United States Patent Application Publication US 2007/0283459 A1 - sequence listing, part 2

SEQ ID NO: 7249 - DNA, 376 bp, Glycine max
atctgagggagaggagagcattttcatttttcaacttgagagaagaagagaaggggaaaaggaaaaaaaggcaaaatgggtaaggatctgagcgatgagcaagtgtcttcaatgaaggaagctttctctttattcgacacagacggtgacggtcggatcgcgccgtcggagctggggatcctgatgaggtctctgggagggaacccgactcaggcccaactcaaagccatcgtggccgaagagaacctcacggctcccttcgacttcccccgattcctcgatcttatggccaaacacatgaaacccgaacccttcgatcgccaactccgcgacgccttcaaggtcctcgacaaggactccaccggcttcgtcgccg

SEQ ID NO: 7250 - DNA, 408 bp, Glycine max
  modified_base (377)..(377): a, c, g, t, unknown, or other
gctgatgacccttggttgcctccatgagaagcatcttgaggagcttcttgaatattttcgctttgggctgtggtgggttccccttggggttgcttcttcaaatggtcatggatctggtttgcacacatttgtcctatatttgggaccccacataacactgtttacattaaaagccgtgcaatgtggccgagttgatttgaaaagtgctccatatgatacgacacaattaagtagaagtgcttcttggcttgataaaaactgttctgagtttgggccaccattattccagtcagtatatgattcacaggttccgcttagcatcattttgcctcaagttcagctggaggctattctatggggtattggaacagctatangggagcttcctccttactttatctccagggc

SEQ ID NO: 7251 - DNA, 448 bp, Glycine max
caaactagaagtattattattcttccatttccattaaaaagaaaatatcataaatgggtattttcacattcgaggacgaaatcacctcccctgtggctcctgctactctttacaaagctctagttacagatgccgacaacatcatcccaaaggctcttgattccttcaagagtgttgaaaacgttgagggaaatggtggccctggaacaatcaagaagataactttcgttgagggtactaactcactcactaatcactagattcatttcattattattccatctctacctatctatatgttgcaatgtatgaatggacagatggagaaaccaagtttgtactgcacaagatagaagcagttgatgaggcaaacttgggatatagctacagcgtagtgggtggtgctgcgttgccagacacagcggagaagatcacattccactccaaa

SEQ ID NO: 7252 - DNA, 391 bp, Glycine max
  modified_base (201)..(201): a, c, g, t, unknown, or other
ccgtccgaccacgcaaccggttcaggttccgcctcagaatgcgatgccaggtcccaacggtggtggtggtgccggtggtgctggaaaccagttcgtaacgacgtcgctttacgtcggagatctcgacccgaacgtcacggacgcgcagctctatgacttgttcaaccaattggggcaagtcgtgtccgttagggtttgcanggatttgaccagccggagatcgctcggttatggttatgtcaactttagcaaaccgcaagaagctggtaaagcaatggatggtctgaacttcaatcctcccaataacaaggccaaccgtaataagtaatcgcaacgtgatcccagtatccgttaaagtggacaaaggaatatatttaataagaatttgggt

SEQ ID NO: 7253 - DNA, 402 bp, Glycine max
agaaaacctaagcttagaattagaaacaaagaaaagaagaaaggaaagaattgatcgttgaaaatgcagggaggaaagaaagcgggagagtccattaaggaaacagctacaaacattggtgcttctgccaaggctggcatggagaagaccaaggccactgtccaagagaaggcagaaagaatgacagcacgtgatccggtgcaaaaggagttggcaacccaaaagaaagaggcaaagatgaaccaggcggagctggacaagcaggcggcgcgtcagcataacacggcggccaaacagtccgccaccacggctgggcacatgggacatggccaccacaccaccggaaccgggactggaaccgccacgtattccaccaccggggaatatggtcagcccatgggg

SEQ ID NO: 7254 - DNA, 353 bp, Glycine max
accacgcgtccgcttttgctttgagatggcaaagtcgaagaatcacacagcacacaatcagtcctacaaggcccacaaaaacggcatcaagaaacccaagaggcatcgccacacttccaccaaagggatggatcccaagtttctgaggaatcacaggtacccaaggaaccacaccaggaaaattggtgaaacagccaccgaggaaaattgaaatggcactttctaacggacccattagggtttttatacgcacattttttgggaaaaactttgtgtgaactcaactttcaccagtataattaatttgtttacagaaaatgcagtacttatatcccaaacaaaaaacaagcaac

SEQ ID NO: 7255 - DNA, 434 bp, Glycine max
  modified_base (397)..(397): a, c, g, t, unknown, or other
ccacgcgtccggataaacttctccactatgcactcatcgatctctccaaaaagcatggccccttattctctctctccttcggctccatgccaaccgtcgttgcctccacccctgagttgttcaagctcttcctccaaacccacgaggcaacttccttcaacacaaggttccaaacctctgccataagacgcctcacttacgacaactctgtggccatggttccattcggaccttactggaagttcgtgaggaagctcatcatgaacgaccttctcaacgccaccaccgtcaacaagctcaggcctttgaggacccaacagatccgcaagttccttagggttatggcccaaagcgcagaggcccagaagccccttgacgtcaccgaggagcttctcanatggaccaacagcaccatctccatgatgatgctcggc

SEQ ID NO: 7256 - DNA, 289 bp, Glycine max
acagattccaaaccaggattgaggaagccagtgttcaccaaggtcgatcagcttcgtccagggaccagcgggcacactttaactgtgaaggtggtcgatgctaagatggtgatgcagaaaggtcgttctgatggtcctcaatcccgccaaatgcgaattgctgaatgtttggttggtgatgagactggaatgatcatattcactgccagaaatgatcaagtggatatgatgaaagacggtgctactgtgaccctgcgcaatgccaaaattgacatgttcaaaggatcaa

SEQ ID NO: 7257 - DNA, 381 bp, Glycine max
gagaaacatggcttccttaagctccttagtgctgctccttgcagctctaattctatcccctcaagttcttgcaaactatgagaatcccccagtgtacaagcctcccactgagaaaccaccagtttataagcccccagttgagaagcctcctgtttacaaacctccagttgaaaaccccccaatttataagcctccagtagagaagccaccagtgtacaagcccccagttgagaaacccccagtttataagcccccagttgagaaaccaccagtgtacaagcccccagttgaaaaaccaccagtgtacaagcccccagttgaaaagaccccagtgtacaagcccccagttgagagaacaccagtgtacaagcccccagttga

SEQ ID NO: 7258 - DNA, 204 bp, Glycine max
gcgtccgaatcctatatcttttatgagagctacaggacaaaagccacaacgcatcatattttatatggatggtgtgagtgatggacagttttatcaggttctactgtttgagcttgatgctattcgaaaggcatgtgcatccctggaacccaattatcagcctcctgtgacttttgtggtggttcagaagcgtcaccacacaag

SEQ ID NO: 7259 - DNA, 399 bp, Glycine max
ttccattctctctgtgtatttccctacctctcccttcaagatgcagatcttcgtcaagaccctcaccggcaagaccatcacccttgaggtggaaagctctgacaccatcgacaacgtcaaggccaagatccaggacaaggaaggaatccccccggaccagcaacgtctcattttcgccggaaagcaacttgaggacggccgtacccttgctgactacaacattcagaaggagagtactcttcacctcgtcctccgtctccgtggtggcatgcagatcttcgttaagacactcaccggcaagaccataaccctagaggttgaaagctccgacaccatcgataacgtcaaggccaagattcaggacaaggaaggtatccccccggaccagcaacgtctcat

SEQ ID NO: 7260 - DNA, 402 bp, Glycine max
  modified_base (44)..(44): a, c, g, t, unknown, or other
  modified_base (365)..(365): a, c, g, t, unknown, or other
ctaaaatagagactgtatttatcctgagggaaattgaggggcanggtgataataacagtaacagggatgagtgatatcatttcatttcagagggattaattattgttttatttttaagtgtggagtgctgtgcaggtcaaggcccttttacttgttcgtccggttgttcccatcttctctctcgtaccaatcaaatcacacttttgtgttgtgttgggaaaccctaaaccccgttttcggtgagatcgagatcgatcgaacatggatgaggagtacgatgtgatcgtgttgggcacgggtctcaaggagtgcattctcagcggtcttctctccgtcgatggcctcaaagttctgcatatggatangaacgactattacgggggagaatccacttcgctcaat

SEQ ID NO: 7261 - DNA, 458 bp, Glycine max
acttgttcttcacatcatcctcatcatcttcttcaatcagttgactcttcgttcctccctctattctttcggatggagcccatggacatcgttgggaaggccaaggaagacgcttctcttcctaaagcgacaatgacgaaaattattaaagagatgttgcccccggacgtgcgtgtcgccagagatgcacaggatttattgatcgagtgttgtgtcgagtttataaaccttgtctcgtcagagtccaatgaagtctgtaacaaagaagaaagaaggacgattgcaccggagcacgtgttaaaggctttaggggttcttggatttggcgagtacattgaggaagtttatgcagcatatgaacaacacaagttggaaacaatgcaggattctttaaaaggtgcaaagtggagcaacagagctgagatgactgaggaagaagcattggctgaacagcaaag

SEQ ID NO: 7262 - DNA, 316 bp, Glycine max
tcagcgtcgtcactgtttgtgtgtgtatcacgtgcagctaccaacgatggtgaagggtcgtcaaggagagcgcgtcagactctacgtgaggggtacaatccttggatacaaaaggtccaagtccaaccagtacgcagacacatccctgatccaaattgagggagtgaacaccacagaagaagtacgatcgtatgctggcaacaaaatggcctatatctacaaggctaaggtgaaaaaggatggaagccattacccctgcacattgggcaaggttaccaagcctcacggcaactcacctgagcacgttttaaatgct

SEQ ID NO: 7263 - DNA, 418 bp, Glycine max
cccacgcgtccgactagtcatcataatattatatgctggttctagggcaactactagtccttgctatggctcatacaagctctatatggcaactcctagtggagaaacttccatcttgggtatgatcttctctggttctacagctttgacctggtttccataagctgatgcatgcactccaagtgctgctctacctgatggatcaaggttgttagaccaagcagcatcccactcaacagcttttgctgtgctacatgcaacacttggtcctccaggaacagtgagccttgctgagttctgagggaagaacctctcaaatatcattctatagtggtatgcttcattggtggttggtgtgttgaaggggaaaatgttggcagcattgaccatcagtctgtcagttacaatgtttcccagg

SEQ ID NO: 7264 - DNA, 328 bp, Glycine max
gacacagctgcgaattagttcatcctttcccaagccagccaagcgaggcatgctctcaatttttgaaattacttgcatagatagagcatcatggccatgatgaaacgtgctgcttcctcttcggttcgctcgctactttcctcatcctccaccttcaccagaaaccttcatgcctcaggtgaaaagaagaaaattgtggcggtgttctacaaagggaatgggtatgctaaattgaaccccaatttcgtggggtgtgttgatcgagcattgggtatacgtgagtggctggaatcacagggtcatcagtacattgtcactgatgacaaag

SEQ ID NO: 7265 - DNA, 324 bp, Glycine max
acaattgccatttcaatccccagtttcttcttcaacgtcctcttacgagcagatcccaattctccttcccagtttcaaaccctaattccctcattcccatggcctcagaagagcccactgtcgcggtggaacccgctcgcgaacctgccaccgccgagcctcccccggaggagaaggaggagcccaaacctgaggccagggctaagaaaaccaaggaacccagacctaaaaaggtttccagagcacgcaagcctcccacgcatccttcctacgaggagatgattaaacacgcaagtacctcgctgaaggagatagacggttcga

SEQ ID NO: 7266 - DNA, 358 bp, Glycine max
  modified_base (208)..(208): a, c, g, t, unknown, or other
attccaatatattccattctctctgtgtatttccctacctctcccttcaagatgcagatcttcgtcaagaccctcaccggcaagaccatcacccttgaggtggaaagctctgacaccatcgacaacgtcaaggccaagatccaggacaaggaacgaatccccccggaccagcaacgtctcattttcgccggaaagcaacctgaggacngccgttacccttgctgactacaacattcaaaaggagaatactcttcagctcgtcctccgtctccgtggtggcatgcagatcttcgttaagacactcaccggcaagaccataaccctagaggttgaaagctccgacaccatccataacgtc

SEQ ID NO: 7267 - DNA, 340 bp, Glycine max
cccacgcgtccgcccacgcgtcggcccacgcgtccgcacaaactagaagtattattattcttccatttccattaaaaagaaaatatcataaatgggtattttcacattcgaggacgaaatcagctcccctgtggctcctgctactctttacaaagctctagttacagatgccgacaacatcatcccaaaggctcttgattccttcaagagtgttgggaacgttgagggaaatggtggccctggaacagtcaagaggataactttcgttgaggatggagaaaccaagtttgtactgcacaagatagaagcagttgatgaggcaaacttgggatatacctac

SEQ ID NO: 7268 - DNA, 368 bp, Glycine max
atttctggcgtaggaggtgttctcttcaaggtttatatagttggtgatgctataaaggttgtaaggcggttttcgttacctgatgttagcaactgggaactctccaaagatgctggtatagatcgctttccaagggtttcttgtgctgcagcttctgcggatgatgcagatctggatcctactgttgccggtaagtttgtattcttgaccaaggctttctatagacctttacgttttcagacttaagacaggttttctcattctcccccctcgggaaggggaaaatagcatccttagaaaccaggtcctgtcgctgccattcacaaacataagaaaaacgagttcctggttggttcgcctgagttgat

SEQ ID NO: 7269 - DNA, 411 bp, Glycine max
accacgcgtccgccctttctttctttccgatcccaccgtcaaacttgtcattctatatgctttgcagggtccattgaatatgtctccgtcgttggatcttcctcccaagggtggcttcagttttgatctatgccgaagaaacgcaatgcttcaaaacaagggcctcaaagccccaacctttctcaaaactggcaccactattgtcggtttagttttccagcatggtgtcattcttggtgctgatactagggcaactgaaggacctatagtggctgataaaaactgtgagaaaattcattatatggcacccaacatatattgctgtggagcaggcacaactgctgatacagacgctgttacagacatggttagctcaaagctgcaattacatcgctaccatactggtcgaga

SEQ ID NO: 7270 - DNA, 432 bp, Glycine max
  modified_base (355)..(356): a, c, g, t, unknown, or other
gagaaaagttagggttcacaacttttccttttccttttgcttgcgaatctgaatcaaataatcaatcatccattcattattcatcatgtcgtcggcgaagaaaatcacgctgaagagttcggacggcgaggctttcgaggtggaggaggcggtggcgctggagtcgcagacgataaagcacatgatcgaggacgactgcgccgacagcggcatccctctgccgaacgtgacgagcaagatcctggcgaaggttatcgagtactgcaagaagcacgtcgaggccgcgaatcccgaagacaaaccctccgaggacgatctcaaggcctgggacgctgaattcgtcaaggtcgaccanngcacgctcttcgatctcatcctggctgctaactacttgaacatcaagagcctgctggaccttacatgtcaaactgt

SEQ ID NO: 7271 - DNA, 351 bp, Glycine max
aattttactttgtgaaacagggtaactttgaccttgttggaaacaaccttcccgtcttctttgtacgtgatggcatgaagtttccagatatggttcatgctcttaaacccaatcccaagaagcacatccaggagaattgggggatccttgacttcttctctcactttccagaaagccttcacatgttcacctttgtagttgatgatttgggtgtcgcacaagattacaggcatatggatggttttggagttaagacatacacactgatcaacaaggctgggaaagcagtgtatgtgaaatttcactggaagaccactagtggtataaagtgtctattggaggaggaggcca

SEQ ID NO: 7272 - DNA, 441 bp, Glycine max
  modified_base (396)..(396): a, c, g, t, unknown, or other
gttggtgtagctagcgagggagggatatagggggaagcgtttattcattcattaagatggcatcggagcttcaattgcccccaggcttcagattccatccaacggaccaggagctggtgttgcactatctctgccgtaaatgcgcgtcgcagcctatcgccgttcccatcatcgccgaaatcgacctctacaaatacgacccctgggacctacccggattggcttcctacggagagaaagagtggtacttcttttcaccacgggaccggaaatacccgaacggttccaggccgaaccgggcggcgggaaccggttactggaaggcaaccggggcggataagcccattggccaccccaaaccggttgggataaaaaaagctttggtgttttacgcanggaaagctccgaaaggggacaagagcaattggatcatgcacgagt

SEQ ID NO: 7273 - DNA, 405 bp, Glycine max
  modified_base (372)..(372): a, c, g, t, unknown, or other
cccacgcgtccggatgaaggcattaagctagttgttgaggcgatatgcgctggaatatttaatgacctaggaagtggaagtaatgttgacgtttgtgtgataaccaagggacacaaggatatctcaggaaccaccttctaccaaatcctcgtacctatgtcaatccaaaaggctttgatttccccaaaaagacagaggtcctcttaacaaagattaccccgttgaaggagaaggtggaagtgattgaaggagatgctatggaagagtaacaatcgttccaaaaaatatttggtgtttgagtataaaacttgattgtgcaatggctgtgatatttagttattgtactttcacaactttggctttcattaccanaaattatgtgaatttaattagattgtgcaaaaa

SEQ ID NO: 7274 - DNA, 314 bp, Glycine max
attgttaacgttacatggaagtccaagctcaaagctcagtttcctaatcccaatgagtactcttcattcatgggtgacttctctaatgcaactggaattgccacattcacaatgaagcttgtcagccaaattatatttgacaagtattgatggagaattgctgccacaatcacccctacagtcctgcttttgacaggaattggattcttttcgcttacattgtctggaggcccgcgtgcaactggacctgcaagtccttgaatgaatcacatctaactgcagtataagtgggtgctttgcataacatatttatc

SEQ ID NO: 7275 - DNA, 370 bp, Glycine max
gaagatggtgtcaggttctggaatctgcgcaaagcgagtggtggtggacgctcgccaccacatgttgggtcggctagcgtccatcgtggcgaaagagcttctgaatgggcagaaggttgcggtggtgcgctgcgaagagatttgcatctccggcggtctggtgaggcagaagatgaaatacttgagattcctccgcaaacgcatgaacaccaaaccctcccatggccctatccacttccgcgccccagccaagatcttctggcgcaccgttcgtggaatgataccacacaagacaaagcgtggggaagctgctcttgctcgtttgaaggtttatgaaggaatccctcctccatatgacaagaccaagaga

SEQ ID NO: 7276 - DNA, 356 bp, Glycine max
acgcgtccggtggggattggtggacagagagaagcctggggagtataattggggagggtacgtggaactcatggaaatggcgaagaagcatggcctcaacgtgcatgctgttatgtcatttcaccaatgtggccgtaacgtcggagactcttgcactattcctttgcccaaatgggttgtggaggagattgataatgaccacgatcttgcatatactgatcaatggggaagaagacactatgaatatatatcacttcgatgtgatactttgccggtgctcaaaggacgatccccagttcactgttatgctgatttcatgcgtgcattcatagacactttcatacaacgccttcctg

SEQ ID NO: 7277 - DNA, 436 bp, Glycine max
cccacgcgtccgcccacgcgtccgattccaatatattccattctctctgtgtatttccctacctctcccttcaagatgcagatcttcgtcaagaccctcaccggcaagaccatcacccttgaggtggaaagctctgacaccatcgacaacgtcaaggccaagatccaggacaaggaaggaatccccccggaccagcaacgtctcattttcgccggaaagcaacttgaggacggccgtacccttgctgactacaacattcagaaggagagtactcttcacctcgtcctccgtctccgtggtggcatgcagatcttcgttaagacactcaccggcaagaccataaccctagaggttgaaagctccgacaccatcgataacgtcaaggccaagatccaggacaaggagggtatccccccgggacagcaacgtctcatct

SEQ ID NO: 7278 - DNA, 367 bp, Glycine max
tttgtttccttgggtgctgcatgcactttcactcgaagaaccttgaagcgagtctgggccacagcaaccagcgacaacaactcaatcagctagggttgctttgcttgctatcttgttggaggattttctgttcaagagaagatggtaactagaattgtggatcttcgttcagacacagttacaaagccaactgaagcaatgagagctgctatggcaagtgctgaagttgatgacgatgttctaggctatgatccaactgcttttcgcttagaaacagagatggcaaagacaatgggcaaagaagctgctctttttgttccatctggcactatggggaaccttgtatctgtacttgttcattgtgatg

SEQ ID NO: 7279 - DNA, 418 bp, Glycine max
  modified_base (404)..(404): a, c, g, t, unknown, or other
attcaagggaagctaagatttggaacaatgtgtttgagaaagctgagaaggtagcaggcatcgaaagaggaagcataagggcaactgttctgatagaaacacttcctgcagtgtttcaaatgaatgaaattttgtatgaactgaaggaccattcagtgggtttgaactgtgggcgttgggattacattttcagttatgttaagaccttccaagctcatccagatcgcctcttaccagatagggtcctagttggcatgactcaacacttcatgaaaagttattctgatcttctcatcaggacgtgccacaggcgcggcgtgcatgctatgggaggaatggcagcgcagattccaatcaaagaagatccagtggctaacgaagtagcactggaacttgtaaggaangacaagcttagaga

SEQ ID NO: 7280 - DNA, 363 bp, Glycine max
caatcatcaacacagagctgagtgtgttgctctgtgaatccaccttcttcttccattggaggaccatttcctcctggaatagaaatactaccacacttttcttttttcacttctctaagttgctaagttaattgctccttcattttttcactcttcgttctcgcgtacccgtgtcacggtaactcgtggtgaagtgttcgaaaatgactgtcacacctaagatctcagttaacgatgggaaacttgttgtccatggtaagaccattctgactggagtgccagacaacgttgtgctgactccaggttctggaaggggtcttgtgactggtgcttttgttggtgccacagcttcacacagcaaaa

SEQ ID NO: 7281 - DNA, 382 bp, Glycine max
aaatccaacaaccttatttttgtgtctggtgttcttggccttgttcccgagacagggaagttcgtatctgatgatgttgaagaccaaactgaacagcttcttaaaaacatgggggaaattcttaaagccggtggtgctagctactcgtccgttgttaagacaacaattatgttggctgacttgaaggactttaagaaggtcaatgagatctatgctaaatacttcccttcacctttccctgctcgttcaacttatcaagtagctgcattgccattggatgccaagattgaaattgagtgcatagcaactatataagcaccaagagtaatagtatatctggctccttcagcaaacttggttaataacacgggaagggacatat

SEQ ID NO: 7282 - DNA, 441 bp, Glycine max
  modified_base (269)..(269): a, c, g, t, unknown, or other
accacgcgtccgctcccttcttccttgtctctttctcttctcaacaacatgcagatcttcgtcaagactttgactggcaagaccatcaccctcgaggtcgagagtagcgacaccatcgacaacgtcaaggccaagatccaggacaaggaaggtatccctcctgaccagcagaggttgatttttgctggtaagcagctggaagatggtcgcactcttgctgattataacatacacaaggaatcaacacttcacttggtcttgaggctcangggaggaaccatgattaaagtgaagactctaactggaaaagaaattgaaattgacattgagccaactgatacaatcgaccggatcaaggaacgcgttgaagaaaaagagggaattccacctgtgcagcagagactcatatatgcaggtaaacagcttgctgatgacaaaaca

SEQ ID NO: 7283 - DNA, 342 bp, Glycine max
  modified_base (85)..(85): a, c, g, t, unknown, or other
  modified_base (196)..(196): a, c, g, t, unknown, or other
  modified_base (259)..(259): a, c, g, t, unknown, or other
  modified_base (271)..(271): a, c, g, t, unknown, or other
taatcactaactgaatattcgatcggagatgtctgccgccgccgaagaagctaacgctcccgccgtcgaaaagccggttgaggangtgaaagcgccgaaccccgcgaaggagaagaaacctaaggctccgaaggaaaagaagccaaaacaggccaaaacagcttcacatcctccatattttcagatgattaaggangctttgatcgctttgaacgagaaaggaggatcgagtccttatgcgatagcgaagtacatggangagaagcacaangcggtgctccctgcgaatttcaagaagattctaagtctgcaactaaagaaccaagctgcgagaaggaaact

SEQ ID NO: 7284 - DNA, 423 bp, Glycine max
  modified_base (323)..(323): a, c, g, t, unknown, or other
atcgaggtaggaggcagaggcgcggagaagatgtggttcaccctctcaaggtctctctggaggacctttatctcgggacttctaagaagctctccctctccagaaatgtcatatgctccaagtgcactggtaagggttctaagtctggtgcttcgatgaagtgtgctggttgtcaaggaactggtatgaaggtttctataagacatcttggcccgtccatgattcagcagatgcagcatgcttgcaatgaatgcaagggtactggagaaaccatcaacgacagagatcgctgcccacagtgcaagggagaaaaggttgtgcangagaaaaaagtccttgaagttattgtggaaaagggaatgcagaacgggcagaagaatacattccctggcgaagctgatgaagcgccagacacaattactg

SEQ ID NO: 7285 - DNA, 425 bp, Glycine max
agaaagattcgaaacgaagaaagaaagcgttgtgaagaatggcggaagagggacaagtgatcggtgtccacagcgtagaggagtggaaggaacatctcaagaagggagaagagtccaagaaattgattgtggtggattttactgcttcttggtgcggtccatgccgtttcattgccccaattcttgcagagtttgctaaaaagttgccgaatgtcaccttcctcaaggtggatgtggatgaattggagactgtttccaaggagtggggaattgaggctatgccaaccttcctgttcttgaaagaaggcaagctggtggacaaggttgtgggtgccaagaaagaggagctgcaattgacaatagccaaacatgccgcaattgctgctgcttgaagtgccatatgaatatgttaagaataatagact

SEQ ID NO: 7286 - DNA, 412 bp, Glycine max
  modified_base (349)..(349): a, c, g, t, unknown, or other
  modified_base (383)..(383): a, c, g, t, unknown, or other
acgtacgctcttcttctcttgcggctagggttttagcgcagcttcttctagatttaaggaagatgggtaaggaaaaggttcacatcagtattgtggtcattggccatgtcgactctgggaaatccactaccactggtcacctgatttacaagcttggaggcattgacaagcgtgttattgagaggtttgagaaggaagctgctgagatgaacaagaggtctttcaagtatgcctgggtgctggacaaacttaaggctgagcgtgaaagaggaatcaccattgatattgctttgtggaagtttgaaacaacaaagtattattgcacagttattgatgcgcctggacatanggatttcattaagaatatgattactgggacatcncaagctgactgtgctgttcttatcattga

SEQ ID NO: 7287 - DNA, 437 bp, Glycine max
aacacactaagttctgaaaaatgagttccaaagtttttcttattctacttatgttcatggccactatacttttgatctcctctgaggttgcacccgatgatgcataccagaattttgacaaaacagatgggaagcgtagtgcaaatggggtagatgaaagcaaatattggcgtggtggctatggcgactatggtggttggcgtggtggtggttggcgtggtggctatggaggctggcgtggtggctatggtggtgggcgtggtggctatggtggctggcgtggtggctatggtggtgggcgtggtggctacggaggttggggtggtggctttggccctaacgaacataatgaggctgggattgatgctagccctcacaactaagaaggaaacttgctaaagcttatataggatttaagttatcgtaataaataaaac

SEQ ID NO: 7288 - DNA, 437 bp, Glycine max
  modified_base (371)..(371): a, c, g, t, unknown, or other
agtgagaaacaaagaaaggaaataattgatctttgaaaatgcagggaggaaagaaagctggagagtccatcaaggaaacagctgcaaacattggtgcttctgccaaggctggcatggagaaaaccaaggccactgtccaggagaaggcagaaagaatgacggcacgtgatccgatgcaaaaggagttggcaacccagaagaaagaggcaaagatgagccaggcagagctggacaagcaggcggcgcgtcagcataacacggcggcgaagcaggctgccacggcagggcacatgggacaacccatggggacccatcagacgtcagctatgcccggtcatggaaccggacagcccacgggccatgtcaccganggagtggtgggctcacaccctattggaaacaacagaagcccgggttggactgctacggcccataat

SEQ ID NO: 7289 - DNA, 400 bp, Glycine max
  modified_base (363)..(363): a, c, g, t, unknown, or other
agctccttctcaaactagtagtattattcttccattcataatgggtgttttcacattcgaggatgaaatcaactcccctgtggctcctgctactctttacaaggccctagttacagatgccgacaacgtcatcccaaaggctcttgattccttcaagagtgttgaaaacgttgagggaaatggtggcccaggaaccatcaagaagatcactttccttgaggatggagaaaccaagtttgtgctgcacaaaatagaaagcattgatgaggcgaacttgggatacagctacagcgtggttgggggtgctgcattgccagacacggcggagaagatcacattcgactccaaattggttgctggtcncaatggaaggtctgctgggaagctcactgtcaaatac

SEQ ID NO: 7290 - DNA, 412 bp, Glycine max
acgtgccaacttcacatctcaagtcattatcatgaaccaccctggccagattggaaatggatacgcaccggtgcttgattgccacacttctcacattgctgtcaagttttctgaaatcttgaccaagattgacaggcgatctggtaaggagcttgagaaggagcccaaatttttgaagaatggtgatgcaggtatggttaagatgattccaaccaagcccatggtggttgaaactttctctgagtatcctccccttggtcgttttgctgtgagggacatgcgtcaaactgtggctgtcggagtcatcaagagtgttgagaagaaagaccccaccggagccaaggtcaccaaggccgctgccaagaagaagtgattgcatttgggcaattttgctagcacatgtgatcatcat

SEQ ID NO: 7291 - DNA, 403 bp, Glycine max
acggcaaagcagagccaagaagaagaagaagaaaaccaacataatcaacaacaacaacaacaaaaagcttgcaaattagaagaatcttcagttaaaagggaagaagaacacacaagaagaaagagaagaagaaacgcgcgcgaatgaagggagaattagagttgccacctgggttcagatttcaccccactgatgaagaattggtgaatcactacttgtgtaggaagtgcgctggtcaaccaatcgcggttcccgtcatcaaagaggtcgatttgtacaagtttgatccatggcagcttccagaaattggtttttacggcgagaaagaatggtacttcttttctcctcgggaccggaaatacccgaacggttcacggccgaaccgcgccgccggaagccgcta

SEQ ID NO: 7292 - DNA, 361 bp, Glycine max
agcacacaccctattggaaccaacagaggcccgggtgggactgctacggcccataatacccgtgcggggggaaacccaaatgattatgggtatggaactgggggtacttacaattaaataatgatgatttagaaaaggaaagctacgacccataagaaggtttagttaagagtatgacttttgttgtggttatcttcttgtttggttatctttttgtttgtgtctccttttctctccatttttgttgtggagaattgggtgtggttacacgacagtgttttcacttctactaggtgcaagcattctgtgtcgtgatgttgtattccttcgtttcaatgaataaataaaatcgtggttgtgc

SEQ ID NO: 7293 - DNA, 410 bp, Glycine max
cccacgcgtccgctttgatggaaattttccagtggattcttggttaccaatttttgtgaattgtctttatcctgtaagtcaattaccttcagaagctgtcgttgtaaatgttacatgtggtagtggacgtggtggtttacccaccactgcttggattagttctgcagttaacaatcgctcctcagatatcaacaaaaagattcgcacagcacttgggaaaggtaagaaaattgtttttcttactagagttgatccttttccagtagctttactggctgttctttttggcgttaagaatgaaattctgagttctaacgccactaaccctatgctgacgcgacttcttgagaactgtaagagtctcaaatatctggttgatgagtgtccttttgcatttgtgaactagtgtg

SEQ ID NO: 7294 - DNA, 409 bp, Glycine max
cccacgcgtccgattccaatatattccattctctctgtgtatttccctacctctcccttcaagatgcagatcttcgtcaagaccctcaccggcaagaccatcacccttgaggtggaaagctctgacaccatcgacaacgtcaaggccaagatccaggacaaggaaggaatccccccggaccagcaacgtctcattttcgccggaaagcaacttgaggacggccgtacccttgctgactacaacattcagaaggagagtactcttcacctcgtcctccgtctccgtggtggcatgcagatcttcgttaagacactcaccggcaagaccataaccctagacgttgaaagctccgacaccatcgataacgttaaggccaagattcacgacgaagaaggtatccccccggacc

SEQ ID NO: 7295 - DNA, 425 bp, Glycine max
cccacgcgtccggcaattcactctgtacaattcttcgttcgttctctgcagttatatcctttttgagcttcaatggcggacgctgaaaccttcgctttccaggctgagatcaaccagcttctaagtctcatcatcaacacattctacagcaacaaggagattttcttgcgtgaactcatcagcaatgcttctgatgctttggataagattcgattcgagagcttaaccgacaagagcaagctcgatgctcagccagagctcttcattcgtcttgtgcctgacaaggataacaagactctttccattattgacagcggcattggaatgaccaaagcagatttggtgaacaacttgggtaccattgcgaggtccgggaccaaggagttcatggaggcgttgcaggccggtgctgatgtcagcatgat

SEQ ID NO: 7296 - DNA, 411 bp, Glycine max
aataaaaccaaatactttgcgtgcaaaaccatcacatcatcggcaacagtgacagtaacggtggaagagagaaaggattcgctctcctcaatccttatataagctccagcgacccaatttcttctcttatcgatttgattgtttctgagtaatggcttcgtcgcgagtagatctggatgggaaccccataaagcccatcaccatttgcatgattggcgccggtggcttcattgggtcccacctctgcgagaagctcatgtcggagacccctcacagtgtcctcgccttggatgtctacaatgacaagattaaacacctcttggaaccccacacgctcccttgggcctctcgcatccagttccatcggctcaacatcaagcacgattcccgttccgaaagcctcatcaaaat

SEQ ID NO: 7297 - DNA, 403 bp, Glycine max
  modified_base (247)..(247): a, c, g, t, unknown, or other
aggaagagtgcgaaagaaagatcgttctcgatgacagaggggaacggtgacaaaactctgcgaaagatcgcagacgcattcaatgaccttgcaaacgttttcaccgattctcagagcgcagaagcagaggtcaaggttgctcccttctctcatgcctgctctctcgtctcccctctcttcggttgcttgggcgtcgccttcaagttcgccgaaatggattacgtcgccaaggttcatgatctggcanaggcgtccaagtctattcagaatctgcagtctctgattgagctggatgtgcaagctaacactgttaggaaaggaggtagccatacgcggaatctgctcagagtgaagcgcggacttgacatggtcagagtgctctttgagcagattctagttacag

SEQ ID NO: 7298 - DNA, 410 bp, Glycine max
  modified_base (313)..(313): a, c, g, t, unknown, or other
agcccacgcgtccgcaaactagtaatattaatcttcgaatccattttattattcataatgggtagtttcacatttgaggatgaaaccacctcccctgtggctcctgctaccctttacaaagctctacttacagatgccgacaacgtcatcccaaaggctgtcgaagccttcaggagtgttgaaaaccttgaggggaacggtggccctggaaacatcaagaagatcactttcgttgaggatggagaaagcacgtttgtgttgcacaaaatagaatcagttgatgaggcaaacttgggatacagctatagcgtanttggtggagttgggttgccagacacagtggagaagatcacattcgaatgcaaattggctgctggcgccaactgaaggtctgctgggatgctaactgt

SEQ ID NO: 7299 - DNA, 422 bp, Glycine max
acgaccaaagcagatttggtgaacaacttgggtaccattgcgaggtccgggaccaaggagttcatggaggcgttgcaggccggtgctgatgtcagcatgatagggcagttcggtgtggggttctactctgcttaccttgttgcagagaaggtcattgttaccaccaagcacaatgatgatgaacagtacatttgggagtctcaggctggtggctctttcactgttactagggacactgatggcgagcaactcggaaggggaaccaagatcaccctcttcctcaaggaagatcagttggagtacttggaggagaggagaatcaaggatcttgtgaagaagcactctgaattcattagttatcctatttacctttggactgagaagacaccgagaaagagatcagcgatgatgaagatgatgaa

SEQ ID NO: 7300 - DNA, 414 bp, Glycine max
  modified_base (379)..(380): a, c, g, t, unknown, or other
agcccacgcgtccgcccacgcgtccgaagaaaagtcaaagacaatgtcagggatcattcacaagattgaggagacccttcatgtgggaggccacaagaaggaggaggagcacaagggtgagcagcaccatggtggagaatacaaaggggagcatcatggtgaacacagtactgaatacaaaggagagcatcatgttggtgagcacaagccggagcaccatggaggagaagagcacaaagaggggttcctagacaagatcaaggacaagatccacggcgaggagggtggcgccaccgccgagggcgagaagaagaagaagaagaaggagaagaagaagcatgaacatggccatgacagcagcagcagcagtgacagtganntagatatctcccactgctgcatcacctatatacc

SEQ ID NO: 7301 - DNA, 383 bp, Glycine max
agtaacttcatcaataatcgcagaagcagtttccggtgcatctcatcgtcttccaaaatgaacgacgcagatgtctcgaagcaaatccagcagatggtgcgtttcatccgccaggaagctgaggagaaagccaacgagatctctgtatctgccgaagaggaattcaagatcgagaagctgcagttggttgaagccgaagagaagaagatcaggcaagaatacgaacgcaaagagcgccaagtcgaaattcgcaagaagattgagtactcaatgcagctgaatgcttcccggattaaagttcgtcgggctcaagatgacgtgatcacttccatgaaagaggctgcatccaaggaacttttgaatgtcagtcatcagcatgatga

SEQ ID NO: 7302 - DNA, 358 bp, Glycine max
gggtcgggcacgcgtccggttcaaactaagttctgaaaatgagttccaaggttttgcttgttctacttatgttcttggccactatacttctgatctcctctgaggttgcacccgatgatgcatacgagaattttgacaaaatagatgggaagcctagtgcagatggggtagatgaaagcaagtattggcgtggcggctatggtggcggctatggtggtggttatggaggtgggcgtggaggctatggaggtgggcgtggaggctatggagggggacgtggtggatatggcggcggacgaagtggctatggtggccggcgtggtggctatggcggcgggcgtggtcgcgggcgtggtgg

SEQ ID NO: 7303 - DNA, 172 bp, Glycine max
acccacgcatccacgttgctgttcatagtgatacatggttacttgcccttgccttttattttggagccagatttggatttgataaaactcagaggaatcgactattcggtatgatcaatgaactagcaccgagagttcaagttgttacagcgcggaaacaggttagagagaa

SEQ ID NO: 7304 - DNA, 311 bp, Glycine max
agaggatgaaatcaactcccctgtggctcctgctactctttacaaggccctagttacagatgccgacaacgtcatcccaaaggctcttgattccttcaagagtgttgaaaacgttgagggaaatggtggcccaggaaccatcaagaagatcactttccttgaggatggagaaaccagagtttgtgctgcacaaaatagaaagcattgatgaggcgaacttgggatacagctagagcgtggttgggggtgctgcattgccagacacggcggagaagatcacattcgactccgaattgcgggctggtcccaat

SEQ ID NO: 7305 - DNA, 239 bp, Glycine max
gcgtccgaatttacgatcaatttgaaagaacttatccatttcttgcaattttagttgtgtacccataactccatgcatgcaactcgttgagctatctcaataaatgccgtttgtatgtgttagtatttagatttatataccttttcggcatgtttcgctgctattgttgtggactatgtgttccgtgtaatccaattaattaagagggagagtattaaattaggaagtaacgagagttt

SEQ ID NO: 7306 - DNA, 435 bp, Glycine max
agaaatttcactggaagaccactagtggtataaagtgtctattggaggaagaggccattaaggtgggaggagccaaccacagccatgccactcaagaccttcatgattcaattgctgctggtaactatcctgagtggaaactgttcgttcagacaatagatcctgagcatgaagacaaatttgactttgaccctcttgatgttactaagacttggcctgaggacattatacccttgcagcctgttggtcgcttggtcctgaataaaaacatagataatttctttgctgagaatgaacaacttgcattttgccctgccattgtggttcctggtgtatactactcagatgataagatgcttcagaccaggatattctcttatgctgattcacaaaggcacagacttggaccaaactatctgcaacttcctgctaatg

SEQ ID NO: 7307 - DNA, 434 bp, Glycine max
cgtatcttcatcaataatcgcagaagcagtttccggtgcatctcatcgtcttccaaaatgggcgacgcagatgtctcgaagcaaatccagcagatggtgcgtttcatccgccaggaagctgaggagaaagccaacgagatctctgtatctgccgaagaggaattcaatatcgagaagctgcagttggttgaagccgaaaagaagaagatcaggcaagaatacgaacgcaaagagcgccaagtcgaaattcgcaagaagattgagtactcaatgcagctgaatgcttctcggattaaagttcttcaagctcaagatgacgtgatcagttccatgaaagaagctgcatccaaggaacttttgaatgtcagtcatcaccatgatgatcatgtgtatagaaaccttctgaaagatctcattgttcagtgtttgctaag

SEQ ID NO: 7308 - DNA, 278 bp, Glycine max
gttcatactaagttctgaaaatgagttccaaggttttgcttgttctacttatgttcggggccactatacttctgatctcctctgaggttgcacccgatgatgcatacgagaattttgacaaaatagatgggaagcctagtgcagatggggtagatgaaagcaagtattggcgtggcggctatggtggcggctatggtggtggttatggaggtgggcgtggaggctatggaggtgggcgtggaggctatggagggggacgtggtggatatggcagcgga

SEQ ID NO: 7309 - DNA, 425 bp, Glycine max
acaagacttagaatgcgatgagcaaaaatagacctcaattccgaattcagagatagcacgcgaccaggagaagccatggctactcaatccccttcacctcagaacctaggtggtgaaattgagcaaacagaaaatgtagatcagcataataggggagaagagcttggtaaacagagttcagacacatcggtgtttgtgaactcagagccattgcgtgaggaacaaattcagaatgctgtgaaatttctgtcgcacccgaaagttagaggttctcctgtcatccacagacgatcgtttctggagaagaagggccttacgaaggaggagattgatgaagcctttcggcgtgtgcctgattcacctccaagtgtgcagacagctggcataaatcaagatggacaattgaagccatcatcaaacattta

SEQ ID NO: 7310 - DNA, 419 bp, Glycine max
gcgatagctgataagagagataccaacaagaaaagaaaaaaagaagagttgagattccgtttgaagaaaagatggcatcccataggcaaagctatgaagctggtcaaactaagggccgaactgaggaaaagacgaaccagacgatgggcaatattggagagaaggctcaagctgcaaaggagaagacccaggaaatggcccaagctgcaaaggagaagacccaacaaacagcccaagctgccaaggacaagacttgcgacacttcccaagcggcaaaagagaagacccaacagaatacaggagctgctcaacaaaagacctcaaagatgggccagtccacgaaggaatcggcccagtcagggaaggacaacacccaaaggttcctgcaacagacaggggaaaaggtgaagggcgcaacc

SEQ ID NO: 7311 - DNA, 378 bp, Glycine max
  modified_base (120)..(120): a, c, g, t, unknown, or other
gttcactcctcttctcttgccgctacggaattaccacatcttcatctagctttaacgagagataggctcagataaggttctcctcatccttgctgtcattccccatctcaactcctcagnctccactaccaccctatcacctgacacactagctctgcaagcatagacacacttcgaactgatacgtgtaaataggtagctgcttacacgcacccgaggcccttgaactctgcctgggtgctcgactgacctgcggcttagcgattacgaggaatcaccattgatattgctttgtggaagtttgaaacaacaaagtattattgcacagttattgatgcgcctggacatacggatttcatttataatatgaatactggg

SEQ ID NO: 7312 - DNA, 392 bp, Glycine max
aaattagttcattctctttgcgcagttccctacctctcctttcaagatgcagatctgcgtcaagaccctcaccggaaagaccatcacccttgaggtggaaagctctgacaccatcgacaacgtcaaggccaagatccaggacaaggaaggaattcccccggatcagcaacgtctcatcttcgccggaaagcagctcgaggactgccgtaccctcgccgactacaacatccataaggagtcaacccttcaccttgtccttcgtctccgtggtggcatgcagatcttcgtcaagactctcactggcaaaaccataaccctagatgtcgaaagctctgacaccattgacaacgtcaaggccaagatccatgacaaggagggaatccctccatacc

SEQ ID NO: 7313 - DNA, 335 bp, Glycine max
cgaggatgaaatcaactcccctgtggctcctgctactctttacaaggccctaggtacagatgccgacaacgtcatcccaaaggctcttgattccttcaagagtgttgaaaacgttgagggaaatggtggcccaggaaccatcaagaagatcactttccttgaggatggagaaaccaagtttgtgctgcacaaaatagaaagcattgatgaggcgaacttgggatacagctacagcgtggttgggggtgctgcattgccagactctgcggataagatcacattctactccaaattggttgctggtctcaattggaggtctgcttggaagcttattg

SEQ ID NO: 7314 - DNA, 331 bp, Glycine max
aaattcactggaagaccactatggtataaagtgtctattggagaagagccattaagtgggaggagccaacacagccatgccactcaagaccttcatgatcattgctgctggtaactatcctgagtggaaactgttcgttcagacaatagatcctgagcatgaagacaaatttgactttgaccctcttgatgttactaagacttggcctgaggacattatacccttgcagcctgttggtcgcttggtcctgaataaaaacatagataatatctttgctgaaaattaaacacttgcattttgccctgccattgtggttcctggtgtatactac

SEQ ID NO: 7315 - DNA, 185 bp, Glycine max
agtgacggtggtgatggaggctggagaaactagggcttgatgtcgttgattaaggtttatgattatgctcagtaattttagttgtgtttgagtttgagtatctttatggttttgtgtcaccgtggttcttgtttttgaccaatatatctggttgtttatagtcgatttaatgaaatgataatcag

SEQ ID NO: 7316 - DNA, 381 bp, Glycine max
acgcgtccaccacgcgtccggttttgttagttcacacactaagttctgaaaaatgagttccaaagtttttcttattctacttatgttcatggccactatacttttgatctcctctgaggttgcacccgatgatgcataccagaattttgacaaaacagatgggaagcgtagtgcaaatggggtagatgaaagcaaatattggcgtggtggctatggcgactatggtggttggcgtggtggtggttggcgtggtggctatggaagctggcgtggtggctatggtggtgggcgtggtggctatggtggctggcgtggtggctatggtggtgggcgtggtggctacggacgttggggtggtggctttggccctaacgaacataa

SEQ ID NO: 7317 - DNA, 419 bp, Glycine max
  modified_base (383)..(383): a, c, g, t, unknown, or other
agcgagatagaagcgtaagcagcggctaccctaacctcgtcttcctctctactaatttcagctatggccgacgaagctgtggttgttccagatcccacccagatcgatgtcaagctctttaaccgctggagcttcgaggatattgaggttactgacatttcactggctgattacattggagttgcggcatccaagcacgccacatatgttcctcacaccgccggaaggtactccgtgaagcggttcaggaaggcgcagtgccccattgttgagaggctcaccaactctctcatgatgcacggtagaaacaatggcaagaaactcttggctgttaggatcatcaagcatgctatggagattattcatttgttgactgaccaganacccattcaggttattgttgatgctgtcatcaacag

SEQ ID NO: 7318 - DNA, 230 bp, Glycine max
agtttattcatctaccgtcgggagggaggggatgaccacggcgccccgtgcgcccggcctcctcgtcctcgcgacaaacgcagaccccggcgcttcgtgcgccaaggaactcacgtctgtgaagtgcgactcccgggggcccggagacggtgtcccgcgggagtcgtcagggagcatcgtttacagacaatgagtctccggggcggatggtccggggcttgcatcgatga

SEQ ID NO: 7319 - DNA, 272 bp, Glycine max
caatcgtagccgtcgcactctgtgttttcagcgccgtctccgatctccgacaatggcgacccaaatgagcaagaagagaaagttcgtagctgatggagtgttcttcgctgaactgaacgaggttctgacaagagagttggccgaggacggttactccggcgtggaagttagggttacgccgatgcgcaccgaaatcataattagagccaccagaacccaagctgttctcggtgagaagggaaggagaataagggaacttacctctgtggttc

SEQ ID NO: 7320 - DNA, 323 bp, Glycine max
agcatccatgatacatctcctggtacactcaccgcctctgtctgcgcctctgatgttgacctcatcacacaagtagcaggtgctgaatggcctggagatacaattgtttatgcttacagatcaggtgaggtgattcggctaccaaaaggggtttcaattccagtgacactaaaagttctggagtttgagcttttccacttctgtccactccaagaaatagctccaagtatatcatttgcagcaatagggctactggatatgttcaacactggacgagcagtggagcatgttgagattcataaccgagcagcaacgaaaacaat

SEQ ID NO: 7321 - DNA, 462 bp, Glycine max
gggtcgaggcacgcgtccaaccaaatcaatcaaattctttgagttgaacacaggggccaagattccttctcttgggttagggacttggcaagctgaacctggtgttgtagctgaagctctcaccacagccattcaggttggatacaggcatattgactgtgctagtgcgtataagaatcaagcagagattggttctgctcttaagaagctttttgatgatggtgtggtgaagcgtgaggacttatggatcacttccaaactctggtgttcagatcatgcaccagaagatgtgccaaaagcattggataaaacattacaggaattgcaacttgactatcttgacctctatctgatccactggccagtccgcatgaaaagtggaacatttggactcaataaagaatatcttgagcaaccagacattcccaatacatggagagcaatggaggcactctatgactc

SEQ ID NO: 7322 - DNA, 437 bp, Glycine max
atccacccacgcgtccgaccgggacaaacctgctcagcaagaacaaggacaagataaacctgctcagcaagaacaaggacaagatgagcaagaaaaaggaaaagatgagctttgaaagggagctgttcctcacatgggatatagacacaaagttacatgtgggctgcacacccttttgtatctcgttatcagaatttagtgaaccttaggtgctacctatcttcctttgatcttcttttcttttcggttttcttttatgtatggtttacttaataaaaacgggagcttttgcttggtgtagtagagtttagtgcagggaaaggtgtagctgggattcgagttaaattaatggatgtttttagatcacccagttaaaaaagaagacgagattcagaatggtacaacatttgctaaagattgaaaaataaaagggcggc

SEQ ID NO: 7323 - DNA, 421 bp, Glycine max
  modified_base (70)..(70): a, c, g, t, unknown, or other
cagccgtccgaccacacgtccgcctttttttttttttttttttttttttttttttttttttttttttttntttttttttttttttttttttgtaaggattgctcatctttattataatttattattgatgaagtgagatacagatatatcataagtctcacaattatatgggaaaaggaaagaagaaaggaaagactggatacattggaaggcaacttaagttgagaacagagtgattggataagtctccaagcaagaaagtgatgacaagtaagttgaagaggattagttgcaatcctgatgtggcaggaagccagaacagccttgagatcgatggtttaactcgctttgctgttgaagaacacaacaaaaaacagaatgcccttttggagtttgaaaaggtagtaagtgcaaaacagca

SEQ ID NO: 7324 - DNA, 433 bp, Glycine max
  modified_base (403)..(403): a, c, g, t, unknown, or other
acgcaaccacccacgcgtccggttcattctctttgcgcagttccctacctctcctttcaagatgcagatcttcgtcaagaccctcaccggaaagaccatcacccttgaggtggaaagctctgacaccatcgacaacgtcaaggccaagatccaggacaaggaaggaattcccccggatcagcaacgtctcatcttcgccggaaagcagctcgaggacggccgtaccctcgccgactacaacatccagaaggagtcaacccttcaccttgtccttcgtctccgtggtggcatgcagatcttcgtcaagactctcactggcaaaaccataaccctagaggtcgaaagctctgacaccattgacaacgtcaaggccaagatccaggacaaggagggaatccccccnagacagcaacgtctcatcttcgccggaaag

SEQ ID NO: 7325 - DNA, 196 bp, Glycine max
  modified_base (159)..(159): a, c, g, t, unknown, or other
gctggttgtcaaggaactggtatgaaagtttctataagacatcttggcccgtccatgattcagcagatgcagcatgcttgcaatgaatgcaagggtactggagaaaccatcaacgacagagatcgctgcccacagtgcaagggagaaaaggttgtgcangagaaaaaagtccttgaagttattgtggaaaaaggaa

SEQ ID NO: 7326 - DNA, 387 bp, Glycine max
  modified_base (60)..(60): a, c, g, t, unknown, or other
  modified_base (322)..(322): a, c, g, t, unknown, or other
  modified_base (338)..(338): a, c, g, t, unknown, or other
agcgaagaggcgcagccgtagcagtaactcgtggaattgctagcaatggcgaggatcaangtttacgagctgaggcagaagacgaaggctgatctgttgaatcagctgaaggacctcaaggccgagcttgccttgcttcgtgttgctaaggtcaccggcggtgcacctaacaagctctctaagatcaaggtggtgaggttgaacattgcccaggttttgacggtgatttctcagaagcagaaggccgcgttgagggatgcctacaagaacaagaagtacttgcctctcgatctccgccctaagaagaccaggccattcgcangaagcttactaagcancaggcatcattgaagaccgagagggagaagaagaaagagttatatttcc

SEQ ID NO: 7327 - DNA, 345 bp, Glycine max
atccctcccttcttccttgtctctttctcttctcaacaacatgcagatcttcgttcaagactttaactggcaagaccatcaccctcgaagtcgagagtagcgacaccatcgacaacgtcaaggccaagatccaggacaaggaaggtatccctcctgaccagcagaggttgatttttgctggtaagcagctggaagatggtcgcactcttgctgattataacatacaaaaggaatcaacacttcacttggtcttgaggctcaagggaaggaacatgattaaagtgaagactctaactggaaaagaaattgaaattgacattgagccaactgatacaatcgaccgga

SEQ ID NO: 7328 - DNA, 353 bp, Glycine max
cccacgcgtccggaagaagaaggatgtggcacgaggcgaggaggtcggagaagaaggtccacgacatgatggacgcggctcggaagagagcgcaacgacgcgccgtttacctagccaagaggcgcggcgatcctcagcaatctattcagctcgtcggctttcgaagccgaacctatcgcgacgacgctctctaccaagccacgcaagattagcaaggcctgataccttggaatgggaaacaagatgtattgattgacagatttgatgggcgtgctctccttgaattcaatcgcgattctaaccacaagcgcgtcccggaaaagtctgaagaagaagaagagttagaagagttt

SEQ ID NO: 7329 - DNA, 311 bp, Glycine max
  modified_base (242)..(242): a, c, g, t, unknown, or other
ctgaattgtgtgaatcgaaaactaaacattgctattgtaaaagttgcaaatgcctataaacaccctaatattattgcagaatttatagctggacaattaaagaatagagtttcgtttcgtaaagcaatgaaaaaagctattgaattaactgaacaggcgggtacaaaaggagttcaagtacaaattgcaggacgtatcgacggaaaagaaattgcacgtgttgaatggatcagagaaggtanagttcctctaaaaaccattcgagcgaaaatcgattattgttgctatacagttcgaactatttatggggt

SEQ ID NO: 7330 - DNA, 439 bp, Glycine max
gttagttcacacactaagttctgaaaaatgagttccaaagtttttcttattctacttatgttcatggccactatacttttgatctcctctgaggttgcacccgatgatgcataccagaattttgacaaaacagatgggaagcgtagtgcaaatggggtagatgaaagcaaatattggcgtggtggctatggcgactatggtggttggcgtggtggtggttggcgtggtggctatggaggctggcgtggtggctatggtggtgggcgtggtggctatggtggctggcgtggtggctatggtggtgggcgtggtggctacggacgttggggtggtggctttggccctaacgaacataatgaggctgggattgatgctagccctcacaaccaagaaggaaacttgctaaagcttatatatgatttaagttatcgtaataaat

SEQ ID NO: 7331 - DNA, 343 bp, Glycine max
  modified_base (261)..(261): a, c, g, t, unknown, or other
attcaattagttcatactaagttctgaaaatgagttccaaggttttgcttgttctacttatgttcttggccactatacttctgatctcctctgaggttgcacccgatgatgcatacgagaattttgacaaaatagatgggaagcctagtgcagatggggtagatgaaagcaagtattggcgtggcggctatggtggcggctatggtggtggttatggaggtgggcgtggaggctatggaggtgggcgtggaggctatgganggggacgtggtggatatggcggccgaccaagtggctattgttgccggcgttgtggctatgccggccggccttgtggcgggcc

SEQ ID NO: 7332 - DNA, 419 bp, Glycine max
atccactatactgatgaggctcttgtagctgctgcacagctgtcctacaagtatatcagtgatcgatttttgccagacaaagctatcgatttgattgatgaagctggttcacgagtccggcttcaacatgcacagttacctgaagaagcaagagaacttgacaaggaggtgaggcagattattaaggagaaagaagaagctgttcgcaaccaagactttgaaaaggctggagagctacgtgatagagagatggatcttaaggcacagatctcaacacttgtagagaaaggcaaggagatgagcaaggcagagactgaggcacgggatgaaggtcctattgtgactgaagctgacatacagcatattgtctcatcctggactggtattcctgttgagaaagtctcaacagatgaatctga

SEQ ID NO: 7333 - DNA, 430 bp, Glycine max
gaaatctgaaagggagaatgaattgaaacaacgatttgagcagagcatgaaagaagctgctgataaatatcaaggcgcaaacttgtatgtaaaaaatttagatgatagcattggtgatgaaaaacttaaggagctgttctccccttttggtaccattacctcttgcaaggttatgagagacccaaatggcttaagtcgtggatcgggttttgttgcattctcgactcccgaggaggcatctagagcactcctggagatgaatggcaaaatggtggtaagcaaacctctgtatgtgactctagcccaaaggaaagaagataggagagctagactgcaggctcagtttgctcaaatgcgacctgttggaatgccaccatctgttggtcctcgtgtgccaaatgtatccccaagtggtccaggtattggtcaa

SEQ ID NO: 7334 - DNA, 420 bp, Glycine max
cccacgcaaccaacaatctgaaagggagaatgaattgaaacaacgatttgagcacagcatgatagaagctgctgataaatatcaaggcgcaaacttgtatgtaaaaaatttacatgatagcatgggtgatgaaaagcttaaggagctgttctcgccttttggtaccattacctcttgcaaggttatgatagacccaaatggcttaactcgtggatccggttttgttacattctctactcgctaagatgcatctatatcactcttggagatgaatggcataatggtggtaagcaaacctctgtatgtgactctaccctatatgaaagaagatacgacagctacactgcacgtacagtttgctcaaatgcgacctattggcattccaccatcggtcggtcctcgtgtgccaatgtatctccc

SEQ ID NO: 7335 - DNA, 426 bp, Glycine max
acgcgtccgatcgacagatgcagatcttcgtcaagaccctcaccggcaagaccatcacccttgaggtggaaagctctgacaccatcgacaacgtcaaggacaagatccaggacaaggaaggaatccccccggaccagcaacgtctcattttcgccggaaagcagcttgaggacggccgtacccttgctgactacaacattcagaatgagagtactcatcacctcgtcctccgtctccgtggtggcatgcagatcttcgttaagacactcaccggcaagaccataaccctataggttgaaagctccgacaccatcgataacgtcaaggccaagattcaggacaatgagggtatccccccggaccagcaacgtctcatcttcgccggaaagcagctcgatgactgccgcatcctcgccgactacaaca

SEQ ID NO: 7336 - DNA, 366 bp, Glycine max
accaagcgtccgcccacgcgtccggtgagggtgcatgagtggtaatcgggatgtttttgttgcacggctccatgcttgcgcatgcaacgtgtgacatgcatccttttcattgtcaccttagccttcgtggcttaggtgctgacgattggttcctgtgttgcctacctaccaaacggtattcgtgtggctagtcagacccattccatccaggcctctttgttggggacgctggaggatttcaaagtcccacacgtgaaccacgttagtcgtccatcataacggcttcctgtggcacacgtgtggtgattgttctctcggatgcggtgcatgcagtgaacgtgggtggtctagtgccccacattgttc

SEQ ID NO: 7337 - DNA, 417 bp, Glycine max
gtccgcccacgcgtccggtgagggtgcatgagtggtaatcgggatgtttttgttgcacagctccatgcttgcgcatgcaacgtgtgacatgcatccttttcattgtcagcttagccttcgtggcttatgtgctgacgattggttcctgtgttgcctacctaccaaacggtactcgtgtggctagtcacagtcattccagctaggcctctttgttggggacgctggaagatttcagagtcatacacgtgaaccacgttagtcgtccatcataacggcttcctgtggcacacgtgtggtgattgttctctcggatgcggtgcatgcagtgaacgtgggtggtctagtgcccccacattgttccttaagatcggttgtctcggatgaaccttgccctggcgcttgctttttcaacgcgat

SEQ ID NO: 7338 - DNA, 428 bp, Glycine max
aaagaaagagaagaaaagagtggaatcgaagacgaagacgaagatggaggacgcatcagcatcaaagttcatcccacaccaaatcggaggggtccaaaacgacgtgcttcgatttggtctccatggagtcaagagcgacatcgttggttcccaccctcttcaatcttcactccaatctacaaggagaatggatgaagcgatgaagaagcaatgcaaagttaacctgtacggaactgcttttcccctgaaggaggagcttgacaggcaaatcctgtctaggttccagcggcctcctggaccaattccatcttcaatgctgggtttggagactgttacaggaagtgttgatcactttggttttgaggattgtctaaatgacccccgtgagtcagagactttccggccattggacatgcatcatgggatgg

SEQ ID NO: 7339 - DNA, 378 bp, Glycine max
tcaaatccagcagatggtgcggttcatccgccaggaagctgaggaaaaggccaacgagatctctgtctccgccgaagaggaattcaatatcgagaagctgcagttggtcgatgccgacaagaagaagatgaggcatgaatacgaacgcaaagagcgctaagtcgatattcgcaagaagattgggtactcgatgcagctgaatgcttctcggatcaaagttcttgaagctcaagatgacttgatcagtgccatgaaataagctgcatccaaggaactgttgaatgtgagtcagcatcatcatttgaagtctactgagtcatcatcatcatgagtacagaaaccttctgacagatcccattagtcagtgtttgcttagac

SEQ ID NO: 7340 - DNA, 421 bp, Glycine max
  modified_base (276)..(276): a, c, g, t, unknown, or other
acgcgtccgcccaagcgtccggtaactttttgattcctaaattctccaaaattccaaattccaaattccttaagggaaaaaaaatgtttggtttttaattaatttggccggaaaaagccagggttcctgccaaccgaatcgatttgggaaacgacgtactcttgcgtcggcgtgtggcaacacgatcgtgttgaaatcatagccaacgatcagggtaacagaactaccccatcctacgtggctttcaccgacacagaacggttgatcggcgatgcngccaagaccaggtcgctatgaacccaccaacaccgtttttgatgctaaacgtttgattggaaggcctttttccgatgcatcagttacaggtgacatgaaattgtggccgttcaaggtgattcctggcccctgctgagaaacctat

SEQ ID NO: 7341 - DNA, 394 bp, Glycine max
acgcgtcagcagtatacaagcccccagttgagaaacccccagtttataagcccccagttgagaaaccaccagtgtacaagcccccagttgaaaaaccaccagtgtacaagcccccagttgaaaaacccccagtgtacaagcccccagttgaaaaaccaccagtgtacaagcccccagttgagaagcccccagtttacaagcccccagttgagaagccaccagtttacaagcccccagttgagaagccaccagtatacaagcccccagttgagaagcctccagtgtacaagccaccagtagagaagctccaggttacaagccaccagtagagaaacctccagtttacaagcccccagtggagaaaactcctatttacaagccacctgttgagaag

SEQ ID NO: 7342 - DNA, 301 bp, Glycine max
acgcgtcaaattcacctcactcaaactcgggattacagaaaccaacaacagttcctgccacgaaggttcacggaagttgccggaaactgcacttgggttgtttgggttaaccttggttctgcaacttccttctcacaccaagtgcaaaatcaaaagcaattcgccacctcccaacacctccaagcccaaagccccgtcgtcccttcattggccaacttcacctcttaaaagataaacttctccactaagcaatcatcgatccccccaaagagcatggccccctacttcccgcccctccttc

SEQ ID NO: 7343 - DNA, 429 bp, Glycine max
agcccacgcgtccgcaacaacaactatggcaagttatcaaaagcactacgatgatcagggtcgcaaggttgacgagtatggcaacgttgagaagcaaaccgacgaatacggcaaccctgttcatgctgctagtgtcacctatgtagccaccagaactgctgctggtggttacagtgatgacattaataagcaacatgataccaccaatgcctacggcgtagacactggtagacagcattctagtggtggctacgatggtgacactaataaacatcatggaactactggtggctataatgatgacaccaatagacatcatggaactaccggtgtctatggtatagacaccgataggcaacaacatgggactactggtggctatgccggtgacactggtaggcaacatgggaacatcggtggcccttacta

SEQ ID NO: 7344 - DNA, 415 bp, Glycine max
gcgtcagcccacacgtccggcacgctgctgccaaggttttcagccatcctgatgttgttgctgaagtgccatggtacggtattgaacaagaatacaccttgttgcagaaagatatccaatggcctcttgggtggcctgttggtggtttccctggacctcagggtccatactactgtggtgttggcgctgacaaggcttttggccgtgacattgttgacgcacactacaaagcctgtatttatgctggcatcaacatcagtggaattaatggagaagtgatgcccggtcagtgggaattccaagttggaccttcagttggaatctcagctggtgatgagatttgggcagctcgttacatcttggagaggatcactgagattgctggtgtggtggtttcctttgaccccaagccaat

SEQ ID NO: 7345 - DNA, 412 bp, Glycine max
cgcgtcaacccaaacgtccgattttcagacgaacaatggcaggtaagggttcgacgtgcttcctcctcgagtttgctcattctcgccatcctccgtttcaaattgccgctgaggaatcatccgaaaaagaattcgtgctcacaatggattactccaactttcacgaaaatgttcagaagccacgatttcatcgccctcgagttctaagccccaaggggttgccactggtataaaccttccacccgagtatgacaaaaccggctccaacctgaattatcaagattcccccggttgttttgccaaaatttgaggcaaataagggaatgatcaatgacgtgcatctcaatatgatgttaggggatacccaacaattaagattctgagaaatgggggacagaatgttcaggaatac

SEQ ID NO: 7346 - DNA, 410 bp, Glycine max
agcaggactcggtatcgctcgccaacgtcaagccattgtggatggactgagggacagtgtgcttgctttctctgagaacgtgcctgggacaacagctaaagatgtcatggacatggtgctggtgactcaatactttgacaccatgaaagagattggagcatcttcaaagtcctcatctgttttcataccacatggtcctggcgcagttaaggacattgccatgcagattcgggatggtctgcttcaggccaccacttcacagaattaagctttcctggagttgtaaataacaaatagtagcgtgccagattttttttcagtaaatgcttttcttgtttgaacttaaaatgtctgcatctttactcttatattggatagattcatggcagtgtctatttttatgcgtgtaa

SEQ ID NO: 7347 - DNA, 393 bp, Glycine max
agagagtagtgagtagtgagagggaggaagcagaagtgaagcgatgaatgccccagatcgttacgagcgtttcgtcgtccctgaaggcacaaaaaagttttcttatgagatggacacgaagatcatcaatgcgtcatccttcaccatcgagtaagaggagcacactatcaacaacatcctccgcatctgcacagagaccccaatgtcttgattgtcagatacaagcttcctcatgctcttcaatacaaaattattgtcagggttagcgtcttttccttattactactactactgccttctttcaatttcatggaatagtttaggttttagttctaagctatttcgaccatatagttagttagggttaaagaataagacccaaatcctactttt

SEQ ID NO: 7348 - DNA, 430 bp, Glycine max
cttcatcgctgagaagagatgcgctcctctaatgctccgtttggcatggcactctgctggaacttacgacgtgagctcgaagaccggtggtcccttcggaaccataaagcacccctccgaactcgctcacggcgctaacaacggtcttgacatcgctgttaggcttttggagccactcaaagcggagtttcctattttgagctacgccgatttctaccagttggctggcgttgttgccgttgaggtcaccggtggacctgaagttcccttccatcctggaagagaggacaaacctgagccaccaccaagagggtcgcttggccgatgccactaagggttctgaccatttgagagatgtgtttggcaaagctatggggcttagtgagcgagatatcgttgctccgtcggggggtcagactattggagctgc

SEQ ID NO: 7349 - DNA, 277 bp, Glycine max
cgttgccattctcatcctcttctttctctctctaccattgccatggatccctacaagcaccggccatccagcgccttcaattctcccttctgggacacaaattccggtgctcctaattggaacaacaactcctccttaaccgttggggccagaagtccaattctgctggaagattatcaacctgtggagaagcctgcaaattttgatagggaacgtttcccaaaacgtgttgttcaaggcaagggggctagttcaaaaggtttccttgaagtcaccc

SEQ ID NO: 7350 - DNA, 418 bp, Glycine max
cggctcgacccaagcgtcagagaaaacctaagcttagaattagaaacaaagaaaagaagaaaggaaagaattgatcgttgaaaatgcagggaggaaagaaagcgggagagtccattaaggaaacagctacaaacattggtgcttctgccaaggctggcatggagaagaccaaggccactgtccaagagaaggcagaaagaatgacagcacgtgatccggtgcaaaaggagttggcaacccaaaagaaagaggcaaagatgaaccaggcggagctggacaagcaggcggcgcgtcagcataacacggcggccaaacagtccgccaccacggctgggcacatgggacatggccaccacaccaccggaaccgggactggaaccgccacgtattccaccaccgggggaatatggtcagccca

SEQ ID NO: 7351 - DNA, 419 bp, Glycine max
ccggctcgacccaagcgtcaggtgttttgttagttcacacactaagttctgaaaaatgagttccaaagtttttcttattctacttatgttcatggccactatacttttgatctcctctgaggttgcacccgatgatgcataccagaattttgacaaaacagatgggaagcgtagtgcaaatggggtagatgaaagcaaatattggcgtggtggctatggcgactatggtggttggcgtggtggtggttggcgtggtggctatggaggctggcgtggtggctatggtggtgggcgtggtggctatggtggctggcgtggtggctatggtggtgggcgtggtggctacggaggttggggtggtggctttggccctaacgaacataatgaggctgggattgatgctagccctcacaactaag

SEQ ID NO: 7352 - DNA, 399 bp, Glycine max
agcccacgcgtccgcccacgcgtccggagagagaggttttgacgcaacacactttcactgagaaaggatctctatctaccaaggagcagaataaaacccttctctctggtaagtgaataagagaatggcttcagatcggaaacttcacactttcgaggaggtggcaaagcacgaccagaccaaggattgctggctcatcatttctggcaaggtgtatgatgtcacccctttcatggaggatcatcccggaggtgatgaggttttgttatctgcaacagggaaagatgcaaccaatgattttgaagatgttggacacagtgattctgctagagatatgatggaaaaatactacattggtgagattgattcatcaactgtaccactaaaacgtacctacat

SEQ ID NO: 7353 - DNA, 356 bp, Glycine max
attcaagggcatctccttctcaaaatagtagtattattcttccattcataatgggtgttttcacattcgaggatgaaatcaactcccctgtggctcctgctactctttacaaggccctagttacagatgccgacaacgtcatcccaaaggctcttgattccttcaagagtgttgaaaacgttgagggaaatggtggcccaggaaccatcaagaagatcactttcctttgaggatggagaaaccaagtttgtgctgcacaaaatagaaaacattgatgaggcgaacttgggatacagctacaacgtggttggggggtctgcattgccaagacacggcggggaaagatcacattcgac

SEQ ID NO: 7354 - DNA, 404 bp, Glycine max
agcaaaaccggttccaaggtcggagagtacgcagattacgcttctcagaaggccaaggaaacaaaagatgcaacgatggaaaaagctggagagtacacagattatgcttcgcagaaagcgaaggaagcgaagaagacgaccatggagaagggtggagaatacaaggattactctgcggagaaagctaaggagagaaaagatgctactgtgaataagatgggagagtataaggactatgctgcggagaaagccaaagaggggaaagatgctactgtgaataaaatgggagagtataaggactatgctgcggagaaaacgaaagaggggaaagatgcccactgtgaatagatgggagagtataaggattacactgcggagaaggcgaaagaggggaaagatacgac

SEQ ID NO: 7355 - DNA, 400 bp, Glycine max
acccacgcgtccgcatcgctgatcaaacttcaaaccctagctaggatttcaaggtacacttaacgatggcttcaaaacgcattactaaggagttgaaggatctgcagcaggaccctcctgtttcctgcagtgctggccctgttggtgatgacatgtttcattggcaagctacaattatgggtccaactgacagtccttatgctggtggtgtattcctggtgaccattcacttcccaccagattatccatttaagccaccaaaggtttccttccgaaccaaggtatttcaccctaacataaacagcaatggaagtatctgtctggacattctgaaagagcagtggagtcctgcccttacagtttccaaggtgctactttcaatttgctccctgctgacaga

SEQ ID NO: 7356 - DNA, 441 bp, Glycine max
accacgcgtccgcccacgcgtccgctcgtttctggtccaaattcattgatgataaggtttttggtgctgcatggaaatccgttttcacagctgatgagaaagagcgtgagaagaatgttgaggaagcaattgaggctctgcagtttcttgagaatgagataaaggacaagaagttctttggaggagaggagattgggttggtagatattgctgctgtctacatagcattttgggtccctatggttcaagaaattgcagggttggagttattcacaagtgagaaatttcctaagctccacaattggagccaagaatttttgaaccatccaattgtcaaagaaagtctgccccctagagatcctgttttcccctttttcaagggtctctatgaaagcctttttggttcaaaatagatttgatgatgtggtgtgagacttagta

SEQ ID NO: 7357 - DNA, 382 bp, Glycine max
cgacgtaagcgtatagatgattatgctctggatttgatttcctctcaaattgcagaagcacgagattcagagccgccgccatcaacggcaaggaccgctcctcctcgtccctcttagccgccgccaaggactcccgctccgcctccgtcaccgcccctatctccaagaattccaacgcttccgacgaggaatctgaaacagacagcgaggagtctgatgttagtggctccgacggagatgacacatcgtggatctcgtggttctgcaatttgagaggaaatgaattcttctgcgaggttgatgacgattacatccaggacgacttcaacctgtgtggattgagcagtcaagtgccttactatgattatgctctggatttgat

SEQ ID NO: 7358 - DNA, 401 bp, Glycine max
cgacccacacgtacgcccacgcgtccgctcactttcatttctacatccctggctctgttccgtcgatgacgatggcgtttagggtgcgaaaccctgacctccgctttctcattcttctctctctcttgtccatcacttccgccaaggtcttcttcgaggagcgtttcgatgacggatggggaaatcgttgggttaaatcagattggaaaaaagatgagaacctggctggggagtggaaccacacctctggccaatggaatggagacgctaacgacaaaggtattcaaaccagtgaggattacagattctacgctatttcagctcagtaccctgaattcagcaacaaggataagacactagtcttccaattttctgtcaagcatgaacagaagcttgactgc

SEQ ID NO: 7359 - DNA, 375 bp, Glycine max
aatcagaagaagatcactttcgttgaggatggagaaagcaagtttgtgttgcacaaaatagaatcagttgatgaggcaaacttgggatacagctatagcgtagttggtggagttgggttgccagacacagtggagaagatcacattcgaatgcaaattggctgctggtgccaacggagggtctgctgggaagctaactgtcaaataccaaaccaaaggagatgctcagcccaacccagacgacctcaaaattggcaaagtcaagtctgatgctcttttcaaggccgttgaggcttaccttttggccaatcctcattacaactgatccaatattcaacttaattatcatcagtgtcttgcttatcatatacaagag

SEQ ID NO: 7360 - DNA, 307 bp, Glycine max
gttttctttcgcttgttcgtttgtttaattcaataaaggaaattaggcatgaccctcttgttgagtatgctctgcctatttgaaaatttccacacctcttttaattgtcgtaatgatgtgtgaagtgtgtgttattttaaaaaaaaaaaacaaaaaaaaaaaaaaaaaaaaagaaaaagaaaagggcggcagatcaaaaagagttaaaactaaggtaagcatgcatacgaaatcaaaaatcttcgatagtgtaaactagtctcaattgacaggcattcgttttacaccgatcttgattgggaaaaac

SEQ ID NO: 7361 - DNA, 294 bp, Glycine max
aaatttccgcctcctcccaatcccggaaccccccaatcaacatggtgaacgttccgaaaacaaagaagacatactgcaagagtaaggagtgcaggaagcacaccctgcacaaggttacccaatacaagaagggtaaagatagcattgctgcccaaggaaaacgccgttacgatcgcaaacaatctggttatggcggacaaactaagcccgtcttccacaagaaggctaagaccaccaagaagattgttctgaagttgcaatgccagggtttcaagcatgtctcccaacacgcta

SEQ ID NO: 7362 - DNA, 381 bp, Glycine max
cgacccacgagtacgcagctatacttgttccttttgaaggttagaagtgctacaatacaaacaatggcagctactcaggaagatgtgaagcttttgggtattgtgggaagcccatttgtgtgcagggtccagattgcccttaagttgaagggagttgaatacaaatttttggaagaaaatttgggcaacaagagtgatctgcttctcaaatacaaccctgttcacaagaaggttccagtgtttgttcacaatgagaagcccatagcagagtctcttgtgactgttgaatacattgatgagacatggaagaacaaccccatcttatcttctgatccttaccatagagccttggcccgtttctggtccaaattccatgatgat

SEQ ID NO: 7363 - DNA, 400 bp, Glycine max
  modified_base (370)..(370): a, c, g, t, unknown, or other
gaggcacgcgtcaacccaaacgtccggtgacgctggaacttcatccaagctgttgatcaagggaggcaccgttgtcaatgctcaccaccaacaggttgccgatgtttatgtcgaagatggtatcattgtttccatcaaatccactattatggttggagatgaggtgactgtcatagatgccactggcaagtttgtcatgccagggggcaccgatcctcacacccacctagagtttgaatttatgggtacagaaactgtagatggcttcttcggtggtcaggctgcagcattagctggtgggacaacaatgcacattgactttgttataccacgtaaaggaagtttaacggctggtattgaagcctatganaagaaggcaaggaagtcttgcatggattat

SEQ ID NO: 7364 - DNA, 402 bp, Glycine max
agcccacgcgtccgctcaaaagtgatattcttaagaatcctgttgtcacagagattgcagagagattggggaagacaccagcacaagttgcccttcgatggggcttgcaagcaggtcatagtgtgcttcctaagagcactaatgagtccagaatcaagggaaattttgatatctttgactggtctattcctcaagatttgatgaccaagatctctgaaattaagcaggaaaggctagttaaggccagtttttttgttcacgagacctatggtgcctataggagcattgaagacttctgggatggtgaactctgagcaatatgcatctttgagacgttgaaaaatacattgctcctagagcaaatttattctgccttatacccactagttgtagtgattcaag

SEQ ID NO: 7365 - DNA, 402 bp, Glycine max
gcgtcaggcagaggctaccctaatcctctcctcttcctctctactaatttcagctatggccgacgaagctgtggttgttccagatcccacccagatcgatgtcaagctctttaaccgctggagcttcgacgatattgagtggcgacatccaagcacgccacgtatgtgcctcacaccgccggcaggtactcggtgaagcggttcaggaaggcgcaatgccccattgttgagaggctgaccaactctctcatgatgcacggtagaaacaatggcaagaaactcttggctgttaggatcatcaaacatgctatggagattattcatttgttgactgaccagaaccccattcaggttattgttgaagctgttgtcaacagtggtccacgtgaagatgcaacaaga

SEQ ID NO: 7366 - DNA, 413 bp, Glycine max
gacccaagcgtcagcccacgcgtccgcgctctgtttctgtctctgtgtttgcggctgaggattccgaacgagcgaccttcttcgtttctcgcaaagtttaagtcatcatgggtaaggaaaagactcacatcaacattgtcgtcattggacatgtcgactctgggaagtcaactaccactggtcatttgatctacaagcttggaggtattgacaagcgtgtgattgagaggttcgagaaggaggctgctgagatgaacaagaggtcattcaagtatgcctgggtgcttgacaagctcaaggctgagcgcgaaagaggaattaccattgatattgctttgtggaagtttgaaaccaccaagtactactgcacagtcatcgatgcccccggacatcgtgactttatcaagaacatg

SEQ ID NO: 7367 - DNA, 389 bp, Glycine max
  modified_base (372)..(372): a, c, g, t, unknown, or other
acgcgtcagggagaaatcatgcaacctgactgggacatgttcatagttacaccagcagcagattatcaggcctgcagctcgtgcaattggtggatgtcctatttatgttagtgacaagccaagcaatcacaattttgatcttcttaagaagctggttctcccggatggttcggttctccgtgctcagttacctggcaggccaactcgtgattctctatttgtggattcagccagagataggactagcttgctcaaaatatggaacctgaacaaatgctctggagttgttggtgtacttaactgccaaggtgctggatggtgcaagatagagaagaaaacccgcatccatgatacatctcgtggtacactcancgcctctgtctgcgcct

SEQ ID NO: 7368 - DNA, 293 bp, Glycine max
gcgtcagtctcaatctcaatctattattattattcctcaattaataatgggtgttttcatattcaatgatgattacatatcccctgtggtccatgcaaatcttgacaaggttttagttacatatctcgacaacatcttcccgatggcacatgattccttcaagagtgttgacaatgtttacggaaatagtggcacaggatacatcacgaatatcactttccttgaggatagataattcaagtttgtgctgcatagaatagaaagcattgatgacgctaacttgggatacattt

SEQ ID NO: 7369 - DNA, 406 bp, Glycine max
gacccaagcgtcaggagaaacatggcttccttaagctccttagtgctgctccttgcagctctaattctagcccctcaagttcttgcaaactatgagaatcccccagtgtacaagcctcccactgagaagccaccagtttataagcccccagttgagaagcctcctgttgacaaacctccagttgaaaatcccccaatttataagcctccagtagagaagccaccagtgtacaagcccccagttgagaaacccccagtttataagcccccagttgagaaaccaccagtgtacaagcccccagttgaaaaaccaccagtgtacaagcccccagttgaaaaacccccagtgtacaagccgccagttgaaaaatcaccagtgtacaaacccccagttgagaagcccccag

SEQ ID NO: 7370 - DNA, 412 bp, Glycine max
ggctcgacccaagcgtaaggttcattctctttgcgcagttccctacctctcctttcaagatgcagatcttcgtcaagaccctcaccggaaagaccatcacccttgaggtggaaagctctgacaccatcgacaacgtcaaggccaagatccaggacaaggaaggaattcccccggatcagcaacgtctcatcttcgccggaaagcagctcgaggacggccgtaccctcgccgactacaacatccagaaggagtcaacccttcaccttgtccttcgtctccgtggtggcatgcagatcttcgtcaagactctcactggcaaaaccataaccctagaggtcgaaagctctgacaccattgacaacgtcaaggccaagatccaggacaaggagggaatccccccaaaccagcaacg

SEQ ID NO: 7371 - DNA, 355 bp, Glycine max
tagcgtcacgaattctagggccgcaggacgtctaagagacgacacggtggttcggcggggaacaagttccggatgtcgctgggtctgccggtggcggcgacagtcaactgcgccgacaatacggcggcgaagaacctctacatcatagcggtgaaagggatcatcgggcgtttgaaccgtctcgcctccgcttgcgttggcgacatggtgatcgccaccgtgaataacgggaaacccgatctgatgaagaacgttttgccagctgtcattgttccccagcgcaagccatggccccgaaatgacggtgtctacatgtatttcgaatataataccggtgttattgtcaatcccaaaa

SEQ ID NO: 7372 - DNA, 421 bp, Glycine max
acgcgtaagtgaaagaatcaagagtgttgaaaacgttgagggaaatggtggcccaggaaccatcaagaagatcactttccttgaggatggagaaaccaagtttgtgctgcacaaaatagaaagcattgatgaggcgaacttgggatacagctacagcgtggttgggggtgctgcattgccagacacggcggagaagatcacattcgactccaaattggttgctggtcccaatggagggtctgctgggaagctcactgtcaaatacgaaacaaaaggagatgctgagcccaaccaagacgaactcaaaactggaaaagccaaggctgatgctctcttcaaggccattgaggcttaccttttggcccatcccgattacaactaatcctcttcaacttacttgttaacactttcctggcttttc

SEQ ID NO: 7373 - DNA, 289 bp, Glycine max
ccccaaggggaaaactcccaaaccaatgaaaaagtgaaagcgaaaattcaggacaaggaaggaatcccaccggaccaacaaagggttatttttgctggcaaacagctagaggatggaaggaccctccctgactacaacatccagaaggagtcaactctgcacttggtgttgcgtcttcgttgggggttttaagctggagctgatttctgtgtgatgttcgatgttggattttcccaaacattttaagaagaaatgtgatgtgtaatgggtctgtaatgaacctttgaaa

SEQ ID NO: 7374 - DNA, 389 bp, Glycine max
aggcaccttgcagaatcaattttctctctcaatcgtctttcatggctcgtaccaagcaaaccgctcgcaaatccaccggtgggaaggctcctaggaagcaactcgccaccaaggctgcaagaaaatctgcacctaccaccggtggagtcaagaagcctcatcgctatcgtcctggaactgttgctcttcgtgagatccgaaaataccaaaagagcacagagcttctgatccgcaagctcccctttcagcgtcttgttcgtgaaatcgcgcaagacttcaaggtaagttctaaattcaaaaacaaggttttaaatattggttgcggtcctgttgtggtttcattgagaacgttgatattgcagcaaatcactgacattttttgttgatat

SEQ ID NO: 7375 - DNA, 428 bp, Glycine max
agcccacgcgtccgcacaaacacaaacaaagacaacaaccttgtttgtctgcaatcaaaacctttcaagctggcgttcgagaaccaagacacccctgtccgagaaatcaagcccaagaaccggagaatcatgggtgctggaggccctgatgacgaggacaataggtggccaccatggctgaaacctcttctcaaagagagcttctttgttcaatgcaagcttcacgctgattcgcacaagagcgagtgcaacatgtattgcttagattgtatgaacggtgctctctgctctctctgcctcgcttaccacaaagatcaccgtgctattcagataagaaggtcttcataccatgatgtgattacggttaatgagattcagaaggtgttggacatcacaggggtccaaacctacattatcaacagcgcaag

SEQ ID NO: 7376 - DNA, 405 bp, Glycine max
  modified_base (369)..(369): a, c, g, t, unknown, or other
agcccacgcgtccgcttccatttccattaaaaagaaaatatcataaatgggtattttcacattcgaggacgaaatcacctcccctgtggctcctgctactctttacaaagctctagttacagatgccgacaacatcatcccaaaggctcttgattccttcaagagtgttgaaaacgttgagggaaatggtggccctggaacaatcaagaagataactttcgttgaggatggagaaaccaagtttgtactgcacaagatagaagcagttgatgaggcaaacttgggatatagctacagcgtagtgggtggtgctgcgttgccagacacagcggagaagatcacattccactccaaattggctgctggtcncaatggaggctctgctggcaagctcactgtcgaata

SEQ ID NO: 7377 - DNA, 327 bp, Glycine max
cgcgtcagctgctattccctacactcctacctaaggagtgtactattatccgcagtttctattctctctagctactttcatgtatgttcaatgctatatatagccttgaattaatgtcaactatgttctaattaatgctatagcttcggtttgtgttaaaaaaaaaaaaaaaaaaaaaaaaaaaaaaaaaaaaaaaaacaaaaaaaaaataaaaaaaaaaaaaaacaaaaaaagaaagaaaaaaaaaaaaaaaaaaaaaaacaaaaaaaaaaaataaaaaaaagaacaattaaaagaaaaacaaaatcataggggggtggttcagaa

SEQ ID NO: 7378 - DNA, 383 bp, Glycine max
cgcgtcaggcaaaaacgcattgtgtttctctctttccgcggcgtagatctgagcagtttgggaaaccctaactgctctcaccactctctttgctttttttcctctccgatcaacgacctctttcgtcgccctaagtcatggcaggacttgcacccgagggatcacagtttgatgctcgtcaatatgataccaagatgaatgagttgcttacatctgatggacaggattttttcacatcttatgatgaggtttatgacagttttgatgctatgggcttgcaggagaatctcctgagaggcatttatgcatatggttttgagaaccatcagctattcagcagagaggaatagttcctttctgcaaaggacttgatgttatacaac

SEQ ID NO: 7379 - DNA, 219 bp, Glycine max
tatcgtggtggttgtgaccgtggttacccgcgtggtggtgaccgtggctgatgctgctgtacaaactagggcttgatgtcgttgattatggtttatgattatgctcagtaattttagctgtgtttgagtttgagtatctttatggttttgtgtcaccgtggttcttgtttttgatcaatacatctggttgtttatactccatttactcagttgataatt

SEQ ID NO: 7380 - DNA, 414 bp, Glycine max
agcccacgcgtccgcccacgcgtccggcaattccccttccgtttcgtttcgatctcaaaacatgttcttcttcgattggttctatggcattctagcttccctcggtctctggcagaaagaagccaaaattctcttccttggtctcgataatgcagggaagaccacacttcttcacatgctcaaagacgagagattagttcagcaccagccgacccaacaccccacttcggaggaattgagcattgggaagatcaagtttaaggcttttgatttggggggtcatcaagttgcccgcagagtctggaaagactattacgcgaaggtggatgcagtagtttacctggttgatgcctttgacaaagagaggtttgcagaatcaaagaaggagcttgatgccttgctttcagatgaatc

SEQ ID NO: 7381 - DNA, 425 bp, Glycine max
aggagaagtgaatgctgagcttcttgacacccaagtgaatcctgctgtgtgggaaattagtggacacatggttttaaagaggaggaaggattatgatgaggcgtctgaaggcaatgcttggaggcttcttgctgaggtgtccctttctcaagagaggtttcaagaagtcaatgatcttgtttttgaagccattggctgtggtgaattggaggatgtcaatgttcaaagtgtcaaaaaagaagttgatgcagtcagcacaagcgaacaccctactgtggtggtggtggctggttcacaagaatgtgtggttctacagtaacaaggctcttgtattttgaacaaattcagaaaatctgcagtgttttaagaataattgctgaaatgtgtcaccgtttaagtcatactattgccttgtgcttgagcct

SEQ ID NO: 7382 - DNA, 419 bp, Glycine max
aggcagttgagactgaccaaggccttcacatggtttacatgcatgctgggaccaatccctttgaagtcatcaatcaagctgtcaaggctgtggaaaaacacatgcaaacttttcttcatcgtgagaagaaaaggttgccatcttgtcttgactggtttggatggtgcacatgggatgctttctatactgatgtcacagctgagggtgttgaggaaggcctgaaaagtctatcacagggaggtacacctccacgattcctcatcatagatgatggttggcaacagattgaaaataaagcaaaggatgctactgaatgtttggtacaagaaggagcacagtttgctactaagttgactggtattaaagagaatactaaatttcaaaagaaattacagaacaatgagcagatgtcaggtctg

SEQ ID NO: 7383 - DNA, 440 bp, Glycine max
tcccgactcgaccaacgcgtcagcccacgcgtccgcccacgcgtccgctctgatcagaattggagtttcacctcagtaatctgcataataaagatgtggtgtattcgaggattacatagattaccaaggtgaatctctaattttgattagagaacaacaccaactatatcaaggttttgttcttttccagttgaggttaccaatactcttgtatgattgtctttgtatgaatgaagatggatgatattggcattgctgttacactgacaatggtttgaatggattttatgcaggcaagccctttgtgaatgtcttgaaggaagctggtgtgcttcctggcatcaaggttgacaagggcacagtcgagcttgctggaactaatggagagaccaccactcagggtctagatggccttggtcagcgttgtgccaagtactacg

SEQ ID NO: 7384 - DNA, 308 bp, Glycine max
  modified_base (97)..(97): a, c, g, t, unknown, or other
  modified_base (123)..(123): a, c, g, t, unknown, or other
ccggccgacccacgcgtcagattattattcttccatttccattaaaaagaaaatatcataaatgggtattttcacattcgaggacgaaatcacctcncctgtggctcctgctactctttacanacctcaatttacaaatgcgaacaaaatcatccaaaaggctcttgattccttcaaaattgttaaaaactttaaggaaaatgttggccctgaaacattcagaaaaataccttcctttaaggatgaaaaaaccaatttggtacggcacagaataaaaccatttaataaggcaaccttggaataaacca

SEQ ID NO: 7385 - DNA, 262 bp, Glycine max
agctcactcatcaatctcgtttgttctcactaactattacttcatcatgtcgtcgagcacagttggtcaagtcatcaaatgcaaagctgcggtttcatgggaggcagggaagccacttgtgattgaagaagtagaggtggcaccaccacaagctggtgaagtgcgtttgaagatcctctacacctctctttgccacactgatgtttacttctgggaagccaagggccaaactccattgtttcctcgtatatttggtcatgaa

SEQ ID NO: 7386 - DNA, 409 bp, Glycine max
agcccacgcgtccggctttgtttagatcagaaccagatcgtgttctcttcttccattggcaaacatggcaactcaaatgagcaagaagagaaagtttgtggcggatggagtgttcttcgccgaactgaacgaggttctgacacgtgagttggcggaggacggttactccggcgtggaggttagggttacgccgatgcgcaccgagattatcatcagagccaccagaacccaagccgttctcggtgagaagggaaggagaattagggaacttacctcagtggtgcagaagaggttcaaatttcccgagaacagtgtcgagctttatgctgagaaggtcaacaacagaggcctctgtgccattgctcaggccgagtcgcttcgctacaagcttctcggtggcctcgctgtt

SEQ ID NO: 7387 - DNA, 407 bp, Glycine max
  modified_base (263)..(263): a, c, g, t, unknown, or other
  modified_base (302)..(302): a, c, g, t, unknown, or other
  modified_base (379)..(379): a, c, g, t, unknown, or other
aggaacagtatgtctgggagtcccatgccggtggctcatttactgtgacaagagatacatctggtgagaaccttggtaggggaacaaagataactttgtttcttaaggaagatcaacttgagtatcttgaggaacgccgtctgaaggatttgataaagaagcattctgaattcattagctatccaatttctctctggattgagaagactactgaaaaggagatttctgatgatgaggatgatgaagagaagaaggatgagganggtaaagttgaagatgtggatgaagataaggaaaaggangagaagaaaaagaagaccattaaggaggtatctcacgagtggtcattggtgaacaagcagaagcctatttggatgangaaacctgaagagattacgaaagaagaa

SEQ ID NO: 7388 - DNA, 419 bp, Glycine max
agcccacgcgtccgcccacgcgtccgcggacgcgtgggctttgcgcagttccctacctctcctttcaagatgcagatcttcgtcaagaccctcaccggaaagaccatcacccttgaggtggaaagctctgacaccatcgacaacgtcaaggccaagatccaggacaaggaaggaattcccccggatcagcaacgtctcatcttcgccggaaagcagctcgaggacggccgtaccctcgccgactacaacatccagaaggagtcaacccttcaccttgtccttcgtctccgtggtggcatgcagatcttcgtcaagactctcactggcaaaaccataaccctagaggtcgaaagctctgacaccattgacaacgtcaaggccaagatccaggacaaggagggaatccccccagaccagca

SEQ ID NO: 7389 - DNA, 224 bp, Glycine max
cacgcgtcaaggaactccttcgcaaactagtactattattcttccattcataatgggtgttttcacattctaggatgaaatcatctcgcctgtggctcctgctactctttataaggtcctaattacatattcagacaacgtcatcacaaaagctcttgaatccttcatgagtgttgaaaactttgagggaaatggtagttaggaatcatcatgatgatcacttt

SEQ ID NO: 7390 - DNA, 407 bp, Glycine max
agccaacgcgtccgcccacgcgtccggttcattctctttgcgcagttccctacctctcctttcaagatgcagatcttcgtcaagaccctcaccggaaagaccatcacccttgaggtggaaagctctgacaccatcgacaacgtcaaggccaagatccaggacaaggaaggaattcccccggatcagcaacgtctcatcttcgccggaaagcagctcgaggacggccgtaccctcgccgactacaacatccagaaggagtcaacccttcaccttgtccttcgtctccgtggtggcatgcagatcttccgtcagactctcactggcaaaacataaaccctaaaggtcaaaagctcggacaccattgacaacgtcaaggccaagatccaggacaaggagggaatcccccc

SEQ ID NO: 7391 - DNA, 417 bp, Glycine max
  modified_base (387)..(387): a, c, g, t, unknown, or other
agcccacgcgtccggaagctagtgatcaatcatcaacacagagctgagtgtgttgctctgtgaatccaccttcttcttccattggaggaccatttcctcctggaatagaaatactaccacacttttcttttttcacttctctaagttgctaagttaattgctccttcattttttcactcttcgttctcgcgtacccgtgtcacggtaactcgtggtgaagtgttcgaaaatgactgtcacacctaagatctcagttaacgatgggaaacttgttgtccatggtaagaccattctgactggagtgccagacaacgttgtgctgactccaggttctggaaggggtcttgtgactggtgcttttgttggtgccacagcttcacacagcanaagtctccatgtgtttccaatgggtgtttt

SEQ ID NO: 7392 - DNA, 415 bp, Glycine max
agcttcaagattcaggtactgcgtttcggaagcagacacagatggctcgtacgaagcaaaccgctcgtaagtccacaggaggaaaggctcctaggaagcagcttgcaaccaaggctgcacgtaagtctgcaccaactactggtggtgtgaagaagccccaccgttatcgtcctggtaccgttgctcttcgtgagattaggaaataccagaagagtaccgagcttttgatccggaagctccccttccagaggctggttcgtgaaattgctcaggacttcaagactgatctgcgtttccagagccacgccgtgcttgcattgcaagaagctgctgaggcataccttgttgggctctttgaggacactaacctgtgtgccattcacgccaagcgtgtaaccattatgcccaaggatat

SEQ ID NO: 7393 - DNA, 425 bp, Glycine max
gacccacgcgtcagccatctcaaactagtaatatatactattattcatccattccattctatatatttcataatgggtgttttcacattcgaggatgaaaccacctctcctgtggctcctgctaccctttacaaagctctagttacggatgctgacaacgtcatcccaaaggctgttgacgccttcaggagtgttgaaaacgttgagggaaatggtggccccggaaccatcaagaagatcactttccttgaggatggagaaaccaagtttgtgttgcacaaaatagaagcgattgatgaggctaacttgggatatagctatagcgtagttgggggagatgggttgccagacacagtggagaagatcacattcgaatgcaaattggctgctggctccaacggaaggtctgctgggaagctaactgt

SEQ ID NO: 7394 - DNA, 417 bp, Glycine max
gacccacacgtcagcccacgcgtccgaaaaaaaaccctctctttctctctcttccaaaacctaattttcattttttctcttcaaacaaattttcaaaatgcgtgagatccttcacatccagggtggccaatgcggcaaccagatcggcgccaagttctgggaggtggtttgcgcggagcacgggatcgaccccactggaaggtacggtggggactcagagcttcagctcgagaggatcaatgtctactacaacgaagccagctgcggccggttcgtgccgcgcgcggttctcatggacctcgaaccgggcaccatggacagcgtccggtccgggccgtacgggcagatcttcaggcccgacaactttgtgttcgggcagtccggggcatgaaacaactgggccaaggggcactacac

SEQ ID NO: 7395 - DNA, 409 bp, Glycine max
agcccacgcgtccggatgctttaatacaattatatcacaatttcatcacagactttgagacgaaaatcaaccttctcaagcttgcacattttgctgttatagtttctcggcagtattctgaaaaagaagctgctgttggttatcttggaggggtcattcagaaacttcaagacactagggagcagcgcatagaagaacctattctttacattaagatgcaaatagcaatattcaagcttgagcaatgtgatcaaaatgaatgcaagaaacttctagaagatgggaagagtacactcgacagcatgacagatattgattcatctgtatatgctagctattactgggtatcatctcagtttcataagacatgccaagaatttgctgagttctacaaaagtgcccttctcta

SEQ ID NO: 7396 - DNA, 411 bp, Glycine max
aggttacgaatagattatcctaagtctttgggaatagtgctgcaatggcttcaagtcaggaggaggtgacccttttgggagctactggaagcccatttgtgtgcagggttcatattgccctcaagttgaagggagttcaatacaaatatgtcgaagaaaatttgaggaacaagagtgaactgcttctcaaatccaacccagttcacaagaagattccagtgtttattcacaatgagaagtccatagcagagtctcttgtgattgttgaatacattgatgagacatggaagaacaatcccatcttgccttctgatccttaccaaagagccttggctcgtttctggtccaaattcattgatgacaaggtttttggtgcttcatggaaagctgttttcacagctgatgagaaag

SEQ ID NO: 7397 - DNA, 339 bp, Glycine max
  modified_base (269)..(269): a, c, g, t, unknown, or other
ctgcacttcttgatcattcgatttttcccctcaagatgcagatattcgtaaaaactttgaccggcaagaccatcacccttgaggtggaatcctccgacaccattgacaacgtaaaagctaagattcaagacaaggaagggatcccacctgaccagcagagacttatctttgcgggtaaacaacttgaggatggtcgcacccttgccgattacaacatccaaaaggaatcaaacctccatctcgtgcttcgcctcaagggtggcatgcanatctttgtcaagactttgaccgggaagaaacatcaccttgaggtggaatcctcggaacacattgataatg

SEQ ID NO: 7398 - DNA, 423 bp, Glycine max
gacccacaagtcaggatcaatctctctctctgtctcccaatcaaaacagacatgggtttgaaggaggattttgagcagtatgctgagaaagcaaagactttgccaccgactcaatcaaacgaagacttgcttatcctttatggattgtacaagcaggccaccgttggacctgtcaacaccagccgtccgggaatgttcaacatgagggacagagctaaatgggatgcatggaaggctgttgaagggaaatccaaggacgaagcaatgagtgattacatcactaaggtgaaacagctgctggaagcagccggcatgcctgcttgataacattgtcatgccttgctttcttattctgtgctagaagttcccaacagtttggaaataaacaattgcagtgtttgaagcttttattatcataatctt

SEQ ID NO: 7399 - DNA, 401 bp, Glycine max
accacgcgtccgcccacgcgtccgcccagacgtctgcaagttgcttggcaaatttgagttatctggaattccacctgctcctacaggtgttccacacatcaccgtttgctttgacattgacgccaacggtatattgaacgtgtctgcagaggacacaatcactggacagaagaacaagattacaattaccatcgacaaatgaaggctttctaatgaggagattgagaagatggtgcatgaagctgagaagtacaacgctgaggatgacgagcataagaagaaagtggaggccaattcgacattggagaattacccctataacatgaggaacacaattaaagatgataagattgcttccaagctgtctgctgatgattacaagaacattgatgatgcaattg

SEQ ID NO: 7400 - DNA, 292 bp, Glycine max
caaactagtaatattattcttcgaatccattttattattcataatgggtatcggcacagttgaggatgaaaccacctaccctgtggctcctgctaccctttacaaagctctagttacagatgccgacaacgtcatcccaaaggctgtcgaagccttcaggagtgttgaaaaccttgaggggaacggtggccctggaaccatcaagaagatcactttcattgaggatggagaaagcaagtttgtgttgcacaaaatataatcagttgatgaggcaaacttgggatacagctat

SEQ ID NO: 7401 - DNA, 431 bp, Glycine max
actcagttctctcacacactcattcggtgctccgaatctcagattctagggttagggttcccaatttctccaccgatcagaaaatgagttcaactggtggttctaccaagggcggaaggggcaagcccaaagcctccaaatccgtttcaagatcgcagaaagctggtctccaattccccgttggaagaatcgctcgattccttaaggctgggaaatacgccgagcgtgttggtgctggtgctcctgtgtacctctctgcagtgctcgaatatctcgctgctgatgttttggaattggctgggaatgctgctagggataacaagaagaatcgtattgttcctaggcacattcagcttgctgtgaggaacgatgaggaactgagcaagcttttggggtctgttaccattgccaacggaggtgtcttgccgaac

SEQ ID NO: 7402 - DNA, 434 bp, Glycine max
aacgaatttctatctatctcttgtttcaatttcaacaacggttactcctttttcgttttgagtttcaatcaagccatcatcatgtctaccgcatcgcaacccaaggccaagaaaacggcgtcgtccaagaagcccctctcccaccctcccttcgccgtgatgatagcagaggcgattgcgagtctgaaagagagaaccggttcgagccaatacgcgataaccaaatacatcgaagggaagcacaaggagttgcctgcaacctacaagaagcttgtcctcgttcatctcaagaaatctgttgctgctggcaagcttgttaaggtgaaaaactcctttaagctcgcaccgactaagcctgctccggttaaggccgctgctcccaaaaagccaaccaaagctgccactaagcccgcttccaagcccaaagctgctac

SEQ ID NO: 7403 - DNA, 263 bp, Glycine max
acggacgcgtgggttttgttatttgcatctgagattccgattagttaaatgatgttggttttcttagttgtagagaaccttgaatagtatttttgaaattacgaattcaagaaaaaaattaaaaaaaaaaaaaaaaaatgaggagagaaaagagagaaaaataaaaaaaataaaaaaaaaaaaaggaaaaaaaaaagaaaagtgagataaaatgaaagaggaaggtggaagtagaaaaaaaaagggggggtcgcccaaagggt

SEQ ID NO: 7404 - DNA, 444 bp, Glycine max
acaagccttcgaacaagccttcgttcaaaggaaccaattaaggaaaaagaaaaccaccctgaaaacctcaggaattatcagaacattcccgggggaaaatttgtacttcaccccatcatgaatgtcccctcagaatttgagcatgtggaacagggggatgcattgtatgcaatggaattagctttgtctttggagaagttagtgaatgagaaacttctgaatgtgcacagtgtggcagatcgcaacaatgaccctcaaatggccgacttcattgaaagcgagtttttgtctgaacaggttgaatcaattaagaaaatttcagagtatgtggctcagttgagaatggttggaaagggtcacagtgtgtggcactttgatcaaagacttcttgattaggaagatgctgcttaatcttgaatagccttattattagtcttcatttac

SEQ ID NO: 7405 - DNA, 424 bp, Glycine max
  modified_base (321)..(321): a, c, g, t, unknown, or other
  modified_base (327)..(327): a, c, g, t, unknown, or other
atttgttgcaggcatcacatctgatctcacacgattcggattcggaattttctcgatccctttctgatctgtgatctctgatctgtttgcgttacttgatcttatgatacttgtgttactatatgattcttttattactctcacgccaatagattatcaacgatcgtgagactggaagatccaggggttttggatttgtgaccttcgcctcggagcagtccatgaaagacgccatcgaagggatgaacggccaaaaccttgacggccgtaacatcactgttaacgaagctcagtcccgtggtggcggtggcggccgaggcngtggangtggtggatatggtggtggtcgcggtggtggatatggtggtggtggtcgcggttgtggagggggatacaaccgtatcggtggcggtcgacgctatgg

SEQ ID NO: 7406 - DNA, 433 bp, Glycine max
  modified_base (408)..(408): a, c, g, t, unknown, or other
  modified_base (415)..(415): a, c, g, t, unknown, or other
acactagaagtattattattcttccatttccattaaaaagaaaatatcataaatgggtattttcacattcgaggacgaaatcacctcccctgtggctcctgctactctttacaaagctctagttacagatgccgacaacatcatcccaaaggctcttgattccttcaagagtgttgaaaacgttgagggaaatggtggccctggaacaatcaagaagataactttcgttgaggatggagaaaccaagtttgtactgcacaagatagaagcagttgatgaggcaaacttgggatatagctacagcgtagtgggtggtgctgcgttgccagacacagcggagaagatcacattccactccaaattggctgctggtcccaatggaggctctgctggcaagctcactgtcgnaatacanaccaaaggagatgctcag

SEQ ID NO: 7407 - DNA, 387 bp, Glycine max
gacccacgcgtacaaccaagcctagaagcgaaatcgcaatcgcaatccagcgaatatgaaggtcgtcgctgcatacttgctcgcagtgttgggagggaatccttccccttctgccgatgacatcaaacacatcctcggcgcagttggagctgaggctgagaatgagttggttgagttgctcttgactgaagtcaagggaaaagacttcaatgagctaattgctagtggaagtgggaagatgtctgcagtgtctggtggctgtgcagcggttgccgttgctgctgcaccagctggaggtgctgctgcagttgctgccgaggcagacgaagaagagaggttcgaagagaaggaggagtctgagtaggatatgggtttcagtttgttcga

SEQ ID NO: 7408 - DNA, 446 bp, Glycine max
gacccacgcgtcaatatttccctacctctcccttcaagatgcagatcttcgtcaagaccctcaccggcaagaccatcacccttgaggtggaaagctctgacaccatcgacaacgtcaaggccaagatccaggacaaggaaggaatccccccggaccagcaacgtctcattttcgccggaaagcaacttgaggacggccgtacccttgctgactacaacattcagaaggagagtactcttcacctcgtcctccgtctccgtggtggcatgcagatcttcgttaagacactcaccggcaagaccataaccctagaggttgaaagctccgacaccatcgataacgtcaaggccaagatccaggacaaggagggtatccccccggaccagcaacgtctcatcttcgccggaaagcagctcgaggacggccgcaccctcgccgactacaac

SEQ ID NO: 7409 - DNA, 431 bp, Glycine max
aagtttctaagaactttattaatttttaatactgtaatgcatttgttgttatatcaggtgtctacattttcttttgtctacaaactaattttctttttatttgttacttgaacaggaactccttgcttccgtggatatggaaggcgtaatggagagcgtatgagaaagtctgttcgtgggtgcattgtcagcccagacctctctgttttgaacttggtaattgtgaagaaaggtgagaatgatttaccaggattgactgatgttgagaagccaaggatgagaggcccaaagagagcatccaacatccgtaaactgttcaacctgtctaaggaggatgatgttaggaagtatgtcaacacctaccgtcgtacatttacgacaaaatgaaaaagtgagcacagctcccaagatacgaagactggtcactcctc

SEQ ID NO: 7410 - DNA, 267 bp, Glycine max
cacaaactagaagtattattattcttccatttccattaaaaagaaaatatcatagatgggttatttcacattcgaggacgaaatcacctcccctgtggcttctgctactctttacaaagctctagttacagatgccgacaacatcatcccaaaggctcttgattccttcaagagtgttgaaaacgttgagggaaatggtggccctggaacaatcaagaagataactttcgttgaagattgagaaaccaagtttgtactgcacaagat

SEQ ID NO: 7411 - DNA, 283 bp, Glycine max
ccacgcgtccgggtcaagattgggtgggttgcttgttacttatccatcactgagaaaatatcataggtgggtattttcacattcgaggacgaaatcacctccactgtggctcctgctactctttacaaagctctagttacagatgccgacaacatcatcccaaaggctcttgattccttcaagagtgttgaaaacgttgaaggaaatggtggccctggaacaatcaataagataactttcgttgaggatagataaacctagtatgtactgcacaatataaaat

SEQ ID NO: 7412 - DNA, 197 bp, Glycine max
cgtccgcgacaactactacaagtacttccttataatcaaaaccaacaacaactatggcaaggatcaaaagcactacgatgatcagggtcgcaaggttgacgagtatggcaacgttgagaagcaaaccgacgaatacggcaaccctgttcatgctgctagtgtcacctatgtagcctccataactgttgctggtggat

SEQ ID NO: 7413 - DNA, 209 bp, Glycine max
cccgcctccacccacgcgtccgattgtttaaacctaattctcattttttcatcgttcgattcttctcctcctaaagaggcagatcttcgtgaaaactttgaccggtaagaccatcacccttgaggtggagtcctccgacaccatcgataacgtgaaagctaagattcatgacaaggaatggatcccaccttaccagcagagacttatct

SEQ ID NO: 7414 - DNA, 348 bp, Glycine max
gttgccattctcatcctcctctgtctctctctctccaccattgccatggatcctgacaagctccggccatccagcgccttcaattctcccttctggactacaaattctggtgctcctgtttggaacaacaactcctctttaaccgttggagctagaggtccaattctgcttgaggattatcatcttgtggagaagcttgcaaactttgacagggaacgtatcccagaacgtgttgtccatgccaggggagctagtgcaaagggtatctttgaggtcacacatgacatatctcacctgacatgtgcagatttccttcgagcctttggagttcagactctttgtaattgg

SEQ ID NO: 7415 - DNA, 396 bp, Glycine max
agtcgagcctcccgaagaaaaagcgaaggggccgtcgcacaagacattcagaatcaagaagaagttggcgaagaagatgaggcagaacaggcccatcccctactggatccgcatgaggaccgacaacaccatcaggtacaacgcgaagcgccgtcactggcgtcgcaccaagcttggattctgaggtgcttgctttgcctcgattcagtttatccaattaattagtgttttattttcttgagccaaaaacaatgctttggagtttttaatattttgcattttattccaagactatattgtgtaaagaatttattgtagtaccgttgacgtgagtctatttgcaatttcgagtatttgggcaaaaccaatctggtttgggcagaccttcataatctc

SEQ ID NO: 7416 - DNA, 224 bp, Glycine max
ccgtaacctcgggaaaaggattggctctgagggctgggcacgggggtcccagtccggaacgcgtcggctgtcggtggactgctcgagctgcttccgcggcgagagcgggtcgtcgcgtgccggtcgggggacggattgggaacgggcccttcggggcctattccctgggcatttaacagtcaactctgatcttgtaccgactaggcgaatccgactggttaatt

SEQ ID NO: 7417 - DNA, 429 bp, Glycine max
gctccttctaatcccatcccatgtgcttttacttttaatccttttttcaagaaaaagagagcttgttttgtttgtgggaagccaggacattttgctcctcagtgtaggtatagagttatcagaaatggcaatcctcctaaatgatgcaatcctaccccccaagggcattggatagaagactccaagaaaattgggccaaagatgcaagagaaggccctagggttctcatgagtcttagggtagattttgggcccatgggctaagtatgagcttacttatctttgtacatattagattagggtttcattattttttgggccttgtatttagggctctatactgtatggatgataccctagtaatatatgattttttaacccttgtatattatggcacctatactagtttttgtattaggggtggttttgt

SEQ ID NO: 7418 - DNA, 364 bp, Glycine max
ctttttgattcctaaattctctaaaattcgaaattctaatttcgttaggggaaagagattgggtgtgtgtgagtgagtatggctggaaaaggcgagggtcctgctatcggaatcgatttgggaacgacgtactcttgcgtcggcgtgtggcaacacgatcgtgttgaaatcatagccaacgatcagggtaacagaactaccccatcctacgtggctttcaccgacacagaacggttgatcggcgatgcggcgaataaccaggtcgctatgaacccaacctacaccgcttttgatgcttagcgtttgattggaatgcgtagttccgatgcatcattacaaagtgatcctgaaattgtggctcgtt

SEQ ID NO: 7419 - DNA, 399 bp, Glycine max
tattatccttccattccgttctacatataatcattcataatgggtgttttcagatgggacgatgaaatcaactcccctgtggctcctgctactctttacaaggccctagttacagatgccgacaacgtcatcccaaaggctcttgattccttcaagagtgttgaaaacgttgagggaaatggtggcccaggaaccatcaagaagatcactttccttgaggatggagaaaccaagtttgtgctgcacaaaatagaaagcattgatgaggcgaacttgggatacagctacagcgtggttgggggtgctgcattgccagacacggcggaaaagatcacattctactccaaattggttgctggtcccaatggaaggtctgctgggaagctcactgtcatattc

SEQ ID NO: 7420 - DNA, 374 bp, Glycine max
catagcagagcgaccttgaagagctatggctggcggaaagaataagaggatttccaagggaaagaagggtggcaagaagaaagccgctgatccctttgccaagaaggactggtacgatatcaaggccccttccgtctttcaggtcaagaatgttggcaaaaccctcgtctctcgtacccagggaaccaagattgcttctgaaggactcaaacatagagtgtttgaggtctcattggctgatctccaaggagatgaagaccatgccttcaagaagattcgtttgagagctgatgatgttcaagggaaaaatgttctgacaaacttttggggaatggatttcacaactgataagttgaggtccttggtgctgaaat

SEQ ID NO: 7421 - DNA, 183 bp, Glycine max
acgtagatcgctccgttcgcaaaaagaacggccctaaggttggatgattgggtgctttgccgtatttacaacaagaagggcacgatcgagaaactgcaaccaagcagcgatgttgctcatagccgaaatatcgaatcctcggagatcgaagacaggaagcccgagattctgaatagctgagga

SEQ ID NO: 7422 - DNA, 347 bp, Glycine max
tcacacttatacaaaattctccaattagggagcttgttgagagttgctgcttggaagaaaggctgtttaatggtcaagattgtgatgtctgggaatgcagcagtcaaaaggagtgattgggcctcattggtacaagtgtttttaacaaacagcaacagtacagagcattttgatgcatgtaagtggacaaaatcagaaccacattcctgggaattgatcttcccaatagaggtatgtggtcctaataatggttttgaaatgtggagttctgagtgggcaaatcaaacttcatggcatttgagtttccttattgacaatcccaaacagtctacagttttagatattct

SEQ ID NO: 7423 - DNA, 262 bp, Glycine max
ctttgttagttcagaaagtagtccagagaaggacccagttgtgctatggctgaatggtggacctgggtgctggggctttgatggctttgtttacgagcatggaccattcagctttgaggctgcaaattcaaaagggaatctacccactttgcatatcaatccttgcggctggtctaaggtttccgacatgatatatttggactcccctgctggtgttgggctctcttactccaagtaacacaagcgggtatgccgctgggga

SEQ ID NO: 7424 - DNA, 214 bp, Glycine max
cgagcgtgggctcactgtcaaatacttatcaaaaggagatgctgagcccaaccagagacggaactcaaaactggaaaagccaaggctgatgctctcttcaaagccattgatgcttaacctttagcccatcccgattacaactaatcctctacaacttacttgtcatcactttcttgcttggagacttatccaatcactctgttctcaacttaag

SEQ ID NO: 7425 - DNA, 354 bp, Glycine max
cactgaattcaaaaacatcgaaagagagaggcatggccgagcaaaccttcatcatgatcaagccagatggcgttcaaagaggccttattggcgagattattagcagatttgagaggaagggtttttacttgaaagggttgaaactcgttactgtggaccgtccttttgctgagaagcactatgctgatttgtctgcaaagcctttctttagtggtttggtggattacattgtctctggccctgttgttgccatgatctgggagggtaagaatgttgttacaactggccgaaagattatcggagccacaaacccatctcaatctgagtcctgaactattcatggtgactttgcta

SEQ ID NO: 7426 - DNA, 288 bp, Glycine max
aaaattcctgaaccgggacgtggcggctgacgcaacgttagggagtccggagacgtcggcgggggccccggaaagagttatcttttctgtttaacagcctgcccaccctggaaacggctcagccggaggtagggtccagcggctggaagagcaccgcacgtcgcgtggtgtccggtgcgcccccggcggcccttgaaaatcccgaggaccgagtgcctcccacgcccagtcgtactcataaccgtatcatgtctcctaggtgaacaacctctggtcgatggaacaatg

SEQ ID NO: 7427 - DNA, 391 bp, Glycine max
ccttcaaagtgaggtctctaagtttcactttgtttgcatagggcaacctcctttctctgtgactctgagtatcgtatcgttttattattatttctaattctctcttatcaggtccattgaatatgtctccgtcgttggatcttcctcccaagggtggcttcagttttgatctatgccgaagaaacgcaatgcttcaaaacaagggcctcaaagccccaacctttctcaaaactggcaccactattgtcggtttagttttccaggatggtgtcattcttggtgctgatactagggcaactgaaggacctatagtggctgataaaaactgtgagaaaattcattatatggcacccaacatatattgctgtggagcaagcacagctgctgatac

SEQ ID NO: 7428 - DNA, 381 bp, Glycine max
gtcctccgtctccgtggtggcatgcagatcttcgttaagacactcaccggcaagagggtaaccctagaggttgaaagctccgacaccatcgataacgtcaaggccaagatccaggacaaggagggtatccccccggaccagcaacgtctcatcttcgccggaaagcagctcgaggacggccgcaccctcgccgactacaacatccagaaggaatcaacccttcacctcgtcctccgtctccgtggtggcatgcagatcgtcgttaagacgcttagcggcaggactattaccctagaagtcggaagctgcgacgccatcgacgaagtgaaggctgagattcaagacaaggagggaatccggggagccagcagaggctgatct

SEQ ID NO: 7429 - DNA, 434 bp, Glycine max
gatttatgctgagggtgctgaaaatggcttggagttcacaattgtgaggccttttaactggattggacctcgaatggatttcattcctggcattgatggtccaagtgagggtgttcctcgggttcttgcatgctttagcaataatcttctcagaggagagcccctcaagcttgtggacggtggccagtcccagagaacctttgtttacattaaagatgctattgaagctgtcttgctgatgattgaaaaccctgccagggccaatggccacatatttaatgtgggtaacccaaacaatgaggttactgttaggcagcttgctgaaataatgattaaggtttattcaaaggtaagtggcgaacaaactcctgaaacacctaccgttgatgtgagctcaaaagaattttatggtgaaggatatgatgatagtgaca

SEQ ID NO: 7430 - DNA, 437 bp, Glycine max
attccgttctacatataatcattcataatgggtgttttcacattcgaggatgaaatcaactcccctgtggctcctgctactctttacaaggccctagttacagatgccgacaacgtcatcccaaaggctcttgattccttcaagagtgttgaaaacgttgagggaaatggtggcccacgaaccatcaagaagatcactttccttgaggatggagaaaccaagtttgtgctgcacaaaatagaaagcattgatgaggcgaacttgggatacagctacagcgtggttgggggtgctgcattgccagacacggcggacaagatcacattcgactccaaattggttgctggtcccaatggagggtctgctgggaagctcactgtcaaatacgaaacaaaaggagatgctgagcccaaccaagacgaacttcaaactggaaa

SEQ ID NO: 7431 - DNA, 447 bp, Glycine max
gttttgttagttcacacactaagttctgaaaaatgagttccaaagtttttcttattctacttatgtgcatggccactatacttttgatctcctctgaggttgcacccgatgatgcataccagaattttgacaaaacagatgggaagcgtagtgcaaatggggtagatgaaagcaaatattggcgtggtggctatggcgactatggtggttggcgtggtggtggttggcgtggtggctatggaggctggcgtggtggctatggtggtgggcgtggtggctatggtggctggcgtggtggctatggtggtgggcgtggtggctacggatgttggggtggtggctttggccctaaccgacattatgaagctgggaatgatgctagccctcacaactaaggaaggaacttgctaaagcttatatagtgattaagttatcgtaataaataaa

SEQ ID NO: 7432 - DNA, 440 bp, Glycine max
cccacgcgtccggagaaagagaagagagaatcgaaaccctaatttcggaaagatcggcgatgactgcctccaaggatcgcgagaacttcgtctacatcgccaaactcgccgagcaggccgagcgttacgaagagatggtggaatcaatgaagaacgttgcgaatctcgacgttgaactgacggtggaggagcggaatttgctttctgttgggtacaagaatgtgattggtgctcgcagagcgtcctggaggatcctgtcttccattgagcagaaggaagaaacaaaagggaacgagttgaatgcgaagcggattaaggagtacagacagaaggttgaattggagctatcgaacatctgtaatgatgttatgagagtgattgatgagcaccttatcccttcggctgcagctggtgaatccactgtgttttactataagatg

SEQ ID NO: 7433 - DNA, 434 bp, Glycine max
cccacgcgtccggtactgttctattagttcatactaagttctgaaaatgagttccaaggttttgcttgttctacttatgttcttggccactatacttctgatctcctctgaggttgcacccgatgatgcatacgagaattttgacaaaatagatgggaagcctagtgcagatggggtagatgaaagcaagtattggcgtggcggctatggtggcggctatggtggtggttatggaggtgggcgtggaggctatggaggtgggcgtggaggctatggagggggacgtggtggatatggcggcggacgaggtggctatggtggcgggcgtggtggctatggcggcgggcgtggtggctggcgtggtggctatggtcctaatgaacataacgaggctggggttgatgctaaccctcacaactaagaaggcaactttc

SEQ ID NO: 7434 - DNA, 402 bp, Glycine max
  modified_base (378)..(378): a, c, g, t, unknown, or other
  modified_base (384)..(384): a, c, g, t, unknown, or other
gttattgtgagcaaagaaagatagtgagtgaagtaactgaagagaagaaaaaatgccgtgcctcaacctcagcaccaacgtgtccctcgaaggcgtcgacacctcttccatcctcgccgaagccacctcctccgtcgccagcataatcggcaaacccgaagcctatgtgatgattgtactgaaaggatcagtacccatagcttttggtgggaatgagcagccagcagcttatggagaattggtttccattggtggtcttaaccctagtgtaaacaaggaacttagtgctgcaattgcttcaattctggaaaccaaattgtcaatggccgaagtcgcggttcttcttgaaattctatgacaccaagggttccaacttcngatggnaatggatctacattctga

SEQ ID NO: 7435 - DNA, 431 bp, Glycine max
gctgttgcttatggtgctgcagtgcaggctgcgattctcagtggcgagggtaatgagaaagtgcaggatcttcttttgttggatgttactcctctatccactggtttggagactgcaggaggagtcatgactgtgttgattcccagaaacacaaccattcccaccaagaaggagcaggtgttctcaacctactctgacaaccagcccggtgtgttgattcaggtctatgaaggtgaacgaacgaggactcgtgacaacaatttgcttggcaaatttgagttatctggaattcctcctgctcccagaggtgttcctcagatcactgtttgcttcgacattgatgccaacggtatattgaacgtgtctgcggaggacaaaaccactggacagaagaacaagattacaattaccaacgacagggcaggctttct

SEQ ID NO: 7436 - DNA, 291 bp, Glycine max
  modified_base (254)..(254): a, c, g, t, unknown, or other
acgaccacgcgtccggtgtatgtccctacctctcccttcaagatgcagatcttcgtcaagaccctcaccggcaagaccatcacccttgaggtggaaagctctgacaccatcaacaccgtcagggccagaatccaggccagggaaggattcccccggacccaccaccgcttaatttcgcccgaaagccacttgaggaccggcgtacccttgctgactaccacattcagaaggagagtactcttcacctcgtcctncgtcttccggggtggcatgcagatcttcgttaagaca

SEQ ID NO: 7437 - DNA, 380 bp, Glycine max
gaagcgcaagaagaagacctacaccaagcccaagaagatcaagcacaagcacaagaaagtcaagctcgccctcctccagttctacaaggtcgacgactccggcaaggtccagaggctccgcaaggaatgccccaacgccgagtgcggcgccgggactttcatggccaaccacttcgatcgccactattgcggcaagtgtggtttgacctatgtttaccagaaggctgaggcttagggttacatttcgttttttctagtttctggattttggaattttattattagtataatactctgtttttttgtctgtattttggtcgcatattattatgactgcctgaatgttctgccttttcaaaaaaaaaaatataaaacaaaaa

SEQ ID NO: 7438 - DNA, 370 bp, Glycine max
tcgcccacgcgtccgcccacgcgtccggttcaattacacgattctgagagacacaaaggatgttctggttataactgccagagggagcagtgcggagattataccctttctcaaaacgtgggtgaaccttcccatggccgttgggttcatgttgttgtacacaaagttgtccaatgttttgtcaaagcaagctcttttctacaccgtgattcttccattcattgctttctttggggctttcgggtttgtgttgtaccctctcagcaattatattcaccctgaggcatttgcggacaagcttctcaacatcctcggacctaggttccttggcccctttgcgataatgaaaattggaacctctggttggttt

SEQ ID NO: 7439 - DNA, 432 bp, Glycine max
cgcaaatatgtttttggtggacatggtgctttctatatgaagatcttggcagaagatgaaccagagaaataccagtcacacttcagcgaatacatcaaacgtgggatagaggctgatggtattgaagcactttacaagaaggttcatgctgccatccgtgctgatcctactctcaagaaatctgataagcagcccccgaaggagcacaagaggtacaacatgaagaagctgacttatgaggagaggaaggctaagtcggttgcacgcgtggcagccatcaactctgctgctgataatgatgaagatgatgagtgaaagttcattgcggatgctgtctcatagctggacaagtagaaaactatgttatttgcctgtactgattattttctatggccaaaatttggatactttttggagtcgagagccttattt

SEQ ID NO: 7440 - DNA, 438 bp, Glycine max
gtgagaaacaaagaaaggaaataattgatctttgaaaatgcaaggaggaaagaaagctggagagtccatcaaggaaacagctgcaaacattggtgcttctgccaaggctggcatggagaaaaccaaggccactgtccaggagaaggcagaaagaatgacggcacgtgatccgatgcaaaaggagttggcaacccagaagaaagaggcaaagatgagccaggcagagctggacaagcaggcggcgcgtcagcataacacggctgcgaagcaggctgccacggcagggcacatgggacaacccatggggacccatcagacgtcagctatgcccggtcatggaaccggacagcccacgggccatgtcaccgagggagtggtgggctcacactctattggaaccaacagaggcccgggtgggactgctactggccataatac

SEQ ID NO: 7441 - DNA, 442 bp, Glycine max
cggacgcgtgggcacacacaactactacaagtacttccttacaatcaaaaccaacaacaactatggcaagttatcaaaagcactacgatgatcagggtcgcaaggttgacgagtatggcaacgttgagaagcaaaccgacgaatacggcaaccctgttcatgctgctagtgtcacctatgtagccaccagaactgctgctggtggttacagtgatgacattaataagcaacatgataccaccaatgcctacggcgtagacactggtagacagcattctagtggtggctacgatggtgacactaataaacatcatggaactactggtggctataatgatgacaccaatagacatcatggaactaccggtgtctatggtatagacaccgataggcaacaacatgggactactggtggctatgccggtgacactggtaggcaaca

SEQ ID NO: 7442 - DNA, 444 bp, Glycine max
gcaagccccactcaaccaccacacctcttctcgttcacgctacccctttctgctcttcttctacctttcaagttttaaaagtataaagatggcagagacattcctatttacctcagagtcggtgaacgagggacaccctgacaagctctgcgaccaaatctccgatgctgtcctcgacgcttgcctcgagcaggacccagacagcaaagttgcctgcgaaacatgcaccaaaaccaacttggtcatggtcttcggagaaatcacgaccaaggccaacgttgactacgagaagatagtgcgtgacacctgcaggaacatcggcttcgtctcaaatgatgtgggactggatgccgacaactgcaaggtcctcgtcaacattgagcagcagagccctgatattggctcaggtgtacacgggcaccttaccaaaaaaccctgagaaat

SEQ ID NO: 7443 - DNA, 453 bp, Glycine max
gtactgttctattagttcatactaagttctgaaaatgagttccaaggttttgcttgttctacttatgttcttggccactatacttctgatctcctctgaggttgcacccgatgatgcatacgagaattttgacaaaatagatgggaagcctagtgcagatggggtagatgaaagcaagtattggcgtggcggctatggtggcggctatggtggtggttatggaggtgggcgtggaggctatggaggtgggcgtggaggctatggagggggacgtggtggatatggcggcggacgaggtggctatggtggcgggcgtggtggctatggcggcgggcgtggtggcgggcgtggtggctatggtcctaatgaacataacgaggctggggttgatgctaaccctcacaactaagaaggcaactttctaaagcttatatatgggtttaagttatcgca

SEQ ID NO: 7444 - DNA, 446 bp, Glycine max
cttgtactgttctattagttcatactaagttctgaaaatgagttccaaggttttgcttgttctacttatgttcttggccactatacttctgatctcctctgaggttgcacccgatgatgcatacgagaattttgacaaaatagatgggaagcctagtgcagatggggtagatgaaagcaagtattggcgtggcggctatggtggcggctatggtggtggttatggaggtgggcgtggaggctatggaggtgggcgtggaggctatggagggggacgtggtggatatggcggcggacgaggtggctatggtggcgggcgtggtggctatggcggcgggcgtggtggcgggcgtggtggctatggtcctaatgaacataacgaggctggtgttgatgctaaccctcacaactaaaaaggccactttctaaagcttatatatgggttta

SEQ ID NO: 7445 - DNA, 434 bp, Glycine max
accagctatacttgttccttttgaaggttagaagtgctacaatacaaacaatggcagctactcaggaagatgtgaagcttttgggtattgtgggaagcccatttgtgtgcagggtccagattgcccttaagttgaagggagttgaatacaaatttttggaagaaaatttgggcaacaagagtgatttgcttctcaaatacaaccctgttcacaagaaggttccagtgtttgttcacaatgagaagcccatagcagagtctcttgtgattgttgaatacattgatgagacatggaagaacaaccccatcttaccttctgatccttaccaaagagccttggctcgtttctggtccaaattcattgatgataagattgtgggtgctgtatggaaatctgttttcacggttgatgagaaagagcgtgagaagaatgtt

SEQ ID NO: 7446 - DNA, 419 bp, Glycine max
cctagattcagccacagtttcggaggatatagaatatagtcgttcgagatggcccgtacgaagcagactgctcgtaagtccacaggaggaaaggctcctaggaagcagcttgcaaccaaggctgcacgtaagtctgcaccaactactggtggtgtgaagaagccacatcgttaccgtcctggtaccgttgctcttcgtgagattaggaaataccagaagagtaccgagcttttgatcaggaagctccccttccagaggctggttcgtgaaattgctcaggacttcaagactgatctgcgtttccagagccacgccgtgcttgcattgcaagaagctgctgaggcataccttgttgggctctttgaagacactaacctgtgtgccattcacgctaaacgggtaaccattatgcccaagga

SEQ ID NO: 7447 - DNA, 413 bp, Glycine max
cccacgcgtccgcccacgcgtccgcccacgcgttcggctatacttgttccttttgaaggttagaagtgctacaatacaaacaatggcagctactcaggaagatgtgaagcttttgggtattgtgggaagcccatttgtgtgcagggtccagattgcccttaagttgaagggagttgaatacaaatttttggaagaaaatttgggcaacaagagtgatttgcttctcaaatacaaccctgttcacaagaaggttccagtgtttgttcacaatgagaagcccatagcagagtctcttgtgattgtggaatacattgatgagacatggaagaacaaccccatcttaccttgtgatccttaccaaagagtcttggctcgtttctggtccaatttcattgatgataatattgtgggtg

SEQ ID NO: 7448 - DNA, 384 bp, Glycine max
cccacgcgtccgcaaaaggagtgattgttcctcattggtacaagtgtttttaacaaacagcaacagtacagagcattttgatgcatgtaagtggacaaaatcggaaccacattcctgggaattgatcttcccaatagaggtatgtggtcctaataatggttttgaaatgtggagttctgagtgggcaaatcaaacttcatggcatttgagtttccttattgacaatcccaaacagtctacagtttttgatattctcttgggaatttctcaagattttgaaattgctgggaatactcttatgccagctttttctgttccacagggctatgccagatcttctgaaaatgcggaatcctttgcatgatctggaatttgtgctgtctt

SEQ ID NO: 7449 - DNA, 432 bp, Glycine max
  modified_base (384)..(384): a, c, g, t, unknown, or other
gcagaactctgcttcttcggattccgatcgcacgcgccgtcaccatggtgaacgttccgaaaacaaagaagacatactgcaagagtaaggagtgcaggaagcacacgctgcacaaggttacccaatacaagaagggtaaggatagcattgctgcccaaggaaaacgccgttatgatcgcaaacaatccggttatggtggacaaactaagcccgtcttccacaagaaggctaaaaccaccaagaagattgttctgaggttgcaatgccagggttgcaagcatgtctcccaacacgctattaagaggtgcaagcactttgagattggtggtgacaagaagggcaagggaacatcactcttctagtttgagaattaggatttagagncttatgtttcagcaatgttggaatgttttgtttctctctggatttttc

SEQ ID NO: 7450 - DNA, 393 bp, Glycine max
cccacgcgtccgcgtagtgcaaatggggtagatgaaagcaaatattggcgtggtggctatggcgactatggtggttggcgtggtggtggttggcgtggtggctatggaggctggcgtggtggctatggtggtgggcgtggtggctatggtggctggcgtggtggctatggtggtgggcgtggtggctacggaggttggggtggtggctttggccctaacgaacataatgaggctgggattgatgctagccctcacaactaagaaggaaacttgctaaagcttatataggatttaagttatcgtaataaataaaacttcattggaagggtagatataatagatgtggagatctttctttgctctggtcatataaaggattaatgcttttatatt

SEQ ID NO: 7451 - DNA, 383 bp, Glycine max
atacacttgtactgttctattagttcattctaagttctgaaaatgagttccaaggttttgcttgttctacttatgttcttggccactatacttctgatctcctctgaggttgcacccgatgatgcatacgagaattttgacaaaatagatgggaagcctagtgcagatggggtagatgaaagcaagtattggcgtggcggctatggtggcggctatggtggtggttatggaggtgggcgtggaggctatggaggtgggcgtggaggctatggagggggacgtggtggatatggcggcggacgaggtggctatggtggcgggcgtggtggctatggcttgctgcctggtggcggtcgtggtggctatggtcctaatgaacataa

SEQ ID NO: 7452 - DNA, 435 bp, Glycine max
ctcaatcctctgtaacttcaaaacatacacctcttctctctgtttctcttcactctctgtctccctccctcttcaactaacatggcaattgaaaaccaagacaccgctgtcagagaaatcaagcccaagaacaggagaatcatgggtgctggagggcctgatgatgaggacaataggtggccaccgtggttgaagccactgctgaaagagagcttctttgttcaatgcaagttgcatgctgattctcacaagagcgaatgcaacatgtattgcttggactgtatgaatggccctctctgctctctctgcctcgcccaccacaaagatcaccgtgcaatccagattaggaggtcctcataccatgatgtgatcagggtctctgagattcagaaggtgttggacatcactggtgtccaaacctacattatcaacagc

SEQ ID NO: 7453 - DNA, 436 bp, Glycine max
ggcaccttggtccttctatgattcagcatatgcagtatccttgcaatgagtgtaagggtactggagagacaatcaatgacagagacaggtgccaacagtgcaagggagagaaggttgttcaggagaagaaagtacttgaagttgttgtggagaagggaatgcagaatggacagaagattacattccctggtgaagctgatgaagcgcctgatacagtcacaggggatattgtctttgtcctacaacagaaggaacacccaaagttcaaacgaaaggcagatgacctttttgtagaacacacattgtctcttactgaggctctatgtggcttccagtttgtgctgactcacctggatagcaggcagcttctgatcaaatcaaaccctggggaggttgttaagcctgagtcattcaaggcaataaatgatgagggaat

SEQ ID NO: 7454 - DNA, 444 bp, Glycine max
cccacgcgtccggtggattctgaggatcttcctctcaacatttctagagaaatgctgcagcagaacaagatcctgaaagtcatcaggaagaacttggtcaagaagtgcattgagatgttctttgaaattgctgagaacaaggaagactataacaagttttatgaagccttctctaagaatctgaaacttggtattcatgaggattctcagaacaagacaaaacttgctgaattgctcaggtatcactccaccaagagtggtgatgagatgaccagcctcaaggactatgttaccaggatgaaggaaaggcagaatgacatctactacattactggtgaaagcaggaaagctgttgagaattcccctttccttgaaaagcttaagaagaaggggttcgaggttctctacatggttgatgctattgacgagtatgctgttggtcag

SEQ ID NO: 7455 - DNA, 424 bp, Glycine max
ccggtgtctgcggtgttggttccatagtaagggccaccgatgttcccatgttgcctaccagtgtcaccggcatagccaccagtagtcccatgttgttgcctatcggtgtctataccatagacaccggtagttccatgatgtctattggtgtcatcattatagccaccagtagttccatgatgtttattagtgtcaccatcgtagccaccactagaatgctgtctaccagtgtctacgccgtaggcattggtggtatcatgttgcttattaatgtcatcactgtaaccaccagcagcagttctggtggctacataggtgacactagcagcatgaacagggttgccgtattcgtcggtttgcttctcaacgttgccatactcgtcaaccttgcgaccctgatcatcgtagtgcttttgataacttg

SEQ ID NO: 7456 - DNA, 451 bp, Glycine max
tattcttccatttccattaaaaagaaaatttcataaatgggtattttcacattcgaggacgaaatcacctcccctgtggctcctgctactctttacaaagctctagttacagatgccgacagcatcatcccagaggctcttgattccttcaagagtgttgaaaacgttgagggaaatggtggccctggaacaatcaggaagataactttcgttgaggatggagaaaccaagtttgtactgcacaagatagaagcagttgatgaggcaaacttgggatatagctacagcgtagtggatggtgctgcgttgccagacacagcggagaagagcacattccactccaaattggctgctgagtccaatggaggctctgctgggaagctgatggcgaataccaaaccaaaggagatgctcaggccaaccaagaccaactcaaaactggaaaagccaa

SEQ ID NO: 7457 - DNA, 278 bp, Glycine max
catctgccccactgaatcaccacacctcttttcgatttcgctacccctttctgctctactggtaccggtcaagttttaaaggggtaaagatggcagatacaatcctatttaccttatagtcgatgaacgatggacaccctgacaagctactgcgaccaaatcttcaatgctgtactctacgcttgcctcgagcaggacccagacagcaaagttgactgcgaaacatgcaccatacccaacttgctcatggtcttcgagaaatcactactcaagccaac

SEQ ID NO: 7458 - DNA, 422 bp, Glycine max
atcactctagctgttgcaaatttctactatttttcaatggcttctgcagatgttgagttccgttgctttgttggtgggcttgcttgggtcaccggcaacgatgccctcgagaaagccttttcaatctacggcgacatcgttgaatcgaaggttatcaacgaccgtgagactggaaggtccagaggattcggatttgtgaccttcgcctcagagcagtcaatgaaagatgcgatcgcaggaatgaacggccaggaccttgacggccgtaacatcactgtcaacgaagctcagacccgcgccagccgtggtggtggtggaggcggtggtttcggaagtggtggtggatacaaccgcggtagcggtggatatggtggtggtggtggcggcggctgatacggtggtcgtcgtgaaggtggatacaa

SEQ ID NO: 7459 - DNA, 443 bp, Glycine max
ctcacccattttcttcgtagccaaacactctgaaattctcagttatgtcgtggcaagcgtatgtggatgatcacctactgtgtgaaatcgaaggtaaccacctcactcacgccgctatcatcggccaagacggaagcgtttgggctcagagcaccaacttccctcagttcaaacctgaggaaataactgccatcaataatgactttaatgagcctggatcacttgctccaactggattgtatatcggtggcaccaaatacatggtcatccagggtgagcctggtgctgtcattcgagggaagaagggtcctggtggtgttactgtgaagaagaccggtgcggccttgatcattggcatttatgatgaaccaatgacttcaggtcaatgcaacatggtagttgaaagggctttggcgatatctcattgatcaaggtctctaatc

SEQ ID NO: 7460 - DNA, 427 bp, Glycine max
cacattagttcagtctctaagtgcagcttcctacctatccttacaagatgcagatcttcgccaagaccctcaccggaaagaccatcacccatgaggtggaaagctctgacaccatcgacaacgtcaaggccaagatccaggacaaggaaggaattccgccggatcagcaacgtgtcatcttctccggaaagcatctcgaggacagacgtaccctcgccgactacaacatccagacggagtcaacccttcaccttgtccttcgtctccgtggtggcatgcagaccttagtcaagactctcactggcaaaaccataaccctagaggtcgaaagctctgacaccattgacaacgtcaaggccaagatccacgacaaggagggaatccctccagaccagcaacgtcttatcttcgacggatagcaacttga

SEQ ID NO: 7461 - DNA, 453 bp, Glycine max
ctagaagtattattattcttccatttccattaaaaagaaaatatcataaatgggtattttcacattcgaggacgaaatcacctcccctgtggctcctgctactctttacaaagctctagttacagatgccgacaacatcatcccaaaggctcttgattccttcaagagtgttgaaaacgttgagggaaatggtggccctggaacaatcaagaagataactttcgttgaggatggagaaaccaagtttgtactgcacaagatagaagcagctgatgaggcaaacttgggatatagctacagcgtaatgggtggtgctgcgttgccagacacagcggagaagatcacattccactccaaattggctgctggtcccaatggaggctctgctggcaagctcactgtcgaataccaaaccaaaagagatgctcagcccaaccaagaccaactcaaaac

SEQ ID NO: 7462 - DNA, 444 bp, Glycine max
gctaatcttagccacagttctgcaggcattttttgattctgtgggccttctgctcagaggcaatgtagacaagaaggaagcactagagaacttggatctcattctattgtgcattgatgaaattgttgatggcggtatcatacttgaaactgatccaaatgttatagctgggaaagttgctagtaatagtatagattctggagctcctttgtccgaacagactctaagtcaagcattggccacagccagggaacatcttgcaaggtcccttcttaaatgattcatatggcatttcacaatgacggaggaaacttgtctttaggtttctcctataaacgtttataagacagaacctcattgcattctcgagaagtcgaacctggatgacgatgttacttgcgtagtgaaagttaatatcgacatgctaatacaggctattctagc

SEQ ID NO: 7463 - DNA, 460 bp, Glycine max
  modified_base (412)..(412): a, c, g, t, unknown, or other
ctcgaactatcattattcttccatttccattaaaaagaaaatatcataaatgggtattttcacattcgaggacgaaatcacgtcccctgtggctcctgctactctttacaaagctctagttacagatgccgacaacatcatgccaaatgctcttgattccttcaagagtgttgaaaacgttgagggaaatggtggccctggaacaatcaagaagataactttcgttgacgatggagaaaccaagtttgtactgcacaagatagaatcagttgatgaggcaaacttgggatatagctacagcgtagtgggtggtgctgcgttgccagacacagcggataagatcacattccactccaaattggctgctggtcccaatggatgctctgctggcaagctcactgtcgaataccanaccaaacgagatgctcagcccaaccaagaccaactcaaaactggaaag

SEQ ID NO: 7464 - DNA, 447 bp, Glycine max
gagcttttgtcaattttctattgaccttctcggtggaggaattttagtggacaaaactggagattggatcacacttatacaaaattctccaattagtaacttgttgagagttgctgcttggaagaaaggctgtttaatggtcaagattgtgatgtctgggaatgcagcagtcaaaaggagtgattgggcctcattggtacaagtgtttttaacaaacagcaacagtacagagcattttgatgcatgtaagtggacaaaatcagaaccacattcctgggaattgatcttcccaatagaggtatgtggtcctaataatggttttgaaatgtggagttctgagtgggcaaatcaaacttcatggcatttgagtttccttattgacaatcccaaacagtctacagtttttgatattctcttaggaatctctcaagatttgaaattgctggt

SEQ ID NO: 7465 - DNA, 447 bp, Glycine max
  modified_base (315)..(315): a, c, g, t, unknown, or other
ggatccacatcgttctcttcctctcttctgtcttcttctccttcaacattcccaaacccaaaaaggttttgattggggttaccgagcgaacaggtgttttaacagctacaaaataagtgatttatgatatgatggagtttggtgtgaatttcattcactgattcaacgattaggatcaactgtcattggtttttttgtgttgggactagaaatgtcaatgtcaggatttgaagggcaatgtagtaatgatgagattagagagaggaggtccgatgttgagaactcagaagacgagatgcggtcgttgagaattgngaacttgaataagaaggcgatgaatgcgtcatctagattcactcattctcttaagaatagaaggaaaagggaaatcgattatcgggttccgtccatgtccattgaagatgtaagagatgcgcgggaggagac

SEQ ID NO: 7466 - DNA, 239 bp, Glycine max
gctacgcaccagtttcactgcatacacttgtgagaaaactctgcagacatgttggtttatcacgacctccttacaggtgatgagcttctatgggactgcttccgttacaatgaaattgataatgggatgctgtgggaagttgaggggaagtgtggagttaagggagcggttggcgttgacattggtgcaaaccctatctgctgaaggtgtagaagatgatggagtcgatgacgcagctg

SEQ ID NO: 7467 - DNA, 344 bp, Glycine max
gctactcagaagactgttgatggtccatcaaacaaggactggaggggtggaagagctgcttccttcaatataattcccagcagcactggagctgctaaggctgtaggaaaagttcttccagcactgaatggtaaattgactggcatgtccttccgagtccccactgtagatgtgtcagttgttgacctcactgttaggctagagaagccagcaacctatgagcaaatcaaatctgctatcaaggaggaatcagagggcaaattgaagggtattttgggttacacagaacatgatgtagagtctactgattttgttggtgataacatgtctagcatatttgacgc

SEQ ID NO: 7468 - DNA, 457 bp, Glycine max
cggacgcgtgggcggacgcgtgggcggacgcgtggtcggacgcgtgggcttgttcctccgctcaacaactataataacatctttctctctgcgaacagatcacactatggccaccttaagcgccaaatcagtccatgatttcaccgttaaagatgccaagggaaatgatattaatcttggtgactacaaaggaaaggtccttatcattgtcaatgttgcctcacaatgtggcttgactaattcaaattacactgagctcagtcagttgtatgagaaatacaaacagaaaggtctggaaattctggcatttccatgcaatcagtttggggcacaggaacctggatctaatgaacagatacaagagtttgtttgtactcgcttcaaggctgagtttcccgtttttgacaaggttgatgtgaatggggacaaagctgctccactgtacaagtatctaaaa

SEQ ID NO: 7469 - DNA, 403 bp, Glycine max
atatcccattctctctgtgtattccccttcctatcccttcaagatgcagatcttcgtcaagaccctcaccggcaagaccatcacccttgaggtggaaagctctgacaccatcgacaacgtcaaggccaagatccaggacaaggaaggaatcccctcggaccagcaacgtctcattttcgccggaaagcaacttgaggacggccgtacccttgctgactacaacattcagaaggagagtactcttcacctcgtcctacgtctccgtggtggcatgcagatcttcgttaagacactcaccggcaagaccataaccctagaggttgaaagctccgacaccatcgataacgtcaaggccaagatccaggactaggagggtatcccaccggaccagcaacgtctcatc

SEQ ID NO: 7470 - DNA, 433 bp, Glycine max
gcagcaagcatctccttctcaaactagtagtattattcttccattccgttctacatataatcattcataatgggtgttttcacattcgaggatgaaatcaactcccctgtggctcctgctactctttacaaggccctagttacagatgccgacaacgtcatcccaaaggctcttgattccttcaagagtgttgaaaacgttgagggaaatggtggcccaggaaccatcaagaagatcactttccttgaggatggagaaaccaagtttgtgctgcacaaaatagaaagcattgatgaggcgaacttgggatacagctacagcgtggttgggggtgctgcattgccagacacggcggagaagatcacattcgactccaaattggttgctggtcccaatggagggtctgctgggaagctcactgtcaaatacgaaa

SEQ ID NO: 7471 - DNA, 400 bp, Glycine max
gtcatgactgtgttgattcccagattctacaaccattcccaccaagaaggagcagggattttcgacctattccgacaaccagcctggtgtgttgattcaggtctatgaaggtgaacgtacgatgactcgtgataacaatttgcttggcaaattggagatatctggaattcctcctgctccgagaggtgttcctcagatcaccgtttgctttgacattgacgccaacggtatattgaacgtgtctgcagaggacaaaaccactggacagaagaacaagattacaattaccaacgacaaaggaaggctttctaaggaggagattgagaagatggtgcaggaagctgataagtacaaggctgaggatgaggagcataagaagaaagtgtaggccaaaaataca

SEQ ID NO: 7472 - DNA, 391 bp, Glycine max
gtcaaggctaagattcaggacatggttggaatccccccagaccagcagaggctgagcttcgccgggaagcagctcgaggacggacgcacccttgctgactacaacatccagaaggagtcaactctccacttggtgttgcgtcttcgtggtggtatgcagattttcgtgaagactcttacgggtaagactattaccctcgaggtggagagctctgacaccattgacaatgtgaaggccaagattcaggacaaggaaggcatcccaccggaccagcagaggctgatttttgctggcaagcagctcgaggatggaaggaccctcgctgactacaacatccagaaggaatcaacccttcaccttgtcctccgtctccgtggggggttttaagctc

SEQ ID NO: 7473 - DNA, 414 bp, Glycine max
aggtatccaagctggccaaaggagtttatgctaatgttgaacattggatcaatgtggacgggggctagagtagttgctgtgaagaatgacttggcgaagttgcaacttacttcccctgtgtgcactagcaagggtgagaagattgcacttagtcgacgtgttgagaagcattggcgtcttatcgggtggggacaaatccaagctggaatcactcttgatgtccctcccgcccccgatctgagtcgaacactgatcacaagaaacaccagcagctataaaaaactgagatgaatttagatatgtgggaagggaggcaattgttgggaaccatttttgtgaggtggagaagaaaacgttctttgattgttgtcttctatattgttttcacatcgttattggtttattttcccaact

SEQ ID NO: 7474 - DNA, 399 bp, Glycine max
ccaaaattacggtttttgtcgtagcttgaagaagcagcaatggcgcctaagataacacgcaaggtcagcagaaaccccgaattgataaggggaatcggaaagtactcgaggtcgcagatgtaccacaagaggggcatttgggctatcaaggccaaaaacggtggcgttttacctcgccacgaccgcaaacccaaacctgaaactcccactgaaaaaccacccaaattttaccccgctgatgatgtcaagaaaccccttgtcaacaagcacaaacccaaaccagctaagctcacggctagcattacccccggaacagtgttgattcttcttgctggtagatttaagggaaagagggtagtgtttttgaaacaactaccttctgggttgcttcttgtaaca

SEQ ID NO: 7475 - DNA, 395 bp, Glycine max
ctttttagggcaaggatgggctttcttaccctgggtcaaggctaatggtgagttgggattttggctcaagaggcttgcagaatggccggacatgatgtatgtcagggtgttggtttggccagcggttcaaagataaaggggatgccccacatttatttccatgacacacatacacacaaactagtaatattattcttcgaatccattttattattcataatgggtattttcacatttgaggatgaaaccacctcccctgtggctcctgctaccctttacaaagctctagttacagatgccgacaacgtcatcccaaaggctgtcgaagccttcaggagtgttgaaaaccttgaggggaacggtggccctggaaccattaagaagatcactttcgt

SEQ ID NO: 7476 - DNA, 269 bp, Glycine max
atcacgcgaacgcgcgcatgtcctgtactaactagtagtatgattcttccattcataagggctgttttcacattccaggatgaaatcaactcccctgagtctcctgctactctttacaaggccctagttacagatgccgacagcagcatcccaagcgctcttgatcacgacaagagcgtagacaacgtcaagagaaacggcgacccaggaaccatcatgaagatcactttccttgtagattgagagaccaagtttgggctgcacaaaat

SEQ ID NO: 7477 - DNA, 357 bp, Glycine max
ccgggttgacaccaagccttccgccaacccttccgctaacgcgtccgttacttttccggttttaaacttttctgggggctattatgaaatccttaactcgccagatcgtgcttgtaatcttgccaagcaggcatttgatgaggcaatttccgagcttgacacattgggtgaagagtcatacaaagatagtacattgatcatgcaacttctccgtgacaatctgactttgtggacatcagacatcacggacgatgctggagatgagatcaaggaaacatctaagcaacaaccaggcgaataggcgatggcagttgcgatgtgggtagtgattggatatgtattaccgataatatggat

SEQ ID NO: 7478 - DNA, 403 bp, Glycine max
cccacgcgtccgcccacgcgtccgcttacgcgtccgcccacgcgtccggcattaagctagttgttgaggcgatatgtgctggtatatttaatgacctaggaagtggaagtaatgttgatgtttgtgtgataaccaagggacataaggaatatctcaggaaccaccttctaccaaatcctcgtacctatgtcaatccaaaaggctttgatttccccaaaaagacagaggtcctcttaacaaagattacaccgttgaaggagaaggtggaagtgattgaaggagatgctatggaagagtaacaatcattccaaaaaaaattggtgtatgagtatgaaacttgattagtgcaatggctgtgatatttgattttgtactttcacaactttggcttttattaccaaaa

SEQ ID NO: 7479 - DNA, 378 bp, Glycine max
tgtaacttcaaaacatacacctcttctctctgtttctcttcactctctctctccctcccgcttcaactaacatggcaattgaaaaccaagacaccgctgtcagagaaatcaagcccaagaacaggagaatcatgggtgctggagggcctgatgatgaggacaataggtggccaccgtggttgaagccactgctgaaagagagcttctttgttcaatgcaagttgcatgctgattctcacaagagcgaatgcaacatgtattgcttggactgtatgaatggccctctctgctctctctgactcgcccaccacaaagatcaccgtgcaatccagattaggaggtcctcataccatgatgtgatcagggtctctgagattc

SEQ ID NO: 7480 - DNA, 428 bp, Glycine max
  modified_base (79)..(79): a, c, g, t, unknown, or other
  modified_base (323)..(323): a, c, g, t, unknown, or other
gttagttcacacactaagttctgaaaaatgagttccaaagtttttcttattctacttatgtgtcatggccactatactnttgatctcctctgaggttgcacccgatgatgcataccagaattttgacaaaacagatgggaagcgtagtgcaaatggggtagatgaaagcaaatattggcgtggtggctatggcgactatggtggttggcgtggtggtggttggcgtggtggctatggaggctggcgtggtggctatggtggtgggcgtggtggctatggtggctggcgtggtggctatggtggtgggcgtggtggctaccgangttggggtggtggctttggccctaacgaacataatgaggctgggattgatgctagccctcacaactaagaaggaaacttgctaaaggctatataggatttaagtt

SEQ ID NO: 7481 - DNA, 388 bp, Glycine max
  modified_base (310)..(310): a, c, g, t, unknown, or other
gttgccattctcatcctcctctgtctctctctctccaccattgccatggatccttacaagctccggccatccagcgccttcaattctcccttctggactacaaattctggtgctcctgtttggaacaacaactcctctttaaccgttggagctagaggtccaattctgcttgaagattatcatcttgtggagaagcttgcaaactttgacagggaacgtatcccagaacgtgttgtccatgccaggggagctagtgcaaaaggtttctttgaagtcacacatgacatttctcacctgacatgtgcagatntccttcgagcccctggagttcagacgcctgtaattgttcgtttctcaactgtcattcatgagcgtggtagccctgaaa

SEQ ID NO: 7482 - DNA, 373 bp, Glycine max
  modified_base (33)..(33): a, c, g, t, unknown, or other
ttgtgtggcttcgcaatttgtgctgactcagtnggatagccgtcagcttcttattaaatcaaatcccggtgaagttgtgaagcctgattcatacaaggctataaatgatgagggaatgcccatgtatcataggccattcatgaacgggaaactttacattcacttcactggggagtttccagattctctaaaccctgatcaagttaaggccttggaggctgttctgccaccaaagccttcttcacaattgacagacatggagctggatgaatgtgaggaaactacactccatgatgtcaacatggaggaggagactaggatgaagcagcatcaagctcaggaggcttatgatgaggatgatgacatgcctggt

SEQ ID NO: 7483 - DNA, 351 bp, Glycine max
caagattctaagagagatcttgctgctctttgaagaagggtgtttgcttgattttggagagtgtcgctgctctcagatctcatcaaccttaacctctcatacactactgagaaggtgatcgcagagtacatatggatcggtggatcaggaatggacctgaggagcaaagcaaggactcttccaggaccagttagcgacccttcacagcttcccaagtggaactatgatggttccagcacaggccaagctcctggagaagacagggaagtgattatatacccacaagccattttcagggatccattcagaaggggcaaccatatcttggttatctgtgatacttacacttca

SEQ ID NO: 7484 - DNA, 443 bp, Glycine max
cccaaattcattttaatcctaattctgcacttcttgatcattcgatttttctcctcaagatgcggatattcgtaagaactttgaccggcaagaccatcacccttgaggtggaatcctccgacaccattgacaacgtaaaagctaagattcaagacaaggaagggatcccacctgaccagcagagacttatctttgcgggtaaacaacttgaggatggtcgcacccttgccgattacaacatccaaaaggaatcaaccctccatctcgtgcttcgcctcaagggtggcatgcaaatctttgtcaagactttgaccgggaagaccatcacccttgaggtggaatcctcggacaccattgataatgttaaggccaagatccaggacatagagggcatcctcccagatcagcagatgctgatttttgccggtaaacaacttgaggat

SEQ ID NO: 7485 - DNA, 380 bp, Glycine max
ctccgacacaatcgataacgtgaaagccaagattcaagataaggaagggattcctccggatcgacaacgtttgatcttcgccggaaaacaactcgaagacggcagaaccctcgccgattacaatatccagaaagaatcgactctgcatttggtgcttcgtctccgcggagggatgcagatcttcgtgaaaaccctaaccggcaaaacgattacgctagaggtagagtcctctgacacaatcgataacgtgaaagcgaagatccaggataaggaaggtattccaccggatcagcaacgtcttatcttcgccggaaagcagttggaagacggcagaaccctcgccgattacaatattcaaaaggaatcgacgcttcatctgg

SEQ ID NO: 7486 - DNA, 322 bp, Glycine max
gcgcttattctctcgcattccgtggagatctagtgcttctgctgcaagacctggctggggattagggtttcgattcggaggtagactaagatgttcggaagggctccaaagaaaagcgacagcaccaggtactacgaaatcctcggcgtttccaagaacgcttcgccggatgacttaaagaaggcttacaagaaagccgccattaagaaccatcctgacaaaagcggggatcccgagaagtttaaagagcttgctcaagcctatgaggttcttagtgaccctgagaagcgcgagatttatgatacatatggagaagatgctc

SEQ ID NO: 7487 - DNA, 368 bp, Glycine max
ctttgatggaaattttccagtggattcttggttaccaatttttgtgaattgtctttatcctggaagtcaattacctccagaagctgtcgttgtaaatgttacatgtggtagtggacgtggtggtttacccaccaatgcttggattagttctgcagttaacaatcgctcctcagatatcaacaaaatgattcgcacagcacttgggaaaggtaagaaaaattttttcttactagagttgatccttttccagtagctttactggctgatctttttggcgttaagaatgaaattctgagttctaacgccgctaaccctatgctgacgcgactttttgagaactgtaagagtctcacatatctggttgatga

SEQ ID NO: 7488 - DNA, 429 bp, Glycine max
gagcttttgtcaattttctattgaccttctcggtggaggaattttagtggacaaaacgtggagattggatcacacttatacaaaattctccaattagtaacttgttgagagttgctgcttggaagaaaggctgtttaatggtcaagattgtgatgtctgggaatgcagcagtcaaaaggagtgattgggcctcattggtacaagtgtttttaacaaacagcaacagtacagagcattttgatgcatgtaagtggacaaaatcagaaccacattcctgggaattgatcttcccaatagaggtatgtggtcctaataatggttttgaaatgtggagttctgagtgggcaaatcaaacttcatggcatttgagtttccttattgacaatcccaaacagtctacagtttttgatattctcttaggaatctctc

SEQ ID NO: 7489 - DNA, 349 bp, Glycine max
tccatttgcatttgctctctctcagtttccaagaatcttaagctatgggaaagtcttgtccgaccgtgagcgctgattaccagaatgccgttgagaaggctaagaagaagctcagaggctacatcgctgataagagatgcgctcctctaatgctccgactggcatggcactctgatggaacttacgacgtgagctctaagaccggtgcaacgtacggatctatgatgattcagtacaaactatttcaaaaccttttcgacgttacagacatctaccgtactctgatcatgcctgtcggactcgacgcatatataatcagtttgctcgctgttgaataccgaaactaatg

SEQ ID NO: 7490 - DNA, 430 bp, Glycine max
tctctgtccccctccgactgcgatcgatcaaggcagcgtctacaatgagaaaggtggagatggctagatacaacgcgctgctgattctcctgctccttctaatacagtgaaaacacagagagaagcactcttctcactaccttttctagatacagaaactcatggcctgagttaatccgaacggcttcgacgattctccggcgactccaacgcacaagctacagttcattcactacaacatattcggaaacctcttctaggttacggccaaataccgtcctccaatcatgcctgtcagacgcggctcgtatggaatcgattgctcgctgttgaataccgagacgaatgagctgatggcggttaagaagatagcgaacgctttctacaatcacatggacgctaagcgtacgcttcgtgagattaaccttct

SEQ ID NO: 7491 - DNA, 392 bp, Glycine max
cttgtactgttctattagttcatactaagttctgaaaatgagttccaaggttttgcgtgttggacttatgttcttggccactatacttctgatctcctctgaggttgcacccgatgatgcatacgagaattttgacaaaatagatgggaagcctagtgcagatggggtagatgaaagcaagtattggcgtggcggctatggtggcggctatggtggtggttatggaggtgggcgtggcggctatggaggcgtgcgtgaaggctctggaaggtgccgtgctgcaatcatgcctgtcggacgcggctcgtatggaatcctttgctcgctgttgaataccgagacgaatgagctggtggcggttaagaagatagcgaacgctttcgacaatcaca

SEQ ID NO: 7492 - DNA, 432 bp, Glycine max
ggccaccgttccagggcagctcgtgtgggagatcgtcaagaaaaacaattccttctgggtcaagcagtttggaaggggcacccagagcgtcgaattcagcagagagagcaacaatctctacaacctcaattcgttcaagtactctggtttggcaaacaagaaaactgttactgttcagcctgagggcaaagatcaggctgtgttgttggctacaaccaagacaaagaagcaaaacaagcccgctgcattgctccacaaatctgtgatgaagaaggagttcaggaggatggcaaaagctgttgaaaaccaggtggccaaaaattactacaggcctgatctcaagaaggctgcccttgcaaggttgagtgctgttcacagaagcctcaaagttgccaagtctggtgtcaagaagaggaatagacagggcgtgag

SEQ ID NO: 7493 - DNA, 393 bp, Glycine max
tccttcgcctttctctctcttcttttaactctctctctgtctctctctacgctttctggtgcgagatccctcaagggatccactaactgaaggagaaatggggttgacattcaccaagcttttcagccggcttttcgccaagaaggaaatgcgaattctgatggtgggtctcgatgcagctggtaagaccaccatcctgtacaagctcaaacttggagagatcgttaccacaattcccaccattgggttcaatgtggagactgtggaatacaagaacattagtttcactgtctgggatgttggtggccaggacaagattcgtcccttgtggaggcactacttccaaaacacacagggtctcatttttgtggttgacagcaacgacagggacag

SEQ ID NO: 7494 - DNA, 426 bp, Glycine max
gtttaaacctaattctaatttcttaatcggtcgattcttctcctcctaaagatgcagagctgcgtgaaaactttgaccggtaagaccatcacccttgaggtggagtcctccgacaccatcgataacgtgaaagctaagattcaagacaaggaagggatcccacctgaccagcagagacttatctttgcgggtaaacagcttgaggatggtcgaacccttgccgactacaacatccaaaaggaatccactctccacctcgtgcttcgcctcaggggtggcatgcaaatctttgtcaagactttgactggcaagaccatcaccctcgaggtcgaatcctcggacaccattgataatgtcaaggccaagatccaggacaaggagggtatccctccagatcagcagaggttgatatttgctggtaaacaa

SEQ ID NO: 7495 - DNA, 430 bp, Glycine max
gtttctctctttccgcggcgtagatctgagcagtttgggaaaccctaactgctctcacgactctctttgctttttttcctctccgatcaacgacctctttcgtcgccctaagtcatggcaggacttgcacccgagggatcacagtttgatgctcgtcaatatgataccaagatgaatgagttgcttacatctgatggacaggattttttcacatcttatgatgaggtttatgacagttttgatgctatgggcttgcaggagaatctcctgagaggcatttatgcatatggttttgagaagccatcagctattcagcagagaggaatagttcctttctgcaagggacttgatgttatacaacaggcccagtctggaactgggaagacagcaactctctgctctggaattctgcagcaacttgactatagtg

SEQ ID NO: 7496 - DNA, 352 bp, Glycine max
gttactctctttccgcggcgtatatctgagcattttgggaaaccctaactgctctcaccactgtctttgctttttttcgtctccgatcaactacctttttcgtcgccctaagtcatggcaggacttgcaccctagggatcacagtttgatgctcgtcaatatgataccaatatgaatgagttgcttacatctaatggacagtattatttcacatcttatgatgaggtttatgacaactttgatgctatggccttgcacgagaaattactgagacgcatctatgcatatggttccgagatgccatcaactattcatcatatactgatagttatcttctgaccggtacttcttg

SEQ ID NO: 7497 - DNA, 407 bp, Glycine max
cgtcacgcgttcgccaacgcgtccgcttcaattctcccttctggactacaaattctggtgctgctgtttggaacaacaactcctctttaaccgttggagctagaggtccaattctgcttgaggattatcatcttgtggagaagcttgcaaactttgacagggaacgtatcccagaacgtgttgtccatgccaggggagctagtgcaaagggtttctttgaggtcacacatgacatttctcacctgacatgtgcagatttccttcgagcccctggagttcagacgcctgtaattgttcgtttctcaactgtcattcatgagcgtggtagccctgaaaccttgagggaccctcgaggttttgccgtgaagttttacaccagagagggtaactttgaccttgttggaaac

SEQ ID NO: 7498 - DNA, 434 bp, Glycine max
ctgtgaaggagcagaggagtattattcccgcgccatacttgcagacccggatgacggagaagttctatcacagtatgggaagttagtttgggagctacatcatgaccaagaacgtgcctccagctattttgaaagagcagtccaagcctctcctgaagacagccatgtacaagcagcatatgctagtttcctttgggacacggaggaagacgaggatggtagcaacgaaccacaatgtttgccgccacattctcttcaaggagctatagctactgcaggtgcttgaattggtggtgaagtttgtacgtgcaagagagtgtctcatgatgtaaacaagttcttatattgaagccaatgttgtagctgttgagaaagcagtaaataactgaatgcataaactcatgtgtagtaacactaagacaggcgaccaccct

SEQ ID NO: 7499 - DNA, 430 bp, Glycine max
gaaaaaataaaaatcaaagagcataatgtcagggatcattcacaagattggggagacccttcatgtgggagggcacaagaaggaggaggagcataagggtgagcaccatgctggagaatacaaaggggagcaccatggtgaacacagtagtgagtacaaaggagagcatcatggtgaacacaaagctggagagtaccatggtgagcacaagccagagcacaaagaggggttcctagacaaagtcaaggacaagatccatggtgagggcggcgccgccgagggcgagaagaagaagaaggagaagaagaagaaggagcatggccatgagcatggccatgacagcagcagcagcagtgacagtgattaaactgctgcatcacctatatatttaaaaggtttatgggaccatagtagcgagggctgtgcctta

SEQ ID NO: 7500 - DNA, 350 bp, Glycine max
gcgaagaagaagctcagaggcttcatcgctgagaagagatgcgctcctctaatgctccgtttggcatggcactctgctggaacttacgacgtgagctcgaagaccggtggtcccttcggaaccataaagcacccctccgaactcgctcacggcgctaacaacggtcttgacatcgctgttaggcttttggagccactcaaagcggagtttcctattttgagctacgccgatttctaccagttggctggcgttgttgccgttgaggtcaccggtggacctgaagttcccttccatcctggaagagaggacaaacctgagccaccaccagagggtcgcttgcccgatgccac

SEQ ID NO: 7501 - DNA, 415 bp, Glycine max
tcttcatctttcttcttctcgtttttactttgacggtttctagagagagaaagttggttgtagagagagaaagcgcgctgctgcttcttctgctgctgcttcgacagtgagaagagagagagaagcgctcttctccgtaccgtttctagagagagaaactgatggccggagttaatccgaacggcgtcgccgattttccggcgactccaacgcacggcggacagttcattcagtacaacatattcggaaacctcttcgaggttacggcgaagtaccgtcctccgatcatgcctgtcggacgcggcgcgtatggaatcgtttgctcgctgttgaataccgagacgaatgagctggtggcggttaagaagatagcgaacgctttcgacaatcacatggacgctaagcgtacgcttcg

SEQ ID NO: 7502 - DNA, 405 bp, Glycine max
  modified_base (381)..(381): a, c, g, t, unknown, or other
cccacgcgtccgcccacgcgtccggtttcttttcgtgaaacaaaagaaaacaaaggatgaggttttgtgatgtcgggcatggagaggcttcagaggatgttcgcgggtgcaggtggagcgctgggccatcccccaccggattcccccaccctcgattcctccgagcaggtctacatctcctccctcgcccttctcaaaatgctcaaacacggaagagctggggtacccatggaagtgatgggtctgatgttgggggagttcgtggatgagtacaccgttcgcgttgtggatgtgtatgcgatgcctcagagtgggaccggtgttagcgttgaagctgttgatcatgtttttcagactaatatgcttgatatgttgaagcanactggaaggccggagatggttgtg

SEQ ID NO: 7503 - DNA, 405 bp, Glycine max
atttttgtgaattgtctttatcctgtaagtcaattacctccagaagctgtcgttgttaatgttacatgtggtagtggacgtggtggtttacccaccactgtttggattagttctgcagttaacaatcgctcctcagatatcaacaaaaagattcgcacagcacttgggaaaggtaagaaaattgtttttcttactagagttgatccttttccagtagctttattggctgttctttttggcgttaagaatgaaattctgagttctaacgccactaaccctatgctgacgcgacttcttgagaactgtaagagtctcaaatatctggttgatgagtgtccttttgcatttgtgaactagtatgtaatattttattcacttaaataaagcgcattactatgtgcaatg

SEQ ID NO: 7504 - DNA, 247 bp, Glycine max
cccacgcgtccgcccacgcgtccgacactagagtgttggagcattctattgctagctaataatgggcttaataataatggtgagaaagaaaagaatggccaaggtaataaaattctttgagttgaacacaagggccaagattccttctggtgggttaggcacttggcaagctgagcctggtgttgtagccaaagctgtcaccacagacattctggttggatacacgcatattgattgtgctcaaacg

SEQ ID NO: 7505 - DNA, 339 bp, Glycine max
agcacatcgagggagcaactaaatacctgctctctaagattaaagatttccaatggtttgttggtgagagcatgggtgatgatgcttgcttggtctttgcctactacaaggacggcgctgctgatccaacattcctgtactttgcatatgccttaaaggaggtcaagtgctaagtgacttaatgtaccgagctatctactcattttatctagtttttttttacgttctgtcctaagttacttgaaactttgacctggtattttgattttaatggtgagacgtgtgctactgctacatcataattcccatcaaatttaattatcgatgggttagaatttc

SEQ ID NO: 7506 - DNA, 407 bp, Glycine max
  modified_base (391)..(391): a, c, g, t, unknown, or other
cttcttctcttgcggctagggttttagcgcagcttcttctagatttaaggaagatgggtaaggaaaaggttcacatcagtattgtggtcattggccatgtcgactctgggaaatccactaccactggtcacctgatttacaagcttggaggcattgacaagcgtgttattgagaggtttgagaaggaagctgctgagatgaacaagaggtctttcaagtatgcctgggtgctggacaaacttaaggctgagcgtgaaagaggaatcaccattgatattgctttgtggaagtttgaaacaacaaagtattattgcacagttattgatgcgcctggacataaggatttcattaagaatatgattactgggacatcccaagctgactgtgctgntcttatcattgattcg

SEQ ID NO: 7507 - DNA, 421 bp, Glycine max
  modified_base (399)..(399): a, c, g, t, unknown, or other
cttccattccgttctacatataatcattcataatgggtgttttcacattcgaggatgaaatcaactcccctgtggctcctgctactctttacaaggccctagttacagatgccgacaacgtcatcccaaaggctcttgattccttcaagagtgttgaaaacgttgagggaaatggtggcccaggaaccatcaagaagatcactttccttgaggatggagaaaccaagtttgtgctgcacaaaatagaaagcattgatgaggcgaacttgggatacagctacagcgtggttgggggtgctgcattgccagacacggcggagaagatcacattcgactccaaattggttgctggtcccaatggagggtctgctgggaagctcactgtcaaatacgaaacanaaggagatgctgagcccaacca

SEQ ID NO: 7508 - DNA, 449 bp, Glycine max
  modified_base (269)..(269): a, c, g, t, unknown, or other
  modified_base (275)..(275): a, c, g, t, unknown, or other
cccacgcgtccgcacagttggaaaaaaaaaaaaagttgttcgagatggcacgtacgaagcaaactgctcgtaagtccacaggaggaaaggcacctaggaagcagctcgcaaccaaggctgcacgtaagtctgcaccaactactggtggtgtgaagaagccacatcgttatcgtcctggtaccgttgctcttcgtgagattaggaaataccagaagagtaccgagcttttgatcaggaagctccccttccagaggctggttcgtgaaatngctcangacttcaagactgatctgcgtttccagagccatgctgtgcttgcattggcagaagctgctgaggcataccttgttggactctttgaggatactaatctgtgtgccattcacgcttagcgtgtaactattatgcccaaagatatccagctggcaagaaagattcgtggtgagcgt

SEQ ID NO: 7509 - DNA, 431 bp, Glycine max
  modified_base (415)..(415): a, c, g, t, unknown, or other
cacaaactagtaaatagtaatattattcttcgaatccattttattattcataatgggtgttttcacatttgaggatgaaaccacctcccctgtggctcctgctaccctttacaaagctctagttacagatgccgacaacgtcatcccaaaggctgttgatgccttcaggagtgttgaaaaccttgaggggaacggtggccctggaaccatcaagaagatcactttcgttgaggatggaaaaagcaagtttgtgttgcacaaaatagaatcagttgatgaagcaaacttgggatacagctatagcgtaattggtggaattgggttgccagacacagtggagaagatcacattcgaatgcaaattggctgctggtgccaacggagggtctgctgggaagctaactgtcaaataccanaccaaaggagatgctc

SEQ ID NO: 7510 - DNA, 366 bp, Glycine max
caagtattggcgtggcggctatggtggcggctatggtggtggttatggaggtgggcggggaggctatggaggtgggcgtggaggctatggagggggacgtggtggatatggcggcggacgaggtggctatggtggcgggcgtggtggctatggcggcgggcgtggtggcgggcgtggtggctatggtcctaatgtacataacgaggctggggttgatgctaacccttacaactaagaaagcgactttctaaagcttatatatgggtttaagttatcgcaatagatataattttatgtgaaggttagtagtaatattagtggaaaactttgtagaggtttaatactgtattttgaattttcttaaaa

SEQ ID NO: 7511 - DNA, 433 bp, Glycine max
ggagaaaccaagtttgtgctgcacaaaatagaaagcattgatgaggcgaacttgggatacagctacagcgtggttgggggtgctgcattgccagacacggcggagaagatcacattcgactccaaattggttgctggtcccaatggagggtctgctgggaagctcactgtcaaatacgaaacaaaaggagatgctgagcccaaccaagacgaactcaaaactggaaaagccaaggctgatgctctcttcaaggccattgaggcttaccttttggcccatcccgattacaactaatcctcttcaacttacttgtcatcactttcttgcttggagacttatccaatcactctgttctcaacttaagttgccttccaatgtatccagtctttcctttcttctttccttttcccatataattgtgagacttatgata

SEQ ID NO: 7512 - DNA, 424 bp, Glycine max
  modified_base (379)..(379): a, c, g, t, unknown, or other
cttccattcataatgggtgttttcacattcgaggatgaaatcaactcccctgtggctcgtgctactctttacaaggccctagttacagatgccgacaacgtcatcccaaaggctcttgattccttcaagagtgttgaaaacgttgagggaaatggtggcccaggaaccatcaagaagatcactttccttgaggatggagaaaccaagtttgtgctgcacaaaatagaaagcattgatgaggcgaacttgggatacagctacagcgtggttgggggtgctgcattgccagacaccgcggagaagatcacattcgactccaaattggttgctggtcccaatggagggtctgctgggaagctcactgtcaaatacgaaacanaaggagatgctgagcccaaccaagacgaactcaaaactggaaaag

SEQ ID NO: 7513 - DNA, 377 bp, Glycine max
aagaactttcttataaccaaaaccaacaacaactatggcaagttatcagaagcactacgatgatcacggtcgcaaggtcgacgagtatggcaatgttgagaggcaaactgactaatatggcaacccggttcatgccactagtgtcacttatgtagccaccaaaagtgttggtggctacaatgatgacgctaataagcaacatgatattactggtgtctatcccgagaaagacaccggtagacatcattctggtcgtggttacgacggtgacactaacatgcaccatgatgctactggtgtctatcccggaatagacattggtagagatcatgggactaccggtgtttatggcctatacaccgacagacatcatggaa

SEQ ID NO: 7514 - DNA, 446 bp, Glycine max
  modified_base (313)..(313): a, c, g, t, unknown, or other
  modified_base (412)..(412): a, c, g, t, unknown, or other
  modified_base (418)..(418): a, c, g, t, unknown, or other
cccacgcgtccgcttctctctctctttttcgcctcattccattttcatctatcaatggctccagtagcagcagcatcttcagattcaatcaagccaagagatgtttgcatcgttggtgttgcacgtacaccaatgggtggatttcttggtactctgtcatctctatctgccaccaagctaggctctatagctattgaagctgctcttaaaagggccaatgttgatccatcccttgtggaagaagtattttttgggaatgttcttagtgctaatttggggcaagctcctgcaagacaagctgctcttggagcangaatatccaattcagttatctgcactaccgttaacaaaagttgtgcatcaggaatgaaagctgcaatgcttgctgcacagagtattcaattaggcacanatgatngtgttgtggctggtggtatggaaagcat

SEQ ID NO: 7515 - DNA, 438 bp, Glycine max
gaagcgtgagatatatgatcagtatggtgaagatgcgcttaaggaaggaatgggtggtggcggtggccatgatccatttgatatcttttcatctttctttggcggtgggagtccctttggatcaggtggaagtagtcgaggtaggaggcagaggcgcggagaagacgtggttcaccctctcaaggtctctttggaggacctttatcttggaacttccaagaagctctccctctccagaaatgttatatgctccaagtgcagtgggtaagtgaattcggagtttggtttggttttgattggtgattagtttttcaagggaagaaatgcttttttagtttttaaagtatgatattgattaatttgatgtagcatggtcctaaattgtggtggcagcctttgttgcaattcttgatattactgggaatttcaaacaaatgt

SEQ ID NO: 7516 - DNA, 430 bp, Glycine max
tgatatcccagttattccagtagagcctaaaactgtctctgtgcaacctttatttggtgcaggtccagaagggagtggtgaggcaaagctgaaggatggaccaaaacgctgcagcagctgcaacaagcgagttggtttgacagggtttaattgtcgatgtggtgaccttttttgtgctgtacatcgctactcagacaagcataattgcccatttgattaccgcactgctgctcgggatgccatagctaaagcaaacccagttgtcaaggctgagaagcttgataagatctaagatttgaagtcaaagtttcatggcctgagatgaagttatgcataatttcatcatgaaatgatccgagtttccttcacattttatttggtgttcttattatattgttatatgtggtgggtgacttggagttattggaca

SEQ ID NO: 7517 - DNA, 401 bp, Glycine max
gctgttaaggatttgaagcgtggttatgttgcctcaaactcaaaggatgaccctgcagaggaggctgctaacttcacagcccaagtcatcatcatgaaccaccctggtcagattggaaatggctatgcccctgtcctcgactgccacacttctcacattgctgtcaagtttgctgaactcatgaccaagattgacaggcgatccggcaaagagcttgagaaggagcccaagtttttgaagaacggtgatgctggttttgttaagatgattccaaccaaacccatggttgttgaaactttctccgagtatcctccacttggtaggtttgctgttagggacatgcgtcaaactgttgctgtgggagtcatcaagaacgttgagaagaaggatcctaccggagc

SEQ ID NO: 7518 - DNA, 433 bp, Glycine max
tttcaatccccagtttcttcttcaacgtcctcttacgagcagatcccaattctccttcccagtttcaaaccctaattccctcattcccatggcctcagaagagcccactgtcgcggtggaacccgctcccgaacctgccaccgccgagcctcccccggaggagaaggaggagcccaaacctgaagccaaggctaagaaaaccaaggaacccaaacctaaaaaggtttccagaccacgcaaccctcccactcatccttcctacgaggagatgattaaagacgcaattacctcgctgaaggagaaaaccggttcgagccaacacgcgattgcgaagttcatcgaggagaagcacaagcagcttccaccgaacttcaggaagcttcttctctaccatttgaagaaacttgtagccgctggaaaactcgtcaaagtc

SEQ ID NO: 7519 - DNA, 376 bp, Glycine max
cccacgcgtccgcccacgcgtccggaagaggtggtgtgaagagaatcagtggtttgatgtacgaggaaaccaggggggttctgaagattttcttggagaacgtgattcgagatgctgtgacctacaccgagcacgctaggaggaagacggtgactgccatggatgtggtttatgcgctcaagaggcagggaaggaccctctacggttttggaggctaaagaatttaacccttcttttctgggttgcaggataagacattggttcttttgaatttgcgtggtgttttagtttaggtttgttatgtatcatacgaatctctggtttgcatagaaaatatttcatttgaaatttaaatggagtatcggttctgttaggc

SEQ ID NO: 7520 - DNA, 430 bp, Glycine max
gttagttcacacactaagttctgaaaaatgagttccaaagtttttcttattctacttatgttcatggccactatacttttgatctcctctgaggttgcacccgatgatgcataccagaattttgacaaaacagatgggaagcgtagtgcaaatggggtagatgaaagcaaatattggcgtggtggctatggcgactatggtggttggcgtggtggtggttggcgtggtggctatggaggctggcgtggtggctatggtggtgggcgtggtggctatggtggctggcgtggtggctatggtggtgggcgtggtggctacggaggttggggtggtggctttggccctaacgaacataatgaggctgggattgatgctagccctcacaactaagaaggaaacttgctaaagcttatataggatttaagttatc

SEQ ID NO: 7521 - DNA, 393 bp, Glycine max
cagaaagaaaagaccatcaaagtttcacttcagccttatccggtttagggtttcgggtgttgacccaacctttgacgtatcgaaaccttaagtttcggatcaggtctgagcaatctggttggtagaacctttggtcttagagagtcaagttttatgtctgaattagacgatcaaattcctactgccttcgatccttttgctgatgcaaatgctgatgactcgggtgctgggtcaaaggagtatgtgcatattcgcgtacagcagcgaaatggaaggaaaagcctgacaaccgttcagggattgaaaaaagaattcagctataacaagatacttaaagatgttaagaaagagttctgttgcaatggaacagttgttcaggacccagaactagga

SEQ ID NO: 7522 - DNA, 366 bp, Glycine max
  modified_base (302)..(302): a, c, g, t, unknown, or other
agaaaacctaagcttagaattagaaacaaagaaaagaagaaaggaaagaattgatcgttgaaaatgcagggaggaaagaaagcgggagagtccattaaggaaacagctacaaacattggtgcttctgccaaggctggcatggagaagaccaaggccactgtccaagagaaggcagaaagaatgacagcacgtgatccggtgcaaaaggagttggcaacccaaaagaaagaggcaaagatgaaccaggcggagctggacaagcaggcggcgcgtcagcataacacggcggccaaacagtccgncaccacggctgggcacatgggacatggccaccacaccaccggaaccgggactggaaaccgcacg

SEQ ID NO: 7523 - DNA, 323 bp, Glycine max
acgcgtctattagttcatactaagttctgaaaatgagttccaaggttttgcttgttctacttatggtcttggccactatacttctgatctcctctgaggttgcacccgatgatgcatacgagaattttgacaaaatagatgggaagcctagtgcagatggggtagatgaaagcaagtattggcgtggcggctatggtggcggctatggtggtggttatggaggtgggcgtggaggctatggaggtgggcgtggaggctatggaaggggacgtggtggatatggcggctgacgatgtggctatggtggcgggcgtggtggctat

SEQ ID NO: 7524 - DNA, 300 bp, Glycine max
cggacgcgtgggcgccaataggttatcaacgaccgtgagactggaaggtccagaggattcggatttgtgaccttcgcctcagagcagtcaatgaaagatgcgatcgcaggaatgaacggccaggaccttgacggtcgtaacatcactgtcaacgaagctcagacccgcgccagccgtggtggtggtggaggcggtggtttcggaagtggtggtggatacaaccgcggtagcggtggatatggtggtggtggtggcggcggcggataccgtggtcgtcgtgaaggtggataccaccgtaat

SEQ ID NO: 7525 - DNA, 399 bp, Glycine max
cccacgcgtccggttagttcacacactaagttctgaaaaatgagttccaaagtttttgttattctacttatgttcatggccactatacttttgatctcctctgaggttgcacccgatgatgcataccagaattttgacaaaacagatgggaagcgtagtgcaaatggggtagatgaaagcaaatattggcgtggtggctatggcgactatggtggttggcgtggtggtggttggcgtggtggctatggaggctggcgtggtggctatggtggtgggcgtggtggctatggtggctggcgtggtggctatggtggtgggcgtggtggctacggaggttggggtggtggctttggccctaacgaacataatgaggctgggattgatgctagccctcacaac

SEQ ID NO: 7526 - DNA, 430 bp, Glycine max
cgataacgtgaaggcaaagatacaggacaaagaggggattccaccagaccagcagaggcttatctttgctgggaagcagctggaagatggtcgtactcttgctgattataatatccagaaggagtccactctgcatttggtgttgaggcttcgtggaggtatgcagatatttgtgaagactctgacagggaagaccattaccttggaggtggaaagctctgatactattgacaatgtgaaagctaagattcaggacaaggaaagtatccctccagatcagcagaagctcatttttgctgggaagcaattggaaaatggtcgtaccttggcagattacaatattcagaaagaatccactttgcatcttgtccttcgccttcgtggtggttgctaaggggaatcccttttatgaagtgttctcatatgtctt

SEQ ID NO: 7527 - DNA, 423 bp, Glycine max
cctaagtctttgggaatagtgctgcaatggcttcaagtcaggaggaggtgacccttttgggagctactggaagcccatttgtgtgcagggttcatattgccctcaagttgaagggagttcaatacaaatatgtcgaagaaaatttgaggaacaagagtgaactgcttctcaaatccaacccagttcacaagaaggttccagtgtttattcacaatgagaagcccatagcagagtctcttgtgattgttgaatacattgatgagacatggaagaacaaccccatcttgccttctgatccttaccaaagagccttggctcgtttctggtccaaattcattgatgataaggtttttggtgctgcatggaaatccgttttcacagctgatgagaaagagcgtgagaagaatgttgaggaagcaattg

SEQ ID NO: 7528 - DNA, 418 bp, Glycine max
attattctttcgcaccttcgaaaatcaattttctgtcttctctgcgtctgcttcctgtatcaatcgttttccatggctcgtaccaagcaaaccgctcgcaaatccaccggtggaaaggctcctaggaagcaactcgccaccaaggctgcaaggaaatctgcaccgacaaccggtggagtcaagaagcctcatcgctatcgccctggaactgttgctcttcgtgagatccgaaaataccaaaagagcacagagcttctgatccgcaagctccccttccagcgtcttgttcgtgaaattgcgcaagacttcaagaccgatttgaggttccagagtcacgctgttcttgcgcttcaggaagctgcggaggcttacttggtgggtttgtttgaggacaccaacttgtgtgcgattcacgcca

SEQ ID NO: 7529 - DNA, 435 bp, Glycine max
aatagatttcgtcagtgttgaaatcacgagaaattcatggctgctccaccggcaagagctcgtgcggattacgattatctcataaaacttctcttgattggcgatagtggtgtcggaaagagttgccttcttctacgattctctgatggttctttcacaactagtttcatcacaactataggcattgattttaagataagaaccattgagcaggatggaaaacggatcaagctccaaatttgggatactgcaggtcaggagcggttccgaacaattacaaccgcttactatcgtggtgctatgggcatattgctagtctatgacgttacagacgaatcttcatttaacaatatcaggaattggattcgtaacattgagcagcatgcttcagacaatgttaacaaagtactggtggggaacaaagctgacatggat

SEQ ID NO: 7530 - DNA, 350 bp, Glycine max
ttttgctttaccaaattccattttccaattcaaaaccctaactccgttcgaagcaccaaatcgtgatggcaccaaaggcagagaagaagccagcagagaagaagcctgtggaggagaagaaatcgacggtgggagacaaggctccggcggagaagaagccaaaggccggaaagaagcttccgaaggagggaggcgccggcggagaaggtaagaagaagaagagaaacaagaagagcgtggagacatacaagatctacatcttcaaggttctgaagcaggttcaccctgacattggtatctcaagcaaggccatgggaatcatgaacagcttcatcaacgacatcttcgag

SEQ ID NO: 7531 - DNA, 366 bp, Glycine max
ggaagctaactgtcaaataccaaaccaaaggagatgctcagcccaacccagacgacctcaaaattggcaaagtcaagtctgatgctcttttcaaggccgttgaggcctaccttttggccaatcctcattacaactgatccaattcgatcttcagtattcagtgatctgcaaagaccttgttttatattatatacaagagttttcttgccttgtgtggagtgttattcaatcactttgagtgtgtggtgtggcttccaattgatgtaacgagtgtttcctttcttatttcctttttccacagaattgtgagagccagttgatgtctttgtatgtcacttcatcaataaatcaatatgttataataat

SEQ ID NO: 7532 - DNA, 426 bp, Glycine max
  modified_base (287)..(287): a, c, g, t, unknown, or other
  modified_base (403)..(403): a, c, g, t, unknown, or other
tacggaggagaatccacttcgctcaatcttattcagctttggaagagattcaggggagatgacaagcctcctccacatttgggcgctagcagggactacaacatcgatatgaaccccaagtttattatggctaatggcaatttggtgcgggttctcatacataccgatgttactaagtatctctatttcaaagctgtggatgggagctatgtgtttaataaaggaaaggttcataaggtgcctgcaaacgacatggaggccttgaagtccccacttatggggctatntgaaaaacgccgggcaccgcagtttttcaattatgtgcaaaactacaacgagagcgatcccaagacccacgaggggatggacttgacaagagtgtctactaaagagttgatagcanaatacggccttgatgataacact

SEQ ID NO: 7533 - DNA, 439 bp, Glycine max
caagtgtttttaacaaacagcaacagtacagagcattttgatgcatgtaagtggacaaaatcggaaccacattcctgggaattgatcttcccaatagaggtatgtggtcctaataatggttttgaaatgtggagttctgagtgggcaaatcaaacttcatggcatttgagtttccttattgacaatcccaaacagtctacagtttttgatattctcttgggaatttctcaagattttgaaattgctggtaatactcttatgccagctttttctgttccacaggctactgccagatcttctgaaaatgcggaatcctctgcatgatctggaatttgagtcttctttcgctagttcgtttgtttaattcaataaaggaaattaggcatgaccctctggttgagtatgctctgactatttgaaaatttccacacctatttta

SEQ ID NO: 7534 - DNA, 448 bp, Glycine max
ctcagaatttctatctatctcttgtttcaatttcaacaacggttactcctttttcgttgtgagtttcaatcaagccatcatcatgtctaccgcatcgcaacccaaggccaagaaaacggcgtcgtccaagaagcccctctcccaccctcccttcgccgtgatgatagcagaggcgattgcgagtctgaaagagagaaccggttcgagccaatacgcgataaccaaatacatcgaagggaagcacaaggagttgcctgcaacctacaagaagcttgtcctcgttcatctcaagaaatctgttgctgctggcaagcttgttaaggtgaaaaactcctttaagctcgcaccgactaagcctgctccggttaaggccgctgctcccaaaaagccaaccaaagctgccactaagcccgctttcaagcccaaagctgctactcctaagaaaaag

SEQ ID NO: 7535 - DNA, 307 bp, Glycine max
  modified_base (56)..(56): a, c, g, t, unknown, or other
  modified_base (77)..(77): a, c, g, t, unknown, or other
cggacgcgtgggtccgaactcgctcacggcgctaacaacggtcttgacatcgctgntaggcttttggagccactcanagcggagtttcctattttgagctacgccgatttctaccagttggctggcgttgttgccgttgaggtcaccggtggacctgaagttcccttccatcctggaagagaggacaaacctgagccaccaccagagggtcgcttgcccgatgccactaagggttctgaccatttgaaagatgtgtttggcaaagctatggggcttagtgaccgagatatcgttgctctgtctgggg

SEQ ID NO: 7536 - DNA, 382 bp, Glycine max
gttagttcacacactaagttctgaaaaatgagttccaaagtttttcttattctactgatgtgcatggccactatacttttgatctcctctgaggttgcacccgatgatgcataccagaattttgacaaaacagatgggaagcgtagtgcaaatggggtagatgaaagcaaatattggcgtggtggctatggcgactatggtggttggcgtggtggtggttggcgtggtggctatggaggctggcgtggtggctatggtggtgggcgtggtggctatggtggctggcgtggtggctatggtggcgggcgtggtggctacggaggttgcggtggtggctttggacctaacgaacataatgaggctgggattgatgctagccctt

SEQ ID NO: 7537 - DNA, 387 bp, Glycine max
ccgggttgaaccaagccttcggccaagccgtccgttcaaatccgactgaccgaagaaaatattagggtttttgagtgcggtgcggcaatcctagcactttcttttgcagctttcgccgacagcttaattcaccatggctgaccaaaccgagaaggcttttttgaaacaaccaaaagtgtttctaagctcgaaaaaaactgggaagggaaagagacccggaaagggtgggaaccgtttttggaaatccattgggcttggatttaagactcccagggaagccatcgaaagaacctacattgacaagaagtgccccttcactggcaatgtttccatccgtggccgtatcttggctggaacatgtcacagtgctaagatgaacaggactat

SEQ ID NO: 7538 - DNA, 416 bp, Glycine max
  modified_base (376)..(376): a, c, g, t, unknown, or other
ctcgcggcttctttctccaagattaagtttcagtagtaatgggtaaggaaaaggttcacattaacatcgtggtcattggccatgtcgactctgggaagtcaaccaccaccggtcaccttatctacaagctcggaggtattgacaagcgtgtcatcgagagattcgagaaggaagctgctgagatgaataagaggtctttcaagtatgcctgggtgcttgacaagctcaaggctgagcgtgaaagaggaatcaccattgatattgctctgtggaagtttgagaccacaaagtactactgcacagtcattgatgcccctggacatagggatttcatcaagaacatgattactggaacatcccaagctgactgtgctgntcttattattgattccaccactggtggttttgaagctggt

SEQ ID NO: 7539 - DNA, 431 bp, Glycine max
gtccagactctcattgttgatatagagcctgatgttaatgtcaagagagcaatgaacgagattaacgcagctgctagattgaggttggctgcaaatgagaaggctgaagcagaaaaaatactgcagatcaaaaaagctgaaggagaagcagaatccaaatatctgtcaagactcggtatcgctcggcaacgtcaagccattgtggatggactgaaggacagtgtgcttgctttctctgagaacgtgcctgggacaacagctaaagatgtcatggacatggtgctggtgactcaatactttgacaccatgaaagagattggagcatcttcaaagtcctcatctgttttcataccacatggtcctggcgcaattaaggacattgccatgcagattcgggatggtctgcttcaggccaccacttcacagaatta

SEQ ID NO: 7540 - DNA, 398 bp, Glycine max
  modified_base (70)..(70): a, c, g, t, unknown, or other
  modified_base (225)..(225): a, c, g, t, unknown, or other
gcatcgctcacctttccctttgcgacgccgtgagaaacgaaagcaaacagaaaaaaaaggacagagtggngtgggaggcacacgcacaaacgcagagtcagaatctccattctccaatcggagacaaagcgagctcgaacgaacgaagtagagtagtgtgctacggaaaatgtggcggtgcattgctcgtggactccgtggacctgctttcaccagatccacctncaatcactcacttggatctcacttttatagattcttctctagtggggcgaactcttcgtacaccgtggtggatcatacttatgatgctgttgtcgttggtgctggtggcgcgggattgagagctgctattggactttcagaacatgggttcaatactgcttgtattaccaagc

SEQ ID NO: 7541 - DNA, 385 bp, Glycine max
gtgaaatgatttgaagcttttaagttgcaatttgaattgtgatgagctgagctgcacagaggaggcatcgcaccgagttaaaaagtactgtctcgaccaggagagaacagcacagcctcttaaaaagcttaccgatctgacagcagctctagctcttaagtgaggaggaaagagaagatggagagaaaaggaagaagaagaagaaggaaaagaaagggctgaaagagaagatcgaggagaaaatagagggtgatcatcatcatcacaaggatgaggacacaagtgtccctgttgagaaagttgaggttgttgaaacagcacatgctgaggaaaagaaagggttcctcgacaagattaaggagaagctaccagggcacaagaagac

SEQ ID NO: 7542 - DNA, 346 bp, Glycine max
gtgaaagccaagattcaagataaggagggtatccccccagaccagcagaggcttatctgtgctggtaaacagcttgaagatggacgaacccttgcagattataacatccagaaggaatctaccctgcacttggttttgaggcttcgtggtggcatgcaaatctttgttaagactttgaccggaaaaacaataactttagaagttgaaagttctgataccatcgataacgtgaaggcaaagatacaggacaaagaggggattccaccagaccagcagaggcttatctttgctgggaagcagctggaagatggtcgtactcttgctgattataatatccagaaagagt

SEQ ID NO: 7543 - DNA, 435 bp, Glycine max
ggttgtcaaggaactggtatgaaggtttctataagacatcttggcccgtccatgattcagcagatgcagcatgcttgcaatgaatgcaagggtactggagaaaccatcaacgacagagatcgctgcccacagtgcaagggagaaaaggttgtgcaggagaaaaaagtccttgaagttattgtggaaaagggaatgcagaacgggcagaagattacattccctggcgaagctgatgaagcgccagacacaattactggggatattgtctttgtccttcagcagaaggaacatcccaaattcaaaagaaaggctgaagatctttttgtagagcacattttgtcccttactgaagccttatgtggcttccaatttgtgctgactcacttggatggccgtcagcttcttattaaatcaaatcctggggaagttgtcaag

SEQ ID NO: 7544 - DNA, 426 bp, Glycine max
cacagcagcaaacatctccttctcaaactagtaatatatactattattcatccattccattctatatatttcataatgggtgttttcacattcgaggatgaaaccacctctcctgtggctcctgctaccctttacaaagctctagttacggatgctgacaacgtcatcccaaaggctgttgacgccttcaggagtgttgaaaacgttgagggaaatggtggccccggaaccatcaagaagatcactttccttgaggatggagaaaccaagtttgtgttgcacaaaatagaagcgattgatgaggctaacttgggatatagctatagcgtagttgggggaaaatggttgccagacacagtggagaagatcacattcgaatgcaaattggctgctggcgccaacggagggtctgctgggaagctaact

SEQ ID NO: 7545 - DNA, 420 bp, Glycine max
caacttttgcttgtccttttgcttgcgaatctgaatcaaataatcaatcatgcattcattattcatcatgtcgtcggcgaagaaaatcacgctgaagagttcggacggcgaggctttcgaggtggaggaggcggtggcgctggagtcgcagacgataaagcacatgatcgaggacgactgcgccgacagcggcatccctctgccgaacgtgacgagcaagatcctggcgaaggttatcgagtactgcaagaagcacgtcgaggccgcgaatcccgaagacaaaccctccgaggacgatctcaaggcctgggacgctgaattcgtcaaggtcgaccaggccacgctcttcgatctcatcctggctgctaactacttgaacatcaagagcctgctggaccttacatgtcaaactgtagccga

SEQ ID NO: 7546 - DNA, 399 bp, Glycine max
  modified_base (10)..(10): a, c, g, t, unknown, or other
cccacgcgtncggttagttcacacactaagttctgaaaaatgagttccaaagtttttctgattctacttatgttcatggccactatacttttgatctcctctgaggttgcacccgatgatgcataccagaattttgacaaaacagatgggaagcgtagtgcaaatggggtagatgaaagcaaatattggcgtggtggctatggcgactatggtggttggcgtggtggtggttggcgtggtggctatggaggctggcgtggtggctatggtggtgggcgtggtggctatggtggctggcgtggtggctatggtggtgggcgtggtggctacggaggttggggtggtggctttggccctaacgaacataatgaggctgggattgatgctagccctcacaac

SEQ ID NO: 7547 - DNA, 389 bp, Glycine max
caattcctaattgtttaaacctaattctcatttcttcatcgttcgattcttctccttctaaagatgcagatcgtcgtgaaaactttgaccggtaagaccatcacccttgaggtggagtcctccgacaccatcgataacgtgaaagctaagattcaagacaaggaagggatcccacctgaccagcagagacttatctttgcgggtaaacagcttgaggatggtcgaacccttgccgactacaacatccaaaaggaatccactctccacctcgtgctttgcctcaggggtggcatgcaaatctttgtcaagactttgactggcaagaccatcaccctcgaggtcgaatcctcggacaccattgataatgtcaaggccaagatccaggacaa

SEQ ID NO: 7548 - DNA, 357 bp, Glycine max
cccacgcgtccggcaaaattctcttccgtttcaggattagggtttcaccgttacagtgaaacatggcaaaaccaaagcgaatctctctgcgtatctttgcgctgctcctcttgatttccacctcttcgtttcagcttctccgcgcttccgatgacgccgatgatgatgcgatcttctatgattcgttcgacgaggattttgaagaccgttgggttgtgtctcagaaagatgagtacagtggtgtctggaaacatgccaagagtgagggacatgatgattatgggcttcttgtcagtgagaaagcaaggaaatatgctatagtaaaagaacttgatgaggccgtgagtctcaaggatg

SEQ ID NO: 7549 - DNA, 417 bp, Glycine max
  modified_base (317)..(317): a, c, g, t, unknown, or other
cccacgcgtccggaagtattattattcttccatttccattaaaaagaaaatatcataaatgggtattttcacattcgaggacgaaatcacctcccctgtggctcctgctactctttacaaagctctagttacagatgccgacaacatcatcccaaaggctcttgattccttcaagagtgttgaaaacgttgagggaaatggtggccctggaacaatcaagaagataactttcgttgaggatggagaaaccaagtttgtactgcacaagatagaagcagttgatgaggcaaacttgggatatagctacagcgtaatgngtggtgctgcgttgccagacacagcggagaagatcacattccactccaaattggctgctggtcccaatggaggctctgctggcaagctcactgtcgaata

SEQ ID NO: 7550 - DNA, 292 bp, Glycine max
  modified_base (166)..(166): a, c, g, t, unknown, or other
  modified_base (201)..(201): a, c, g, t, unknown, or other
aacacaacaaaaaagagaatgcaagtctggagtttgtgaaggtgattagtgcaaaagaacaagtggtttctggcaccttgtactatatcactttggaggcaaatgatggtgtgacgaaaaagggttatgaaactaaggtgttggagaaaccatggttgaacatcanagaggtcaggatttcaagcccatcactgttgctgntaatcctctttcggtgacggtctaacacatagctaggtaattgaagtgactagcttgggccgcagaagtataatatgtatgaactgaataa

SEQ ID NO: 7551 - DNA, 421 bp, Glycine max
tcggcgccactcgatgtttccatttgcctgcatgcctttggtattgtggggtgtgggtcgtttaatggtgtcaagtcttgcgaacgtgagggtgccttaatggtaatcgggatgtttttgttgcacggctccatgcttgcgcattcaacgtgtgacatgcatccttttcattggcaccttagccctcgtggcttaagtgcttaccattggttcctggggtgcctaactaccaaacggtattcgtgtggctagtcagacccattccattcaggcctctttgttggggacgcttgaggatttcaaagtcccacacgtgaaccacgttagtcgtccatcataacggctttctgtggcacacgtgtggtgattgttctcttcgatgcggtgcatgcagtgaacgtgggtggtctagtgcccccac

SEQ ID NO: 7552 - DNA, 452 bp, Glycine max
  modified_base (231)..(231): a, c, g, t, unknown, or other
  modified_base (267)..(267): a, c, g, t, unknown, or other
  modified_base (373)..(373): a, c, g, t, unknown, or other
cacccagaagaattgaatggccatggaaaatcaaaattttctagagtattgggttttgccactacttatgatgcttttgttgggtcattggatctctgttcaagctgccccttcaccctctctcatcactcaactccctggctttaacgccaatttcccatccaagcactattccgggtatataagtattgatggaaatgctgaaagtgggaagaacctgttctactactntgttagttcagaaagtagtccagagaaggacccagntgtgctatggctgaatggtgaccctgggtgctccagcttgaatggcttggttacgagcatggaccattcaaactttgaggcttgcaaattcaaaagggaatctacncactttgcatatcaatccttacagctggtctaaggtttccaacattatatatttggactcccctgctggtgttgggctc

SEQ ID NO: 7553 - DNA, 305 bp, Glycine max
  modified_base (274)..(274): a, c, g, t, unknown, or other
gcggtttcctttgttggtgttgctgggaactgttttcctggcatcagtttgtgtctcattaaaggtgagagaggatgagaataaccctttctacttgagaagctctaacagcttccaaactctctttgagaaccaaaacggtcgcattcgtctcctccagagattcaacaaacgctccccacaacttgagaaccttcgagactaccggattgtccagtttcagtcaaaacccaacacaatccttctcccccaccatgctgacgccgatttcctnctctttgtccttagcgggagagccatactta

SEQ ID NO: 7554 - DNA, 446 bp, Glycine max
cccacgcgtccggtgctacaatacaaacaatggcagctactcaggaagatgtgaagcttttgggtattgtgggaagcccatttgtgtgcagggtccagattgcccttaagttgaagggagttgaatacaaatttttggaagaaaatttgggcaacaagagtgatttgcttctcaaatacaaccctgttcacaagaaggttccagtgtttgttcacaatgagaagcccatagcagagtctcttgtgattgttgaatacattgatgagacatggaagaacaaccccatcttaccttctgatccttaccaaagagccttggctcgtttctggtccaaattcattgatgataagattgtgggtgctgtatggaaatctgttttcacggttgatgagaaagagcgtgagaagaatgttgaagaaacatatgaggctcttcagtttcttgag

SEQ ID NO: 7555 - DNA, 438 bp, Glycine max
cccacgcgtccgcatttgagagatgtgtttggcaaagctatggggcttagtgaccgagatatcgttgctctgtctgggggtcacactattggagctgcgcacaaggagcgttctggattcgagggtccctggacctctaatcctcttattttcgacaactcatacttcaaggagttgttgagtggtgagaaagaaggcctccttcagctaccttctgacaaggcacttttgtctgaccctgtgttccgccctcttgttgagaaatatgcatcggacgaagatgccttcttcgctgattacgctgaggctcaccaaaagctttctgagcttgggtttgctgaagcctaagcaacgttttggggattgttggagaggcacggtgcccataatatttctctcataaattctatggtcatggtttctaatgcgccactgtgg

SEQ ID NO: 7556 - DNA, 441 bp, Glycine max
ttcggataccgttgtggagccttacaacgctaccctctctgttcaccaacttgttgagaatgctgatgagtgtatggttttggacaatgaagctctctatgacatctgtttcaggactttgaagctcgccacgccgacatttggtgaccttaaccacctgatatctgccaccatgagtggagttacttgttgtctacgtttccctgggcaattgaactctgatcttcgcaagcttgctgtcaatcttatcccattccctcggctccatttcttcatggttgggtttgcgcccttgacatcaagaggatcccagcaataccgtgctttgactgttcctgaattgactcagcaaatgtgggatgccaagaacatgatgtgtgctgctgaccctcgtcacggtcgttatttgactgcttcagctatgttccgtggtaagatgag

SEQ ID NO: 7557 - DNA, 332 bp, Glycine max
cccacgcgttcgcccacgcgtccgcaattatcttcacaaactagtaatattattcttcgaatccattacattattcataatgggtattttcacatttgaggatgaaaccacctcccctgtggctcctgctaccctttacaaagctctagttacagatgccgacaacgtcatcccaaaggctgtcgaagccttcaggagtgttgaaaaccttgaggggaacggtggccctggaaccatcaagaagatcactttcgttgaggatggagaaagcaagtttgtgttgcacaaaatagaatcagttgatgaggcaaacttgggatacagctatagcg

SEQ ID NO: 7558 - DNA, 367 bp, Glycine max
  modified_base (348)..(349): a, c, g, t, unknown, or other
ggatggtgaaccactttgttcaagagttcaagagaaagaacaagaaggacattagtggaaaccccagagcacttagaaggttgaggactgcttgtgagaaggccaagagaacactttcatcgactgctcagaccaccattgaaattgattctctatacgagggaattgatttctactccactgttactcgtgccagatttgaggagctcaacatggatctcttcaggaaatgtatggagccggtggagaaatgtttgagggatgctaagatggacaaaagaagtgttgatgatgttgtcctttgttggtggttctaccagaattcccaaggttcaacaactgctgcanngacttcttaatggaaaag

SEQ ID NO: 7559 - DNA, 448 bp, Glycine max
gactcgttcttcttcgtcgttatcttcttcttttgttgtttgtgtgtttgttttttctctcacctgaaaatgtcttgctgcggtggtaactgtggttgcggaagcgcctgcaagtgcggcaacggctgcggaggctgcaagatgtacccagacttgagctacaccgagtcaaccaccaccgagaccttggtcatgggagtggcaccagttaaggctcaattcgagagtgctgaaatgggtgttcccgctgagaacgatggctgcaaatgtggagctaactgcacctgcaacccctgcacttgcaagtgaggtgttggagagctaaagcttcaagcagagatggcccttagaaataatgataaaaactatatgtagtttcaaaacttcaaaattatgtagtatgtattatgttgcactctggtgttttgtgtctaaacaaacaccctta

SEQ ID NO: 7560 - DNA, 396 bp, Glycine max
atctccagctgcttccttatcagaagcgcttcgccccagagattctcgcttcctctccttcaatccttcttccaacgctattaattacaaaattaacctctccgcttccctccgatccattcactccctccctcttaaaacctccttgcggatcaaatgctccaaacagatgggaatgaagtcctgcaaagaggacagtgcttcatgatctttatgagaaagaagggcagagtccatggtatgataatctctgcagacctgttacagaccttcttcctcttatagcaagtggtgtcagaggcgtcactagcaaccctgcgatttttcagaaagctatctcatcatcgaatgcttacaatgatcagttcagggaacttgtgcaagcagggaaagaca

SEQ ID NO: 7561 - DNA, 434 bp, Glycine max
cccacgcgtccgcgcaaactcgccgtgtatctcattcccttccctcgtctgcacttcttcatggtgggatttgccccactcacttcccgcggttcccaacagtacagggctctcactgtccctgaattgacccaacaaatgtgggatgctaagaacatgatgtgtgcagctgatcctcgccacggtcgttacttgacagcttctgcgatgttccgtggaaagatgagcacaaaggaggttgatgaacagatgatcaatgttcagaacaagaactcatcgtacttcgtggaatggatccccaacaatgtgaaatccactgtctgggacatccctccaactgggttgaaaatggcatcaaccttcattggcaattctacctctattcaagaaatgttcaagaaggtgagcgagcaattcacggctatgttccgcag

SEQ ID NO: 7562 - DNA, 369 bp, Glycine max
gttgcagtcactgctttggttagatcagaaccagatcgtgttctcttcttccattggcaaacatggcaactcaaatgagcaagaagagaaagtttgtggcggatggaatggtcttcgccgactgacgaggtctgacactgagtgcggagacggtactccgcgtgaggttaggttacgccgatgcgcaccgagattatcatcagagccaccagaacccaagccgttctcggtgagaagggaaggagaattagggaacttacctcagtggtgcagaagaggttcaaatttcccgagaacagtgtcgagctttatgctgagaaggtcaacaacagaggcctctgtgccattgctcaggccgagtcgcttcgc

SEQ ID NO: 7563 - DNA, 449 bp, Glycine max
ggatggtcgcacccttgccgattacaacatccaaaaggaatcaaccctccatctcgtgcttcgcctcaggggtggcatgcaaatctttgtcaagactttgaccgggaagaccatcacccttgaggtggaatcctcggacaccattgataatgttaaggccaagatccaggacaaagagggcatccccccagatcagcagaggctgatttttgccggtaaacaacttgaggatggaagaacccttgctgattacaacattcagaaggaatccacccttcacttggtgcttcgtttgagaggtggtatgcagattttcgttaaaactttgaccggaaagaccatacccttggaggtggagagttcagataccatagacaatgtgaaagctaagattcaggacaaggaaggtatcccaccagaccaacagaggcttatctttgccgggaaac

SEQ ID NO: 7564 - DNA, 436 bp, Glycine max
cccacgcgtccgctcatagctcccactcactttctcgcagaaacgtattgtttttctctctttccgcggcctagatctgagcagtttggaaaccctaactgctctcaccaacgacatcaccactctctccgatcaactacctctttcgtcgccctaagtcatggcaggaattgcacccgagggatcacagtttgatgctcgtcaatatgataccaagatgaatgagctgcttacgtccgatggtcaggatttcttcacatcctacgatgaggtttatgacagttttgatgctatgggcttgcaagagaatctcctgagaggcatttatgcatatggttttgagaagccatcagctattcagcaaaggggaatagttccattctgcaagggacttgacgttatacaacaggcccagtctggaactgggaaaacagca

SEQ ID NO: 7565 - DNA, 445 bp, Glycine max
gggcttgactgcctacagttcatactaagttctgaaaatgagttccaaggttttgcttgttctacttatgttcttggccactatacttctgatctcctctgaggttgcacccgatgatgcatacgagaattttgacaaaatagatgggaagcctagtgcagatggggtagatgaaagcaagtattggcgtggcggctatggtggcggctatggtggtggttatggaggtgggcgtggaggctatggaggtgggcgtggaggctatggagggggacgtggtggatatggcggcggacgaggtggctatggtggcgggcgtggtggctatggcggcgggcgtggtggcgggcgtggtggctatggtcctaatgaacataacgaggctggggttgatgctaaccctcacaactaagaaagcaactttctaaagcttatatatgggttt

SEQ ID NO: 7566 - DNA, 432 bp, Glycine max
gacctttgttcactcttctactcttgcttctagggatttagcgcatcttcttctacatttaaggaagatgggttaggaaaaggcccacatcagcattgaggtcattggccatgtctactctgggaaatacactaccactgatcacctaatttacaagcttggatgcattgacaagcgtgttactgagaggtttgagaaggaagctgctgagatgaacactaggtcttatcacgtatgcctgggtgctggacaaacttaaggctgaacgtgaactacgaatccccattgatattgcttcgagtaagtctgaaacatcaacgtattattgcacagatcttgatacacctggacatatggatatgattacgaatatgattactgggacattccaagctgactgtgctgctcttatcatcgattctaccactggtg

SEQ ID NO: 7567 - DNA, 433 bp, Glycine max
cccacgcgtccgcccacgcgtccggtggacttgccagaaggtgcattgtgcaagtgtcttatgccattggtgtgcctgagcctttgtctgtgtttgttgacacctatggcactgggaagatccatgataaggagattctcaacattgtgaaggaaaactttgatttcaggcctggtatgatctccatcaaccttgatctcaagaggggtggaaataacaggtttttgaagactgctgcctatggacactttggaagagaagaccctgacttcacatgggaagtggtcaaacccctcaagtgggagaaggcctaagtaattcattccactgctctatgctggaagttttttgagcgttgcccttataatatgtctaatatccataactttccacgtctcttactctgtgtgtttctctcctcttcctcctattt

SEQ ID NO: 7568 - DNA, 421 bp, Glycine max
gctggttcaaatgttactcttcttgcagaccaggtaaaaagatttaagcctcaacttgttgctgttagaaatgagtccctaattgctgaacttaaagaggccttgcatgacgttgaagaaaaacctgagatcatccctggagagcagggaatcattgaggttgctcgtcacccagatgcagtcagtgtagtcacaggaatagtaggctgtgcaggactgaagccaacagttgctgcgatagaagcagggaaatacatagctttagccaacaaagagacattgattgctggaggtccttttgttcttcctcttgctcagaagcataatgtaaaaatacttccagctgattcagaacattctgccatctttcagtgtatccaggggttgccagagggtgcacttaggagagttattttaactg

SEQ ID NO: 7569 - DNA, 438 bp, Glycine max
cccacgcgtccgagcagcagcagcaagctatggcggaagaaccgaaagttccaccaccttccaatcctacgttgtcgtttgatcctagtcgaacggttggtattatcaagaggaaggccttgatcaaagacttagctgcggtataccatgccgaatgccttgcatactgtcaagagcttttggaacttcaaactaaatgggaagagccatatattgacttaaaaactccagaggaatcaaaaaaggagacagcacgaccctctaaacgtgtaaaaaagttgcgttaggttttcaggtggttgatgcataactcatttagagagcaaaatatgcaccgtcagaggataccttttgcttgctgctggtgtagctgatagtatcagagcacacatttaatgtagtattgatgtacttttcaaatgctactgagacgtcatg

SEQ ID NO: 7570 - DNA, 420 bp, Glycine max
aaaactgaagctcgaggaagataactacgatgaaacaagaggaatggatgattacgacagcgttgctatcgttgctgtttgtttcatcttttccgccgttgagttacggagttgttcctcctcgtactctgctcaataagctgtcggagggcaaatatctcaacactcaggagctctggttcgaccaaaccctcgatcacttctctccctatgatcaccgacaattccggcaacgttactatgagtttctagactatttccggattcccgatggaccaatttttttggtaataggtggtgaaggtatattgaatggggtagcaaatgactatcttgctgtactggcaaagaagtttggagcagctatggttactcttgaacatcgctactacggaaagagtactccatttaattctttgg

SEQ ID NO: 7571 - DNA, 413 bp, Glycine max
cccacgcgtccgagaagtcctaggagtgtaaaacagagacgcaaaatgaagacgatcttgtcgtctgagaccatgaatattcccgacggcgtgagcatcaaggttcacgctaaggttatcgaggttgagggccctcgtggaaaactcgtgcgagacttccaccatctgaacttggacttccaacttattaccgacgatggcggtaaaaggaagctcaagattgattcttggttggttctcgtaaaacctccgccgccatccgcaccgccctcagccacgttgagaatttgatcaccggcgtcaccaaaggataccgatacaaaatgagaatcgtgtacgcacattttccgatcaacgctagcattggcaacaacagcaagtccatcgagatcagaaatttcctcggcgagaag

SEQ ID NO: 7572 - DNA, 320 bp, Glycine max
gccacgcgtccgtccacgcgtccggggaaataatgttaatctcgccgattacaaaggaaaggtccttctcattgtcaatgttgcctcacaatgcggcttgactaattcaaactacacagagcttaaccaattgtatgagaaatacaaagggaaaggacttgaaattctggcattcccatgcaatcagtttggggctcaggaaccaggaactaatgaagagattgtggagtttgcttgtactcgcttcaaagctgagtctcccattttcgacaaggtggatgtgaatggggaacaatgctgctccactgtacaagtttctg

SEQ ID NO: 7573 - DNA, 432 bp, Glycine max
gaaaaagttagggtttgtaactttgtcttttgcttgcgaatctgaatcgaataataatcaatcaatcatcatgtcgtcggcgaagaagatcacactgaagagttcggacggcgaggctttcgaggtggacgaggcggtggcgctggagtctcagacgataaagcacatgatcgaggacgactgcgccgacagcggcatccctctgccgaacgtgacgagcaagatcctggcgaaggtgatcgagtactgcaagaagcacgtcgaggccgcgaatcccgaagacaaaccctccgaggacgatctcaaagcctgggacgccgatttcgtcaaggtcgaccaggccacgctcttcgatcttatcctggctgcgaactacttgaacatcaagagcctgctggaccttacatgccaaactgtagccgacatgatcaa

SEQ ID NO: 7574 - DNA, 433 bp, Glycine max
attcctaccacatgcgtttggaacgctgaattaattttcgcctaaaaggacaatctaagacttcggtgggatctaggttagcaaccagcgatctgggacttttctttctcccccacaccacacccagattcaaaaactcgctctgctctgctctgcaattccccttccgtttcgtttcgatctcaaaacatgttcttcttcgattggttctatggcattctagcttccctcggtctctggcagaaagaagccaaaattctcttccttggtctcgataatgcagggaagaccacacttcttcacatgctcaaagacgagagattagttcagcaccagccgacccaacaccccacttcggaggaattgagcattgggaagatcaagtttaaggcttttgatttggggggtcatcaagttgcccgcagagtctgga

SEQ ID NO: 7575 - DNA, 433 bp, Glycine max
aaacaagcttggacctcaaattggtcttatccacactcccttcaagcaacaactaccaaagtgtgtgcacccttgacaaggtcaagtcagcacttgagagggcagagaaagagcctattgttaggaaaagaacctcattcttgaagtcacctctctcggcttcatcgccgtcgtattcctcctcgtcgtcatcgattagggaaacaattcaagaagaagaatgtgaagagagacttaatgtttcatcatcccctttggctgcagggtgccctggttgcttatcatatgtaatgatcatgaagaacaaccccaagtgtcctaggtgtaactctcttgttcctattccttccatgaagaaacctagaattgacctcaatatatcaatttaagtgaggtaattgatgaaaattgtctccattttcaatataatttg

SEQ ID NO: 7576 - DNA, 377 bp, Glycine max
cccacgcgtacgtccacgcgttcgctctgaggttgcacccgatgatgcataccagaattttgacaaaacagatgggaagcgtagtgcaaatggggtagatgaaagcaaatattggcgtggtggctatggcgactatggtggttggcgtggtggtggttggcgtggtggctatagaggctggcgtggtggctatagtggtggtcgtggtggctatggtggctgtcgtggtggctatggtggtggccgtggtggctactgaggttgaggtggtagatatggccctaaggtacataacgaggatgggacagatgcttgacatgatagctatgaacgaaacgtgctagtgctcatattggatctatgctatcgtagcgtat

SEQ ID NO: 7577 - DNA, 423 bp, Glycine max
gaacaatggcgggtagggtttcgacgtgcttcttcttcgtgtttgctctttctctccttcttccttttcagatctccgctgaggaatcatcggagaaagagttcgtactcacattggatcactctaactttcatgacactgtcagcaagcacgatttcatcgtcgtcgagttctacgctccatggtgtggccactgtaagaagcttgctcccgagtatgagaaagctgcttctatcttgagtagtcatgatcctccggttgttttggctaaaattgatgccaatgaggagaagaacaaagaccttgcatctcaatatgatgttaggggatacccaacaattaagattctgagaaatgggggaaagaatgttcaggaatacaaaggtccccgtgaagcagatggcatcgttgactatttgaaga

SEQ ID NO: 7578 - DNA, 396 bp, Glycine max
gccgcaccaagtgatcgacgcgaacagagagaaattcatcgtcgcagtaatcatgggtaaggtccatggatcacttgcacgtgctggtaaggttagagggcaaaccccgaatgtggccaagcaggataagaagaagaagccacgtggccacgcccacaagaggatgcagtacaatcgccgattcgtcaccgtcgaggtgggattcggcaagaagaggggacccaactcgtatgagaagctaaggcctacgcttgacgaatatgttggtactctatttgatttatctatgctgtcatacattcatgtttaatttgcatgttttgatagtgatgtgtgaacggtgattgttagctatatatcaaacttgaaatgttgcgtacaatatctaactatcta

SEQ ID NO: 7579 - DNA, 434 bp, Glycine max
cacaactactacaagtacttccttacaatcaaaaccaacaacaactatggcaagttatcaaaagcactacgatgatcagggtcgcaaggttgacgagtatggcaacgttgagaagcaaaccgacgaatacggcaaccctgttcatgctgctagtgtcacctatgtagccaccagaactgctgctggtggttacagtgatgacattaataagcaacatgataccaccaatgcctacggcgtagacactggtagacagcattctagtggtggctacgatggtgacactaataaacatcatggaactactggtggctataatgatgacaccaatagacatcatggaactaccggtgtctatggtatagacaccgataggcaacaacatgggactactggtggctatgccggtgacactggtaggcaacatgggaaca

SEQ ID NO: 7580 - DNA, 409 bp, Glycine max
ccattctctctgtgtatttccctacctctcccttcaagatgcagatcttcgtcaagaccctcaccggcaagaccatcacccttgaggtggaaagctctgacaccatcgacaacgtcaaggccaagatccaggacaaggaaggaatccccccggaccagcaacgtctcattttcgccggaaagcaacttgaggacggccgtacccttgctgactacaacattcagaaggagagtactcttcacctcgtcctccgtctccgtggtggcatgcagatcttcgttaagacactcaccggcaagaccataaccctagaggttgaaagctccgacaccatcgataacgtcaaggccaagatccaggacaaggagggtatccccccggaccagcaacgtctcatcttcgccggaaa

SEQ ID NO: 7581 - DNA, 424 bp, Glycine max
  modified_base (418)..(418): a, c, g, t, unknown, or other
cccacgcgtccgcaagctgcaaaggagaagacccaggaaatggcccaagctgcaaaggagaagacccaacaaacagcccaagctgccaaggacaagacttgcgacacttcccaagcggcaaaggagaagacccaacagaatacaggagctgctcaacaaaagacctcagagatgggccagtccacgaaggaatcggcccagtcagggaaggacaacacccaagggttcctgcagcagacaggggagaaggtgaagggcgcagcccaaggtgctacagaggctgtgaagcaaacccttggcttgggcgagcatgatcaagacaaccgcagaaattactaatactataatttgaagtgctttcttgtagtagtggtttacgcagcatggctttttaaataagctgctattccctacactnctacct

SEQ ID NO: 7582 - DNA, 414 bp, Glycine max
gtgagaaacatggcttccttaagctccttagtgctgctccttgcagctctaattctatcccctcaagttcttgcatactatgacaatgccccagtgtacaagcctaccactgagaaaccaccagtttataagcccccagttgagaagcctcctgtttacaaacctccagttgaaaaccccccaatttataagcctccagtagagaagccaccagtgtacaagcccccagttgagaaacccccagtttataagcccccatttgagaaaccaccagtgtacaagcccccagttgaaaaaccaccagtgtacatgcccccagttgaaaaacccacagtgtacatgcccccagttgagaaaccaccagtgtacaagcccacagttgagaagcccccagtttacaagcccccagttgag

SEQ ID NO: 7583 - DNA, 389 bp, Glycine max
gccgcgcgcgcgcactctctgtctcttgcgcatggggtggtagcgcagctccttctagatgtaaggaagatgggtacggacaaggttcacatcagtattgtggtcattggccatgtcgactctgggaaatccactaccactggtcacctgatttacaagcttggaggcattgacaagcgtgttattgagaggtttgagaaggaagctgctgacatgaacaagaggactctcaagtatgcctgggtgctggacaaacttaacgctgagcgtgaaagatgaatcaccattgatattgctttgtggaagtctgaaacaccaccagattattgcacagtcattgatgcgcctggacataaggatttcattaagaatctgattactgggacatc

SEQ ID NO: 7584 - DNA, 410 bp, Glycine max
ctttttgattcctaaattctctaaaattcgaaattctaatttcgttaggggaaagagattgtttgtgtgtgagtgagtatggctggaaaaggcgagggtcctgctatcggaatcgatttgggaacgacgtactcttgcgtcggcgtgtggcaacacgatcgtgttgaaatcatagccaacgatcagggtaacagaactaccccatcctacgtggctttcaccgacacagaacggttgatcggcgatgcggcgaagaaccaggtcgctatgaacccaaccaacaccgtttttgatgctaagcgtttgattggaaggcgtttttccgatgcatcagtacaaggtgacatgaaattgtggccgttcaaggtgattcctggccctgctgagaaacctatgattgtggtgaacta

SEQ ID NO: 7585 - DNA, 425 bp, Glycine max
  modified_base (349)..(349): a, c, g, t, unknown, or other
gctccatgcttgcgcatgcaacgtgtgacatgcatccttttcattgtcaccttagccttcgtggcttaggtgctgacgattggttcctgtgttgcctacctaccaaacggtattcgtgtggctagtcagacccattccatccaggcctctttgttggggacgctggaggatttcaaagtcccacacgtgaaccacgttagtcgtccatcataacggcttcctgtggcacacgtgtggtgattgttctctcggatgcggtgcatgcagtgaacgtgggtggtctagtgcccccacattgttccttaaaatcggttgtctcggatgacgctttgccctgcgcttggcttgntaaacgcgatgctactacttctagttagctagcgctggcaatgctcgtggcaagtgctttgtcattaacggatgct

SEQ ID NO: 7586 - DNA, 416 bp, Glycine max
tcgcccacgcgttcgaagaaaaattgcacctaccaccggtggagtcaagaagcctcatcgctatcgtcctggaactgttgctcttcgtgagatccgaaaataccaaaagagcacagagcttctgatccgcaagctcccctttcagcgtcttgttcgtgaaatcgcgcaagacttcaagcaaatcactgacattttttggtgatatcggtgccaatgtgaccgatatgattccagactgatttgagggtccagaatcacgccgttcttgcgcttcaagaaactgcggaggcttacttgggggggttggttgaagacaccaaactttgtgcgatccacgcccagagagtgaccatcatgcccaaagacatttcactcgcacgccgcattcgtggagaacgtgcttaggcttataataa

SEQ ID NO: 7587 - DNA, 434 bp, Glycine max
caatttaccagctatacttgttcctttttaaggttagaagtgctacaatacaaacaatggcagctactcaggaagatgtgaagcttttgggtattgtgggaagcccatttgtgtgcagggtccagattgcccttaagttgaagggagttgaatacaaatttttggaagaaaatttgggcaacaagagtgatttgcttctcaaatacaaccctgttcacaagaaggttccagtgtttgttcacaatgagaagcccatagcagagtctcttgtgattgttgaatacattgatgagacatggaagaacaaccccatcttaccttctgatccttaccaaagagccttggctcgtttctggtccaaattcattgatgataagattgtgggtgctgtatggaaatctgttttcacggttgatgagaaagagcgtgagaag

SEQ ID NO: 7588 - DNA, 332 bp, Glycine max
caatttaccagctatacttgttcctttttataggttataagtgctacaatacaaacaatggcagctactcaggaagatgtgaagcttttgggtattgtgggaagcccatttgtgtgcagggtccagattgcccttaagttgaagggagttgaatacaaatgtttggaagaaaatttgtgcaacaagagtgatttgcttctcaaatacaaccctgttcacaagaaggttccagtgtttgttcacaatgagaagcccatagcagagtctcttgtgattgttgattacattgatgagacatggaataacaacctcttgttaccttttgatcctta

SEQ ID NO: 7589 - DNA, 392 bp, Glycine max
aaaaaaaaaaccactttgatcaagtattttatgagtttgaacaagaaagacattaaatggggaccccgagagcacttaaaaggatgaagactgcatgtgagaaggccaaagagaacactttgatcgactgctcagaccaccatagaaattgattctatatacgacggaattgatttctactccaatggtactcgggccagatttgaagagctcaacatggatctcttcacgaaatgtatggagccggtggaaaaatgattgagggatgcttagatggacagaagaagtgttgatgatcttgtccttgtgggtggatctaccagaattcccaaggttcaacaactgcttctagacttctttaacggaaaagagctatgcaagagcattaattc

SEQ ID NO: 7590 - DNA, 437 bp, Glycine max
  modified_base (379)..(379): a, c, g, t, unknown, or other
  modified_base (382)..(382): a, c, g, t, unknown, or other
cttggtttgtgagagagacagaggcacatagagaaaatggtttcggggtcaggaatctgcgcgaagagggtagttgtggacgcgcggcaccacatgctggggaggctggcatcgatcgtggcgaaggaacttctgaatgggcagaaggtggtggtggtgcgctgcgaggagatttgcatctccggtgggctcgtcaggcagaagatgaagtacttgcgtttcctccgcaagcgcatgaacaccaagccctctcacggccccatccatttccgtgcacccggcaagatcttctggcgcaccgttcgtgggatgataccacacaagacaaagcgcggggaaactgctcttgcacgactgaaagtgtacgagggcattcctnctncttatgacaagaccaagaggatggttgtccctgatgctctcaaaggtgtgaggct

SEQ ID NO: 7591 - DNA, 436 bp, Glycine max
cccacgcgtccggccaacattttccccttcaacactccaaccaccaaagaagcataccactatagaatgatatttgagaggttcttccctcagaactcagcaaggctcactgttcctggaggaccaagtgttgcatgtagcacagcaaaagctgttgagtgggatgctgcttggtctaacaaccttgatccatcaggtagagcagcacttggagtgcatgcatcagcttatggaaaccaggtcaaagctgtagaaccagagaagatcatacccaagatggaagtttctccactaggagttgccatatagagcttgtatgagccatagcaaggactagtagttgccctagaaccagcatataatattattatactagtcatcataaaatgaaaattttgcttgctttgtagtttatccagggaatggtatataaata

SEQ ID NO: 7592 - DNA, 425 bp, Glycine max
  modified_base (374)..(374): a, c, g, t, unknown, or other
cccacgcgtccgtcaatcatcaacacatagctgagtgtgttgctctgtgaatccaccttcttcttccattggaggaccatttcctcctggaatagaaatactaccacacttttcttttttcacttctctaagttgctaagttaattgctccttcattttttcactcttcgttctcgcgtacccgtgtcacggtaactcgtggtgaagtgttcgaaaatgactgtcacacctaagatctcagttaacgatgggaaacttgttgtccatggtaagaccattctgactggagtgccagacaacgttgtgctgactccaggttctggaaggggtcttgtgactggtgcttttgttggtgccacagcttcacacagcanaagtctccatgtgtttccaatgggtgttttagaggggctccggttcatgtg

SEQ ID NO: 7593 - DNA, 252 bp, Glycine max
cccacgcgtccgttccattctctctgtgtatttccctacctctcccttcaagatgcagatcttcgtcaagaccctcaccggcaagaccatcacccttgaggtggaaagctctgacaccatcgacaacgtcaaggccaagatccaggacaaggaaggaatccccccggaccagcaacgtctcattttcgccggaaagcaacttgaggacggccgtacccttgctgactacaacattcagaaagagagtactct

SEQ ID NO: 7594 - DNA, 351 bp, Glycine max
cccacgcgttcgcgcatactcgccgagatgctcattcccttccctcgtctgcacttcttggtggtgggatttgccccacgtgacttcccgcggttcccaacagtacagggctctcactgtccctgaattgacccaacaaatgtgggatgctaagaacatgatgtgtgcagctgatcctcgccacggtcggtacttgacagcttctgcgatgttccttggaaagatgagcacatatgatgttgatgaacagatgatcaatgttcagaacaggaactcatcgacttttgttgaatggatccccaccaatgtgaaatccactggtctgggaccttccttccaactggttttaaa

SEQ ID NO: 7595 - DNA, 403 bp, Glycine max
gtaaccagctatagttattttttgagtgaaggttagaagtgctacaaacaatggcaactaatcaggaagaggtgtctcttttgggagttgttggaagcccatttgtgtgcagggtgcagattgccctcaagttgaagggaattcaatacaagttttttgaagaaaatttggtcaacaagagtgaactgcttctcaaatacaaccctgttcacaagaaggttccggtgtttgttcacaatgagaagcccatagcagagtctcttgtgattgttgaatacattgatgagacatggaagaacaaccccatcttgccttctgatccttaccaaagagccttggctcgtttctggtccaaattcattgatgacaagaatgggggtgctgtatggaaatctgttttcac

SEQ ID NO: 7596 - DNA, 388 bp, Glycine max
attcaacactcatatccttatcctgtttctttcaatggaagtcatttctgcttctagcttgaatccgaacgctccgatgttcgtgccactcgcctatcggacggtggaggatttctccgaccagtggtgggacctcgttcactcctccccctggttccgcgactactggctccgcgagtgcttccaagatccccagttccaaaacgacgacgctttcgacttcgactttgacctagatctccaagatgaagatgaaagggaacgaaaggaagggaaggaggtggtgtcgttggggctgctgaaatggcgaagctgtggaggaagatgggcccaggcgccgaagtatgtggaaaaagcccccaagtttgtgaaacccaaagtgagccca

SEQ ID NO: 7597 - DNA, 444 bp, Glycine max
ctcgtgcctctagggttatcatatctccatttccatttcctctctctcagtttccaggaatcttaagctatgggaaagtcttacccaaccgtgagcgctgattaccagaaggccgttgagaaggcgaagaagaagctcagaggcttcatcgctgagaagagatgcgctcctctaatgctccgtttggcatggcactctgctggaacttacgacgtgagctcgaagaccggtggtcccttcggaaccataaagcaccccttcgaactcgctcacggcgctaacaacggtcttgacatcgctgttaggcttttggagccactcaaagcggagtttcctattttgagctacgccgatttctaccagttggctggcgttgttgccgttgaggtcaccggtggacctgaagtttcctttcattctggaaaagagggcaaacctgagccc

SEQ ID NO: 7598 - DNA, 393 bp, Glycine max
acccctcttagtcccaattttctagggttttattcattttccgatggcttctgcagatgttgagtagcgttgctttgtcggtgggctcgcttgggccactgacgaccatgccctcgagagagccttctctcagtacggcgaaatcgttgaaacgaaggtctgtttgttgcaggcatcacatctgatctcacacgattcggattcggaattttctcgatcccgttctgatctgtgatctctgatctgtttgcgttacttgatcttatgatacttgtgttactatatgattcttttattactcacgccaataggtacgttcatcttctttctttcaccaaaggcgaagatcgatcggcttctatttggttctgggttttgtttttcgtgctgttt

SEQ ID NO: 7599 - DNA, 268 bp, Glycine max
gagcaagtgcagtgcttcgggcggaagaagacggcggtggcagtgagctactgcaagcgcggccgaggcctcattaagatcaacggctgcccgatcgagctggtggagccggagatcctccgcttcaaggccttcgagccaatcctccttctcggtcgccaccgcttcgccggcgtggacatgcgcatccgcgtgaagggcggcggtcacacctcccagatatactccatcaggcatagcatagccaaggctcttgtcgcttactacc

SEQ ID NO: 7600 - DNA, 366 bp, Glycine max
ggaggagcggcattaaaaatgcagatcttcgtgaaaaccctaacggggaagaccatagccctcgaggtcgaaagcagcgacaccattgacaatgtcaaggctaagattcaagacaaggaaggcatccctccggatcagcagcgtttgattttcgccggaaagcaacttgaagatggaaggaccttggccgattacaacatccagaaggaatcaacccttcaccttgtcctcaggcttcgtggtggcatcatcgagccttccctcatggctttggctcgcaaatacaaccaggacaagatgatttgccgcaaatgctatgctcgtctgcaccctaaggctgtgaactgccgtaagaagaaatgcggt

SEQ ID NO: 7601 - DNA, 327 bp, Glycine max
atgtctctgccgaagacaaaactaccggccaaaagaacaagatcaccattaccaatggcaagggtaggttgtcaaaggaagagattgagaagatggttcaagaggctgagaagtacaaatcagaagatgaagagcacaagaagaaggtagaggccaagaatgcattggagaactactcatacaacatgaggaataccattaaagacgagaagattggaggaaaacttgacccagctgacaagaaaaagattgaggatgccattgagcaggccatccaatggctagacagcaaccagcttggagaggcttatgaatttgatgtcaaaa

SEQ ID NO: 7602 - DNA, 418 bp, Glycine max
attattattcttccatttccattaaaaagaaaatatcataaatgggtattttcacattcgaggacgaaatcacctcccctgtggctcctgctactctttacaaagctctagttacagatgccgacaacatcatcccaaaggctcttgattccttcaagagtgttgaaaacgttgagggaaatggtggccctggaacaatcaagaagataactttcgttgaggatggagaaaccaagtttgtactgcacaagatagaagcagttgatgaggcaaacttgggatatagctacagcgtagtgggtggtgctgcgttgccagacacagcggagaagatcacattccactccaaattggctgctggtcccaatggaggctctgctggcaagctcactgtcgaataccaaaccaaaggagatgc

SEQ ID NO: 7603 - DNA, 374 bp, Glycine max
cccacgcgtccggcaaatattggcgtggtggctatggcgactatggtggttggcgtggtggtggttggcgtggtggctatggaggctggcgtggtggctatggtggtgggcgtggtggctatggtggctggcgtggtggctatggtggtgggcgtggtggctacggaggttggggtggtggctttggccctaacgaacataatgaggctgggattgatgctagccctcacaactaagaaggaaacttgctaaagcttatataggatttaagttatcgtaataaataaaacttcattggaagggtagttataatagatgtggagatctttcttcgctctggtcatataaaggaataatacttttctattaatttc

SEQ ID NO: 7604 - DNA, 400 bp, Glycine max
cccacgcgtccgcccacgcgtccgtacaattcgctctgtgcagtttcctcgctctcttttctgcaattttcttttttgttccttctctgcggttatctttttgagcttcaatggcggacgctgaaaccttcgctttccaggctgagatcaaccagcttctcagcctcatcatcaacaccttctacagcaacaaggagattttcttgcgtgaactcatcagcaacgcttctgatgctttggataagattcgatttgagagtttaaccgacaagagcaagctcgatgctcagccagagctcttcattcgtcttgtgcccgacaaggccaacaagactctttccgttattgacagcggcattggaatgaccaaagcagatttggtgaacaacttgggtaccat

SEQ ID NO: 7605 - DNA, 418 bp, Glycine max
  modified_base (330)..(330): a, c, g, t, unknown, or other
cccacgcgtccggcccttcaagcatttattgatcatggtaccgtatccaggacaatagactcaaatgcatctgaagctgaaggaatatacaatgctctccagaaattgggtattgactggagctttgttggttcccagcttgaacttgaaggagtggactcgtttaagaagagctttgacagcctcctggattctctgcaagagaaggcaaactctcttaagttggtcagccactgaagtttgaacgtcatggttagtaatgcagtgctgtgtatgatggcatctatggattaataaaaggcagcggctgtgcattttgtgctgctgcanatgtgcttcatggagtcatttatttagacgatagtgatacaatgtaaatgggaaaaattgtccgcttcaagtcaagcgttttgttttt

SEQ ID NO: 7606 - DNA, 407 bp, Glycine max
  modified_base (373)..(373): a, c, g, t, unknown, or other
cccacgcgtccgcccacgcgtccgcccacgcgtccgcccacgcgtccgcataaccttagtcatcttcttctttcatctttctccctaacggtatcgagggaaaaatatggcggaagaacacagatgccaggcaccgcgcttctgcgccaacaattgcggtttctttggcagccctgccacgcagaatatgtgctccaagtgctaccgcgatttccagctcaaggagcagcaatcttccaacgccaagatggttctcaatcagtcgctggttccttcaccgccaccggcggtgatttctcagccgtcgtcttcttcttcggccgcggtagatccgtcatcggcggtggttgatgacgcgccacgcgaggcggangaggttaaggcgccgcagcagaaccggtgtatga

SEQ ID NO: 7607 - DNA, 346 bp, Glycine max
aaattctcaaatccaaatccaattccaattccaattcccaatcttctcaaaccctaattcctgatcttgaaaatgagagaaatcttgcacatccagggagggcaatgcgggaaccagatcggagcgaagttctgggaggtgatatgcgacgagcacggcatcgaccacaccggaaagtacagtggcgactctgaactccaattggaacgcatcaatgtttattacaacgaagcgagtggcggaaggtacgttccacgcgccgtcctcatggatctagagcccggcaccatggactccgtcagatccggcccctacggccagatcttccgccccgacaacttcgtct

SEQ ID NO: 7608 - DNA, 424 bp, Glycine max
ctctggttgattcggatctagagtcttcagtttctcctcgttgttcttcgctttgctgttttcaatttcgattctttcgttaatttaataagatgtttgggagggcaccgaagaagagcgataatacgaggtactacgaaatcctcggcgtctccaagaacgcttcgcaggatgatctgaagaaggcttacaagaaagccgccattaagaatcaccccgacaagggcggtgatcccgagaagtttaaagagctggcgcaagcttatgaggttctgagtgaccctgagaagcgtgagatatatgatcagtatggtgaagatgcgcttaaagaaagaatgggtggttgcggtggccatgatccatttgatatcttttcatctttcttttggcggtgggagtcccttgggatcaggtggaaagtagt

SEQ ID NO: 7609 - DNA, 368 bp, Glycine max
ctcttgtttcaatttcaacaacggttactcctttttcgttttgagtttcaatcaagccatcatcatgtctaccgcatcgcaacccaaggccaagaaaacggcgtcgtccaagaagcccctctcccaccctcccttcgccgtgatgatagcagaggcgattgcgagtctgaaagagagaaccggttcgagccaatacgcgataaccaaatacatcgaagggaagcacaaggagttgcctgcaacctacaagaagcttgtcctcgttcatctcaagaaatctggtgctgctggcaagcttgttaaagtgaaaaactcctttaagctcgcaccgactaagcctgctccggttaaggccgctgctcccaaaa

SEQ ID NO: 7610 - DNA, 341 bp, Glycine max
gagatctcagattgcaattgcctcttctcttctcccagaatcggtgtaggttacaggtttaagggttttgttttcatttaggtcactaatccgatatcatgaagctcgatacgactagtctcgaatcgtttcccacactgattgcacctcaaaacgacgtcgccggagaactctccgccgctccgttctttgaccttccgaattccaatgacttcgatgggttcttgaaagacgctattcagatggtgaagcccgcgaagggtactacaactcttgcttttatatttaaagaaggtgttatggtaactgctgattctcgagctagcatgggaagatatata

SEQ ID NO: 7611 - DNA, 209 bp, Glycine max
gctttttctgttccacaggctactgccagatcttctgaaaatgcggaatcctctgcatgatctggaatttgtgttttctttcgcttgttcgtttgtttaattcaataaaggaaattaggcatgaccctcttgttgagtatgctctgcctatttgaaaatttccacacctcttttaattgtcgtaatgatgtgtgaagtgttgttatttt

SEQ ID NO: 7612 - DNA, 388 bp, Glycine max
agcgttgccattctcatcctcttctttctctctctaccattgccatggatccctacaagcaccggccatccagcgccttcaattctcccttctggactacaaattctggtgctcctatttggaacaacaactcctctttaaccgttggagctagaggtccaattctgctggaggattatcatcttgtggagaagcttgcaaattttgatagggaacgtatcccagaacgtgttgtccatgccaggggcgctagtgcaaagggtttctttgaggtcacccatgacatttctcacctgacatgtgcagatttccttcgagcccctggagttcagacgcctgtaattgttcgtttctcaactgtcattcatgagcgtggtagccctgaaac

SEQ ID NO: 7613 - DNA, 381 bp, Glycine max
ctagggtttcatctttgccatcagtaaacgacaatgatttacgacgttaactctgctcttttccgatccttcctcagccagaagggaggctcctctgataagaagaaatcggacgaacagaagccaaaagagcagaaacccaaagccagggagaacaaacctataatgactggatggtaacaactgagctgcattcagttgtagaatgaaaataggtggtaggtattggatttggtgctaaactaagaactttttggctggggtctgaagtatatgccggcgatgttggtctttgttattggaatggtttgattttggatatgggtataacgaaaacttataatggacacaagttgaacttggagcacgcatgacacatgc

SEQ ID NO: 7614 - DNA, 341 bp, Glycine max
accacgcgtccgctttgttcaagagttcaagagaaagaacaagaaggacattagtggaaaccccagagcacttagaaggttgaggactgcttgtgagagggccaagagaacactttcatcgactgctcagaccaccattgaaattgattctctatacgagggaattgatttctactccactgttactcgtgccagatttgaggagctcaacatggatctcttcaggaaatgtatggagccggtggagaaatgtttgagggatgctaagatggacaaaagaagtgttgatgatgttgtccttgatggtggctctaccagaattcccaaggttcaacaactgc

SEQ ID NO: 7615 - DNA, 417 bp, Glycine max
  modified_base (328)..(328): a, c, g, t, unknown, or other
ccagattgatagttcattgcatgcaaccatagttttattaggttttttcttctttgttttcaattaggtttttgctgctctccttcaaactccgtctttccgaatcctctctttgtgattgtgttctgttctgcttcctaccgcgatagtttctcttctgaagcatggccatggcggtttctgcaattggttttgaaggtttcgagaagaggctggaaatatcctttttccagccgggactttttgctgaccctgagggaatgggtttaagagctcttgcaaagtcccagttggatgagatacttacaccggctgcttgcaccattgnttcatctctcagaaatgatcatgtcgactcctatgttctgtctgagtccagtctctttgtttatgcctacaagatcatcatcaaaacct

SEQ ID NO: 7616 - DNA, 423 bp, Glycine max
gccattctcatcctcctctgtctctctctctccaccattgccatggatccttacaagctccggccatccagcgccttcaattctcccttctggactacaaattctggtgctcctgtttggaacaacaactcctctttaaccgttggagctagaggtccaattctgcttgaggattatcatcttgtggagaagcttgcaaactttgacagggaacgtatcccagaacgtgttgtccatgccaggggagctagtgcaaagggtttctttgaggtcacacatgacatttctcacctgacatgtgcagatttccttcgagcccctggagttcagacgcctgtaattgttcgtttctcaactgtcattcatgagcgtggtagccctgaaaccttgagggaccctcgaggttttgccgtgaagttttac

SEQ ID NO: 7617 - DNA, 347 bp, Glycine max
  modified_base (301)..(301): a, c, g, t, unknown, or other
gtgagagagagagagagagagaggcacttggaatccaaaaatgagagaaatcatcagcattcacataggtcaggccgggatccaggttggcaactcctgctgggaactctactgcctggaacatggcatccagcccgatggcatgatgccaagtgactcctccttcggtgtagcccacgacgccttcaacaccttcttcagcgaaaccggatccggcaagcacgtccctcgcgccgtcttcgtcgatctcgagcccaccgtcatcgacgaagtccgttgtggcacttaccgtcaactcttncaccccgaacaactcatcttcggcaaggaagatgccggcaacaact

SEQ ID NO: 7618 - DNA, 395 bp, Glycine max
caaaaagtttacgttacaaatcgcataataaccgtcctaagtttattgagagaattttgcaagtgtgagaaacatggcatctcgtcaaaacaacaagcaagagcttgatgaaagagcaaggcaaggagagactgttgtcccgggtggaactggtggcaagagcctggaggctcagcaacaccttgctgaaggaaggagcaagggagggcaaacaaggaaggaacagctgggtacagaagggtaccaggaaatgggacgcaaaggagggttgagcactgtggacaaatcaggagaagaacgtgctcaagaggaaagcattggcatcgatgagtccaagttcaggactggtaataacaagaaccagaatcagaacgaagcccaggataagtgataat

SEQ ID NO: 7619 - DNA, 366 bp, Glycine max
acgcggacgcgtgggtgcatacgagaattttgacaaaatagatgggaagcctagtgcagatggggtagatgaaagcaagtattggcgtggcggctatggtggcggctatggtggtggttatggaggtgggcgtggaggctatggaggtgggcgtggaggctatggatggggacgtggcggctatggcctcaaacaaggtgcctatgatggcagacgtggaaggtacagctgggtacagtaagggtaccacgaaatggctagcgtactgaaggacatcactagggacaaattgatgctagaacttgcatctaaggaaggcattggcttaagttaatccaaggtcatgacttgtcataacaagtacca

SEQ ID NO: 7620 - DNA, 329 bp, Glycine max
tacacttgtactgttctattagttcatactaagttctgaaaatgagttccaaggtgttgcttgttctacttatgttcttggccactatacttctgatctcctctgaggttgcacccgatgatgcatacgagaattttgacaaaatagatgggaagcctagtgcagatggggtagatgaaagcaagtattggcgtggcggctatggtggcggctatggtggtggttatggaggtgggcgtggaggctatggaggtgggcgtggaagctatggagggggacgtggtggatatggcggcggacgaagtggctatggtggcgggcgttgtggc

SEQ ID NO: 7621 - DNA, 345 bp, Glycine max
cccacgcgtccggtctttatcctgtaagtcaattacctccagaagctgtcgttggtaatgttacatgtggtagtggacgtggtggtttatccaccactgcttggattagttctgcagttaacaatcgctcctcagatatcaacaaatagattcgcacagcacttgggaaaggtaagaaaattgtttttcttactagaggatccttttccagtaactctattggctgttctttttggcgttaagaatgaaattctgagttctaacgccactaaccctatgctgacgcgacttcttgagaactgtgagagtctcaaatatctggtcgatgagtgtccttttgcattt

SEQ ID NO: 7622 - DNA, 354 bp, Glycine max
agagaatggctcccaagggtttaatctttttggctgtgttatgcttctcagcactgtcactgagtcgttgtcttgcggaggataatggacttgttatgaacttctacaaggaatcatgccctcaggctgaagacatcatcaaagaacaagtcaagcttctctacaagcgccacaagaacactgctttctcctggctcagaaacatcttccatgactgtgctgttcagagttgtgatgcttcactgttgctggactccacaagaaggagcttgtctgataaggaaacagatagaagctctgggttgagaaatttcaggtacattgagaccatcatagaagctatggaaagggaat

SEQ ID NO: 7623 - DNA, 392 bp, Glycine max
gaaaccctagctagccacaatgcagatattcgtgaaaaccctaacggggaagacgatgaccctagaggtagagtcatcggacacaatcgacaatgtgaaggcgaagatccaggacaaggagggcatcccgccggaccagcagcgcctgatcttcgccggtaagcagctggaggacggccgcaccctcgccgactacaacatccagaaggagtccacgcttcacctcgtcctccgcctccgcggcggcgccaagaagcgcaagaagaagacctacaccaagcccaagaagatcaagcacaagcacaagaaagtcaagctcggcctcctccagttctacaaggtcgacgactccggcaaggtccagaggctccgcaaggaatgccccaacgccc

SEQ ID NO: 7624 - DNA, 352 bp, Glycine max
caaactttgtaacttcaaaacatactcctctgttctctctgtttctcttcaatcgtcctgaaaaaaacaaaaacacgaaaaatcatccaccctctcacattctctctctctctcctttcaactaatatggcaattgaaaaccaagacaacactgtcagagaaatcaagccaaagaacaggagaatcatgggtgctggaggccctgatgatgacgacaataggtggccaccgtggttgaagccactgctgaaagagagcttctttgttcaatgcaagttgcatgctgactctcacaagagcgaatgcaacatgtattgcttggactgtatgaatggccctctctgctctctct

SEQ ID NO: 7625 - DNA, 333 bp, Glycine max
  modified_base (269)..(269): a, c, g, t, unknown, or other
  modified_base (284)..(284): a, c, g, t, unknown, or other
tctctcaatcgttttctacataatacaaacctctctaatttttgaagcttattatgcccaatctcgatatgcagatcttcgtgaaaaccctaactggcaagacgatcaccttggaggtggagtcctctgacaccatcgacaacgtgaaggccaaaatccaagacaaggagggcattcctccggatcaacagcgtttaatcttcgccggaaaacagctcgaagacggcagaaccctcgccgactacaacatccaaaaggagtccacgctncacctcgtcctccgncttcgcggcggcatgcaaatcttcgtcaaaacccttactggcaaaacaa

SEQ ID NO: 7626 - DNA, 429 bp, Glycine max
cacaactacaagaaagaacttccttataaccaaaaccaacaacaactatggcaagttatcagaagcactacgatgatcagggtcgcaaggtcgacgagtatggcaatgttgagaggcaaactgacgaatatggcaacccggttcatgccactagtgtcacttatgtagccaccaaaagtgttggtggctacaatgatgacgctaataagcaacatgatattactggtgtctatcccgagaaagacaccggtagacatcattttggtcgtggttacgacggtgacactaacaagcaacatgatgctactggtgtttatcccggaatagacattggtagagatcatgggaactaccggtgtttatggcctaaacaccgacagacatcatggaacttctggggtgaatcccgggatagacacccataaccaa

SEQ ID NO: 7627 - DNA, 354 bp, Glycine max
agagaacccgcgacctggagtcattattaacagtccacatggaaatgatgtttacaagggagtccctaaggattacattggtgaagatgtaactgttggcaacttttttgctgctatacttggaaataagtcagctcttactggtggcagtgggaaggttgtggatagtggtcccaatgatcatatatttatatattactctgatcatggcggtcctggagtgctagggatgcctactaatccatacatgtatgcatctgatctgattgaagtcttgaagaagaagcatgcttctggaagttataaaagcctagtattttatctagaggcatgtgaatctgggagtatctttga

SEQ ID NO: 7628 - DNA, 432 bp, Glycine max
aggctctggctcggaaccttcgacacggcggaggaagctgctttggcttacgacaaaggcgcgtgtaggctccgaggcgacttcgcgaggctgaacttcccgagcctgaaaggctcgtgccccggggaggagtacaagcctgtgcattccgcggtggacgctaagctcgacgcgatttgcgccaacttggcggaaatgcagaagcaagggaagacggagaaaggtgccaggtcagcgaagaaatcgaagcaaggtccgaaccaggaggccaagcccgaacctcaagcttccgctgaaagtgagggttctgcggattcttctccgctgtctgatcttacctttgatgtaaccgagccgcaatgggaacattttaatctgcagaagtttccttcttatgagatcgattgggattctctctgaacttcggctttg

SEQ ID NO: 7629 - DNA, 414 bp, Glycine max
attcagaaggagtctaccttacacttggttcttcgtttaagaggtggcatgcagattggcgtcaggactttgacgggaaagaccatcaccttggaggtggagagttcagataccatagacaatgtgaaagccaagattcaagataaggagggtatccccccagaccagcagaggcttatctttgctggtaaacagcttgaagatggacgaacccttgcagattataacatccagaatgaatctaccctgcacttggttttgaggcttcgtggtggcatgcaaatctttgctaagactttgaccggaaaaacaataactttagaagttgaaagttctgataccatcgataacgtgaaggcaaagatacaggacaaagaggggattccaccagaccagcagaggcttatctttgct

SEQ ID NO: 7630 - DNA, 418 bp, Glycine max
cttttgttcccgattttctcaaattgctttcggttttcgttctgattctgcgaaatcggggagatggagcgcatcgttgaattccctcacacctacatggatcgacccccaagaaagagagcgcgtttgggctgggacatcgctgaggcccccaagataagatccatagtaaaatgggcgaaggaacttttgggcaggtcttggagtgctgggacagagaaaggaaggaaatggttgccataaaaattgtccgtgggataaagaagtatcgagaggcagccatgatagaaattgaggtattgcaacagcttgggaaacacgataaaggtagcaatcgttgtgtgcaaatacggaactggtttgactatcgtaatcatatctgtattgtgtttgagaaacttggaccaagcttatacga

SEQ ID NO: 7631 - DNA, 361 bp, Glycine max
ggtagccggtcccaatggagggtctgctcgtaagttcactgccaaataccaaacatagggagacgctgagctcaaccaagacgaactcataactggaaaagccaaggctgatgctctattcaaggccattgaagcttaccttttgacccatcccgattacaactaatcctcttcaactcacttgtcatcactttcttgcttaggagacttatccaatcactctgttctcaacttaacttgccttacaatgtatacagtctttccttacttatatgcttatacgatataattgtgagacttatgatatatctgtatctcacttcatcaatactaagttataataaagatgagcaatccttac

SEQ ID NO: 7632 - DNA, 406 bp, Glycine max
  modified_base (351)..(351): a, c, g, t, unknown, or other
cccacgcgtccgcccacgcgttcgcccacgcgttcgtccacgcgtccgaagaaaacctaagcttagaattagaaacaaagaaaagaagaaaggaaagaattgatcgttgaaaatgcagggaggaaagaaagcgggagagtccattaaggaaacagctacaaacattggtgcttctgccaaggctggcatggagaagaccaaggccactgtccaagagaaggcagaaagaatgacagcacgtgatccggtgcaaaaggagttggcaacccaaaagaaagaggcaaagatgaaccaggcggagctggacaagcaggcggcgcgtcagcataacacggcggccaaacagtccgncaccacggctgggcacatgggacatggccaccacaccaccggaaccgggactgga

SEQ ID NO: 7633 - DNA, 368 bp, Glycine max
gaaagaaaagaccatcaaagtttcacttcagccttatccggtttagggtttcggtttgggacccaacctttgacgtatcgaaaccttaagtttcggatcaggtctgagcaatctggttggtagaacctttggtcttagagagtcaagttttatgtctgaattagacgatcaaattcctactgccttcgatccttttgctgatgcaaatgctgatgactcgggtgctgggtcaaaggagtatgtgcatattcgcgtacagcagcgaaatggaaggaaaagcctgacaaccgttcagggattgaaaaaagaattcagctataacaagatacttaaagatgttaagaaagagttctgttgcaatggaacag

SEQ ID NO: 7634 - DNA, 359 bp, Glycine max
ctctaaaaaaaacctaccaatggctcccgcaaggcagagaagaagcccgcggagaagaagccggcagagaaggccccagcggagaagaagccgaaggcggagaagaagatatcgaaggaaggaggaagcgagaagaagaagaagagaacaaagaagagcgttgagacctacaagatctacatcttcaaggtgttgaagcaagtgcaccccgacatcgggatctccagcaaggctatggggatcatgaacagtttcataaacgacatcttcgagaagctcgcccaggagtcatcgcgtctcgctaggtacaacaagaagcccaccattacttccagggagatccaaacggcggtgcgttt

SEQ ID NO: 7635 - DNA, 366 bp, Glycine max
gcagtttcctcgctctcttttctgcaattgtcttttttgctccttctctgcggttatcgttttgagcttcaatggcggacgctgaaaccttcgctttccaggctgagatcaaccagcttctcagcctcatcatcaacaccttctacagcaacaaggagattttcttgcgtgaactcatcagcaacgcttctgatgctttggataagattcgatttgagagtttaaccgacaagagcaagctcgatgctcagccagagctcttcattcgtcttgtgcccgacaaggccaacaagactctttccgttattgacagcggcattggaatgaccaaagcagatttggtgaacaacttgggtaccattgcga

SEQ ID NO: 7636 - DNA, 383 bp, Glycine max
tgcgactgtagcccaacggaaagaagataggagagctagactgcaggctcagtttgctcaaatgcgacctgttggaatgccaccatctgtcggtcctcgtgtgccaatgtatcccccaggtggtccaggtattggtcaacaaatattttatgcccaaggccctgctgctatcattccttcccagcctggatttgggtatcaacaacaacttgctcctggtatgaggccaggtgcagctcccgtgccaaatttctttgtgccaatggttcagcagggacaacagggacagcgtcctggtggaaggcgtacaggtgcagtccagcagtcccagcagcccgttccaatgatgccacagcaaatgctacctagggggcgtgtttatc

SEQ ID NO: 7637 - DNA, 341 bp, Glycine max
ctcttgctcttcgcaacaatggttgccgccaagaaaaccaagaagacccatgagagcatgaacaacaggcttgctcttgtcatgaagagcggcaaatacacccttggttataagaccgttctcaaatctcttaggagctccaaagggaaattgattatcattgctaacaactgcccccctttgagaaagtcagagattgaatactatgccatgttggcaaaggttggagttcatcattacaatgggaacaatgtggatttgggcactgcctgcggcaaatattacagagtgtgctgccttagcattattgatcctggtgattcggatatcattaagacact

SEQ ID NO: 7638 - DNA, 274 bp, Glycine max
attccaatatattccattctctctgtgtatttccctacctctcccttcaagatgcagagcttcgtgaagaccctcaccggcaagaccatcacccttgaggtggaaagctctgacaccatcgacaacgtcaaggccaagatccaggacaaggaaggaatccccccggaccagcaacgtctcattttcgccggaaagcaacttgaggacggccgtacccttgctgactacaacattcagaaggagagtactcttcacctcgtcctccgtctccgtg

SEQ ID NO: 7639 - DNA, 314 bp, Glycine max
accacgcgtccgcccacgcgtgcgtctacacatccctagctctgtcgttccgtcgttggcgatggcgtttcgggtgcgaagccctgacctacgctctctctatcttctctctctcttgtccatcgcttccgccaatgtcttcttcgaagagcgtctcgatgacgggtgggaaaatcgatgggttaaatcagattggaaaaaagatgagaacgtggctggggagtggaaccacacctctggtcaatggaatggaaacgctaatgacaaaggtattcaaaccagtgaggattacagattctatgctatttcagctg

SEQ ID NO: 7640 - DNA, 340 bp, Glycine max
cttgccatagagttgagtttgccacatcctcagggagatcaatctggtgcttttagtcgagttttgctgcctgcagatgaaggtgttgaaagttctatttggctgctagcaaaggcttatgtagttgtgaatgactcgtgctatcatcaacttgtcagccattggttaaacactcatgcagttgttgagccattcatcatagcaacaaacaggcatctcagtgttgttcaccctatttataaactccttcaccctcactatcgtgacaccatgaacataaatggccttgctcggttatcactggtcaacgacggtggcgttatagaacaaacatttttgt

SEQ ID NO: 7641 - DNA, 399 bp, Glycine max
ggaacaatggcgggtagggtttcgacgtgcttcttcttcgtgtttgctctttctctccttcttccttttcagatctccgctgaggaatcatcggagaaagagttcgtactcacattggatcactctaactttcacgacactgtcagcaagcacgatttcatcgtcgtcgagttctacgctccatggtgtggccactgtaagaagcttgctcccgagtatgagaaagctgcttctatcttgagtagtcatgatcctccggttgttttggctaaaattgatgccaatgaggagaagaacaaagaccttgcatctcaatatgatgttaggggatacccaacaattaagattctgagaaatgggggaaagaatgttcaggaatacaaaggtccccgtgaagca

SEQ ID NO: 7642 - DNA, 326 bp, Glycine max
cccacgcgtccgcccacgcgtccgcccacgcgtccgcgaaagccgaaccttaaacacagacgccggatctagcaactattgagttttgttttctttgaaacatcgtgtgcacagtaccccagaagatcgaacaaggatctccacgaagacaaacctctgttctcaactgtgtttctttacctctcacctactttcagaccataccagattgactaggctgagaagatgcagcagacaccggctatgattcctatgatgccttcgttcccacctacgaacataaccaccgagcagattcaaaaataccttgatgagaacaagaagct

SEQ ID NO: 7643 - DNA, 369 bp, Glycine max
aacgactctatctctgttcgatccggtcttccttgcgctcctcctagttggttcgttgtccctcgcgtagatcggcaatggcagataccgagacgtttgctttccaggctgagatcaaccagctcctcagtctcatcatcaacaccttctactccaacaaggaaatcttacttcgtgaactcatcagcaacgcctctgatgctttggacaagattagatttgagagtttgacggacaagagcaagctcgatgctcagccagagttgttcattcatattattcccgacaagactaacaattcggtgaccattgttgacagtggcattggcatgaccaaagcttatttggtaaaccacttgggtacaattg

SEQ ID NO: 7644 - DNA, 352 bp, Glycine max
cgcagttgagatttgagaattgactctgagaatcgagaaaatggccggtttaccagcgaggctccgtctccaacccaccgacgtcaaagccgccgccttgtggggcgttaccgccgccactggcgctctctacctcattcagccatggggatggttgaagaagacattcttggagaagccagaacctgagcaaaaatgagttggcttctgagaagagtggtttgaatttttggatcatgccaaggatgggtaacagtcgaatattgttaatttctgctgaggtcttctcgcacctgtgctttatgttatgaatttggatactaaattttaatgctctgcgcttgatggtttt

SEQ ID NO: 7645 - DNA, 410 bp, Glycine max
cgcacgcgtccggaatatcttgtcgtttggagcgatccgagaaaaactctgtgcacatgttggagtaccaggacctccttacaggtgatgagctactctctgactcctttcgttacaaggaaattgagaatggaatgctgtgggaagttgaggggaagtgggttgttaaaggagcagttgatgtagacattggtgcaaacccttctgctgaaggtggaggagaagatgagggagttgatgatgcagctgttaaggttgttgacattgttgacacattcagacttcaagagcaacccgcattcgataagatgcagtttgataccttcatgaagaggtttatcaagaattggactcccaagctcgatgcatagcaacaggagttggttaagaagcacatcgggggagcaact

SEQ ID NO: 7646 - DNA, 369 bp, Glycine max
gaacacaaaatatttttacttccattttttgactgaaagaataaaaaaatggtatgattcaacctcaaactcatttgaatgtagctgataatagcggagcacgcgaactgatgtgtattcgaatcctaggagctagtaatcgacgatatgcttatattggtgacattgttgttgctgtaatcaaacaagcagtaccaaatacgaacttagaaagatcagaagtgatcagagctgtaattgtacgtacttgtaaagaactcaaacgtagcaacggtataataattcagtatgatgataatgctgcagttgtcattgatcaagaaggaaatccaaaagggaactcgaatctttttgtgcaatcgccccggg

SEQ ID NO: 7647 - DNA, 434 bp, Glycine max
cccacgcgtccgtgcgtattcaaacattccaatgacctcatatgagcttcctgatggccagacagtggaaattggagctgacagatttaagataccagatgttcttttcaatccatccctggttcagtcaattcctggcatggagagctttgcagaaattgctccttcagttcgtggcctgccccaaatggtgattgaaagcattaataagtgtgatgtagacattcgaagagagttgtttaatagtatactgcttgctggtggtacagcttcaatgcaacaactaaaggaacgccttgagaaagacttgttagaggaatcccctcaagctgccagagtaaaagtattggccagtgggaatgctactgaaagaaggtttagtgtttggatcgggggtagtatattggcatctcttggctccttccagcaaatgt

SEQ ID NO: 7648 - DNA, 446 bp, Glycine max
cccacgcgtccgaatagattatcctaagtctttgggaatagtgctgcaatggcttcaagtcaggaggaggtgacccttttgggagctactggaagcccatttgtgtgcagggttcatattgccctcaagttgaagggagttcaatacaaatatgtcgaagaaaatttgaggaacaagagtgaactgcttctcaaatccaacccagttcacatgaaggttccagtgtttattcacagtgagaagcccatagcagagtctcttgtgattgttgaatacattgatgagacatggaacaacaaccacatcttgccttctgatccttaccaaagagccttgactcgtttctggtccaaattcattgatgataaggtttatggtgctgcatggaaatccgttttcacagctgatgagatagagcgtgagaagaatgctgaggaagcaattga

SEQ ID NO: 7649 - DNA, 402 bp, Glycine max
ctaataaaactagtagtataattcttccattccgttctacatataatcattcataatgggtgttttcacattcgaggatgaaatcaactcccctgtggctcctgctactctttacaaggccctagttacagatgccgacatcgtcatcccaaaggctcttgattccttcaagagtgttgaaaacgtcgagggaaatggtggcccaagaaccatcaagaagatcactttccttgaggatggagaaaccaagtttgtgctgcacaaaattgatagcattgatgaggcgaacttgggatacagctacagcgtggttgggggtgctgcattgccagacacggcagataagatcacattcgactccaaattggttgctggtcccaatggaaggtctgctgtgaagct

SEQ ID NO: 7650 - DNA, 373 bp, Glycine max
gaaaaaaataagaggaaatgtatgtggcttttggtaagaactaactttgaatttggccatgctattgtgtgcgttgaatgctatcctggaagaaaagaggaagacacatactaaaaataaattgaatagcattaaatgtgcatctatgctgtgaacattgaacttaaatatgcaagttgactctgtatctatgctgatattaccaatgtatgttgaaacatcactatcttttgtacacgttgaatcaattaagaggatatcagagtatgtgactcagcttagaatgattggaaaggctcacggtgtttggcactttgatcaaagactttctgaataagaagatgctgcttaatcttgaatagccctaatatta

SEQ ID NO: 7651 - DNA, 393 bp, Glycine max
gattgttgtgactcgttcttcttcgtcgttatcttcttcttttgttgtttgtgtgtccgttctttctctcacctgaaaatgtcttgctgcggtggtaactgtggttgcggaagcgcctgcaagtgcggcaacggctgcggaggctgcaagatgtacccagacttgagctacaccgagtcaaccaccaccgagaccttggtcatgggagtggcaccagctaaagctcaattcgagagtgctgaaatgggtgttcccgctgagaacgatggctgcaaatgtggagctaactgcacctgcaacccctgcacttgcaagtgacgtgttcgagagctaaagcttcaagcagaaatggcccttagaaatcatgataaagactatatgtagtttcaaaac

SEQ ID NO: 7652 - DNA, 446 bp, Glycine max
ccgagttttctgatcgctcatagagagttcgacgcggcggttgcagaagaagattgcaagatgaagttcaacatcgcgagtcccaccactggatgccagaagaagctcgagatcgacgacgatcagaaactacgagcattttgggacaagaggatctcacaggaggtcagcggagatgcacttggtgaggaatttaagggctatgtcttcaaaattactggaggttgtgacaaacaaggattcccgatgaaacagggagtgcttactcctggtcgtgttcgacttttgcttcacaggggaactccttgcttccgtggatatggaaggcgtaatggagaacgtaggagaaagtctgttcgtgggtgcattgtcagcccagacctctctgttttgaacttggtaattgtgaagaagggtgagaatgatttaccaggattgactgatgc

SEQ ID NO: 7653 - DNA, 443 bp, Glycine max
cccacgcgtccgcaacactggaggagcagtggagcaggttgagattcataaccgagcagcaacgaagacaatagctcttagtgtaaggggaagaggcagatttggagtttactcctcccagagaccactgaagtgtgtggtaggtggcgctgaaaccgacttcaactatgactcagagaccgggttgacaaccttctccattccagtttctccagaggagatgtacagatggtcaatagagatccaagtttgagtcctttttaagacttggtgtttgatgcattgttgtatcaggagaagggttttgttgtaattaagcattgagggaattgttggagtcaggcagagagagaggggggaggtttgttgtaagacacctagtattagtatcatgtagtggagaaaaagggttgttgatcctaatagctagacaaggcatgttg

SEQ ID NO: 7654 - DNA, 448 bp, Glycine max
aaaacttccacttgagagaaaagtagtgtattaagactacaaattttcaatttttcaatggcgtcgaggcaacaaaaagaggatcgagctgaggcagctgcgaaagttgctgcgaaagaactcgaacaactcaaccgagaaaaagaccgtgatttcagtgttggtgttgcagaccaacaccaacaagaagaacatcagttagatcaacaaaagcgtggtgtaatcggatccatgttcaaggcggtgcaagacacctacgagaacgccaaggaagctgtcgttggcaagaaagaaccttcgacgacgactaactcgtacagtaccagagaggttattcacgacgttgacattcaacccgatgacgcggctgcagcgagggaagtgagagacaaatcagcctcatagtcaccaggtatctacaattctgccactgctgacaacaaaaccg

SEQ ID NO: 7655 - DNA, 387 bp, Glycine max
caaaattagggtttttgtcgtagcaggaagaagcagcaatggcgccgaagataacacgcaaggtcagcagaaaccccgaattgataaggggaatcggaaagtactcgaggtcgcagatgtaccacaagaggggcatttgggctatcaaggccaaaaacggtggcgttttacctcgccacgaccccaaacccaaacctgaaactgccactgaaaaaccacccaaattttaccccgctgatgatgtcaagaaaccccttgtcaacaagcacaaacccaaaccagctaagctcagggctagcattaccctcggaacagtgtcgattcttcttgctggtagatttaagggaaagagggtagtgtatttgaagcagctaccttctgggttgc

SEQ ID NO: 7656 - DNA, 424 bp, Glycine max
attagggtttgccgattgagttagaatgagaaatgggagaacgaaaaggaatgccaagggctttggggctcttggcgatgatcctcttcttcattgcttcctcttcctctcacctcgttcgcgcttccgatgacgccgacgacgcgatcttctacgagtcgttcgacgaggattttgatggacggtggattgtatccgacaaggaggattacaatggtgtctggaagcatgccaagagtgatgggcatgatgattatggacttcttgttagtgaacaagccaggaaatatgctatagtcaaagaacttgccgagtctgtcagtcttaaggatggaacagttgttcttcagtttgagactcgccttcagaatggccttgaatgtggtggtgcatatattaaattatcttcgaccccaggagagcg

SEQ ID NO: 7657 - DNA, 443 bp, Glycine max
cccacgcgtccgtgaacagatgcagatcttcgtgaaaactttgaccggtaagaccatcacccttgaggtggagtcctccgacaccatcgataacgtgaaagctaagattcaagacaaggaagggatcccacctgaccagcagagacttatctttgcgggtaaacagcttgaggatggtcgaacccttgccgactacaacatccaaaaggaatccactctccacctcgtgcttcgcctcaggggtggcatgcaaatctttgtcaagactttgactggcaagaccatcaccctcgaggtcgaatcctcggacaccattgataatgtcaaggccaagatccaggacaaggagggtatccctccagatcagcagaggttgatatttgctggtaaacaacttgaggatggaagaacccttgctgattacaatattcagaaagagtcta

SEQ ID NO: 7658 - DNA, 433 bp, Glycine max
cccacgcgtccgcccacgcgtccgatccaatcatatgtttttgatgtcatcagggccagggtaccaaagttggagttggattctgtctttgagcagaagaatgatatagcaaaggctgtggaggaggagcttgagaaggccatgtcaacctatggatttgagatagtccagactctcattgttgatatagagcctgatgttaatgtcaagagagcaatgaacgagattaacgcagctgctagattgaggttggctgcaaatgagaaggctgaagcagaaaaaatactgcagatcaaaaaagctgagggagaagcagaatccaaatatctgtcaggactcggtatcgctcgccaacgtcaagccattgtggatggactgagggacagtgtgcttgctttctctgagaacgtgcctgggacaacagctaaagatg

SEQ ID NO: 7659 - DNA, 432 bp, Glycine max
cccacgcgtccgtgaaaatgtcttgctgcggtggtaactgtggttgcggaagcgcctggaagtgcggcaacggctgcggaggctgcaagatgtacccagacttgagctacaccgagtcaaccaccaccgagaccttggtcatgggagtggcaccagttaaggctcaattcgagagtgctgaaatgggtgttcccgctgagaacgatggctgcaaatgtggagctaactgcacctgcaacccctgcacttgcaagtgaggtgttggagagctaaagcttcaagcagagatggcccttagaaataatgataaaaactatatgtagtttcaaaacttcaaaattatgtagtatgtattatgttgcactctggtgttttgtgtctaaacaaacacccttagaataaagcggtcatttcttgcccttgagcaagttc

SEQ ID NO: 7660 - DNA, 138 bp, Glycine max
gaaaagtcaaagacaatgtccaggatcattcacaagattgaggagacccttcatgtgggaggccacaagaaagacgaggagcacaagggtgagcagcaccatggtggagaatacaaaagggagcatcatggtgaacac

SEQ ID NO: 7661 - DNA, 362 bp, Glycine max
  modified_base (33)..(33): a, c, g, t, unknown, or other
gggtattttcacatttgacgatgaaaccacctnccctgtggctcctgctaccctttacgaagctctagttacagatgccgacaacgtcatcccaaaggctgtcgaagccttcaggagtgttgaaaaccttgaggggaacggtggccctggaaccatcaagaagatcactttcgttgaggatggagaaagcaagtttgtgttgcacaaaatagaatcagttgatgaggcaaacttgggatacagctatagcgtagttggtggagttgggttgccagacacagtggagaagatcacattcgaatgcaaattggctgctggcgccaacggaaggtctgctgggaagctaactggcaaatacccaa

SEQ ID NO: 7662 - DNA, 438 bp, Glycine max
gtgagtcagcagattcacactatggtatggggcatacataggagcagagtgacaccagaggtagtgcttggctgcttgattataaatagagggcactcctctgctaaagaagcacacagcagcaagcatctccttctcaaactagtagtattattcttccattcataatgggtgttttcacattcgaggatgaaatcaactcccctgtggctcctgctactctttacaaggccctagttacagatgccgacaacgtcatcccaaaggctcttgattccttcaagagtgttgaaaacgttgagggaaatggtggcccaggaaccatcaagaagatcactttccttgaggatggagaaaccaagtttgtgctgcacaaaatagaaagcattgatgaggcgaacttgggatacagctacagcgtggttgggggtgctgcat

SEQ ID NO: 7663 - DNA, 358 bp, Glycine max
ctgctcttctcttctcttctacctgtcaagtttctgaagtataaagatggcagagacaggcctattcacctaggagtcagtgaacgagggacaccctgataagctctgcgaccaaatctccgatgctgtcctcgacgcttgcctagaacaggacccagacagcaaggttgcctgcgaaacatgcaccaagaccaacttggtcatggtcttcggagagatcaccaccaaggccaacgttgactacgagaagatcgtgcgtgacacctgcaggagcatcggcttcatctcaaacgatgtgggactcgatgctgacaactgcacggtccttgtgaacattgagcagcagagccctgatatt

SEQ ID NO: 7664 - DNA, 442 bp, Glycine max
ctctcgtacgcagggtaccaagattgcttctgaaggacttaaacatagagtgtttgagggctccttggctgatcttcaaggggatgaggatcatgcattcaagaagattaggttgagagctgaagatgtgcaagggaagaatgtcctgacaaatttctggggaatggatttcacaactgacaagctgaggtcattggtgcgaaaatggcaaactctaattgaagcccatgtggatgtgaagacaactgataactacacattgaggatgttttgcattggatttaccaagagaagagctaaccaagtgaagagaacctgctatgcacaatcaagccagattagacagattcgtaggaagatgagggagatcatgaccaaccaggcaacatcctgtgatttgaaggagttggtccgcaagtttattcctgagattattggaaaa

SEQ ID NO: 7665 - DNA, 430 bp, Glycine max
gaacagtatgtctgggagtcccatgccggtggctcatttactgtgacaagagatacatgtggtgagaaccttggtaggggaacaaagataactttgtttcttaaggaagatcaacttgagtatcttgaggaacgccgtctgaaggatttgataaagaagcattctgaattcattagctatccaatttctctctggattgagaagactactgaaaaggagatttctgatgatgaggatgaggaagagaagaaggatgaggagggtaaagttgaagatgtggatgaagataaggagaaggaggagaagaaaaagaagaccattaaggaggtatctcacgagtggtcattggtgaacaagcagaagcctatttggatgaggaaacctgaagagattacgaaagaagaatatgctgctttctacaagagtctta

SEQ ID NO: 7666 - DNA, 440 bp, Glycine max
cccacgcgtccgcagagggtgatgttagcagggcgagttgagttcttcgaacacttaagtcggagggactgctgaagacgcaacccaaccaaccatggctgcttctgatcccaacaagttgatggccaaagctgataaacaaacaagactcagtctcacgaggtggagtgcggattggaaaagtgctactgttctatatgagcaggcagctaatgggtttagagttgccaaggactatgagaatgccaaaatagcatatgagaaagcttcgaaaggacaagagatgctttcttcaccttgggatgcagctaagcacatggaatctgctgctgctctagcgaaggatctaagacactggcaagaagttgtggacttctatcgaagggcatctgaattgtatatggagtgtgggagaccccaacctgcatcagacgctcttg

SEQ ID NO: 7667 - DNA, 406 bp, Glycine max
acagaatacaaacaaacaaatagaaaacccaaaataaccgagaaaagaaaattagatagagagaagaagaaagcgtatctggaattttcgtttcgttggtgtgtcgtgtgcgtgtggaggttcttttctttgagactttccttcaaattctagattgcttccctttcttttctttcccttataaccaccaacctctccctttcccccttttcatttcttcctcgattttccatttccataaccttagtcatcttcttctttcatctttctccctaacggtatcgagggaaaaatatggcggaagaacacagatgccaggcaccgcgcttctgcgccaacaattgcggtttctttggcagccctgccacgcagaatatgtgctccaagtgctaccgcgatttccagc

SEQ ID NO: 7668 - DNA, 417 bp, Glycine max
acggacacgcgtacggaagcccatagcagagtctcttgtgattgttgaatacattgatgagacatggaagaacaaccccatcttgccttctgatccttaccaaagagccttggctcgtttctggtccaaattcattgatgacaaggttgtgggtgctgcatggaaatatatttatactgttgatgagaaagagcgtgagaagaatgttgaagagtcatatgaggctctgcagtttcttgagaatgagctgaaggacaagaagttttttggaggagaggaaattgggttggtagatattgctgctgtcttcatagcattttggatccctataattcaagaagtattgggtttgaagttattcacaagtgagaaatttcctaagctctacaaatggagccaagagttcatcaaccaccc

SEQ ID NO: 7669 - DNA, 327 bp, Glycine max
acccacgcgtgcgcccacgcgtccgtgcacagatgcagatcttcgtgaattctttgaccggtaagaccatcaggctttaagtggagtcctacgacaccatcgataacgtgaaagctaagattcaagacaaggaagggatcccacctgaccaacagagacttatctttgcggttaaacagcttgaggatggtcaaacccttgccgactacaacatccaaaatgaatccactctccacctcgtgcttcccctcatgggtggcatgcaaatctttgtcaagactttgactggcaagaccatcaccctcaaggtcgaatcctcggacacca

SEQ ID NO: 7670 - DNA, 336 bp, Glycine max
  modified_base (60)..(60): a, c, g, t, unknown, or other
  modified_base (126)..(126): a, c, g, t, unknown, or other
  modified_base (195)..(195): a, c, g, t, unknown, or other
  modified_base (244)..(244): a, c, g, t, unknown, or other
tttggtggaattctcaactcccgaggaggcatctggagcgctcctggagatgaatggcanaatggtggtaagcatacctctgatgtgacttagccaaagaaagaagataggagagctagactgcangctcagtttgctcaaatgcgacctgttggaatgccaccatctgttggtcctcgtgtgccaatgtatccnccaggtggtccaggtattggtcaacaattattttatagccaaggccctnctgctatcattccttcccagcctggatttggctatcaacaacaacttatgcctggtatgaggccaggtgcagcttctgtgccgaattttttc

SEQ ID NO: 7671 - DNA, 386 bp, Glycine max
tcgcccacgcgtccggaaacatggcttccttaagctccttagtgctgctccttgcaggtcggattctatcccctcaagttcttgcaaactatgagaatcccccagtgtacaagcctcccactgagaaaccaccagtttataagcccccagttgagaagcctcctgtttacaaacctccagttgaaaacccctcaatttataagcctccagtagagaagccaccagtgtacaagcccccagttgagaaacccacagtgtacaagcccccaattgaaaaacctccagtgtacaagcccccagttgagaaaccaccagtgtacaagcccccagttgaaaaacccccagtttacaagcccccacgtgaaaaacccctattgtacaagccc

SEQ ID NO: 7672 - DNA, 447 bp, Glycine max
gtcccaattttctagggttatattcattttccgatggcttctgcagatgttgagtaccggtgctttgtcggtgggctcgcttgggccactgacgaccatgccctcgagagagccttctctcagtacggcgaaatcgttgaaacgaaggtctgtttgttgcaggcatcacatctgatctcacacgattcggattcggaattttctcgatcccgttctgatctgtgatctctgatctgtttgcgttacttgatcttatgatacttgcgttactatatgattcttttattactcacgccaataggtaccgttcatcttcttcctttcaccaaaggcgaaagatcgatcggcttctaattggttctggctttggttttttgtgctgatttgctatagatctgataattggtttactggcttatgttcagattatcaacgatcgtgagactg

SEQ ID NO: 7673 - DNA, 390 bp, Glycine max
tgtagaagaccagcaagaaaagggaagggaggagaggggagagaaaatgccaatattagaaggttgtagatggaattagtgaacatacccgctcaaagcgacacccaaattacacgcacaaccacacctttaaattctccgcagaaggaaaaaaaggaaaaaagataaagaagccaaaagtccctcgttccatttccccctttcctccgcccggcgagaaaatgagagaaatcctccacatccagggcggccaatgcggcaaccagatcggagccaagttctgggaagtaatctgcgacgagcacggcatcgaccacaccggaaagtacagcggcgactccgaactccaattggaacgcatcaatgtctactacaacgaggccagcggcg

SEQ ID NO: 7674 - DNA, 379 bp, Glycine max
tcgagcatgcgcaaatttctactatttttcaatggcttctgcagatgttgagttccgttgcggtgggggtgggcttgcttgggtcaccggcaacgatgccctcgagaaagccttttcaatctacggcgacatcgttgaatcgaaggttatcaacgaccgtgagactggaaggtccagaggattcggatttgtgaccttcgcctcagagcagtcaatgaaagatgcgatcgcaggaatgaacggccaggaccttgacggtcgtaacatcactgtcaacgaagctcagacccgcgccagccgtggtggtggtggaggcggtggtttcggaagtggtggtggatacaaccgcggtagcagtggatatggtggtggtggtggc

SEQ ID NO: 7675 - DNA, 429 bp, Glycine max
cacaaaagtgttccacttgagtgaaaagtagtgtgttaagaactaaacaatttttcaatggcgtccaagaaacaagaggagcgagctgaggcagctgcgaaagttgctgccaaagaactcgaacaagtcaacagagaaagaagagaccgtgatttcggtgttgatgctgaacaacaacaacaacatcatcaggaagatcaacaaaaacgtggtgtaatcgggtccatgtttaaggcggtgcaagacacctacgagaacgccaaggaagctgtcgttggcaagaaagaagctactaataacgcgtacagtcatacagaggttattcacgatgttaacattcagcccgatgacgtgtcggcaacgggcgaagtcagggacatatcaatcacaaagactcatgatatctacgattctgacacggaccacatc

SEQ ID NO: 7676 - DNA, 407 bp, Glycine max
  modified_base (21)..(21): a, c, g, t, unknown, or other
tcgaccacgcgttcggccttnctagaacgaaacaaataagaagagcatttttccctcaccagggaagagaaagcatacaatggccgatcaacttaccgatgaacagatctcctagttcaaggaagccttcagcttgttcgacaaggacggctatggttgcatcacaaccaaggagcttggaactgatatgcgttcattggggcaaaacccaactgaggcagagcttcaggacatgatcaatgaagtggatgctgatgggaatggtaccattgacttacctgagttcctaaatctcatggccaggaagatgaaggacactgattctgaggaggagctgaaagaggcattccaggttttcgacaatgaccagaatgggttcatctctgctgctgaactccgtcatgtga

SEQ ID NO: 7677 - DNA, 308 bp, Glycine max
ggaactgagcaagcttttggggtctgttaccattgccaacggaggtgtcttgccgaacattcaccagactctgcttcccaagaaggctggaaaggggaagggcgaaattggatctgcctctcaagagttttagggtttttgttttacccatttggactatagttttgattttattgcgtttgtaacatacatgtttcggttattttctacatgtcttctctgagaaattaggtgcttctcagtctgatgaactggatggtgtattatcacttttgaatcagatgtgaatgtgaagtgctatttggatt

SEQ ID NO: 7678 - DNA, 405 bp, Glycine max
cccacgcgtccgcccacgcgtccgtgataacttaattagtgttcatgaatatgtcaagccttactttagtggttctaaattgaaaagctttctagctggtcataatatcaccattactgatggtattgacaaaactagtgcaactttgcaatttagaaagttagcagattgtgattttctcaagagaaactttaagcagatgtctaatgttttgtgggtggctcctgaggacaaggcgagtttatggtcacaacttcattatgtttcgtgtaataatctggaaatgcaagaagcttatcttgtcaatctcgtaaatgtgttacgagaattgtatttgcacagtccagaggaagctcgccaattgagaagggaagctctctctcgtattgaatggctgcaaaaagc

SEQ ID NO: 7679 - DNA, 385 bp, Glycine max
  modified_base (288)..(288): a, c, g, t, unknown, or other
gttgacttttagtgatgtatgttttagttgtctatttgtttgtgtatcttgtgctgcggtatgtactgtcatcgtaggtgagttcacttgtttttatttggggttacaacttttctttttgcagaatcgtcatagaaatccagcaatgtctggtggttattctcagcaaggttaccaaacttgggcaaccaatagctgggggtccccttgttgttctattgcacaatcttgttatgggtatgtgcaggcaggaacatactctggtacaccccagtattacatgcctcnagcaacaatatgcaggctattctccccagtcatctggtggatattctgccaccaacctgggatcagtccactgccccacagcagcagtcaacccatg

SEQ ID NO: 7680 - DNA, 365 bp, Glycine max
cccacgcgtccgggacgaagatgccttcttcgctgattacgctgaggctcaccaaaagctttctgagcttgggtttgctgaagcctaagcaacgttttggggattgttggagaggcacggtgcccataatatttctctcataaattctatggtcatggtttctaatgcgccactgtgggttcctcaaatttttagatagcttttgaatgtattttgctggacgtggtgatgatgattggagttgggttgtttttatttgtggtcgatccttttgttaaataacattgttcagcgattgcgatattattaccctttgtagtatgtgaccatttaccgtaataactagtaatttgtctattattact

SEQ ID NO: 7681 - DNA, 405 bp, Glycine max
gtttcgaatagattatcctaagtctttgggaatagtgctgcaatggcttcaagtcaggaggaggtgacccttttgggagctactggaagcccatttgtgtgcaaggttcatattgccctcaagttgaagggagttcaatacaaatatgtcgaagaaaatttgaggaacaagagtgaactgcttctcaaatccaacccaagtcacaagaaagttccagtgtttattcacaatgagaagcccattgcagagtctcttgtgattggtgaatacattgatgagacatggaagaacaaccccatcttgccttctgatccttaccaaagagccttggctcgtttctggtccaaattcattgatgataaggtttttggtgctgcatggaaatccgttttcacagctgatgag

SEQ ID NO: 7682 - DNA, 392 bp, Glycine max
aatcaatcaaattctttgagttgaacacaggggccaagattccttctcttgggttagggacttggcaagctgaacctggtgttgtagctgaagctctcaccacagccattcaggttggatacaggcatattgactgtgctagtgcgtataagaatcaagcagagattggttctgctcttaagaagctttttgatgatggtgtggtgaagcgtgaggacttatggatcacttccaaactctggtgttcagatcatgcaccagaagatgtgccaaaagcattggataaaacattacaggaattgcaacttgactatcttgacctctatctgatccactggccagtccgcatgaaaagtggaacatttggactcaataagaatatcttgagcaac

SEQ ID NO: 7683 - DNA, 407 bp, Glycine max
ataaattctattctggttgacgcttctctcaccatccccatttcgcgttggtgcaaagcatccttcagttcaatttctctctctcagcgctttctgcaatcgaacctttcatctccaaagggatccacaggccgaaggagaaatggggctgacattcacaaagcttttcagtcggcttttcgcgaaaaaggaaatgcgaattctgatggttggtcttgatgctgctggtaagaccactatcctgtacaagctcaagctcggagagatcgttaccacaattcctaccatcgggttcaatggtgagactgtggaatacaagaacattagcttcactgtttgggatgttggtggccaggacaagattgcgcccttgtggaggcactacttgcagaacacccaaggtctta

SEQ ID NO: 7684 - DNA, 414 bp, Glycine max
caacactggaggagcagtggagcaggttgagattcataaccgagcagcaacgaaaacaatagctcttagtgtaaggggaagaggcatatttggagtttactcctcccagagaccactgaagtgtgtggtaagtggcgctgaaaccgacttcaactatgacttagagaccgggttgacaaccttctccattccagtttcttcagaggagatgtacagatggtcaatagagatccaagtttgagtcctttttaagacttggtgtttgaagcattgttgtatcaagaagagggttttgttgtaattaagcattggaggaattgttggagtcaggcacagagaaaagggggaggttgttgtaagacacctagtattagtatcatgtagtggagaaaaagggttgttgatcctaatagc

SEQ ID NO: 7685 - DNA, 373 bp, Glycine max
tttaaacatgccagtacctttcactactggttattccacattcgaagaaataaactcacccactaagcactacacaaatcacacagagttgcaagagaaagataaaagaagatggcgactcttgattccgacgtgcctatggttcccgccggcgagccctcgagcagcgccggtccttcttccaagaagcccaagcgcttcgagatcaagaagtggaacgccgtcgctctctgggcttgggacatcgttgtcgataactgtgctatctgccggaaccacatcatggatctctgcatcgagtgccaagccaaccaggctagcgccactagcgaggaatgcactgtggcttggggaggttgtaaccatgcttttc

SEQ ID NO: 7686 - DNA, 207 bp, Glycine max
cccacgcgtccgggaagatccaggggttttggatttgtgaccttcgcctcggagcagtccatgaaagacgccatcgaagggatgaacggccaaaaccttgacgggcgtaacatcactggtaacgaagctcagtcccgtggtggcggtggcggcggaagcggtggaggtggtggatatggtggtggtcgcagtggtggatatggtggt

SEQ ID NO: 7687 - DNA, 379 bp, Glycine max
actacaagtacttccttacaatcaaaaccaacaacaactatggcaagttatcaaaagcactacgatgatcagggtcgcaaggttgacgagtatggcaacgttgagaagcaaaccgacgaatacggcaaccctgttcatgctgctagtgtcacctatgtagccaccagaactgctgctggtggttacagtgatgacattaataagcaacatgataccaccaatgcctacggcgtagacactggtagacagcattctagtggtggctacgatggtgacactaataaacatcatggaactactggtggctataatgatgacaccaatagacatcatggaacttccggtgtctatggtatagacaccgatgggcaacaacatg

SEQ ID NO: 7688 - DNA, 333 bp, Glycine max
ctcaaactagtagtattattcttccattccgttctacatataatcattcataatgggtgttttcacattcgaggatgaaatcaactcccctgtggctcctgctactctttacaaggccctagttacagatgccgacaacgtcatcccaaaggctcttgattccttcaagagtgttgaaaaccttgaaggaaatggtggcccaagaaccattaagaaaaacacttttcttggaggttggaaaaaccaagttgggctgcacaaaatagaaagccttgatgaagccaaccttgggatacagcttcagcgtgggttggggtgctgcattgccagaca

SEQ ID NO: 7689 - DNA, 378 bp, Glycine max
tgtgactcgttcttcttcgtcgttatcttcttcttttgttgtttgtgtgtctgtttggtctgtcacctgaaaatgtcttgctgcggtggtaactgtggttgcggaagcgcctgcaagtgcggcaacggctgcggaggctgcaagatgtacccagacttgagctacaccgagtcaaccaccaccgagaccttggtcatgggagtggcaccagttaaggctcaattcgagagtgctgaaatgggtgttcccgctgagaacgatggctgcaaatgtggagctaactgcacctgcaacctctgcacttgcaagtgaggtgttggagagctaaagcttcaagcagagatggcccttagaaataatgataaaaactatatgtag

SEQ ID NO: 7690 - DNA, 373 bp, Glycine max
cccacgcgtccggtcgctgctccgtaccagtttcactgcataaatttgagagaaaactctgcaaacatgttggtttatcaggacctccttacaggtgatgagcttctctcggactccttccgttacaatgaaattgagaatggaatgctgtgggaagttgaggggaagtgggttgttaagggagcagttgatgttgacattggtgcaaacccttctgctgagggtggagaagatgagggagtcgatgacgcagctgttaaggttgttgacattgctgatacattcagacttcaggagcaacccgcttttgataagaaacagtttgttaccttcatgaagaggtttatcaagaatttgactcccaagctcgatg

SEQ ID NO: 7691 - DNA, 417 bp, Glycine max
cgaagcgcaatttgtcagtggaagaacttttaaatatgacataattggtgctggttgacattcttctgaggaactttctgaagaaaagaatcagggaaaagtaaagcaggttgatgctaggttgaggcaaagaatagatccacaatacaatgaagttcaagctcaaatggaaacaaatctattcaaattgtctcttgatgatgttgagactccaaaaggttccatgttagacctcaagatttcccaatctaagattgcactttccaaaaatacagttggagggaccattttgcgcagtgatttgctggcaaatttcttaacagaaggcaattttagagcaagtgttgatttgcaacgtacccaccgtatcaaaggaatgattaaaatggtggctacagttggcatttctggaaacac

SEQ ID NO: 7692 - DNA, 415 bp, Glycine max
cccacgcgtccgcccacgcgtccgcccacgcgtccgcccacgcgtccgcccacgcgtgcgcccacgcgtccggttgcaagggataacataacagagtttcgttgaatctgcactaagaccctacgcgcacatcttgcaactccaatcgacatagcagcaatgtctacgctcgaaattgaagctcgagatgtcatcaagattgtgcttcagttttgcaaagaaaattcgttgcatcagacttttcagatgctgcagaacgaatgccaggtttctctgaacaccgttgacagcattgagacctttgttgctgatattaatagtggaaggtgggatgcaatattgcctcaagtttctcaactcaagcttcccaggaataagttggaggatttgtacgagcagattgtattagaaatga

SEQ ID NO: 7693 - DNA, 375 bp, Glycine max
gtgttttgttagttcacacactaagttctgaaaaatgagttccaaagtttttgttatgctacttatgttcatggccactatacttttgatctcctctgaggttgcacccgatgatgcataccagaattttgacaaaacagatgggaagcgtagtgcaaatggggtagatgaaagcaaatattggcgtggtggctatggcgactatggtggttggcgtggtggtggttggcgtggtggctatggaggctggcgtggtggctatggtggtgggcgtggtggctatggtggctggcgtggtggctatggtggtgggcgtggtggctacggaggttgcggtggtgggcttgggcctaacgaacataatgaggctgggat

SEQ ID NO: 7694 - DNA, 433 bp, Glycine max
cacttttctctttgattcatcaatggcaaccgcgaggaccgtgaaggatgtttcgcctcacgatttcgtgaaggcgtacgcctcccatctcaagcgttccggcaagatggagcttcctgagtggactgatattgtaaaaacagcaaaatttaaggaattggctccatatgatcctgactggtattatgttagggctgcctcaatggcaagaaagatttatttgagaggcggtcttggtgttggggctttccagaggatctatggtggaagcaagagaaatggaagccgtcccccacatttctgcaagagcagtggggctattgcaagacacattctgcaacaattgcaaaacatgagcattgttgagattgatacaaaaggaggtatgaaaatcacatctagtggtcgaagggatcttgatcaaattgctggg

SEQ ID NO: 7695 - DNA, 408 bp, Glycine max
gaaagctggaaggagataagaaatgataatacagttacttggttagcctattggagtgaccctatcaatcccaagttattcaaatatgtatttctggctgctagtagttccttgaaggggcaaagcgacaaggaaaagtatgagaaagctaggatgttaaagaattatatagggaatattaggtctgcatacacaaaagattttaccagtaaagatattacaaagcagcaaattgctgttgctacttatcttattgataaattagctctgagggctggcaatgagaaggatgacgatgaagctgatacttgtggttgctgcacgttaaaagtagagaatgtgactagagaaccccccaacaaactgaagtttaacttccttgggtaagattctatcaagtatgaaaat

SEQ ID NO: 7696 - DNA, 428 bp, Glycine max
attcgtccgggaaattagggttagggttgcagcgtcctccatcagcacccgtatataaatacccttttcccgcccacttgttctaccgtaatccttacgctctctcactcacaaacgcacactgaattcaaaaacatcgaaagagagaggcatggccgagcaaaccttcatcatgatcaagccagatggcgttcaaagaggccttattggcgagattattagcagatttgagaggaagggtttttacttgaaagggttgaaactcgttactgtggaccgtccttttgctgagaagcactatgctgatatgtctgcaaagccctttcttagtggatacgtggattacattgtctctggctcctgtagctgccatgatctggggagggtaagaatgatgttacaactggcccgaaagattatcggagcca

SEQ ID NO: 7697 - DNA, 373 bp, Glycine max
  modified_base (348)..(348): a, c, g, t, unknown, or other
agcatcatcatgtccaccgcagcgcagcccaaggccaagaaaacggcgtcgtccaagaagcccgtctcccatcctaccttcgccgcgatgatagcggaggcgatagcgagtctgaaggagagaaccggttcgagccaatacgcgataaccaaattcatcgaaggcaagcacaaggagttgcctccaacctacaagaagcttgttctcgttcatctcaagaagtctgttgctgctggcaagctcgttaaggtcaaaaaactctttcaagctcgcaccgactaagtctgctcctgttaaagccgctgctgctcccaagaagcccaccaaagctgcggctaagcccgccgncaagcccgcttccaagcccaaagct

SEQ ID NO: 7698 - DNA, 409 bp, Glycine max
ctcgcactctctctacgcacgcctcaacatcccttctctgctccattcattatgtctccgtcgttggatcttccccccaagggtggcttcagtcttgatctatgccgaagaaacgcaatgcttcaaaacaagggcctcaaagccccaacctttctcaaaactggcaccactattgtcggtttagttttccaggatggtgtcattcttggagctgatactagggcaactgaaggacctatagtggctgataaaaactgtgagaaaatccattatatggcacccaacatatattgctgtggagcaggcacagcttgtgatacagaagctgtaacagacatggttagctcacagctgcaactacatcactaccatactggtcgggaatcaagagttgctacggcactgactc

SEQ ID NO: 7699 - DNA, 404 bp, Glycine max
gaagaaaacctaagcttagaattagaaacaaagaaaagaagaaaggaaagaattgatcgttgaaaatgcagggaggaaagaaagcgggagagtccattaaggaaacagctacaaacattggtgcttctgccaaggctggcatggagaagaccaaggccactgtccaagagaaggcagaaagaatgacagcacgtgatccggtgcaaaaggagttggcaacccaaaagaaagaggcaaagatgaaccaggcggagctggacaagcaggcggcgcgtcagcataacacggcggccaaacagtccgccaccacggctgggcacatgggacatggccaccacaccaccggaaccgggactggaaccgccacgtattccaccaccggggaatatggtcagcccatgggg

SEQ ID NO: 7700 - DNA, 436 bp, Glycine max
cggacgcgtgggcggacgcgtgggccgacgcgtgggttccattccgatctacatataatcattcataatgggtgttttcacattcgaggatgaaatcaactcccctgtggctcctgctactctttacaaggccctagttacagatgccgacaacgtcatcccaaaggctcttgattccttcaagagtgttgaaaacgttgagggaaatggtggcccaggaaccatcaagaagatcactttccttgaagatggagaaaccaagtttgcgcttgacaaaatcgaaagcattgatgatgcgaacttcggatacagctacagcgtggtttggggtgctgcattgccagacacggcggagaagatcacattcgacttcaaatatggtgcctggtccaaatgaaggttctgttgggaagctaactgtcaaatacgaaacaaa

SEQ ID NO: 7701 - DNA, 382 bp, Glycine max
cttcttctcgtttttactttgacggtttctagagagagaaagtttgttatagagagagaaagcgcgctgctgcttcttctgctgctgcttcgacagtgagaagagagagagaagcgctcttctccgtaccgtttctagagagagaaactgatggccggagttaatccgaacggcgtcgccgattttccggcgactccaacgcacggcggacagttcattcagtacaacatattcggaaacctcttcgaggttacggcgaagtaccgtcctccgatcatgcctgtcggacgcggggcgtatggaatcgtttgctcgctggtgaataccgagaccaatgaactggtggcggttaagaagatagcgaacgctttcgacaatcaca

SEQ ID NO: 7702 - DNA, 343 bp, Glycine max
  modified_base (321)..(322): a, c, g, t, unknown, or other
gtttggttgtaagcagaaacttctctgttttaaatcattgtttgtgatttagctctatggtttttggttctgtttgtgattgaacagatgcagatcttcgtgaaaactttgaccggtaagaccatcacccttgaggtggagtcctccgacaccatcgataacgtgaaagctaagattcaagacaaggaagggatcccacctgaccagcagagacttatctttgcgggtaaacagcttgaggatggtcgaacccttggccgactacaacatccaaaaggaatccactctccacctcgtgcttcgcctcaggggtgcatgcannatcttgtcaagactttgactg

SEQ ID NO: 7703 - DNA, 367 bp, Glycine max
cggcttcagaatggccttgagtgtggtggtgcatatctaaaatatctccgaccacaggaggctggatggaaatccaaggaatttgataatgaatctccatattctatcatgtttggtcctgacaagtgtggtgccacaaacaaagtacacttcattttcaagcataagaatcccaagagtggggagtatgttgaacaccatcttaagaatcccccttctgtcccgtctgacaaattatctcatgtgtacactgccattttgaagcctgacaatgagttgcaaattttgattgatggggaacagaagaagaaggtaaatttcttatctgctgatgattttgaaccccctcttatcccttccaagacaa

SEQ ID NO: 7704 - DNA, 426 bp, Glycine max
cccacgcgtccgctgaaaatgagttccaaggttttgcttgttctacttatgttcttggcgcactatacttctgatctcctctgaggttgcacccgatgatgcatacgagaattttgacaaaatagatgggaagcctagtgcagatggggtagatgaaagcaagtattggcgtggcggctatggtggcggctatggtggtggttatggaggtgggcgtggaggctatggaggtgggcgtggaggctatggagggggacgtggtggatatggcggcggacgaggtggctatggtggcgggcgtggtggctatggcggcggccgtggtggcgggcgtggtggctatggtcctaatgaacataacgaggctggggttgatgctaaccttaacaactaagaaggcaactttctaaagcttatatatgggtt

SEQ ID NO: 7705 - DNA, 405 bp, Glycine max
gcaattcccaatggcctccattttcaagctctcaacgccatctccagctgcttccttatcagaagcgcttcgccccagagattctcgcttcctctccttcaatccttcttccaacgctattaattacaaaattaacctctccgcttccctccgatccattcactccctccctcttaaaacctccttgcggatcaaatgctcccaaacagatgggaatggaagtcctgcaaagaggacagtgcttcatgatctttatgagaaagaaaggcagagtccatggtatgataatctctgcagacctgttacagaccttcttcctcttatagcaagtggtgtcagaggcgtcactagcaaccctgcgatttttcagaaagctatctcatcatcgaatgcttacaatgatca

SEQ ID NO: 7706 - DNA, 450 bp, Glycine max
  modified_base (345)..(345): a, c, g, t, unknown, or other
  modified_base (436)..(436): a, c, g, t, unknown, or other
cccacgcgtccgcggacgcgtgggctcgcactctctctacgcacgcctcaacatccctgctctgttcacttgctttgcaggctccattcattatgtctccgtcgttggatcttccccccaagggtggcttcagttttgatctatgccgaagaaacgcaatgcttcaaaacaagggcctcaaagccccaacctttctcaaaactggcaccactattgtcggtttagttttccaggatggtgtcattcttggggctgatactagggcaactgaaggacctatagtggctgataaaaactgtgagaaaattcattatatggcacccaacatatattgctgtggagcangcacagctgctgatacagaggctgtaacagacatggttagctcacagctgcaactacatcgctaccatactggtcgggaaatcagagttgntacggcactgactc

SEQ ID NO: 7707 - DNA, 236 bp, Glycine max
cccacgcgtccgacgaggccaaatatttaatgttgttgccaactccagaatgattgttagagttgcagacgtgcaaagagtacgataaggatgtgattttggattacctgaaagaactaatccttttcttgcaatattatgttgtgtgtacccataactccatgaatgcaactcgttgacctatctcaataaatgccgtttgtatttgttagtatttaaaaaaaaaaataatgatt

SEQ ID NO: 7708 - DNA, 413 bp, Glycine max
cccacgcgtccgcgattgcaaaaatcgaaacgagtttcatgggcctccgatttagatctttgtcaggttaggctattcttatcagaggaatctccttcacaggttgggttaaattctcaagaccacgtccaagcaaagacatcattgctgttgcatccagatggagcaggttctgacgacattctgcctcctggatttgagggaactcatgctaaaagtcagtccgagattaagctatcccaaataccagttattaaatggattactcctccaaagggtacattggagagtttgagtacgttgatgatcacagagctggaaaaattgttgttgaattgaatggtagactgaacaaatgtggggttattagtccgcgttttgatgttggtgtcaaagagattgaatgttggact

SEQ ID NO: 7709 - DNA, 421 bp, Glycine max
tgcatttctatttctaactaattattgtgcttattattattgttgagaaagaaaagaatggcaaagttaataaaattctttgagttgaacacaggggccaagattccttctgttgggttaggcacttggcaagctgagcctggtgttgtagccaaagctgtcaccacagccattctggttggatacaggcatattgattgtgctcaagcgtataacaatcaagcagagattggttctgctcttaagaagctttttgatgatggtgtggtgaagcgtgaggacttatggatcacctccaaactctggtgttcagatcatgcttcagaagatgtgcccaaagcattggataaaacattgcaggatttgcaacttgattaccttgacctctatctgatccactggccagtgcgcatgaaaagcg

SEQ ID NO: 7710 - DNA, 445 bp, Glycine max
ggattcccggccgaccccgcgtccgcacacactaagttctgaaaaatgagttccaaagtttttcttattctacttatgttcatggccactatacttttgatctcctctgaggttgcacccgatgatgcataccagaattttgacaaaacagatgggaagcgtagtgcaaatggggtagatgaaagcaaatattggcgtggtggctatggcgactatggtggttggcgtggtggtggttggcgtggtggctatggaggctggcgtggtggctatggtggtgggcgtggtggctatggtggctggcgtggtggctatggtggtgggcgtggtggctacggaggttggggtggtggctttggccctaacgaacataatgaggctgggattgatgctagcctttacaactatatggaaacttgctaaagcttatataggatttaagtta

SEQ ID NO: 7711 - DNA, 353 bp, Glycine max
acgctttgacacaaggcataagcctatccatattaacccatatgttcatccagactcggtcgagggacaactgtaacgaattgattcctgaatatttatgctcatccaagggtattgcggattccgaaaatctaccacttcacattttaagacaaatgttgcaacagaacaagaacttgaaagtcatcagaaagaacttcgataaaaaatgccctgagctcttctttgaaattgcagagaacaatgaggattacaacaagttctatgacgcttctttcaagaacttcaaactaggtatccatgaagattcacagaacataggaaagattgctgaattgctcaggtaccacttc

SEQ ID NO: 7712 - DNA, 363 bp, Glycine max
  modified_base (344)..(344): a, c, g, t, unknown, or other
cccacgcgtccggtttgtactgcacaagatagaagcagttgatgaggcaaacttgggatgatagctacagcgtagtgggtggtgctgcgttgccagacacagcggagaagatcacattccactccaaattggctgctggtcccaatggaggctctgctggcaagctcactgtcgaataccaaaccaaaggagatgctcagcccaaccaagaccaactcaaaactggaaaagccaaggctgatgctctcttcaaggccattgaggcttaccttttggccaatcccgattacaactaatccaattcgatcaacttcatgattatcatcactatctctcttgctgtntctgagactgcatatatct

SEQ ID NO: 7713 - DNA, 235 bp, Glycine max
ccacgcgtccgcgtgttgcttgcgattcttaatcgaataattagcaatcaatcatcatgtcgacggggaaggatatctcactgaagagttcggacagcgatgctttcgaggtggacgaagcggtggctctggaagctcagacgataaagcacatgatcgaggacgactgtgcagatagcggcatacctctgccgaacgtgacgagcaagatcctggcgaaggtgatgagagtact

SEQ ID NO: 7714 - DNA, 405 bp, Glycine max
  modified_base (30)..(30): a, c, g, t, unknown, or other
accgccgagattcattcttcaccaattttnctcaaagaaacactacacatccatggcaactgctggcgtgcaagaagttcgtgttccccctctaacttccacctctgagccaccttctctctttgacggaaccaccaggttgtacatcagttatatttgtccctatgcgcagcgtgtttggatcactcggaactataagggactacaagacaagatcaaactggttcctattgacctacaaaacaggcctgcttggtataaggagaaagtctaccctgaaaacaaggtgccatcattggagcacaatggaaaagtcttgggtgaaagtctcgaattggtcaaatacatagatgacaactttgaaaggccgtctctagttcccagtgatcctgccataaaaagatt

SEQ ID NO: 7715 - DNA, 278 bp, Glycine max
caggttttcctgtttgctaactcgaaatgtaagaggtatttccacaacaggttgaagccatcaaagctcacctggactgcaatgtacagaaagcaacacaagaaggacattgctcaagaagctgtgaagaaaagaagacgtgctgccaaaaagccttactccaggtccattgtcggtgccactttggaagttatccagaaaaagagagctgagaagccagaagttcgagatgcatatagggaaactgcccttcgtgaaattaaagagaggaacaagaa

SEQ ID NO: 7716 - DNA, 357 bp, Glycine max
ccgagattcattcttcaccaaaacttcgcaaagaaacactacacatccatggcaactgctggcgtgcaagaagttcgtgttccccctctaacttccacctctgagccaccttctctctttgacggaaccaccaggttgtacatcagttatatttgtccctatgcgcagcgtgtttggatcactcggaactataagggactacaagacaagatcaaactggttcctattgacctacaaaacaggcctgcttggtataaggagaaagtctaccctgaaaacaaggtgccatcattggagcacaatggaaaggtcttgggtgaaagtctcgatttggtcaaatacatagatgacaacttt

SEQ ID NO: 7717 - DNA, 367 bp, Glycine max
atatacacttgtactgttctattagttcatactaagttctgaaaatgagttccaaggttgtgcttgttctacttatgttcttggccactatacttctgatctcctctgaggttgcacccgatgatgcatacgagaattttgacaaaatagatgggaagcctagtgcagatggggtagatgaaagcaagtattggcgtggcggctatggtggcggctatggtggtggttatggaggtgggcgtggaggctatggaggtgtgcgtggaggctatggacggggacgtggtggatatggcggcagacgaggtggctatggtggcgggcgtggtggctatggctgcggtcgtggtggctggcgttgtggcta

SEQ ID NO: 7718 - DNA, 371 bp, Glycine max
ctctctaccattgccatggatccctacaagcaccggccatccagcgccttcaattcgcccttctggactacaaattctggtgctcctatttggaacaacaactcctctttaaccgttggagctagaggtccaattctgctggaggattatcatcttgtggagaagcttgcaaattttgatagggaacgtatcccagaacgtgttgtccatgccaggggcgctagtgcaaagggtttctttgaggtcacccatgacatttctcacctgacatgtgcagatttccttcgagcccctggagttcagacgcctgtaattgttcgtttctcaactgtcattcatgagcgtggtagccctgaaaccttgagggaccc

SEQ ID NO: 7719 - DNA, 372 bp, Glycine max
cggacgcgtacggccacgcgtccgggaggagcttgagaaggccatgtcaaccgatggatttgagatagtccagactctcattgttgatatagagcctgatgttaatgtcaagagagcaatgaacgagattaacgcatctgctagattgaggttggctgcaaatgacaaggctgaagcagaaaaaatactgcagatcaaaaaagctgagggagaagcagaatccaaatatctgtcaggactcggtatcgctcgccaacgtcaagccattgaggatggactgagggacagtgtgcttgctttctctgagaacgtgcctgggacaacagctaaagatgtcatggacatggtgctggtgactcaatactttgacac

SEQ ID NO: 7720 - DNA, 350 bp, Glycine max
attcgaccactggtggttctgaagctggtatttccaaggatggacagactcgtgagacatgctctgctttcattcaccctaggtgtgaaacagatgatgagctgctggaacaaagtggatgctactacacccaagtattccaaggccagatgtgatgaaattgtgaaggaagtctcttactacttgaagaaagtatgatacaaccctgacaagattccttatgttcctatctgtgattacgagggatacatcatgattgagaggtccacaaaccttgactgatacaagggtccaactctgcttgatgcacttgaccagattagtgagcccaagatgccctctgacaagcc

SEQ ID NO: 7721 - DNA, 240 bp, Glycine max
  modified_base (179)..(179): a, c, g, t, unknown, or other
  modified_base (208)..(208): a, c, g, t, unknown, or other
ctacgggagttgtcctcctcgtactctgctcaataagctgtctcagggcagttatctcaccactcaggagcaatggttcaatcaaaccctcgatcacttctctccctatgatcaccatcaattccgtcaacgttacttcgagtttctagactatttccggattcctgatggaccaattntcttggtaatcggtggtgaaggtccatgntatgggataacaaatgactatattggtgtact

SEQ ID NO: 7722 - DNA, 386 bp, Glycine max
ctcctctgtctctctctctccaccattgccatggatccttacaagctccggccatccagcgccttcaattctcccttctggactacaaattctggtgctcctgtttggaacaacaactcctctttaaccgttggagctagaggtccaattctgcttgaggattatcatcttgtggagaagcttgcaaactttgacagggaacgtatcccagaacgtgttgtccatgccaggggagctagtgcaaagggtttctttgaggtcacacatgacatttctcacctgacatgtgcagatttccttcgagcccctggagttcagacgcctgtaattgttcgtttctcaactgtcattcatgagcgtggtagccctgaaaccttggaggaccc

SEQ ID NO: 7723 - DNA, 355 bp, Glycine max
gagaaaacccccaaccccaacctcaaccttaacctctcctcactttcttttcaaccagaactatgattaagctttttaaagtaaaggaaaaacagagagaactggcagaaaatgcgagtggcggaccacccgttaagaagcaaagtgccggcgagttgcgtcttcacaaagatataagcgagctgaatctaccaaaatcatgtaccatgcaattccccaatggcaaagatgacctgatgaactttgaagtttcaattcgacctgatgatggatattacttaggtggcacatttttgttttcctttcaagtgtctcccatctatccacatgaagcaccaaaggttaaatgcaagac

SEQ ID NO: 7724 - DNA, 386 bp, Glycine max
  modified_base (150)..(150): a, c, g, t, unknown, or other
  modified_base (271)..(271): a, c, g, t, unknown, or other
ctttcatatccaaattccaatgcttcttcttccttcttatttcaatttcaatcactactattattactctttcacgcttttgcttctcgatttttaaaccctaaatctatctatctgtctaatagataagatagggcaaaaacataacanaacataataaaaccctagccaaagaaagaccttgttgagcagcagcagcagagagagagaggcttatggaaggagtaccgcacccaatacccagaactgtcgaagaggttttcaccgattntaagggcagacgcgctggtttgattaaggccctcactactgacgttgaaaagttttaccagcagtgcgatcccgagaaggagaatttgtgtctatatgggtttccaaatgaaaca

SEQ ID NO: 7725 - DNA, 375 bp, Glycine max
aaaaccctaatttctcgaaaggtatggttttgcatagcctactcctcctctcacggtttcttctttctatcttctcacctttcttcttccactggtctaatctaagatgggcaagtcaagcaagaaatcacctctcaaggtcgacgcttttccagctgtggttcccccatccaagtctgccaagaatggaggcaagagacaagctcatgatgaaattgactagcaattgagtgccaaaaaacagaagattaatgaggttgctcagaaacaaaaggaggcaaaggtgcacaagaaggaaagtagctcagatgattcttcttcagaatctgaagatgagaaacctgcacccaaatctgctgatctttcaaaaaagat

SEQ ID NO: 7726 - DNA, 437 bp, Glycine max
  modified_base (400)..(400): a, c, g, t, unknown, or other
cccacgcgtccgctgagggagaggagagcattttcatttttcaacttgagagaagaagagaaggggaaaaggaaaaaaaggcaaaatgggtaaggatctgagcgatgagcaagtgtcttcaatgaaggaagctttctctttattcgacacagacggtgacggtcggatcgcgccgtcggagctggggatcctgatgaggtctctgggagggaacccgactcaggcccaactcaaagccatcgtggccgaagagaacctcacggctcccttcgacttcccccgattcctcgatcttatggccaaacacatgaaacccgaacccttcgatcgccaactccgcgacgccttcaaggtcctcgacaaggactccaccggcttcgtcgccgtctccgagctccgncacatcctcaccaacatcggcgagaagctcgagccct

SEQ ID NO: 7727 - DNA, 413 bp, Glycine max
cggacgcgtgggttgtactgttctattagttcatactaagttctgaaaatgagttccaaggttttgcttgttctacttatgttcttggccactatacttctgatctcctctgaggttgcacccgatgatgcatacgagaattttgacaaaatagatgggaagcctagtgcagatggggtagatgaaagcaagtattggcgtggcggctatggtggcggctatggtggtggttatggaggtgggcgtggaggctatggaggtgggcgtggaggctatggagggggacgtggtggatatggcggcggacgaggtggctatggtggcgggcgtggtggctatggcggcgggcgtggtggcgggcgtggtggctatggtcctaatgaacataacgaggctggggttgatgctaaccc

SEQ ID NO: 7728 - DNA, 441 bp, Glycine max
gcctgagccaccaccagagggtcgcttgcccgatgccactaagggttctgaccatttgagagatgtgtttggcaaagctatggggcttactgaccaagatatcgttgctctatctgggggtcacactattggagctgcacacaaggagcgttctggatttgagggtccctggacctctaatcctcttattttcgacaactcatacttcacggagttgttgagtggtgagaaggaaggtctccttcagctaccttctgacaaggctcttttgtctgaccctgtattccgccctctcgttgataaatatgcagcggacgaagatgccttctttgctgattacgctgaagctcaccaaaagctttccgagcttgggttgctgatgcctaagcaacgtttaggggattgttgaaaaggcatggtggccataaatattctttaaaa

SEQ ID NO: 7729 - DNA, 360 bp, Glycine max
cctcagcttcgggtgattcagaaaagtagcccctgatcggcgggagtcctcgaccgagtttttccgccggggcgggaagcggcttctgtgcgaaattcaccggcggaagatctcctcgccggcttaatctccgacggctccggcgacggtttcggccactgcgccgatgccgttgactgcgataccgatcatatcgccgtctaactccggccaggagcaggtgacgtcgtcgaactcatcgccggtcgagcttctagacgagaacgagcgactgaggaaagagaacgttcagctaatgatagagctcccggagatgagatcgctctgcagcaatatttactctctcatgtcaaattacgc

SEQ ID NO: 7730 - DNA, 325 bp, Glycine max
aattgatgtaacgagtgtttcctttcttatttcctttttccacagaattgtgagagccagttgatgtctttgtatgtcacttcatcaataaatcaatatgttataataataaaagaaagcatcatttataaaaaaaaaaaaaaaaaaaaaaaaaaaaaaaaaaaaaaaaaaaaaaaaaaaaaaaaaaaaataaaaaaaaaaaaaaaaaaaaacaaaaacatgcaataaaaataaaaaaacaaatataactaaaaagaataaaaaagaaataccaaagataaatggcatcccatttaaaaatcctcgacatcacctaacgacttat

SEQ ID NO: 7731 - DNA, 424 bp, Glycine max
gccagctagcgcttcttctctcgcattccgtggagatctagtgctgccaaacctggctgaaaattagggtttcgtttcggaggtagacgaagatgttcggaagggcaccgaagaaaagcgacagcaccaggtactacgaaatcctcggcgtttcgaagaacgcttcgccggatgatttaaagaaggcttacaagaaagccgccattaagaaccaccctgacaaaggcggtgatcctgagaagttcaaagagcttgctcaagcctatgaggttctgagtgaccctgagaagcgtgaaatttatgacacatatggagaagatgctcttaaggaaggaatgggtggtggtggcggtggccatgatccatttgatatcttcagttctttctttggtggaagtccgtttgggtcaagtggtagcagtag

SEQ ID NO: 7732 - DNA, 332 bp, Glycine max
attcccggtcgagcgcgcgtacgaaaacaaaaagtttacgttacaaatcgcataataaccgtcctaagtttattgagagaattttggaagtgtgagaaacatggcatctcgtcaaaacaacaagcaagagcttgatgaaagagcaaggcaaggagagactgttgtcccgggtggaactggtggcaagagcctggaggctcagcaacaccttgctgaaggaaggagcaagggagggcaaacaaggaaggaacagcttggtacagaagggtaccaggaaatgggacgcaaaggatggttgagcactgtggacaaatcaggagaagaacgtgctc

SEQ ID NO: 7733 - DNA, 453 bp, Glycine max
cccacgcgtgcgcaaattagttcattctctttgcgcagttccctacctctcctttcaagaggcagatcttcgtcaagaccctcaccggaaagaccatcacccttgaggtggaaagctctgacaccatcgacaacgtcaaggccaagatccaggacaaggaaggaattcccccggatcagcaacgtctcatcttcgccggaaagcagctcgaggacggccgtaccctcgccgactacaacatccagaaggagtcaacccttcaccttgtccttcgtctccgtggtggcatgcagatcttcgtcaagactctcactggcaaaaccataaccctagaggtcgaaagctctgacaccattgacaacgtcaaggccaagatccaggacaaggagggaatccccccagaccagcaacgtctcatcttcgccggaaagcaacttgaggacgggcgcaccc

SEQ ID NO: 7734 - DNA, 425 bp, Glycine max
cccacgcgtccggtgatatattatatcatatcacaatgtgtggcatacttgctgtgcttgggtgctctgattcatctcaagccaaaagggttcgcgtccttgagctttctcgcagattgaagcaccgtggtcctgactggagtgggctccaccaatatggtgataactatttggctcatcaaaggttagccatagttgatccagcttctggtgatcaacccctcttcaatgaagacaaaactgtcgtggttacggtgaatggagagatctacaatcatgaagaactcaggaaacagttgcctaatcacaccttccgtacaggaagtgactgtgatgttattgctcacctgtatgaagagcacggagaaaactttgtggacatgcttgatggtatattttcgtttgttctgctagatactcgtgac

SEQ ID NO: 7735 - DNA, 454 bp, Glycine max
cccacgcgtccgggaaccctagctagggtttggaagaagctgatccgagaagatggtgcagcgtctcgcctaccgcaaacgccacagctatgctaccaaatccaaccagcacagagtcgtcaagactcccggtggcaagcttgtttatcagaccacgaagaagagggccagcggacccaagtgccctgtcactggaaagaggattcaagggattccacatttaaggccagcagagtataatagatcaaggttacacagaaaccgaaggactgtgaaccgtgcatatggtggtgtgttgtctggcagtgctgttagagaaagaatcattcgagctttcttggttgaagagcaaaagattgtgaaaaaggtcttgaagatccaaaagacaaaggaaaaacaagctttgaagggctgagttttgagaaagagtgataaagatctttttggagggatt

SEQ ID NO: 7736 - DNA, 168 bp, Glycine max
gttttatcctctgcatgacctggaatacgtgttgcctttcgattgttcgattgcttaatgtcatacaagaaattaggcatgaccctattgatgagtatgctctgcctatttgaaaatatccacacctcttttaattgtcgcaatgatgtgtgaagagtgtgttacttt

SEQ ID NO: 7737 - DNA, 357 bp, Glycine max
gccacgcgtccgacttgaccagctatacttgatgcttaagtaggttagaagagcttcgcggcgaacaatggcagctgctcatgaagatgtgaagctcttgggcatcgtgggaagcccatttgtgagcagggatcagatcgcccttaagtagacgggagttgaatacatatttactggagaaaatctgtgcagcaagagtgatctgcttctcaaatacaaccctgatcacaagatggttacagtgcatgatcacaatgagcaagccatagcagagtctcttgagattgatgaatacattgctgagacatggaagaacaaccccatcttgacctatgatccttaccaaatagccttggc

SEQ ID NO: 7738 - DNA, 354 bp, Glycine max
gccacacatccttcttgaccagctatacttgatgcttaagaaggttataagagattcgcgtcaaacaatggcagctactcaggaagatgtgaagctcttgggtattgtgggaagcccatttatgagcagggatcagatcgcccttaaggagcagggagttgaatacataatttactggaacaaaatctgtgcagcatgagtgatctgcttcttaaatacaaccttgatcacaagaaggttacagtgcatgatcacaatgagcaagccatagcagcagtctcttgagattcgaagagtacattgcatgagacatggaagaacaaccccatatggacctaagatccttaccaaata

SEQ ID NO: 7739 - DNA, 448 bp, Glycine max
gtttgttgttgtaactcgttcttcttcttttgttgttctgtgtttgtgtttgttttttcgctcacctgaaaatgggttgctgcggtggtaactgtggttgcggaagctcctgcaagtgcggcaacggctgcggaggctgcaagatgtacccagacttgagctacactgagtcaaccaccaccgagaccttggtcatgggagtggcacctgttaaggctcaatttgagggtgctgaaatgggtgtgcccgctgagaacgatggctgcaaatgtggaccaaactgctcctgcaacccctgcacttgcaagtgaggtgttgggagagcaagcttcaagcagagatagcccttaattaggaataatgataaactattaatgtgtagctaaaaacttatgtattatgtctgtgatggttttcgtgcactctggtgttttgtgttaaacaaaca

SEQ ID NO: 7740 - DNA, 451 bp, Glycine max
acgcactcgttcgctgacgcatatttcagatactagtgatcaatcatcaacacggagctgactgtgttgcgctgtgaatccaccttcggcttccattggaggaccatttcctcctggaatagaaatactaccacacttttcttttttcacttctctaagttgctaagttaattgctccttcattttttcactcttcgttctcgcgtacccgtgtcacggtaactcgtggtgaagtgttcgaaaatgactgtcacacctaagatctcagttaacgatgggaaacttgttgtccatggtaagaccattctgactggagtgccagacaacgttgtgctgactccaggttctggaaggggtcttgtgactggtgcttttgttggtgccacagcttcacacagcaaaagtctccatgtgtttccaatgggtgttttagaggggctccggttcatgt

SEQ ID NO: 7741 - DNA, 300 bp, Glycine max
  modified_base (244)..(244): a, c, g, t, unknown, or other
cccccagttgaaaaacccccagtgtacaagcccccagttgaaaaaccaccagtgtacaagcccccagttgagaagcccccacgttacaagcctccaattgagaaacccccaagttacaagcccccagttgagaagccaccagtatacaagcccccagttgagaagcctccaggggtcaagccaccaatagagaagcctaccgtttacaagccaccagtagagaaacctccagtttacaagcccncagtggagaaacctactatttacaagccacctgttgagaagccttcggtctacaag

SEQ ID NO: 7742 - DNA, 356 bp, Glycine max
agcgagtgttctttcttcgtttcaacaccttaatttgcacacgctgcttcttcagcgtgagaaatggcacaagaaacctttctattcacatctgaatctgtaaacgagggtcaccccgacaagctgtgcgaccagatctctgatgcagtgctcgatgcgtgccttgaacaggaccctgacagcaaggttgcctgtgagacatgcaccaagaccaacatggtcatggtctttggagagatcacaaccaaggccaacgtagactatgagaagattgtccgtgacacatgccgcgaaattggattcatctttgatgatgttggtcttgatgctgacaaatgcaaggtgttggtcaacat

SEQ ID NO: 7743 - DNA, 247 bp, Glycine max
tcctcttctttcatatttctgcctaacggtatcgagggaaaaaatttgcctgagaacacagatgccaagcaccgcactattgcgccaacaattgcggtttctttggcagcccttccacgcaaaatatgtgctccaagtgctaccgcgatttccaactcaaggagcagcaatctttcaacgccaagatggttctcaatcagtcgctggttccttcaccgccaccggcggtgatttttcagccgtcgtc

SEQ ID NO: 7744 - DNA, 437 bp, Glycine max
  modified_base (9)..(9): a, c, g, t, unknown, or other
ttcccgggnggaggcacgcgtgcggtccttattctctctggctttctctcttggactcgctcttcttctcatcaagcacagagttacagacgcaccgatcttccgattgtctttcgtcttggattatgagctcgaaagagagacccactcttggtggcacgcggattaagacccgcaaacgaaatattgctgcgccgctggaccctgcagcattctcggatgcagtggtccaaatttatttggataatgctggtgatctggaacttattgctaagagtattgaatcttcagaccttaactttttaagatacggtgacaccttttatgaggatgctttcactgggggtcgttcacaacctggaactaccaagcctgatgagggggaccgccacccatactctataatagagtgtgagcctaagcgtgaagtcatttta

SEQ ID NO: 7745 - DNA, 419 bp, Glycine max
cctaagtctttgggaatagtgctgcaatggcttcaagtcaggaggaggtgacccttgggggagctactggaagcccatttgtgtgcagggttcatattgccctcaagttgaagggagttcaatacaaatatgtcgaagaaaatttgaggaacaagagtgaactgcttctcaaatccaacccagttcacaagaagattccagtgtttattcacaatgagaagtccatagcagagtctcttgtgattgttgaatacattgatgagacatggaagaacaatcccatcttgccttctgatccttaccaaagagccttggctcgtttctggtccaaattcattgatgacaaggtttttggtgcttcatggaaagctgttttcacagctgatgagaaagagcgtgagaagaatgttgaggaagca

SEQ ID NO: 7746 - DNA, 433 bp, Glycine max
aacaaaagattaggttttgtgatgtcgggcatggagaggcttcagaggatgttcgcgggtgcaggtggagcgctgggccatcccccaccggattcccccaccctcgattcctccgagcaggtctacatctcctccctcgcccttctcaaaatgctcaaacacggaagagctggggtacccatggaagtgatgggtctgatgttgggggagttcgtggatgagtacaccgttcgcgttgtggatgtgtttgcgatgcctcagagtgggaccggtgttagcgttgaagctgttgatcatgtttttcagactaatatgcttgatatgttgaagcaaactggaaggccggagatggttgtggggtggtatcactcgcatcctggatttgggtgttggctttctggagtggacattaatacgcaacagagttttgagg

SEQ ID NO: 7747 - DNA, 356 bp, Glycine max
catttctctacttgcgaagtgtacggaaagacgattggagcctttctccctaaagatagtcctgttcgtaaggatccggcatactatgttcttaaagaagacgagtctccttgcatttttggttctattgaaaaacagaggtggtcttatgcctgtgcgaaacagttgattgagaggctgatttatgctgagggtgctgaaaatggcttggagttcacaattgtgaggccttttaactggattggacctcgaatggatttcattcctggcattgatggtccaagtgagggtgttcctcgggttcttgcatgctttagcaataatcttctcagaggagagcccctcaagcttgtgga

SEQ ID NO: 7748 - DNA, 428 bp, Glycine max
acatcttcacaaactagtaaatagtaatattattcttcgaatccattttattattcataatgggtgttttcacatttgaggatgaaaccacctcccctgtggctcctgctaccctttacaaagctctagttacagatgccgacaacgtcatcccaaaggctgttgatgccttcaggagtgttgaaaaccttgaggggaacggtggccctggaaccatcaagaagatcactttcgttgaggatggagaaagcaagtttgtgttgcacaaaatagaatcagttgatgaggcaaacttgggatacagctatagcgtagttggtggagttgggttgccagacacagtggagaagatcacattcgaatgcaaattggctgctggtgccaacggagggtctgctgggaagctaactgtcaaataccaaaccaaa

SEQ ID NO: 7749 - DNA, 370 bp, Glycine max
ctcttttcactccctctgcatatatgatatattcttccataattctcatgtttaagacgttatagtttccttgaattctcgtctgggttcaacctgtttgatgtttagactgaatcagtttgaattagtggagaatatctgataccgaaaaaaagattcagctctttttcttgtttctttgtcacaatacttggatttttgagaatctggagacatgggttgttgtgtaagtaaagattcagagccacaacacaatggttacagacatggtggaactggtggagtgcacaaccagaagactcatgaacctttagtcaaccaatcaagagcacctgcaaatcaaccttatcatttacctgaaaagcatgct

SEQ ID NO: 7750 - DNA, 371 bp, Glycine max
ctcagattgcaattgcctcttctcttctcccagaatcggtcactaatccgatatcatgaagctcgatacgactagtctcgaatcgtttcccacactgattgcacctcaaaacgacgtcgccggagaactctccgccgctccgttctttgaccttccgaattccaatgacttcgatgggttcttgaaagacgctattcagatggtgaagcccgcgaagggtactacaactcttgcttttatatttaaagagggtgttatggtagctgctgattctcgagctagcatgggaggatatatatcgtcgcagtctgtgaagaaaattatcgaaatcaatccgtatatgcttgggacaatggctggtggtgctgctg

SEQ ID NO: 7751 - DNA, 402 bp, Glycine max
tttggtggtccggggttggggttggttttttctgtaacgtgaaaaatgtcttgctgcggtggtaactgtggttgcggaagctcctgcaagtgcggcaacggctgcggaggctgcaagatgtacccagacttgagctacactgagtcaaccaccaccgagaccttggtcatgggagtggcacctgttaaggctcaatttgagggtgctgaaatgggtgtgcccgctgagaacgatggctgcaaatgtggaccaaactgctcctgcaacccctgcacttgcaagtgaggtgttgggagagcaagcttcaagcagagatagcccttaattaggaataatgataaactattaatgtgtagctaaaaacttatgtattatgtctgtgatggttttcgtgcactctgg

SEQ ID NO: 7752 - DNA, 425 bp, Glycine max
cccacgcgtccgcacacactaagttctgaaaaatgagttccaaagtttttcttattctggttaggttcatggccactatacttttgatctcctctgaggttgcacccgatgatgcataccagaattttgacaaaacagatgggaagcgtagtgcaaatggggtagatgaaagcaaatattggcgtggtggctatggcgactatggtggttggcgtggtggtggttggcgtggtggctatggaggctggcgtggtggctatggtggtgggcgtggtggctatggtggctggcgtggtggctatggtggtgggcgtggtggctacggaggttggggtggtggctttggccctaacgaacataatgaggctgggattgatgctagccctcacaactaagaaggaaacttgctaaagcttatataggat

SEQ ID NO: 7753 - DNA, 419 bp, Glycine max
cccacgcgtccgaccagcgtccgcttcgttccttccccaacccaatcttcgccttcggccacagcaactcctccttcaggatcgctgccaacgttactttccatttttacccttcatcctctagaaaaaaacggctaacgcagcatctggtatggccgtccatgatgagtgcaagctaaagtttctggagctcaaagcgaaaaggacgtaccggtatatcgttgttaagattgaggataaatcgaagcaagttattgtggagaagctgggtgaccctgcaaatggctatcatgaattcactgccagtcttcctgctgatgagtgtcgatatgctggttatgattacgattttgtcactgacgagaattgcctaaagagcagaatcttcttcattgcttggttccctgatacatctacgg

SEQ ID NO: 7754 - DNA, 424 bp, Glycine max
cttcgaatccattttattattcataatgggtattttcacatttgaggatgaaaccacgtcccctgtggctcctgctaccctttacaaagctctagttacagatgccgacaacgtcatcccaaaggctgtcgaagccttcaggagtgttgaaaaccttgaggggaacggtggccctggaaccatcaagaagatcactttcgttgaggatggagaaagcaagtttgtgttgcacaaaatagaatcagttgatgaggcaaacttgggatacagctatagcgtagttggtggagttgggttgccagacacagtggagaagatcacattcgaatgcaaattggctgctggcgccaacggagggtctgctgggaagctaactgtcaaataccaaaccaaaggagatgctcagcccaacccagacgacctc

SEQ ID NO: 7755 - DNA, 397 bp, Glycine max
cccacgcgtccgcacaactactacaagtacttccttacaatcaaaaccaacaacaactatggcaagttatcaaaagcactacgatgatcagggtcgcaaggttgacgagtatggcaacgttgagaagcaaaccgacgaatacggcaaccctgttcatgctgctagtgtcacctatgtagccaccagaactgctgctggtggttacagtgatgacattaataagcaacatgataccaccaatgcctacggcgtagacactggtagacagcattctagtggtggctacgatggtgacactaataaacatcatggaactactggtggctataatgatgacaccaatagacatcatggaactaccggtgtctatggtatagacaccgataggcaacaacat

SEQ ID NO: 7756 - DNA, 428 bp, Glycine max
  modified_base (11)..(11): a, c, g, t, unknown, or other
gagcgtccgcntatattccattctctctgtgtatttccctacctctcccttcaagatgcagatcttcgtgaagaccctcaccggcaagaccatcacccttgaggtggaaagctctgacaccatcgacaacgtcaaggccaagatccaggacaaggaaggaatccccccggaccagcaacgtctcattttcgccggaaagcaacttgaggacggccgtacccttgctgactacaacattcagaaggagagtactcttcacctcgtcctccgtctccgtggtggcatgcagatcttcgttaagacactcaccggcaagaccataaccctagaggttgaaagctccgacaccatcgataacgtcaaggccaagatccaggacaaggagggtatccccccggaccagcaacgtctcatcttcgccggaaagc

SEQ ID NO: 7757 - DNA, 407 bp, Glycine max
cccacgcgtccgtttctctcttctctctccacccaaaccctaactcccgacgctgttgccctctcgtatccgtcatgaaaggaggaaagtccaagaccgaatctaagagagccgatcccaaacttgctgtgaataagaagggagccgccaccaaggctaggaaacccgccggcaaggggaaggcagcgaaagaccctaacaagccaaagaggcctccaagtgctttcttcgttttcatggaggagttcaggaaggtattcaacaaagaacatcctgaaaacaaagcagtgtctgctgtgggcaaagctgctggagcaaaatggaagaccatgtctgatgctgaaaaagcaccttatgtggcaaagtctgagaaaaggaaagtggagtacgagaagaacatgagagcc

SEQ ID NO: 7758 - DNA, 396 bp, Glycine max
cccactcgtacggtctttgctgttgtcttgtcttcttgctccaaaacatgggaacaagcaacactctaacattgaccacaacacacacaaagacaacatccttgctggtctgcaatcaaaacctatcaagctggcgttcgagaaccaagacacctgtgttcgagaaatgaagcccaagaaccggacaatcatgggcgctggaggccctgatgactaggacaataggtggacaccatggctgaaacctgttatgaaagagagcttctttgttcaatgcaagcttgacgctgattagcacaagagcgagtgcaacatgtattgcttagattgtatgaacggtgctctctgatctctctgcctcgattaccacatagatcaccgagctattcagattag

SEQ ID NO: 7759 - DNA, 437 bp, Glycine max
tcggtgtgctgcctaagagcactaatgagtccagaatcaagggaaactttgatgtggttgacgggtctattccagaagaagtgatggataagttctctgaaattaagcaggatagactaattaagggcactttttttgttgacgagacctatggtgcctttaagaccgttgaagagctttgggatggtgaactctgagcaatatgcttcatagagatgttgacaaatgcactgctcctcaatcagattgattccgccttttacctgttaagatcttaaagctaccagctgtagtgattcaagtatgcttgagattttgagaagagctattgttcataataacacaaagtaaccgagacttatttttcatttataattgatgaatctttaattcaatctaaagaaaccagtgcagtgaattttaaaaaataatgttcc

SEQ ID NO: 7760 - DNA, 444 bp, Glycine max
gtctctttcttcatagcatttggaaatttggctgatgacaccattaattttgaggcttttgcccacaagctggtacagtttggagagattcaggaaaaagttgtattgaaattttcacaagaggaatttcttacagcttggtcaactcaggtgcgtcctgcaacaactctgttggctgatgggtgtccatatttgtatgctatggtgcatgatagttcagtgtctacaataccaggtgattttgtcattggtgttaagttgacaaccataaacaatatgtgtgcatatgggcttaatcctggtatttcaggttctcgtcttttgggtaccattcctcagtctatttcacagcaaactgtttggaatcaaatggcaacagtgagaacaccattgaattttgattctagcaagcagagcttttgtcaattttctattgaccttctc

SEQ ID NO: 7761 - DNA, 428 bp, Glycine max
agaagcttcagttagcagctagggttattgttgcaattgagaaccctcaggatatcattggtcaatgcgcaaggccttatggtcaaagagcggttctgaagtttgctcagtacactggtgctcatgctattgctggaaggcacactcccggtaccttcaccaatcagcttcagacttcgttcagtgagcctcgtctccttatcctcactgatccaagaacagatcaccagcctattaaggaagctgctcttgggaatattcccaccattgctttctgtgacactgattcgcctatgaggtatgtggacattggaattcctgccaacaacaagggaaaacacagcattggttgtctcttttggctccttgcaaggatggtattgcagatgaagggtacaattcgccctggcctcaaatgggatgtcatg

SEQ ID NO: 7762 - DNA, 412 bp, Glycine max
attcaattttgcgtttctctgcctaaaaggattgaaagatgggtcaagcattcggttgctaccaagtcgatcagtcaaatgtggctatcaaggagcattttggaaaatttgatgatgtcctagagcctggatgtcactgcctgccttggtgtcttgggtaccagattgctggtagtctgtcgctgcgagtgcagcaacttgatgttcgatgtgagacgaaaaccaaggacaatgtctttgtcaatgtggttgcatctgtgcaataccgagctgtgtctgagaaagcatctgatgcattctataggcttaccaacacaagggagcagatccaatcatatgtttttgatgtcatcagggccagtgtaccaaagttggagttggattctgtctttgagcagaaaaatgatatagc

SEQ ID NO: 7763 - DNA, 440 bp, Glycine max
ggacgtagtcaacgcgagctgatgactcgcgcttactaggaattcctcgttgaagaccaacaattgcaatgatctatccccatcacgatgaaatttcaaagattacccggacctgtcggccaaggctatagactcgagttggaaaaaaaaaaaaagttgttcgagatggcacgtacgaagcaaactgctcgtaagtccacaggaggaaaggcacctaggaagcagctcgcaaccaaggctgcacgtaagtctgcaccaactactggtggtgtgaagaagccacatcgttatcgtcctggtaccgttgctcttcgtgagattaggaaataccagaagagtaccgagcttttgatcaggaagctccccttccagaggctggttcgtgaaattgctcaggacttcaagactgatctgcgtttccagagccatgctgtgcttgc

SEQ ID NO: 7764 - DNA, 467 bp, Glycine max
accgcccggaattccggtcgacgacgcgttcgccacaactactacaagtacttccttacaatcaaaaccaacaacaactatggcaagttatgaaaagcgctacgatgatcagggtcgcaaggttgacgagtatggcaacgttgagaagcaaaccgacgaatacggcaaccctgttcatgctgctagtgtcacctatgtagccaccagaactgctgctggtggttacagtgatgacattaataagcaacatgataccaccaatgcctacggcgtagacactggtagacagcattctagtggtggctacgatggtgacactaataaacatcatggaactactggtggctataatgatgacaccaatagacatcatggaactaccggtgtctatggtatagacaccgataggcaacaacatgggactactggtggctatgccggtgacactggtaggcaacatgggaaca

SEQ ID NO: 7765 - DNA, 392 bp, Glycine max
cccacgcgtccgcccacgcgtccgcccacgcgtccggttaaacactcttcgtcatcgtcgtcgcaatgggacgtgtgatccgtgcgcagcgtaagggagcaggctcggtcttcaagtcccacacgcaccaccgcaagggccctgcccgcttccggagcctggatttcggagagcgcaacggctacctgaagggtgtcgtcactgacgtcatccacgatcctggccgtggcgcgcctctcgctaaggtcgccttccgccacccgttccgctacaagaagcagaacgagctcttcatcgccgccgagggtctctacaccggccagttcatctactgcggcaagaaagccaccctcgttgtcggcaatgtgttgcctcttcgatccattcctgaa

SEQ ID NO: 7766 - DNA, 369 bp, Glycine max
cccacgcgtccgcccacgcgtccggcgatgcggatgaggcgccactcgatgtttccatgggcctgcgtgcctttggtattgtggggtgtggttcgtttagtggtgtcaagtcttgcgaacgtgagggtgcatgagtggtaatcgggatgtttttgttgcacggctccatgcttgcgcatgcaacgtgtgacatgcatccttttcattgtcaccttagccttcgtggcttaggtgctgacgattggttcctgtgttgcctacctaccaaacggtattcgtgtggctagtcagacccattccatccaggcctctttgttggggacgctggaggatttcaaagtcccacacgtgaaccacgttagtcggcca

SEQ ID NO: 7767 - DNA, 421 bp, Glycine max
gcaaagcatccttcgtttcaatttctgtctctcagcgctatctgcaatcgagcctttcatctgcaaagggatccacaggccgaaggagaaatggggctgacattcacaaagcttttcagtcggcttttcgcgaagaaggaaatgcgaattctgatggttggtcttgatgctgctggtaagaccactatcctgtacaagctcaagctcggagagatcgctaccacaattcctaccatcgggttcaatgttgagactgtggaatacaagaacattagcttcactggttgggatgttggtggccaggacaagattcagaccttggggaggcactacttgcagaacacccagggtcttatttttgttgtagacagcaatgatagggacagagttgtttgagccagagatgagttgcataggatgt

SEQ ID NO: 7768 - DNA, 408 bp, Glycine max
ctttcgtgcaaggtagctacagattcatctgggcaatcaaagggctatggctttgttcaatttgataatgaggaatctgcccaaaaggccattgagaagctgaatggaatgctgctgaatgataaacaagtgtatgtgggacccttccttcgcaagcaagagagagaaagtactgctgacaaggcaaagttcaacaatgtttttgtgaagaatctgtcagaatcaaccactgatgatgaattgaagaatgctactggtgaatttggaactattactagtgctgtcgtaatgacggatggagatgggaaatcaaagtgctccggatttgagaattctgagaatgctgatgatgctgctagggctgttgatgctctcaatggcaaatagtatgatgactactaatggtat

SEQ ID NO: 7769 - DNA, 431 bp, Glycine max
atcgttttctacataatacaaacctctctaatttttgaagcttattatacgcaatctcgatatgcagatcttcgtgaaaaccctaactggcaagacgatcaccttggaggtggagtcctctgacaccatcgacaacgtgaaggccaaaatccaagacaaggagggcattcctccggatcaacagcgtttaatcttcgccggaaaacagctcgaagacggcagaaccctcgccgactacaacatccaaaaggagtccacgctccacctcgtcctccgcctccgcggcggcatgcaaatcttcgtcaaaacccttactggcaaaacaatcacgctagaggtggagtccttcgacacaatcgataacgtgaaagccaagattcaagataaggaagggattcctccggatcaacaacgtttgatcttcgccggaa

SEQ ID NO: 7770 - DNA, 429 bp, Glycine max
gagaaacatatggcagcactggatggctttaccgacttgaccggagcacagagcagcggggatatcggaaatctcgctcgctttgctggtgatgaacacaacaaataagagaatgcagttctggagactgtgagggtgattagtgcaaagaaacaagtggtatatggcaccttgtactatatcactttggaggcaaatgataggtgtgactaaaaaggtttatgaaactaaggtgttgtagaaaccatggctgaacatcaaggaggttcacgaattcaagcgcatcactgttgctgttgatcctctatcggtgacggtctaacacataactaggttatggaagtgactagcttggcctcaagagtcataatatgtatgaactgaataaatgtacctattaactctacatacggtcgcgggttgtgcatg

SEQ ID NO: 7771 - DNA, 422 bp, Glycine max
acgcgtacgcacacgcgtgcgcacacgcgcgcaactcactcatccgtctactcatcagcccacgcttccgggtacacggggatcatcagcatcaatttatgagatatcaattgctaccgacgctcgtattattgagggtgatccttagaatgttgatcattctgctcttactggagaatcactccctgtaacaaagaattcctatgatgaacagtattccggatcaacggtcaagaaggattatatagaagcaattgagattgcttctggggatcacacctactatggcaaagcagatcatttggtggacagtaccaaccaaattggacacttccagaaagtgcttacagcaattggtaacttctgcatttagctaattgccgatggaatcgtcatccagctcatagtcatgtacccgattc

SEQ ID NO: 7772 - DNA, 436 bp, Glycine max
agcattctttcgcaccttcgaaaatcaattttctgtctgctctgcgtcttcttcctctatgaatcgtttgccatggctcgtaccaagcataccgctcgcaaatccaccggtggaaaggctcctaggaagcaactcgccaccaaggctgcaaggaaatctgcaccgacaaccggtggagtcaagaagcctcatcgctatcgccctggaactggtgctcttcgtgagatccgaatataccaaaagagcacagagcttctgatccgcaagctccccttccagcgtcttgttcgtgaaattgcgcaagacttcaagaccgatttgaggttccagagtcacgctgttcttgcgcttcaggaagctgcggaggcttacttggtgggtttgttcgaggacaccaacttgtgtgcgaatcacgccaagagggtgaccatcatgc

SEQ ID NO: 7773 - DNA, 436 bp, Glycine max
cccacgcgtccgcccacgcgtccgcccacgcgtccgcccacgcgtccgcccacgcgtccgcggacgcgtgggtaatcagcatcaagttaggagatatcattccggccgacgctcgtcttcttgagggtgatcctttgagtgttgatcagtctgctctgactggagaatcactccctgtaacaaagagtccctcggatgaagtgttttcgggatcaacggtcaagaagggtgagatagaagcagttgtgattgctactggggtgcacaccttttttggcaaagcagctcatctggtggacagcaccaaccaagttggacacttccagaaagtgcttacagcaattggtaacttctgcatttgctcaattgcggttggaatcgtcatcgagctcatagtcatgtacccgattcagcaccgcaggtacagggatggaat

SEQ ID NO: 7774 - DNA, 438 bp, Glycine max
gggcaaactcctgaaacacctaccgttgatgtgagctcaaaagaattttatggtgagggatatgatgatggggacaagagaatccctgacatgaccataataaacaggcagcttggatggaatcccaagacttcactttgggacctgcttgagtccactctgacatatcagcacaggacatatgctgaagccgttaagaaagtcattgcaaaacccgttgcaagttaagctttttacagtgatggtgatgtgctacctttgagaagggtgttcttgtcttgcccaagtgttctgccatattatactggttgattttatataaaatcgtaaatgttcctcctattggtttcgttagcctgtaggcaatatagcccccacatggagaagtaggaatttatacaagggcaatctgtgctctatgtcattttaatgtagaga

SEQ ID NO: 7775 - DNA, 383 bp, Glycine max
ctagtgttttgttagttcacacactaagttctgaaaaatgagttccaaaggttttcttaggctacttatgttcatggccactatacttttgatctcctctgaggttgcacccgatgatgcataccagaattttgacaaaacagatgggaagcgtagtgcaaatggggtagatgaaagcaaatattggcgtggtggctatggcgactatggtggttggcgtggtggtggttggcgtggtggctatggacgctggcgtggtggctatggtggtgggcgtggtggctatggaggctggcgtggtggctatggtggtgggcgtggtggctacggaggttggggtggtggctttggccctaacgaacataatgaggctgggaatgatg

SEQ ID NO: 7776 - DNA, 412 bp, Glycine max
attcgctcgcattgcttcgcctcacaacagcagctgcagcagcaatggctcccaaacgaggtggaaaggctccggctcttgccgctaagaagaagcctgagaaggtcacgaatccgttgttcgagaagcgtccgaagcagttcggaatcggaggggcgttgcctccgaagagagacttgactaggttcgtgaagtggccaaagaatgttcaaattcagaggaagaagaggattctgaagcagaggttgaaggttcccccagctttgaaccagtttaccaaaactcttgacaaaaacctagcaacaagtctgttcaagttgcttctgaagtacaggcccgaggacaaagctgaaaagaaggagaggctcttgaaaagggctcaggcagaggctgaaggcaaaactgttgaagc

SEQ ID NO: 7777 - DNA, 428 bp, Glycine max
cccacgcgtccgaagaggtcgagtttcacagcagcaatggtgtacgtcagggctcagaaatgaggagcctacttcaagagatatcaagtcaagttcaagagaagaagagagggaaaaaccgattaccgtgccaggattcggttgattaatcaggacaagaacaaatataacactccgaaataccgatttgttgttcgctttagcaacaaggacattgttgcacaaataatatctgctagcattgctggcgatattgttcttgctgcagcatatgcacatgagctgccacaatatggtcttgaagtagggcttacaaattatgctgcagcttattgcactggtctcctgttggcccgaagagtcctcaatacacttgaaatggatgaggagtatgaaggaaatgttgaggctactggagaggattattc

SEQ ID NO: 7778 - DNA, 437 bp, Glycine max
tttctccaatttaatcaccattgtacaacctaattcccttcgtcgttttggattaacagggcaatggcacgtaccaagcagaccgctcgcaagtccaccggaggaaaggctccgaggaagcaattggcaaccaaagccggtcgcaagtcatccccggcgaccggcggagtgaagaagccccaccgcttcatgccaggaacggtggctctgagggagattcgaaagtaccagatgagcaccgaacttctgatccgaaaactgccattccagaggctcgtcagagaaatcgctcacgatttcaaaaccgatctccgctttcagagcaacgccgtttcggctcttcaggaagccgctgaggcttatctcgctggactctatgaggacactaacctctgcgctattcacgctaagcgagttaccattatgcccaatgacat

SEQ ID NO: 7779 - DNA, 324 bp, Glycine max
ggaattttctcgatccctttctgatctgtgatctctgatctgtttgcgtgacttgatcttatgatacttgtgttactatatgattcttttattactctcacgccaatagattatcaacgatcgtgagactggaagatccaggggttttggatttgtgaccttcgcctcggagcagtccatgaaagacgccatcgaagggatgaacggccaaaaccttgacggccgtaacatcactgttaacgaagctcagtcccgtggtggcggtggcggcggacgcggtggaggtggtcgatatggtggtggtcgcagtggtggatatggtgg

SEQ ID NO: 7780 - DNA, 412 bp, Glycine max
aaaaaaaaaatgcagccccaccagaaccctcccgcactggattccgacccgcagctcccggagatcaaaatccaccaccctgcctccccacgccaccatcacccttcctccgccggcgccgcgacccccacccccaccgccggcgcgcgtcgcaaaatcggcgtggccgtcgacctctccgacgagagcgcctacgcggtccgctgggccgtgcagcactacatccgccccggcgacgccgtgatcctgctccacgtcagcgctaccaacgtcctcttcggcgccgactggggctccatcgacctctccatcaacaccgaccccaactccgacgaggatgccgtcagcgccgtcaacaacagcaacgaccacaacagcaagcgcaagctggaggacgacttcgacgccttta

SEQ ID NO: 7781 - DNA, 423 bp, Glycine max
gcataccagaattttgacaaaacagatgggaagcgtagtgcaaatggggtagatgaaaggaaatattggcgtggtggctatggcgactatggtggttggcgtggtggtggttggcgtggtggctatggaggctggcgtggtggctatggtggtgggcgtggtggctatggtggctggcgtggtggctatggtggtgggcgtggtggctacggaagttggggtggtggctttggccctaacgaacataatgaggctgggattgatgctagccctcacaactaagaaggaaacttgctaaagcttatataggatttaagttatcgtaataaatcaaacttcattggaagggtagttataatagatgtggagatctttcttcgctctggtcatataaaggaataatacttctctattaatttcctt

SEQ ID NO: 7782 - DNA, 426 bp, Glycine max
attggaactgtgccagtgggacgtgttgagaccggtgtcttgaagcctggaatggtggggacttttgcaccaactggactgacaactgaagtcaagtctgtggagatgcaccatgaatctcttacagaggcacatcctggtgacaatgtgggattcaatgttaagaatgttgctgttaaggatttgaagcgtggttatgttgcctcaaactcaaaggatgaccctgcaaaggaggctgctaacttcacagcccaagtcatcatcatgaaccaccctggtcagattggaaatggctatgcccctgtcctcgactgccacacttctcacattgctgtcaagtttgctgaactcatgaccaagattgacaggcgatccggcaaagagcttgagaaggagcccaagtttttgaagaacggtgatgctggt

SEQ ID NO: 7783 - DNA, 438 bp, Glycine max
cccacgcgtccgctgaaaagctcatgaaatatcagaacactcgcgggggaagagttgtactgcaccccatcaagaatgtcccctcagaatttgagcatgtggaaaagggggatgcattgtatgcaatggaattagctttgtctttggagaagttagtgaatgagaaacttctgaatgtgcacagtgtggcagatcgcaacaatgaccctcaaatggccgacttcattgaaagcgagtttttgtctgaacaggttgaatcaattaagaaaatttcagagtatgtggctcagttgagaagggttggaaagggtcacggtgtttggcactttgatcaaagacttcttgattaggaagatgctgcttaatcttgaatagccttattattagtcttcatttacatttggtcttttctgaaattctgggttgttttctaattta

SEQ ID NO: 7784 - DNA, 436 bp, Glycine max
acgattctttcgcaccttcgaaaatcaattggctgtcttctctgcgtcttcgtcctctatcaagggttttccatggctcgtaccaagcaaaccgctcgcaaatccaccggtggaaaggctcctaggaagcaactcgccaccaaggctgcaaggaaatctgcaccgacaaccggtggagtcaagaagcctcatcgctatcgccctggaactgttgctcttcgtgagatccgaaaataccaaaagagcacagagcttctgatccgcaagctccccttccagcgtcttgttcgtgaaattgcgcaagacttcaagaccgatttgaggttccagagtcacgctgttcttgcgcttcatgaagctgcggaggcttacttggtgggtttgtttgaggacaccaacttgtgtgcgattcacgccaaaagggtgaccatcatgc

SEQ ID NO: 7785 - DNA, 325 bp, Glycine max
cccacgcgtccgattcctcatcatagatgatggttggcaacagattgaaaataaagcaaaggatgctactgaatgtttggtacaagaaggagcacagtttgctactaggttgactggtattaaagagaatactaaatttcaaaagaaattacagaacaatgagcagatgtcaggtctgaagcatctagtacatggagcaaagcagcatcacaatgtgaaaaatgtatatgtatggcatgcactagctggttattggggtggagtgaagccagcagcaaccggcatggaacattatgacactgccttggcatatccagtgcagtca

SEQ ID NO: 7786 - DNA, 256 bp, Glycine max
caaaagtgttccacttgagtgaaaagtagtgtgttaagaactaaacaatttttcaatggcgtgcaagaaacaagaggagcgagctgaggcagctgcgaaagttgctgccaaagaactcgaacaagtcaacagagaaagaagagaccgtgatttcggtgttgttgctgaacaacaacaacaacatcatcaggaagatcaacaaaaacgtggtgtaatcgggtccatgtttaaggcggtgcaagacacctacgagaac

SEQ ID NO: 7787 - DNA, 305 bp, Glycine max
  modified_base (250)..(250): a, c, g, t, unknown, or other
ctcatacattccttcttcttcttcttcttcttcttcttctttcacaatcacaatggcgcgaggggatctggatggtaaccccatcaagccacttacgatctgcatgatcggcgcttgcgggttcatcgggtcgcacctctgcgagaagcctatgtcccaaaccccttaaaccgtccttcgcctcgacctttacaaccaccagatccaacaccttctggattccggcgatttccaccttccttgggctggncgcattaactttcaacggcttaaccttaaacaacaattttggcttgaaaggctta

SEQ ID NO: 7788 - DNA, 461 bp, Glycine max
  modified_base (439)..(439): a, c, g, t, unknown, or other
gggagagtatcaaagctgtaatgaagcttcctaggcttcagaaccttgtaatgcagcatgtagggcattcagctggcgatctcatacatctcttgcaggggttacttagatatgacccctctgaaagacttacagccaaggaagctcttagacattccttctttatgagagatcaatttagaagataattcactttctaagctgctgcatcatcgttgaccttcctaagggattaactttagaagatgtgggcaaatgaactcacctgggtgatggctggtttttcctgcagctgtcttcactcctgctgaaaaatcctcatttaggaatttttgaattgatccgaattcaaagtacagaagaaaaaaatgctaatgttgtggtgaaaattgtagctttgtgctcacaaatttaattctccatttgagggtatgaaatnttaataatttattatagaaaaa

SEQ ID NO: 7789 - DNA, 460 bp, Glycine max
atttcctctcagaaccctcgatcactcccacgcgctcctatatcctctccttcaccgtcgctcggtccggcgatcacaacaacatcgtcatcccatggcaaacgccgcatctggtatggcagtccatgatgactgcaagttaaggtttttggagctgaagacaaagaggacacaccgtttcatagtttttaagattgaggagcagcagaagcaggtcattgtggagaagcttggtgagccagcccaaggctatgaagatttcactgccagccttcctgctgatgagtgccgttatgctgtttatgattttgagtatctgactgaagggaatgtccctaaaagcagaatttttttcattgcatggtcccctgacacatcaagggtgaggagcaagatgatctatgcaagctccaaagacagattcaagagggagctggatggaattcaagtagagctgcaa

SEQ ID NO: 7790 - DNA, 410 bp, Glycine max
cgaaattttctggagaggagtttgacaacttttctgccttagcagagaagttgcgttgtgaggatgactttggtcacacgctgaatgccaaactccttccaagaggagagtcatcagtttctgggcccgtagttaggctgttcaagccattcgatgaactttttgttgacttccaggatttcaatgtggaagctctagagaagtttgttgaggaatctagtacccctgttgttactgtctttaacaatgaaccgagcaatcaccctttcgttgtcaaattcttcaacagtcccaacgcaaaggcaatgttgttcatcaacttcacttgccgaaggtgcttaagctatcaaatcaaaataccctgaaactggttagccattttaaccacagggtggcaactttttggtggg

SEQ ID NO: 7791 - DNA, 368 bp, Glycine max
attatgattcttccatttccattaaaaagaatatatcataaatgggtattttcacattcgaagacgaaatcacctaccctgtggctcctgctactctttacaaagctctagttacagatgccgacaacatcatcccaaaggctcttgattccttcaagagtgttgaaaacgttgagggaaatggtggccctggaacaatcaagaagataactttcgttgaggatggagaaaccaagtttgtactgcacaagatagaagcagttgatgaggcaaacttgggatatagctacagcgtagtgtgtggtgctgcgttgccagacacagcgtagaagatcacattccactccaaattggcttgctgtcccaat

SEQ ID NO: 7792 - DNA, 407 bp, Glycine max
attatgattcttccatttccattaaaaagaatatatcataaatgggtattttcacatgcgaagacgaaatcacctcccctgtggctcctgctactctttacaaagctctagttacagatgccgacaacatcatcccaaaggctcttgattccttcaagagtgttgaaaacgttgagggaaatggtggccctggaacaatcaagaagataactttcgttgaggatggagaaaccaagtttgtactgcacaagatagaagcagttgatgaggcaaacttgggatatagctacagcgtagtgggtggtgctgcgttgccagacacagcggagaagatcacattccactccaaattggctgctggtcccaatggaggctctgttggcaagctaactgtcgaataccaaacc

SEQ ID NO: 7793 - DNA, 448 bp, Glycine max
tatcgattctgatgaggctccactcgatgtttccatttgcctgcatgcctttggtattgtggggtgtggttcgtttagtggtgtgaagtcttgcgaacgtgagggtgcatgagtggtaatcgggatgtttttgttgcacggctccatgcttgctcatgcaacgtgtgacatgcatccttttcattgtcaccttatccttcgtggcttatgtgctgactattggttcctgtgttgcctacctaccaaacggtattcgtgtggctagtcagacccattccatccaggcctctttgttggggactctggaggatttcaaagtcccacacgtgaaccacgttagtcgtccatcataactgcttcctgtggcacacgtgtggtgattgttctctcggatgcggtgcatgcagtgaacgtgggtggtctagtgcccccacattgttccttaaaa

SEQ ID NO: 7794 - DNA, 459 bp, Glycine max
tcgcccacgcgttcgcccacgcgttcggcatattcacatgagctgccacgatatggtcttgaagtaggacgtacaaattatgcagcagcttattgcactggtctcctgttggcccgaagagtcctcaaaacacttgaaatggatgaggagtatgaaggaaatgttgaggctactggagaggattattcagtggaacctgccgagagcaggaggccattccgtgcactccttgatgttggtcttgttaggactacaacaggaaatcgcgtctttggtgcccttaagggagctctggatgggggtttggatattcctcacagcgacaagaggtttgctgggtttgataaggagaagaaagagcttgatgctgaggttcatcgcaaatatgtttttggtggacatgttgctgcctatatgaagatcttggcagaagatgaaccagagaaataccagtcacac

SEQ ID NO: 7795 - DNA, 411 bp, Glycine max
gaagaagagggaagaggaggaatcaaaggatgacccagttgactctgatgctgatgaggaagagggggatgctgatgaagctgggaatgactccgatgctgaatcaaagacggaagctggagaagacaccaaggaagagggtgtacatgatgaactctaggaagtttgcaaaacggataaagagtgagcggaagttatattccggaaagttatatctttttcagttgtagtgtttttttgtttttatttttccctagataagcagaccgtggaaaactgcaagtgaaagctggagcttttgcttcaatcacatttgactatttcactgattagaacaggcaaagatgtctcttttgggttgatctttttatgtttcgatcaattgaattttccattaaaaaaaaaataaaa

SEQ ID NO: 7796 - DNA, 405 bp, Glycine max
ccggcttcaacatgcacagttacctgaagaagcaagagaacttgacaaggaggtgaggcagatgattgaggagaaagaagaagctgttcgcaaccaagactttgaaaaggctggagagctacgtgatagagagatggatcttaaggcacagatctcaacacttgtagagaaaggcaaggagatgagcaaggcagagactgaggcaggggatgaaggtcctattgtgactgaagctgacatacagcatattgtctcatcctggactggtattcctgttgagaaagtctcaacagatgaatctgatcgcctcctgaagatggaagagactttacataagcgagtcattggtcaggatgaagcagttaaagccattagtcgggctatccgtcgagctcgggttggact

SEQ ID NO: 7797 - DNA, 415 bp, Glycine max
  modified_base (340)..(340): a, c, g, t, unknown, or other
cccacgcgtccgggcatgcactagctggttattggggtggagtgaagccagcagcaaccggcggggaacattatgacactgccttggcatatccagtgcagtcaccaggcgtgctaggaaaccaaccagacattgtcatggacagcttggctgtacatggccttggcctagtgcacccaaagaaggttttcaatttctacaacgagctccatgcttacttagcttcttgtggagtagatggagtgaaggttgatgtgcagaacattattgagacccttggtgcgggacatggtggccgagtgtcacttactcgcagctatcatcacgcgcttgaggcttncattgctagcaattttactgataacggatgcattgcgtgtatgtgtcacaacactgatggactttatagtgctaa

SEQ ID NO: 7798 - DNA, 451 bp, Glycine max
  modified_base (306)..(306): a, c, g, t, unknown, or other
aattcaataccatttaccaaactcactcatcaattctcatctttcttctcactaactattaatggatcgtgtcgagcacagctggccaagtcatcaaatgcaaagctgcggtttcatgggaggcagggaagccacttgtgattgaagaagtagaggttgcgccaccacaagctggtgaagtgcgtttgaagatcctctacacctctctttgccacactgatgtttacttctgggaagctaagggccaaactccattgtttcctcgtatatttggtcatgaagctggagggattgtggagagcgtangtgagggtgtgactcatctgaaaccaggggaccatgcccttcctgtgtttaccggggagtgtggggactgccctcattgcaagtcagaggagagcaacatgggtgatcttctcaggatcaacactgataggggtgtcatgatcca

SEQ ID NO: 7799 - DNA, 417 bp, Glycine max
gcactaatcactactacacagatcacacacacacacacagagttgcaagagaaagagagcgagattccgatggcgactctggattccgacgtgcctatggttcccgccggcgagccctcgagcagcgccggtccttcttccaagaagcccaagcgcttcgagatcaagaagtggaacgccgtcgctctctgggcttgggacatcgttgtcgataactgtgctatctgccggaaccacatcatggatctctgcatcgagtgccaagccaaccaggctagcgccactagcgaggaatgcactgtggcatggggagtctgtaaccatgcttttcacttccattgcattagtcgatggctcaagacccgtcaagtttgtcctctagataacagtgagtgggagtttcaaaaatatgggcac

SEQ ID NO: 7800 - DNA, 465 bp, Glycine max
  modified_base (448)..(448): a, c, g, t, unknown, or other
ctccccaaacgcccctctctctcctccaatggccgaccagctcaccgacgaccagatcgcggagttcaaggaggccttcagcctcttcgacaaggacggcgatggttgcattactaccaaggaacttgggactgttatgaggtcacttggtcaaaacccaactgaggcagaactgcaggatatgataaacgaggttgatgctgatggcaacggaaccatcgatttcccagagttcctcaacctgatggctcgcaagatgaaagacaccgactcagaggaggagcttaaggaggctttccgtgtgtttgacaaggatcagaatggtttcatctctgcagctgagctccgccatgtcatgacaaatcttggggagaagctgacggacgaggaggtggatgagatgatccgtgaggcccttgttgactgtgatggacagatcaactattangagtttgtcaaagtcat

SEQ ID NO: 7801 - DNA, 382 bp, Glycine max
cggacgcgtgggcggacgcgtgggcggactcgtgggaaaatggccaaatcaatcaaatgggttgagttgaacacaggggccaagattccttctcttgggttagggacttggcaagctgaacctggtgttgtagctgaagctctcaccacagccattcaggttggatacaggcatattgactgtgctagtgcgtataagaatcaagcagagattggttctgctcttaagaagctttttgatgatggtgtggtgaagcgtgaggacttatggatcacttccaaactctggtgttcagatcatgcaccagaagatgtgccaaaagcattggataaaacattacaggaattgcaacttgactatcttgacctctatctgatccact

SEQ ID NO: 7802 - DNA, 477 bp, Glycine max
  modified_base (455)..(455): a, c, g, t, unknown, or other
  modified_base (466)..(466): a, c, g, t, unknown, or other
cttttctctttcctctctctctctctacgctttctcgtttgagatccctcaagggatccagtaactgaaggagcaatggggttgacatttaccaagctttttagccggcttttcgccaagaaggaaatgcgaattctaatggttggtcttgatgccgctggtaagaccaccatcctgtacaagctcaaacttggagagatcgttaccacaattcccaccattgggttcaacgtggagactgtggaatacaagaacattagtttcactgtctgggatgttggtggccaggacaagattcgtcccttgtggaggcactacttccaaaatacacagggtctcatttttgttgttgacagcaatgacagggacagagttgttgaggccagagatgagttgcacaggatgttgaatgaggatgaactgagagatgcagtattgcttgtatttgctaacanacaagatcttnccaatgcaatg

SEQ ID NO: 7803 - DNA, 394 bp, Glycine max
cccacgcgtccggtacttcttttcaccacgggaccggaaatacccgaacggttccagggggaaccgggcggcgggaaccggttactggaaggcaaccggggcggataagcccattggccaccccaaaccggttgggataaaaaaagctttggtgttttacgcagggaaagctccgaaaggggacaagagcaattggatcatgcacgagtatcgtctcgccgatgtagatcgctccgttcgcaaaaagaacagcctaaggttagatgattgggtgctttgccgtatttacaacaagaagggcacgatcgagaagttccaaccaagcagcgatgttgttgttagccgaaaaatggaatcatcggagatcgaagacaggaagccggagattctgaaa

SEQ ID NO: 7804 - DNA, 439 bp, Glycine max
gcgcaatgttctagggttttattcattttccgatggcttctgcagatgttgagtaccgttgctgtgtcggtgggctcgcttgggccactgacgaccatgccctcgagagagccttctctcagtacggcgaaatcgttgaaacgaaggtctgtttgttgcaggcatcacatctgatctcacacgattcggattcggaattttctcgatcccgttctgatctgtgatctctgatctgtttgcgttacttgatcttatgatacttgtgttactatatgattcttttattactcacgccaatagattatcaacgatcgtgagactggcagatccaggggttttggatttgtgaccttcgcctcggagcagtccatgaaagatgcgatcggagcgatgaatggacagaacttggacgggcgtaatatcactgtcaatgaagctc

SEQ ID NO: 7805 - DNA, 473 bp, Glycine max
  modified_base (443)..(443): a, c, g, t, unknown, or other
cccacgcgtccggtgactttatcaagaacatgattactggtacctcccaggccgactgtggtgtccttattattgactccaccactggtggttttgaagctggtatttctaaggatggacagacccgtgagcatgctcttcttgctttcaccctaggtgtgaagcagatgatctgttgctgtaacaagatggatgccactacccccaagtactctaaggctaggtatgatgaaatcgtgaaggaagtctcttcttacttgaagaaggttggttacaacccagacaagattccctttgttcccatctctggttttgagggtgacaacatgattgagaggtccaccaaccttgactggtacaagggaccaactctccttgaggctcttgaccaaatcaatgagcccaagaggcccttcgacaagcctctaaggcttccattgcangatgtctacaagattggtggtattggtact

SEQ ID NO: 7806 - DNA, 330 bp, Glycine max
gcgcccacgcgtacggtgactttatcaagaacatgattactggtgcctcccaggccgactgctgtgaccttgggattgactgcaccgctggcggatatgaagatggtgattctaaggatggacacacccgtgagcatgctcttcttgctttcaccctacgtgtgaaacaggtgatctgatgctgtaacaagatggatgccactacccccaagtactctaagtatacgtatgaagaaatcgtgaacgaagtctctagttactggaagaacgatggctacaacccatacaagattccctgggatgccatctctggcgttaaagttgacaaca

SEQ ID NO: 7807 - DNA, 464 bp, Glycine max
cccacgcgtccgcgcgttggtgcaaagcatccttcgcttcaatctctctctgtctctttgcgctttctgcaaaccgaacatttcatctccaaagggatcaacaggtcgaaggagaaatggggctgacattcacgaagcttttcagccggcttttcgcgaagaaggaaatgcgaattctgatggttggtcttgatgctgctggtaagaccactatcctctacaagctcaagctcggagagatcgttactacaattcctaccattgggttcaatgttgagactgtggaatacaagaacattagcttcactgtttgggatgttggtggccaggacaagattcgtcccttgtggaggcactacttccagaacactcagggtcttatttttgttgtagacagcaatgatagggacagagttgttgaggccagagatgagttacataggatgttgaatgaggatgaactg

SEQ ID NO: 7808 - DNA, 354 bp, Glycine max
cgccgagcagaaagcaaggatgggcgcagcggctagggaggcagctatggtggtggttatggaggggggctgtcaagctatggaggtggccgtgctagcttaacgctacctgaccaaaaaacactaaccggccgaactgcaccttgaggttccattcgagatggcagagtctaagaatcacacagcgcacaatcagtcctacaaggcccacaaaaacggcatcaagaaacccaagaggcatcgccacacttccaccaaagggatggatcccaagtgtctgaggaatcagaggtacgcgaggaagcacaacaagaagagcggcgaaattgccactgaggaagagtgaagtggcac

SEQ ID NO: 7809 - DNA, 475 bp, Glycine max
cccacgcgtccgcacaactactacaagtacttccttacaatcaaaaccaacaacaactatggcaagttatcaaaagcactacgatgatcagggtcgcaaggttgacgagtatggcaacgttgagaagcaaaccgacgaatacggcaaccctgttcatgctgctagtgtcacctatgtagccaccagaactgctgctggtggttacagtgatgacattaataagcaacatgataccaccaatgcctacggcgtagacactggtagacagcattctagtggtggctacgatggtgacactaataaacatcatggaactactggtggctataatgatgacaccaatagacatcatggaactaccggtgtctatggtatagacaccgataggcaacaacatgggactactggtggctatgccggtgacactggtaggcaacatgggaacatcggtggcccttactatggaaccaacacc

SEQ ID NO: 7810 - DNA, 446 bp, Glycine max
cccacgcgtccgcccacgcgtccgctcctcctaaagatgcagatcttcgtgagaactttgaccggtaagaccatcacccttgaggtggagtcctgcgacaccatcgataacgtgaaagctaagattcaagacaaggaagggttcctacctgaccagcagagacttatctttgcgggtaaacagcttgaggatggtcgaacccttgccgactacaacatccaaaaggaatccactctccacctagtgcttcgcctcacgggtggcatgcaaatctttgtcaagactttgactggcaagaccatcaccctcgaggtcgaatcctgggacaccattgataatgtcaaggccaagatccatgacaaggagggtatccctccagatcagcagaggttgatatttgctggtaaacaacttgaggatggaagaaccctggctgattacaatat

SEQ ID NO: 7811 - DNA, 439 bp, Glycine max
  modified_base (3)..(3): a, c, g, t, unknown, or other
cantcctctctcaagccctaatttccccttatttccatggccacagaatagcccactggggcggtggaacccgctcccgaacctgcctccgccgatcctcccccggaggagaaggaggagaccaaacctgaagccaaagctaagaaaaccaaggagcccaaacctaaaaaggtttccagacctcgcaaccctcccactcatccttcctacgaagagatggttaaagatgcaattacctcgctgaaggagaaaaccggttcgagccaatacgcgattgcgaagttcatcgaggagaagcacaagcagcttccaccgaacttcaagaagcttcttctctaccatttgaagaagctcgtcgccgccggaaaactcgtcaaagtcaaaggctcgttcaagcttccacctaccatacctgctgcatcttctttctcttcttttt

SEQ ID NO: 7812 - DNA, 260 bp, Glycine max
atttgggctttgtcaagggtattgttgattctgaagatctcccactcaacatttcaagagaaatgttgcaacagaacaagatcttgaaggtcatccgtaagaacttggtcaagaagtgccttgagctcttctttgaaattgcagagaacaaggaggattacaacaagttctatgaggctttctctaagaacttaaagcttggtatccatgatgattcccagaacaagggaaagattgctgaattgctcaggtaccactcc

SEQ ID NO: 7813 - DNA, 424 bp, Glycine max
cccacgcgtccgaccagctatacttgttccttttgaaggttagaagtgctacaatacaaagaatgggagctactcaggaagatgtgaagcttttgggtattgtgggaagcccatttgtgtgcagggtccagattgcccttaagttgaagggagttgaatacaaatttttggaagaaaatttgggcaacaagagtgatttgcttctcaaatacaaccctgttcacaagaaggttccagtgtttgttcacaatgagcagcccatagcagagtctcttgtgattgttgaatacattgatgagacatggaagaacaaccccatcttaccttctgatccttaccaaagagccttggctcggttcttgtccaaattcattgatgataagattgtgggtgctgtatcgaaatctgttttcacggttgatga

SEQ ID NO: 7814 - DNA, 420 bp, Glycine max
  modified_base (307)..(307): a, c, g, t, unknown, or other
  modified_base (322)..(322): a, c, g, t, unknown, or other
  modified_base (398)..(398): a, c, g, t, unknown, or other
tttacagagaagcgaagaggcgcagccgtagcagtaactcgtggaattgctagcagtggcgaggatcaaggtttacgagctgaggcagaagacgaaggctgatctgttgaatcagctgaaggacctcaaggccgagcttgccttgcttcgtgttgctaaggtcaccggcggtgcacctaacaagctctctaagatcaaggtggtgaggttgaacattgcccaggttttgacggtgatttctcagaagcagaaggccgcgttgagggatgcctacaagaacaagaagtacttgcctctcgatctccgncctaagaagaccagngccattcgcaggaagctaactaagcaccaggcatcattgaagacagagagggaagaagaagaaagagttatatttnccaactgaggaaatatgctatc

SEQ ID NO: 7815 - DNA, 451 bp, Glycine max
tccgttctttgcttttctcgggctacgaaaaacgacgtcgttttcccaattttccccggcgagcgggaaatggtggagccggtggagcttcgcggcgaggagcagctctcgttgctgtcagattccagcaatggtgaccggtcgtggcggttgaacttcgacgggtttcagctatcttcggagcacacggagaagcaagtgaaaccccctcgcggactccatgactgttatggggttcttggtcaagaagataatattgcggagtactatcagcagcaggtagaagtgcttgagggctttactgaaatggatgctttagcaaagcgtggttttattcctggaatgtcaaaggaagagcaagacaagttagcaagaagtgagacttttgccattagagtgtcaaacgcaacaaacatggttctttttggtgccaaagtttatgcatcagtca

SEQ ID NO: 7816 - DNA, 313 bp, Glycine max
gtactgttctattagttcatactaagttctgaaaatgagttccaaggttttgcttgttctagttagtgttcttggccactatggttctgatctcctctgaggttgcacccgatgatgcatacgagaattttgacaaaatagatgggaagcctagtgcagatggggtagatgaaagcaagtattggcgtggcggctatggtggcggctatggtggtggttatggaggtgggcgtggaggctatggaagtgggcgtagaagctatggacggggacgtggtggatatggctgcggacgacgtggctatggtggctg

SEQ ID NO: 7817 - DNA, 425 bp, Glycine max
gcttattctctcgcattccgtggagatctagtgcttctgctgcaagacctggctgaaaggtagggtttcgattcggaggtagacgaagatgttcggaagggctccgaagaaaagcgacagcaccaggtactacgaaatcctcggcgtttccaagaacgcttcgccggatgacttaaagaaggcttacaagaaagccgccattaagaaccatcctgacaaaggcggggatcccgagaagtttaaagagcttgctcaagcctatgaggttctgagtgaccctgagaagcgcgagatttatgatacatatggagaagatgctcttaaggaaagaatgggtggtggtggcggtggccatgatccatttgatatcttcagttcattctttggtggaagtccgtttgggtcaagtggtagcagtagaggac

SEQ ID NO: 7818 - DNA, 410 bp, Glycine max
cattctctctgtgtatttccctacctctcccttcaagatgcagatcttcgtcaggacccgcaccggcaagaccatcacccttgaggtggaaagctctgacaccatcgacaacgtcaaggccaagatccaggacaaggaaggaatccccccggaccagcaacgtctcattttcgccggaaagcaacttgaggacggccgtacccttgctgactacaacattcagaaggagagtactcttcacctcgtcctccgtctccgtggtggcatgcagatcttcgttaagacactcaccggcaagaccataaccctagaggttgaaagctccgacaccatcgataacgtcaaggccaagatccaggacaaggagggtatccccccggaccagcaacgtctcatcttcggcggaaagc

SEQ ID NO: 7819 - DNA, 406 bp, Glycine max
cccacgcgtacgtgttgttgtaactcgttcttcttcttctgttgctctgtgtctgagtttggggtctctctcacctgaaaatgtcttgctgcggtggtaactgtggttgctgaagctcctgcaagtgcggcaacggctgctgaggctgcaagatgtacccagacttgagctacactgagtcaaccaccaccgagacctcggacatggtagtggcacctgttaaggctcaatttgagggtactgaaatggatttgccagttaaaaccgatgcctgcaaatgtggaccaaactgctcctgcaacccttgcacttgcaagtgaggtagttggaagagcaagcttcaagcagagatagcccttaattaggaataatgataaactattaatgtgtaccttatatcttatgt

SEQ ID NO: 7820 - DNA, 341 bp, Glycine max
gtctgtcgctgcgagtgcagcaacttgatgttcgatgtgagacgaaaaccaaggacaatgtctttggcaatgtggttgcatctgtgcaataccgagctgtgtctgagaaagcatctgatgcattctataggcttaccaacactagggagcagatccaatcatatgtttttgatgtcatcagggccagtgtaccaaagttggagttggattctgtctttgagcagaaaaatgatatagcaaaggctgtggaggaggagcttgagaaggccatgtcaacctatggatttgagatagttcatactctcattgatgatatagagcctgatggtaatgtcaagaga

SEQ ID NO: 7821 - DNA, 425 bp, Glycine max
gcgagcagtttcagacacagagagaggggtttgggattggagggattgacgctgcgtcggttcctgttctctttcgatccatccctcattcctaatcctccaatccaaccacctcagcctcacactcacatatacacatatctgaacgcgtatcgtccctcctatggcttcaaagcgcatcctcaaggagctcaaggacttgcagaaagacccaccaacttcttgcagcgctggtccagtagctgaggacatgttccattggcaagcaacaataatgggtcctgctgatagtccttatgctggaggtgtattcctagtcactattcacttccctccggattatcctttcaagcctcctaaggttgcctttaggactaaggtgtttcacccgaacatcaatagcaatggtagcatttgtcttgata

SEQ ID NO: 7822 - DNA, 467 bp, Glycine max
cgggggaagagatccagcagcaatggtgtacgtcaaggctcagaaatcaaaaggctactggaagagatatcaagtcaagttcaagagaagaagagagggaaaaaccgattaccgtgccaggattcggttgattaatcaggacaagaacaaatataacactccgaaataccgatttgtggttcgctttagcaacaaggacattgttgcacaaataatatctgctagcattgccggcgatttagttcttgctacagcatattcacatgagctgccacgatatggtcttgaagtatgacttacaaattatgcagcagcttattgcactggtctcctgttggcccgaaaagtcctcaaaacacttgaaatggattaagagtatgaaggaaatgttgaggctactggagaggattattcagtggaaccctgccagagcaggaggccatttcgtgcacttcttgatgttggtc

SEQ ID NO: 7823 - DNA, 474 bp, Glycine max
agcgtagttctgacgagcagataaatgtggaatacaatgcttcctacgtgtaccacgccttggttgcatactttgacagggacaacgtggctctcaagggatttgccaagttcttcaaggaatctagtgaggaagaaagagagcacgctgaaaagctcatgaaatatcagaacactcgcgggggaagagttgtacttcaccccatcaagaatgtcccctcagaatttgagcatgtggaaaagggggatgcattgtatgcaatggaattagctttgtctttggagaagttagtgaatgagaaacttctgaatgtgcacagtgtggcagatcgcaacaatgacccttaaatggccgacttcattgaaagcgagtttttgtctgaacaggttgaatcaatgaagaaaatttcagagtatgtggctcaattgagaaaggttggaaagggtcactgtgtttggcactttgatcaaagac

SEQ ID NO: 7824 - DNA, 380 bp, Glycine max
caactctgatctgaggaaattggccgtgaatctcattcccttccctcgtctgcactgcttcagggttggatttgcgcctctcacctctcgcggctctcagcaataccgcgcattgacagtgccagagctgacacagcaaatgtgggatgccaagaacatgatgtgtgctgcagatccaaggcacgggcgttacctcacggcatcagccatgttccgtggcaagatgagcaccaaggaggtggacgagcagatgataaacgtgcagaacaagaactcttcatattttgtcgagtggattcccaacaatgtcaagtcgagcgtgtgtgacattgctcctagagggctctccatggcgtccacattcattggaaactcgacct

SEQ ID NO: 7825 - DNA, 403 bp, Glycine max
tccacgcgtccggctggagaaaacctaaccttataattacaaacatagaagagaggagtggaaagaattgatcgttgaaaatgcaaggaggaaagaaagcgggagagtccattaaggaaacagctacaaacattggtgcttctgccaaagctggcatggagaagaccaaggccactgtccaagagaaggcagaaagaatgacagcacgtgatccggtgcaaaaagagttggcaacccaaaagaaagatgcaaagattaaccacgcggagcttgacaagcatgctgcacgtcagcataacacggcggacaaacagtacgccaccaccgctgggcacattggacatggtcaccacaccacctgtaccgggactggaaccgtcacctattccaccaccgtggaata

SEQ ID NO: 7826 - DNA, 413 bp, Glycine max
gcgaaactaaagtcagcattcgaaaaagatgagtagcatcggtacaggttacgatctatcgggcaccactttctcccgtgatggccgcgttttccagatcgagtatgccgctcaagccgtcgacaacagcgggactgttattgggatcaagtgcaaagatggggctgtgttgggcgttgagaagcttattccgtcgaaaatgatgcttccgggttccaatagaagaatacactccgttcatcgtcactctgggatggctagagcaggattagcagctgatggcagacaaattgttgccagagctaagtctgaagctactaactatgacagcgcatatggcgaaccaattcctgttaatgaactagctgaccgtgtggctagttatgtgcacctctgtacgctatataggtggc

SEQ ID NO: 7827 - DNA, 428 bp, Glycine max
gtcacaacttcattatgtttcatgtaataatctggaaatgcaagaagcttatcttgtcaatggcgtagatgtgttacgagaatggtatttgcacagtccagaggaagctcgccaattgagaaggaaagctctctctcgtattgaatggctgcaaaaagctgatgtgcctaccatatcacagatcgaagagttccattcgatgcatacgatgatgaatgctcctgattcaaatgataatatccatctactgttgagcattgatttgttgggcttacaatgaacaggtaaagcttttccaaacaagattgtttttgatgataaactttgtgttggctaactcacaagaattctttgatgggaatttttcactggaatcttgggttccaatttttgtgaattgtcttttttctgtaaataattacctttaa

SEQ ID NO: 7828 - DNA, 428 bp, Glycine max
ggcttctgcggatgttgaataccgatgcttttttggtgggctcgcttgggccactgacaagtacgatctggagaaagccttctctcagtacggtgacgtcgttgaatcgaaggtccgcatcgcatatgatctgacacaattcggatccggaatttctccatcccgttctgatctgtgatctctgatctatttgcgttacttgttctatgatatgatacttgtgttactatatgattcttttattactcacgccaataggtacgttcatcttcatctttttgccaaagaagaagatcgatcggtttctattcggttctggattttgttttcgagctgttttgcttttcatttcaatttgatgaatccgttgtggttttatgtgtagattatcaacgatcgtgagactggaagatccaggggatttggat

SEQ ID NO: 7829 - DNA, 445 bp, Glycine max
caagattggtgagaaacttgacccggctgacaagaataagattgaggatgcaattgagcaaggaatgcagtggttagacagcaaccagcttgcagaagcagatgagtttgaggacaaaatgaaggaattggaaagcatctgcaatccaatcattgccaagatgtaccaaggtggtgctggtccagacgtgggtggtgctggtgcagcagaggatgagtatgctgctcctccttctggtggaagtggtgctggccccaagattgaggaagtggactaaatgtagttgctttcctccagatacctgttttaaaaacttattttactttatgcttttttaattggattttaatcgcatgatttttgttggatgggattcaaactatttttcccttctgatatgaacgttgctttaagcattatggtatttggcgtattttcattatta

SEQ ID NO: 7830 - DNA, 414 bp, Glycine max
ccaaaatcaatctgcggagtcagaaagccatggatccctacaagaatcggccatcaagcgccgtcaattctcccttctggactacaaattccggtgctcccatctggaacaataactcatcgctgactgttggatctagaggtccaattctgctggaggattaccatctggtggagaagcttgcaaactttgacagggaacggatccccgaacgtgttgtccacgctcgtggagctagcgcaaagggtttctttgaagtcacgcatgacatttctcacctcacatgtgccgatttccttcgagcccctggagttcagacccccctcatcgtccgtttctccactgttatccacgagcgtggcagccccgaaaccctcagggatcccagaggttttgctgtcaaattctacacca

SEQ ID NO: 7831 - DNA, 433 bp, Glycine max
aactccctaccctattccgctttctctcatccatcatgaaaggaggaaagtccaagaccgaagctaagagagccgatgccaaacttgctgtgaataagaagggcgccgccaccaagactaggaaacccgccggaaaggggaaggcagcgaaagatcctaacaagccaaagaggcctccaagtgctttcttcgttttcatggaggaattcaggaaggtgttcaacaaggaacatcccgacaacaaagcagtgtctgctgtgggcaaagctgctggagcaaaatggaagacgatgtctgatgctgaaaaagcaccttatgtggcaaagtctgagaaaaggaaagtggagtacgagaagaacatgagagcttataacatgaaacaagcggaaagtcctactggtggggattaagaaaaatctgagaaagtctgatc

SEQ ID NO: 7832 - DNA, 341 bp, Glycine max
cccacgcgtccgataataccaaaaaacaccatgatgcttggggagacccaccgcccgaatcgagaccgtacacgtgccaccgtgggcgccggagatcttctcaccatacaccggcaatgccgattactctccgtactccatgcaagaagcacttagtgcacttcagcactacaaatccaccgatgctgagtcagactcggaggttccgtctcggaaccgtaagtcccggtggacgcttactcctgcgaccatttccgcatgttcgagttcaaggttcggagatgcgcacgttgcaagtcgcatgactggaccgactgtccgtacgcccaccccggcgagaa

SEQ ID NO: 7833 - DNA, 440 bp, Glycine max
cccacgcgtccgcccacgcgtccggctgagtttcccattttcgacaaggtggatgtgaatggtgacaatgctgctccactgtacaagtttctgaaatcaagcaaaggtggactctttggggatagtatcaaatggaacttctccaaattccttgttgataaggatgggaatgtcgttgaccgttatgcacccacaacttctcctctcagcattgagaaagacataaagaagctgctagatgcatgaataatgattagaataacatcatgaatgaataatgtactgcagatcagatattaattagtggaatttcctccgtatttgtactgaaacagttgctctgctcatgtacctctgaattactatttgcttggtcatctatataaaaatgtgtatcaatttatataaaatataatattattttttattttttattatat

SEQ ID NO: 7834 - DNA, 399 bp, Glycine max
  modified_base (358)..(358): a, c, g, t, unknown, or other
gagcgagcagtttcagacacagagagaggggtttgggattggagggattgacgctgcgtcggttcctcttctctttcgatccatccctaattcctaatcctccaatccaaccacctcagcctcacactcacatatacacatatctgaacgcgtatcgtccctcctatggcttcaaagcgcatcctcaaggagctcaaggacttgcagaaagacccaccaacttcttgcagcgctggtccagtagctgaggacatgttccattggcaagcaacaataatgggtcctgctgatagtccttatgctggaggtgtattcctagtcactattcacttccctccggattatcctttcaagcctnctaaggttgcctttaggactaaggtgtttcaccccgacatc

SEQ ID NO: 7835 - DNA, 450 bp, Glycine max
cccacgcgtccgcccacgcgtccgccgcggtagcggtggatatggtggtggtggtggcggcggcggatacggtggtcgtcgtgaaggtggatacaaccgtaatggtgggggtggaggtggaggatacggcggtggtagagaccgtggttacggtggtgatggtggttctcgctactctcgcggtggggaaggcggtggatccgatggaaactggagaaattaggcatatgaccctgtaaattagggtttatgattaagttcaattattttaaggtgttgtctgtgtgtggtttaagtttcggtatctgtgttggtttcgtttcgtgttcctgtggttttcgtttttgacctacaattctagttgtgtttatagtcgatcgaatgaaatgataataagaaattatcgcattaaatttctatggattttgctatctggttggtggactttgg

SEQ ID NO: 7836 - DNA, 372 bp, Glycine max
cttttcggcccacgcgtactgagcgagcagtttcatacacatagagaggtgtttgttattggagggattgactctgcatctggtccgcttctctttcgagccatccctcattcctaatcctccaatccaaccacctcatcctcacactcacatatacacatatctgaacgcgtatcgtccctcctatggcttcaaagcgcatcctcaatgagctcaatgacttgcagaaagacccaccaacttcttgcagcgctggtccagtagcttatgacatgttccattggcaagcaacaataatgggtcctgctgatagtccttatgcttgatgtgtattcctaatcactattcacttccctccggattatcctttca

SEQ ID NO: 7837 - DNA, 267 bp, Glycine max
cttgatggctactttggcaaacttggtgcaggaagcaatgcttatattttgggtggccaagacgaagcacagaactggcatgtctactctgcttctgcagattctgtaactcaatgtgacaatgtttacactcttgagatgtgcatgactggcctggatagagagaaagcacaggttttctacaaagaacaatctgcttcagctgccatgatgactgttaattccggcattagaaaaattcttccagattccgagatttgggacttt

SEQ ID NO: 7838 - DNA, 390 bp, Glycine max
cccacgcgtccgcccacgcgtccgctcatcctcctctgtctctctctctccaccatggccatggatccttacaagctccggccatccagcgccttcaattctcccttctggactacaaattctggtgctcctgtttggaacaacaactcctctttaaccgttggagctagaggtccaattctgcttgaggattatcatcttgtggagaagcttgcaaactttgacagggaacgtatcccagaacgtgttgtccatgccaggggagctagtgcaaagggtttctttgaggtcacacatgacatttctcacctgacatgtgcagatttccttcgagcccctggagttcagacgcctgtaattgttcgttctcaactgtcattcatgagcgtg

SEQ ID NO: 7839 - DNA, 460 bp, Glycine max
  modified_base (380)..(380): a, c, g, t, unknown, or other
ctgctcgtgcctctagggttatcatatctccatttccatttcctctctctcagtttcgaagaaggttaagctatgggaaagtcttacccaaccgtgagcgctgattaccagaaggccgttgagaaggcgaagaagaagctcagaggcttcatcgctgagaagagatgcgctcctctaatgctccgtttggcatggcactctgctggaacttacgacgtgagctcgaagaccggtggtcccttcggaaccataaagcacccctccgaactcgctcacggtgctaacaacggtcttgacatcgctgttaggcttttggagccactcaaagcggagtttgctattttgagctacgccgatttctaccagttggctggcgttgntgccgttgaggtcaccggtggacctgaagttaccttccatcctgtaagagaggacatacctgagccaccaccagagggtc

SEQ ID NO: 7840 - DNA, 431 bp, Glycine max
agcagttgtggcttcgcaagactatcctgaaattacaaagtatgctggtttaggtggtgcccagagctcataggcaggaactcatccaggatcttttcaaacaatggcaagatccagtcagaggaacagtgactggtggaatgatcaaggaacttcttatatcttttaggagagctacaggacaaatgccacaacgcatcatattttatagggatggtgttagtgagggtcaattttatcaggttctactgtttgagcttgatgctattcgaaaggcatgtgcatccctggaacccaactatcagcctcctgtgacttttgtggtggttcaaaagcgtcaccacacaaggctctttgccagcaaccatcacgataagagttcttttgacaggagtggcaacatattgcctggtactgttgttgactccaaa

SEQ ID NO: 7841 - DNA, 425 bp, Glycine max
gccacgcgttcgcacgccaaggcgtttaaggatgggagaaaaacacagcaacaacaacgtgatgagcagcaacaacaacaacagcaacatcaaccttcggtggacgagaaatacacgcagtggaagtcccttgttcctgtcctctacgactggctcgccaaccacaacctcgtctggccctctctctcttgccggtggggccctcagcttgaacaagccacttacaagaatcgtcaaagactctacctttctgagcagactgatggtagcgtgccgaatactctggtgattgcaaattgcgaggttgtgaagcctacggttgcagctgcagaacacatttcgcagtttaatgaagaggcacggtccccatttgagaagaagtacaagaccatcatacatcctggcgaggtgaacagaattaggga

SEQ ID NO: 7842 - DNA, 326 bp, Glycine max
catttctccatttccattttctctctcacttttcaagaatcgtaagctatgggaaaggcttacgcaactgtgagtgctgattaccagaaggccgttgagaaggcgaagaagaagctcagaggcttcatcgctgagaagagatgcgctcctctaatgctccgtttggcatggcactctgctggaacctttgacaagggcacgaagaccggtggacccttcggaaccatcaagcaccctgccgaactggctcacagcgctaacaacggtcttgacatcgctgttaggcttttggagccactcaaggcggagttccctattttgagcta

SEQ ID NO: 7843 - DNA, 280 bp, Glycine max
gatagttcgttgcatgcaaccatagttttattaggattttttcttctttgttttcaatgaggttgttttgttgctctccttcaaactccatctttccaaatcctctctttgcgattgtgttttgatctgcttcctactgcgatagtttctctactgttacatggccatggcggtttccgcaattggttttgaaagtttcgagaaaaggttggaaatatcctttttccagccgggactttttgctgacccttgaagaaagggtctaaaggctcttacaaaa

SEQ ID NO: 7844 - DNA, 422 bp, Glycine max
ctccttctcaaactagtagtattattcttccattcataatgggtgttttcacattcgaggatgaaatcaactcccctgtggctcctgctactctttacaaggccctagttacagatgccgacaacgtcatcccaaaggctcttgattccttcaagagtgttgaaaacgttgagggaaatggtggcccaggaaccatcaagaagatcactttccttgaggatggagaaaccaagtttgtgctgcacaaaatagaaagcattgatgaggcgaacttgggatacagctacagcgtggttgggggtgctgcattgccagacacggcggagaagatcacattcgactccaaattggttgctggtcccaatggagggtctgctgggaagctcactgtcaaatacgaaacaaaaggagatgcttagccc

SEQ ID NO: 7845 - DNA, 432 bp, Glycine max
  modified_base (191)..(191): a, c, g, t, unknown, or other
  modified_base (233)..(233): a, c, g, t, unknown, or other
  modified_base (240)..(240): a, c, g, t, unknown, or other
cttcaatcagttgactcttcgttcctccctctattctttcggatggagcccatggacatcgtggggaaggccaaggaagacgcttctcttcctaaagcgacaatgacgaaaattattaaagagatgttgcccccggacgtgcgtgtcgccagagatgcacaggatttattgatcgagtgttgtgtcgagtntataaaccttgtctcgtcagagtccaatgaagtctgtaacanagaaganaggaagacgattgcaccggagcacgtgttaaagggcttaggggttcttggatttggcgagtacattgaggaagtttatgcagcatatgaacaacacaagttggaaacaatgcaaagatctttaaaaggtgcaaagtggagcaacagagctgagatgactgaggaagaagcattggctgaacagccaaagatg

SEQ ID NO: 7846 - DNA, 402 bp, Glycine max
tgaaaagccacacatttataagcccgcagtacatcagccatccgtgtacagacctgcagtgggggaacccgcgatttacaagccacacatttgaaaaaccaccagttgagaaacccccatttgagaagcctgcagtatacaagctctcaattgaaaaaccaccagtgtacaagccaccagttgagaaccctccaatttacaaaccctcagttgaaaaaccaccagtatacatgcccccaattgataaacctgcagtttataagccaccagtagagaagccaccggttgagaagcctgcagtctacaagccaccatatggaaagtcaccatactcaaagtaccctccaattgatgacacccatttctgaaggatgtcaatgagtgtattaagtatatgctaaa

SEQ ID NO: 7847 - DNA, 472 bp, Glycine max
  modified_base (358)..(358): a, c, g, t, unknown, or other
  modified_base (364)..(364): a, c, g, t, unknown, or other
  modified_base (450)..(450): a, c, g, t, unknown, or other
ctacctctcaagtttttgaagtatagagatggcagagacattcctatttacctcagagtcagtgaacgagggacaccctgacaagctctgtgaccaaatctctgatgctgtcctcgacgcttgcctcgaacaggacccagacagcaaggttgcctgcgaaacatgcaccaaaaccaacttggtcatggtcttcggagaaatcacgaccaaggccaatgttgactacgagaagatagtgcgtgacacctgcaggaacatcggctttgtctcaaacgatgtgggactggatgccgacaactgcaaggtcctcgtcaacattgagcagcagagccctgatattgctcaaggtgtacacggncacctnaccaaaaaacctgaagaaattggtgctggtgaccagggtcacatgtttggctatgccactgatgaaacccctgaattgatgccatngagccatgttcttgaacaaaac

SEQ ID NO: 7848 - DNA, 156 bp, Glycine max
cccacgcgttcgcccacgcgtgcgggaagatcagcttgagtaccttgaggagcgtcgcttgacggatctgatcaagaagcattctgagttcattagctacccaatttgtctttgcattgagaaaactactgagaacgagatctctgacgatgagga

SEQ ID NO: 7849 - DNA, 474 bp, Glycine max
cccacgcgtccggttttccatggctcgtaccaagcaaaccgctcgcaaatccaccggtggaaaggctcctaggaagcaactcgccaccaaggctgcaaggaaatctgcaccgacaaccggtggagtcaagaagcctcatcgctatcgccctggaactgttgctcttcgtgagatccgaaaataccaaaagagcacagagcttctgatccgcaagctccccttccagcgtcttgttcgtgaaattgcgcaagacttcaagaccgatttgaggttccagagtcacgctgttcttgcgcttcaggaagctgcggaggcttacttggtgggtttgtttgaggacaccaacttgtgtgcgattcacgccaagagggtgaccatcatgccaaaggacattcaactcgcacgccgcattcgtggagaacgtgcttaggctaataataagagtaataacgtaattgctgctgctttttttcg

SEQ ID NO: 7850 - DNA, 342 bp, Glycine max
attctctctgtgtatttccctacctctcccttcaagatgcagatcttcgtcaagaccctcaccggcaagaccatcacccttgagggggaaagctctgacaccatcgacaacgtcaaggccaagatccaggacaaggaaggaatcctcccggaccagcaacgtctcattttcgccggaaagcaacttgaggacggccgtacccttgctgactacaacattcagaaggagagtactcttcacctcgtcctccgtctacgtggtggcatgcagatcttcgttaagacactcaccggcaagaccataaccctagaggttgaaagctccgacaccatcgataacgtc

SEQ ID NO: 7851 - DNA, 359 bp, Glycine max
gccacgcgttcggttttccatggctcgtaccattcaaacctttcgcaaatccaccgttgcaaagtctccttggaagcaactcgccggcaaagctgcaaggaaatctgcaccgacaaccggcggagtcaagaagcctcatcgctatcgccctggaactgttgctcttcgtgagatccgaaaataccaaaagagcacagagcttctgatccgcaagcttcccttccagcgtcttgttcgtgaaattgctcaagacttcaagaccgacttgaggttccagagtcacgctgttcttgcgcttcatgaagctgctgaggcttactcggtgggtttgtttgaggacaccaacttgtgtgcgattt

SEQ ID NO: 7852 - DNA, 390 bp, Glycine max
aacctcgtttccttaatccattctttgctccctcgaactgctgtttggtctcttgactcttagtgcatggcatcaacgtttctcaccctaccaactcccttcctacacaaaactaatgccatcactttctctgacaagagaccctcatttttgcagaggagctctctgaagatcaatgcaattaccaaaaaatgggaacccactaaggctgtacctcacgctgatagagttcttgatcgtttggaggagctatcagataaaacagttggtggagttttgctgcccaagtcagctgttaaatttgagcgatatcttgtgggagaaatgctaactgttggtgctgaagctggagaactaaaggctggaacaaaggtactattcactgacatg

SEQ ID NO: 7853 - DNA, 384 bp, Glycine max
gagtaattgtaaatggttttggcttgcccggattcattaaacggtgcgtgtaactcgtggctcgtgccacctgaccttatataaccactcagatcagtcgaacatttcttcacttcttcgttttcgacgatccccttctccttctctctctctttttcgcctcattccattttcatctatcaatggctccagtagcagcagcatcttcagattcaatcaagccaagagatgtttgcatcgttggtgttgcacgtacaccaatgggtggatttcttggtactctgtcatctctatctgccaccaagctaggctctatagctattgaagctgctcttaaaagggccaaatgtgatccatcccctggggaagaagtatttttgggga

SEQ ID NO: 7854 - DNA, 426 bp, Glycine max
  modified_base (311)..(311): a, c, g, t, unknown, or other
aaactagaagtattattattcttccatttccattaaaaagaaaatatcataaatgggtattttcacattcgaggacgaaatcacctcccctgtggctcctgctactctttacaaagctctagttacagatgccgacaacatcatcccaaaggctcttgattccttcaagagtgttgaaaacgttgagggaaatggtggccctggaacaatcaagaagataactttcgttgaggatggagaaaccaagtttgtactgcacaagatagaagcagttgatgaggcaaacttgggatatagctacagcgtagtgngtggtgctgcgttgccagacacagcggagaagatcacattccactccaaattggctgctggtcccaatggaggctctgctggcaagctaactgtcgaataccaaaccaaaggaga

SEQ ID NO: 7855 - DNA, 457 bp, Glycine max
ctcatctttctctcttctctctccacccaaaccctaactcccgaccctgttcccctcgggtatgcgtcatgaaaggaggaaagtccaagaccgaatctaagagagccgatcccaaacttgctgtgaataagaagggagccgccaccaaggctaggaaacccgccggcaaggggaaggcagcgaaagaccctaacaagccaaagaggcctccaagtgctttcttcgttttcatggaggagttcaggaaggtattcaacaaagaacatcctgaaaacaaagcagtgtctgctgtgggcaaagctgctggagcaaaatggaagaccatgtctgatgctgaaaaagcaccttatgtggcaaagtctgagaaaaggaaagtggagtacgagaagaacatgagagcctataacaagaaacaggcggaaggtcctactggtggggatgaagaagaatctgagaa

SEQ ID NO: 7856 - DNA, 428 bp, Glycine max
ccattttcaagctctcaacgccatctccagctgcttccttatcagaagcgcttcgcccgagaggttctcgcttcctctccttcaatccttcttccaacgctattaattacaaaattaacctctccgcttccctccgatccattcactccctccctcttaaaacctccttgcggatcaaatgctcccaaacagatgggaatggaagtcctgcaaagaggacagtgcttcatgatctttatgagaaagataggcagagtccatggtatgataatctctgcagacctgttacagaccttcttactcttatagcaagtggtgtcagaggcgtcactagcaaccctgcgatttttcagaaagctatctcatcatcgaatgcttacaatgatcagttcaaggaacttgtgcaagcatggaaagacattgaaagt

SEQ ID NO: 7857 - DNA, 480 bp, Glycine max
gtgagaaacaaagaaaggaaataattgatctttgaaaatgcagggaggaaagaaagctggagagtccagcaaggaaacagctgcaaacattggtgcttctgccaaggctggcatggagaaaaccaaggccactgtccaggagaaggcagaaagaatgacggcacgtgatccgatgcaaaaggagttggcaacccagaagaaagaggcaaagatgagccaggcagagctggacaagcaggcggcgcgtcagcataacacggcggcgaatcatgctgccacggcagggcacatgggacaacccatggggacccatcagacgtcagctatgcccggtcatggaaccggacagcccacgggccatgtcaccgaaggagtggtgggctcacaccctattggaaccaacagaggcccgggtgggactgctacggcccataatacccgtgcggggggaaacccaaatgattatgggtatggaactgg

SEQ ID NO: 7858 - DNA, 414 bp, Glycine max
caagagacgaggaatctggtctcaacaaggcagggaagttccctacacttgtgactcaccaaggatctctcgagtcaaaggttaatgagaccaaggccatggtcaagttccagcttaagaaggttctctgcatgggagtagctgtggggaatgttagcatggaggaaaagcaaatcttccaaaatgtacaactgagtgttaacttccttgtctctttgctgaaaaagaattggcagaacgttcgctgcctatatctgaagagtaccatggggaaatcgtaccgtgtcttttgagtagtggttcttaaaattcagtgaatttctgattgcacttaatatattgtcatgataggttggacagaatttttcatcgttctacagttttgttggatgagtattttttggctagtatttc

SEQ ID NO: 7859 - DNA, 452 bp, Glycine max
aagaaaatggcggtgcctttactctcgaagaatatcgtgaagaagagggtcaagaaggtgaaggggccttagagtgacaggaaaatttctgtcaagacaaactggcgcagaccaaagggtatcgattcccgtgttacgagaaagtttaagggatgcactctgatgccaatcattggttatggctcagacaataagacccgacactatctccctaatggctttaagaaatttggtgttcacaatgtgaaggacttggaactgctcatgatgcacaacatgacttactgcgctgagattgcccacaatatatccacagaaaagaggaatgatataggcgagagagccgcgcatatagatgttgtagcgacaaacagaacagccatattactcaaacaggaggatgaatagtctaaatgactaaagaagtcacttatctacaatgactcaatagt

SEQ ID NO: 7860 - DNA, 468 bp, Glycine max
gaagaagaacgcagaagccacgatgagtggcagagccatgatctcctgtttctctcctccttgagcagctccatgctctgggcccattccactctggcgccgaaaccacctcctccatgcaactcctccaccttcgctacaccttctctcgcggcggagccacctcgttgccggcggaaggagggtgtgggtgaatgtgaagtccgagaagaacttatccgaatcccccaagtacgaggatgatgtcgtggttcagaagaagaagaagcgtggtttggataacgtggaagaggaagcgaggtggtggcaagtgtttcccaaaagatgggtcattgtggttctctgcttctcagcttttcttctatgtaacatgaataatattctgtcaaaatgggttcctgtgtcagagagaagtagatcactagcgctggtctacagtggcatgtatctgggatcagtcactggact

SEQ ID NO: 7861 - DNA, 413 bp, Glycine max
tcccacgcgtccgcccactcgtccgctaagattcaagacatggaagggatcccaccttaccatggtaggcttatctttgcgggtaaacaacttgaggatggtcgcacccttgccgattacaacatccaaaaggaatcaaccctccatctcgtgcttcgcctcatgggtggcatgcaaatctttgtcaagactttgaccgggaagaccatcacccttgaggtggaatcctcggacaccattgataatgttaaggccaagatccaagacaaagatggcatccccccatatcatcacaggctgatttttgccggtaaacaacttgaggatggaagaacccttgctgattacaacattcagaacgattccacccttcacttggtgcttcgtttgagaggtggtatacagattttcgt

SEQ ID NO: 7862 - DNA, 443 bp, Glycine max
aagaaaatggcggtgcctctactctcgaagaagatcgtgaagaagagggtgaagaagttgaagaggcctcagagtgactggaaaatttctgtcaagacaaactggcgcagaccaaagggtatcgattcccgtgttaggagaaagttcaagggatgcactttgatgccaaacattggttatggttcagacaagacgacccgccactatctccctaatggttttaagaaatctgttgttcacaatgtgaaggacttggaactgctcatgatgcacaacaggacttactgtgctgagattgcccacaatatatccacaagaaagatgaaagatatagttgagagagccgcgcagcttgatgttgttgtgacttacataacagtcagattacgcaaccaagaagatgaatagtctaaatgactaaaaaagtcacttatctgtagtga

SEQ ID NO: 7863 - DNA, 395 bp, Glycine max
tatgcgcttaatgaaggaatgggttgtgtctgtggccatgatccatttgatataggttggtgtttctttggcggtgggagggcctctggatcatgtgtaagtagtctaggtaggtaggcattaagcactcgataagacgtggttcaccctctcaaggtctctttggaggacctttatcttggaactttcaagaagctctccctctccagaaatgttatatgctccaagtgcagtggcaaaggttctaagtctgactcttctatgaactgtgctgattgtcaacgaactgatatgaaagtttctataagacatcttgtcccattcatgattcagctaatgcagcatgcctgcattgaatgtaaaggtacttggataaactattaatgacagatatc

SEQ ID NO: 7864 - DNA, 437 bp, Glycine max
gcgagcgagcgagcagtttcaaagagaggatttgggattgggaaggcgagggattgcgctgcgtctcttcctctgctctttcgattcatccctcattcataatcttccaatccaacaacctcagcctcacactcacacatacacacatctgaacgcgtatcgtccctcccatggcttcaaagcgcatcctcaaggagctcaaggacttgcagaaagacccaccaacttcttgcagcgctggtccagtagctgaggacatgttccattggcaagcaacgattatgggtcctgctgatagtccttatgctggaggtgtattcctagtcactattcactttcctccggatgatcctttcaaacctcccaaggttgcctttaggactaaggtgtttcatccgaacatcaacagcaatggtagcatttgtcttgatatccta

SEQ ID NO: 7865 - DNA, 359 bp, Glycine max
gcgagcgagcgagcagtttcaaagagaggatttgggattgtgaacgcgaggcagtgcgcggcgtctcttcctcttctctgtcgattcatccctcattcataatcttccaatccaacatccttagcctcacactcacacatacacacatctgaacgcgtatcgtccctcccatggcttgaaagcgcatcctcaaggagctcaaggacttgcagaaagacctaccaacttcttgcagagctggtccagtagctgaagacatgttccatcggcaagcaacgattatgggtcctgctgatagtacttatgctggaggtgtattgctagttactattcactttcctccggattatcctctcaaa

SEQ ID NO: 7866 - DNA, 357 bp, Glycine max
atattcagaaggagtctaccttacacttggttcttcgtttaagaggtggcatgcagatgttcgtcaagactttgacgggaaagaccatcaccttggaggtggagagttcagataccatagacaatgtgaaagccaagattcaagataaggagggtatccccccagaccagcagaggcttatctttgctggtaaacagcttgaagatggacgaacccttgcagattataacatccagaaggaatctaccctgcacttggttttgaggcttcgtggtggcatgcaaatctttgttaagactttgaccggaaaaacaataactttagaagttgaaagttctgataccatcgattacgtga

SEQ ID NO: 7867 - DNA, 380 bp, Glycine max
caagttgtttgatcatacgtgttttctttatgttaagggatactgtcgcgaagagaggggccactaagggcttgtaatgggtggttctatcgtctaccaaaaatttgccaagacttgtgactgtggttcacctatatcaactctgaagtgctggatagaggaagatgaataatagtagttttcttaagtgtctttattatgtccttgctaaaataagtccagttttacagacagcgattgtttatctttggtgttttttaccttttatgttagaccattgttagggcagttggaccttttattgttctactattaccatttgaacatcgaatggattttaattaattatacacaatattatggaaatttatttcttatta

SEQ ID NO: 7868 - DNA, 427 bp, Glycine max
cgtgatcttagatgttctatgtatcatttgcgcaggtaagttggaaaaaaatggaccatgacaagactgggtgccaagctcctcctgaaggtcctatattgtgcatcaacaactgtggattttttggaagtgcagctaccatgaatatgtgttctaaatgccacaaagacatgttgctgaaacaggagcaggccaagcttgcagcatcatccattgggaatattatgaatgggtcttcaagcagcactgaaaaggaacctgttgttgccgctgctgctgctaatgttgatatcccagttattccagtagagcctaaaactgtctctgtgcaacctttatttggttcaagtccagaagggagtggtgaggcaaagctgaaggatggaccaaaacgctgcagcagctgcaacaagcgagttggtttgac

SEQ ID NO: 7869 - DNA, 383 bp, Glycine max
atgcgcttaaggaaggaatgggtggtggcggtggccatgatccatttgatatctgttcgtctttctttggcggtgggagtgcctttggatcatgtggaagtagtcgaggtaggaggcataggcgcggagaagacgtggttcaccctctcaaggtctctttggaggacctttatcttggaacttccaagaagctctccctctccagaaatgttatatgctccaagtgcagtggcaagggttctaagtctggtgcttcgatgaagcgtgctggttgtcaaggaactggtatgaagggttctataagaacatctggcccatccatgattcagcagatgcagcatgcctgcaatgaatgtaagggtactggaaaaactatcaatgac

SEQ ID NO: 7870 - DNA, 387 bp, Glycine max
gttttgatgcaacgctgtcactgagaaaggatctctatctacgaaggagcggaataaagcccttctctctgtgattaagagaatggcttcagatcggaaacttcacacttttgaggaggtggcaaagcacaaccagaccaaggattgctggctcatcatttctggcaaggtgtatgatgtcacccctttcatggaggatcatcccggaggtgatgaggttttgttatctgcaacagggaaagatgcaaccaatgactttgaagatgtggggcacagtgattctgctagagatatgatggaaaaatactacattggtgagattgatgcatcaaccgttccactaaaacggacctacattccacctcagcaagctcaatacaatcctga

SEQ ID NO: 7871 - DNA, 328 bp, Glycine max
tcgcccacgcgtccgcggacgcgtgggttcaatcaacggttatacccttttctatttgagcgtcatgatgtccaccgcagcgcagcccaaggccaagaaaacggcgtcgtccaagaagcccctctcccatcctaccttcgccgcgatgatagcggaggcgatagcgagtctgaaggagagaaccggttcgagccaatacgcgataaccaaattcatcgaaggcaagcacaaggagttgcctccaacctacaagaagcttgttctcgttcatctcaagaagtctgttgctgctggcaagctcgttaaggtcaaaaactctttcaagctc

SEQ ID NO: 7872 - DNA, 386 bp, Glycine max
cggacgcgtgggcggacgcgtgggcggacgcgtgggcggacgcgtgggcaccttcgaaaatcaattttctgtcttctctgcgtcttcttcctctatcaatcgttttccatggctcgtaccaagcaaaccgctcgcaaatccaccggtggaaaggctcctaggaagcaactcgccaccaaggctgcaaggaaatctgcaccgacaaccggtggagtcaagaagcctcatcgctatcgccctggaactgttgctcttcgtgagatccgaaaataccaaaagagcacagagcttctgatccgcaagctccccttccagcgtcttgttcgtgaaattgcgcaagacttcaagaccgatttgaagttccagagtcacgctgttcttgcgct

SEQ ID NO: 7873 - DNA, 382 bp, Glycine max
gcgtcgctccgcaccagtttcaccgcacgaatatcttgttgtttggagcgatccgagagaaactctgtaaacatgttggtttaccaggacctccttacaggtgatgagcttctctctgactccttccgttacaaggaaattgagaatggaatgctgtgggaagttgaggggaagtgggttgttaaaggagcagttgatgtagacattggtgcaaacccttctgctgagggtggaggagaagatgagggagttgatgatgcagctgttaaggttgttgacattgttgacacattcagacttcaggagcaacccgcattcgataagaagcagtttgttaccttcatgaagaggtttatcaagaatttgactcccaagctcgatg

SEQ ID NO: 7874 - DNA, 481 bp, Glycine max
  modified_base (121)..(122): a, c, g, t, unknown, or other
  modified_base (172)..(173): a, c, g, t, unknown, or other
  modified_base (196)..(197): a, c, g, t, unknown, or other
  modified_base (204)..(205): a, c, g, t, unknown, or other
  modified_base (225)..(226): a, c, g, t, unknown, or other
  modified_base (269)..(269): a, c, g, t, unknown, or other
  modified_base (299)..(299): a, c, g, t, unknown, or other
tactcggtctcggaattctccgggtgcgactccacgtcgtctcgtcccacgtcgtctcgtcagtaaagtaaaagtaccattcaaagtgttcactttcagctcttatctcgtgtttgagggnntttcggttttgtgactccaacgtctttgatctgtatcgaaatctcttaanngtttcggatcccaggtctgagcnnaatctgnngttggtagaatctctttggnntcttagagtagtcaagttttactgtctgaattagtacgatcanaattcctatctgccttcgatcctttttgcntgatgcataatgtctgatgacttcgggtgtctgggtcaaaaggaagtatgtgcatattcgcgtaccagcagcgaaatggaaaggaaatagcctgacatactcgttcagggattgaaaaaagtaattcagctataacatagatacttaaaagatgttaagaaagagttctgttgcaatggaac

SEQ ID NO: 7875 - DNA, 294 bp, Glycine max
ttcacgcgttcgaaagcactcagtagggtttgcggtttcagagtttgtgactcacgcagccatgttcaacaacatcaacgccgtctgagcctcttcgtgccagctctgacagaaagaagccgacatccagatgatgttagccgtcgacgtgcacctcggcaccaaaaactgcgacttccaaatggaacgttacatcttcaagcgccgcaactacgggatttacattattaaccttgggaagacatgggagaagcttcagttagcatctagggttattgttgcaattgagaaccc

SEQ ID NO: 7876 - DNA, 380 bp, Glycine max
cccacgcgttcggtggcagaagtcctaggagtgtaaaacagagacgcataatgaagacgatcttgtcgtctgagaccatgaatattcccgacggcgtgagcatcaaggttcacgctaaggttatcgaggttgagggccctcgtggaaaactcgtgcgagacttccaccatctgaacttggacttccaacttattaccgacgatggcggtaaaaggaagctcaagattgattcttggtttggttctcgtaaaaccttcgacgtcatccgcaccgacctcagccacgtagagaatttgatcaccggcgtcaccaagggataccgatacaaaatgagattcgtgtacgcacattttccgatcaacgctagcattggcaacaac

SEQ ID NO: 7877 - DNA, 395 bp, Glycine max
  modified_base (300)..(300): a, c, g, t, unknown, or other
gaaatgctccttgtacatctctcttttggttttgcgggttcagagcttgtgactcgcgcagccatgtccaccaacatgtacgccgtctcagccccttcgtgccagctcttccagaaagaagccgacatccagatgatgttagccgtcgacgtccacctcggcaccaaaaactgcgacttccaaatggaacgttacatcttcaagcgccgcaactactggatttacattattaaccttgggaagacatgggagaagcttcagttagcagctagggttattgttgcaattgagaaccctcangatatcattgttcaatccgcaaggccttatggtcaaagagcggttctgaagtttgctcagtacactggtgctcatgctattgctggaaagcacac

SEQ ID NO: 7878 - DNA, 404 bp, Glycine max
cccactcgtccggtggcagaagtcctactagtgtaaaacagagacgcataacgaagacgagctggtcgtatgagaccatgaatattcccgacggcgtgagcatcaaggttcacgctaaggttatcgaggttgagggccctcgtggaaaactcgtgcgagacttccaccatctgaacttggacttccaacttattaccgacgatggctgtaaaaggaagctcaagattgattcttggttaggttctcgtaaaacctccgacgtcatccgcaccgacctcagccacgttgagaatttgatcaccggcgtcaccaagggataccgatacaaaatgagattcgtgtacgcacatttttcgatcaacgctagcattggccacaacaacaaggtcatccagatcagaaat

SEQ ID NO: 7879 - DNA, 355 bp, Glycine max
gttcatttctacacatccctagctctgtcgttccgtcgttgacgatggcgtttcgggtgcgaagccctgacctccggtctctctttcttctctctctcttgtccatcgcttccgccaatgtcttcttcgaagagcgtttcgatgacgggtgggaaaatcgatgggttaaatcagattggaaaaaagatgagaacgtggctggggagtggaaccacacctctggtcaatggaatggagacgctaatgacaaaggtattcaaaccagtgaggattacagattctatgctatttcagctgagtaccctgaattcagcaacaagggtaagacactagtctttcaattttctgttaagca

SEQ ID NO: 7880 - DNA, 304 bp, Glycine max
atgcacttaaggaaggaatgggtggtgtccgtggccatgatccatttgatataggtgggtctttctttggcggtgggagtccctttggatcatgtgtaaatattaccggtaggaagcataagcgctgagaatacgtggttcaccctctcaaagtctctttggaagacctttatctttggactttcaagaagctctccctctccagaaatgtcatatgctccaagtgcaatggcaaaggttctaagtctggagcttcaatgaaacgtgctggttgtcaaggcactgatatgaacgcttctataag

SEQ ID NO: 7881 - DNA, 370 bp, Glycine max
cttgttggtaaagaaagaaagagaagagaagaatcgaagactaagatggaggacgcatcagcgtcaaagttcattccacaccaaatcggaggggtccaaaacgacgcgcttcgattcggtctccatggagtcaagagcgacatcgttggttctcaccctcttgaatcttcactccaatctacaaggagaatggatgaagcgagtaagaggcaatgcaaagttaacctgtacggtactgcttttcccatgaaggacgagcttgacaggcaaatcctgtccaggttccagctgcctacttgaccaattccttcttcaatgctggttttggagactgttacaggaagtgttgatcactttggtatttaggatt

SEQ ID NO: 7882 - DNA, 410 bp, Glycine max
gagagtgagagaaaagagaagagaagatgacaacacgcttcaagaagaacaggaggaagaggggccacgtcagcgctggccacggtcgaatcgtaaagcacaggaagcaccctggaggacgcggtaacgccggaggcatgcaccaccacaggatccttttcgacaaataccaccctgggttcttcggcaaggtaggaatgcgctattttcacaagcttcgcaacaaattctactctccgatcctcaacatctacaagctgtggtccctggtcccgcaagaagtgaaggacaaggcctccaaggagaacaaggcgccgctcatcgacgtcacgcagttcgggtactttaaagttctcggaaagggcgttttgtcgcataaccagcccgttgtggtcaaggccaagcttatt

SEQ ID NO: 7883 - DNA, 372 bp, Glycine max
tcgctcacgcgtccgtccactcgtccgctgctcgtgcctctagggttatcatatctccatttccagggcctctctctcagtttccaagaatcttaatctatggtaaagtcttacccaaccgtgagcgctgattaccatgttgccgttgagaatgcgaataataagctcataggcttcatcgctgataagagattcgctcctctaatgctccgcttggcatgtcactctgctggaacttactacgtgagctctaagaccggtggtcccttctgaaccataaagcactcctcctaactcgctcacggctctaacaactgccttgacattcctgttaggcttttgtagccacttaaagctgattttactattttg

SEQ ID NO: 7884 - DNA, 455 bp, Glycine max
  modified_base (308)..(308): a, c, g, t, unknown, or other
agagaaacaaatggcagcactgggtggctttaccgacatcaccggagcacagaacagcatcgagtatcgaaaatctcgctcgctttgctgttgatgaacacaacaaaaaagagaatgcagttctggagtttgtgagggtgattagtgcaaagaaacaagtggtttctggcaccttgtactatatcactttggaggcaaatgatggtgtgacgaaaaaggtttatgaaactaaggtgttggagaaaccatggttgaacatcaaggaggttcaggaattcaagcccatcactgttgctgttaatcctctntcggtgacggtctagcacatagctaggttatggaagtgactagcttggccgcaagagtaataatatgtatgaactgaataaatgtacctattaactctacaaacggtgtgggggtgtgcatgtttgccatcctatatatttcagttt

SEQ ID NO: 7885 - DNA, 428 bp, Glycine max
gccacgcgtccgtccacgcgttcgcaagtactttcttacaatcaaaaccaacaacaactatggcgagttgggaaaagcactacgatgagcagggtcgcaaggttgacgagtatggcaacgttgagaagcaaaccgacgaatacggtaaccctgttcatgctgctagtgtcacctatgtagccaccagaactgctgctggtggttacagtgatgacattaataagcaacatgataccaccaatgcctacggcgtagacactggtagacagcattctagtggtggctacgatggtgacactaataaacatcatggaactactggtggctataatgatgacaccaatagacattatggaactaccggtgtctatggtatagacaccgataggcaacaacatgggactactggtggctatgccggtgacact

SEQ ID NO: 7886 - DNA, 431 bp, Glycine max
agcagagtctcttgtgattgttgaatacattgatgagacatggaagaacaaccccatcttagcttctgatccttaccaaagagccttggctcgtttctggtccaaattcattgatgataagattgtgggtgctgtatcgaaatctgttttcacggttgatgagaaagagcgtgagaagaatgttgaagaaacatatgaggctcttcagtttcttgagaatgagctgaaggacaagaagttttttggaggagaggaatttgggttggtagatattgctgctgtcttcatagcattttggatcccaatttttcaggaaatagcagggttgcagttattcaccagtgagaaatttcctatactctacaaatggagccaaaaattccttaaccacccttttgtgcacaaagtccttcctactagagacccacttt

SEQ ID NO: 7887 - DNA, 438 bp, Glycine max
atcatgcaccagaagatgtgccaaaagcattggataaaacattacaggaattgcaacttgacggtcttgacctctatctgatccactggccagtccgcatgaaaagtggaacatttggactcaataaagaatatcttgagcaaccagacattcccaatacatggagagcaatggaggcactctatgactcagacaaggctagagccataggagtgagcaatttctcttcaaagaagcttcaagatttgttagatatagcaagagtggttcctgctgttaaccaagtggaattgcacccaggatggcagcagccaaagttgcgcgcattttgtgaatctaaagaaattcatctatctggatattctccactaggttcaccagcagctctcaaaagtgatattcttaagaatcctgttgtcacagagattgcagagagat

SEQ ID NO: 7888 - DNA, 209 bp, Glycine max
cacgcgtccgtccacgcgtccgacatattcgtgatataccatttaccacaccaaaaccgggctgatcgggtgctctgcggagtcaggaatccgtggatccctacaagaagcggccatcaagcgccgtcaatgctcccttctggactactaattccggtgctgccatctggaacaacaacttatcgctgactgttggagctataggttca

SEQ ID NO: 7889 - DNA, 471 bp, Glycine max
cttcaaatcacacactctcttcaatttctagggttttgctattgctttgcctccgttcccccgttctcacaaaaacaacgccttttctcttctccttcgtatctattctttgcgtttggtttttggttgattgaaggcattcacagcgtaattcgttgctgcattttaatcgatttatctaaccaggactgaatgacctaatggagtctaaaggtgggaaaaagaagtctagtagtagtagtagtaaatcaattttttacgaagctcccctcggatacagcattgaagacgttagaccaaacggtggaatcaagaaattcagatctgctgcttactctaactgttctcgcaaaccatcctgatacacatccggattgatagttcgttgcatgcaaccatagttttattaggattttttcttctttggtttcaattaggtttttttgttgctctccttcaaactccatcttt

SEQ ID NO: 7890 - DNA, 428 bp, Glycine max
gagaaaaggaaagtggagtacgagaagaacatgagagcttataacaagaaacaggcggaagggcctactggtggggatgaagaagaatctgagaagtctgtatctgaggtgaatgatgaggatgatgactaggaatgcagtggcgaggaggaggatgacgattagagaatggactgatgataattgcagttatgtaggatctgatgattttgatcatccgtagtaggatgtctggtcatttgcttataaacatatttctctttccaaaaaatattgccctgctccttcttacgtaaatggctcgtatttccaagtcgtgtatagtttaaagaagggagttctctttatttgtatttctaaatccaactgattagttaaaggatgggtatctcttgtagagcttttaagttgatttatagtttttttgt

SEQ ID NO: 7891 - DNA, 459 bp, Glycine max
ttcttgcgcaccttgcagaatcaattttctctctcaatcgtctttcatggctcgtaccaagcgaaccgctcgcatatccaccggtgggaaggctcctaggaagcaactcgccaccaaggctgcaagaaaatctgcacctaccaccggtggagtcaagaagcctcatcgctatcgtcctggaactgttgctcttcgtgagatccgaaaataccaaaagagcacagagcttctgatccgcaagctcccctttcagcgtcttgttcgtgaaatcgcgcaagacttcaagactgatttgaggttccagagtcacgcggttcttgcgcttcaggaagctgcggaggcttacttggtgggtttgtttgaagacaccaacctttgtgcgatccacgccaagagagtgaccatcatgcccaaggacattcaactcgcacgccgcatccgtggagaacgtgcttaggc

SEQ ID NO: 7892 - DNA, 312 bp, Glycine max
gctttctgagcttgggtttgctgaaccctaactaccgttttggggttggttggaaagccacgtggcccttagtattcctctcataaatcctatggtcatggtttctaatgcgccactgtgggttcctcaaatttttagatagcttttgaatgtattttgctggacgtggtgatgatgattggagttgggttgtttttatttgtggtcgatccttttgttaaataacattgttcagcgattgcgatattattaccctttgtagtatgtgaccatttaccgtaataactagtaatttgtctattattactggac

SEQ ID NO: 7893 - DNA, 448 bp, Glycine max
  modified_base (370)..(370): a, c, g, t, unknown, or other
ggggaagaggcagatttggagtttactcctcccagagaccactgaagtgtgtggtaggtggggctgaaaccgacttcaactatgactcagagaccgggttgacaaccttctccattccagtttctccagaggagatgtacagatggtcaatagagatccaagtttgagtcctttttaagacttggtgtttgatgcattgttgtatcaggagaagggttttgttgtaattaagcattgagggaattgttggagtcaggcagagagagaggggggaggtttgttgtaagacacctagtattagtatcatgtagtggagaaaaagggttgttgatcctaatagctagacaaggcatgttgtagtagtcatggngtggggaagtccttttgttgtaacatgtaatttggtttagacttgtagtatgtcatcaattagatggataaagagaga

SEQ ID NO: 7894 - DNA, 464 bp, Glycine max
  modified_base (131)..(131): a, c, g, t, unknown, or other
gccgacaacgtcatcccaaaggctcttgattccttcaagagtgtgaaaaacgttgagggaaagggtggccgaggaaccatcaagaagatcactttccttgaggatggagaaaccaagtttgtgctgcacanaatagaaagcattgatgaggcgaacttgggatacagctacagcgtggttgggggtgctgcattgccagacacggcggagaagatcacattcgactccaaattggttgctggtcccaatggagggtctgctgggaagctcactgtcaaatacgaaacataaggagatgctgagcccaaccaagacgaactcaaaactggaaaagccaaggctgatgctctcttcaaggccattgaggcttaccttttggcccatcccgattacaactaatcctcttcaacttacttgttatcactttcttgctttttcttgcttggagacttatccaatcactc

SEQ ID NO: 7895 - DNA, 381 bp, Glycine max
cttttatttgagaatatatataaagactatactttcgccataaaaacagttaagaaaaacattgtataagtaataatagcatggtattgtgaattccatatgcaaatttttgttttttaaatcattcgattatatatagaaagagtagtatgaaaaagagggtatttacaattttatctgatctatcaagaacctagtataattttagtgtcacagactttatgttattttcttcatactactaaacttttaacattttatatgttaattagaagtaaacataacatatgaaataaaaagaaactttcggatcgttgaatagcacaatgatataaaaaacaacggaaccatcatactatttataattaaagcgattcaaaa

SEQ ID NO: 7896 - DNA, 466 bp, Glycine max
  modified_base (69)..(69): a, c, g, t, unknown, or other
  modified_base (406)..(406): a, c, g, t, unknown, or other
gggaaagtcttacccaactgtgagtgctgattaccagaaggccgttgaaaaggcaaaaaaaaggctcanaggcttcatcgctgagaaaagatgcgctcctctaatgctccgtttggcatggcactctgctggaacctttgacaagggcacgaagaccggtggacccttcggaaccatcaagcaccctgccgaactggctcacagcgctaacaacggtcttgacatcgctgttaggcttttggagccactcaaggcggagttccctattttgagctacgccgatttctaccagttggctggcgttgttgccgttgaggtcacgggtggacctgaagttccattccaccctggaagagaggacaagcctgagccaccaccagagggtcgcttgcccgatgccactaanggttctgaccatttgagagatgtgtttggcaaagctatggggcttactgaccaagatatc

SEQ ID NO: 7897 - DNA, 463 bp, Glycine max
cacaaactagtaatattattcttcgaatccattttattattcataatgggtagtttcacatgggaggatgaaaccacctcccctgtggctcctgctaccctttacaaagctctagttacagatgccgacaacgtcatcccaaaggctgtcgaagccttcaggagtgttgaaaaccttgaggggaacggtggccctggaaccatcaagaagatcactttcgttgaggatggagaaagcaagtttgtgttgcacaaaatagaatcagttgatgaggcaaacttgggatacagctatagcgtagttggtggagttgggttgccagacacagtggagaagatcacattcgaatgcaaattggctgctggcgccaacggagggtctgctgggaagctaactgtcaaataccaaaccaaaggagatgctcagcccaacccagacgacctcaaaattggcaaagtcaagt

SEQ ID NO: 7898 - DNA, 359 bp, Glycine max
  modified_base (287)..(287): a, c, g, t, unknown, or other
tcggataaaacacttccagaaagaaccttcctattaaccaaaaccaccaccaccggtgccaggtgatcaaaaccactacgatgatcagggtcccaaggccgacgagtatggcaatgttgagaggcaaactgacgaatatggcaacccggttcatgccactagtgtcacttatgtagccaccaaaagtgttggtggctacaatgatgacgctaataagcaacatgatattactggtgtctatcccgagaaagacaccggtagacatcattttggtcgtggttacgacngtgacactaacaagcaacatgatgctactggtgtttatcccggaatagacattggtagagatcatgggacta

SEQ ID NO: 7899 - DNA, 447 bp, Glycine max
ctctaatcactctagctgttgcatatttctactattattcaatggcttctgcagatgtttagggccgttgctttgttggtgggcttgcttgggtcaccggcatcgatgccctcgagaaagccttttcaatctacggcgacatcgttgaatcgaaggtccgtttgatgcacgcaccgtaactgatctcacacgattcggattcggattttttctcgatcctcttctgatctgagatctctgatctatttgcgttacttgatctatgatctgatacttgtgctactatatgattcttttattactcacgccaatatgtacgttcatcttcttcctttcaccaaaggcgatgatcgatcggtttctattcggttctgtcattagttctcgtgtctctacttctgctttggatctgatgcatcgtgtctttgtgtgcaggttatcaacgac

SEQ ID NO: 7900 - DNA, 450 bp, Glycine max
aaactagtaatattattcttcgaatccattttattattcataatgggtattttcacatgggaggatgaaaccacctcccctgtggctcctgctaccctttacaaagctctagttacagatgccgacaacgtcatcccaaaggctgtcgaagccttcaggagtgttgaaaaccttgaggggaacggtggccctggaaccatcaagaagatcactttcgttgaggatggagaaagcaagtttgtgttgcacaaaatagaatcagttgatgaggcaaacttgggatacagctatagcgtagttggtggagttgggttgccagacacagtggagaagatcacattcgaatgcaaattggctgctggcgccaacggagggtctgctgggaagctaactgtcaaataccaaaccaaaggagatgctcagcccaacccagacgacctcaaaattggc

SEQ ID NO: 7901 - DNA, 456 bp, Glycine max
caacttcgaagatgaccagctcgccaatatgaccaccgacgacgtcgtcagagcttctggtcttctcgacaacgagattcgcatcctcaaagaagagttgcagaggaccaatttggagttggaatcgtacaaggacaagatcaaggagaatcaggagaagattaagctcaataagcagttgccctacctcgttgggaacatcgttgagatattggaaatgaacccagaagacgaagctgaagaagatggtgccaatattgatcttgactcacaaaggaagggaaagtgtgttgtgctaaagacttctactcgacagacaatctttctacctgttgttgggcttgttgaccctgacaagttaaaacctggtgatctggttggtgttaacaaggatagttacttaatcttggataccttgccttctgagtatgattctagagttaaggccatggaagt

SEQ ID NO: 7902 - DNA, 448 bp, Glycine max
  modified_base (408)..(408): a, c, g, t, unknown, or other
agaaccccccaacaaactgaagtttaacttccttggtaaagattctatcaagtatgagagatacagttgaggttgagcttcctgtttataatgcaattttgaagttccaaaaagataaaaagcctggtgatgatcttttcgatcagctggatacaagtaaattaaatgctcatctgaaggaactcatgcccggtctaacagcaaaagtcttccgtacattcaatgcatcgatcacattggatgttatgttgaataaggaaactaaagatggagaagttggggaaaagattgttgtttatcagcatgcaaataaacaggttgctatcatttgtaatcatcaacgcagtgtttcaaaatctcatactgcacaaatgtcaaagttaacttgaaaaaattgatgaacttcangctgttctgaaagaactgaaaacggacttatacagggcaa

SEQ ID NO: 7903 - DNA, 419 bp, Glycine max
  modified_base (392)..(392): a, c, g, t, unknown, or other
cccacgcgtccgaaactagtagtattattcttccattccgttctacatataatcattcataatgggtgttttcacattcgaggatgaaatcaactcccctgtggctcctgctactctttacaaggccctagttacagatgccgacaacgtcatcccaaaggctcttgattccttcaagagtgttgaaaacgttgagggaaatggtggcccaggaaccatcaagaagatcactttccttgaggatggagaaaccaagtttgtgctgcacaaaatagaaagcattgatgaggcgaacttgggatacagctacagcgtggttgggggtgctgcattgccagacacggcggagaagatcacattcgactccaaattggttgctggtcccaatgganggtctgctgggaagctcactgtcaaat

SEQ ID NO: 7904 - DNA, 451 bp, Glycine max
cccacgcgtccggatttttaccctcgtgatcctgcttcccataccatccatatgtcttgtgttgcatacaactcactattccttggagaattcatgcaacctgactgggacatgtttcatagtttacacccagcagcagattatcatgctgcagctcgtgcaattggtggatgtcctatttatgttagtgacaagccaggcaatcacaattttgatcttcttaagaagctggttctcccggatggttcggttctccgtgctcagttacctggcaggccaactcgtgattctctatttgtggatccagccagagataggactagcttgctcaaaatatggaacctgaacaaatgctctggagttgttggtgtatttaactgccaaggtgctggatggtgcaagatagagaagaaaacccgcatccatgatacatctcctggtacactcaccg

SEQ ID NO: 7905 - DNA, 349 bp, Glycine max
  modified_base (13)..(13): a, c, g, t, unknown, or other
cccacgcgttcgnccacgcgtacggcataataatctaccgtttcatgattaaggtttcgacggggcagtgaaacatgggagaaccaaaacgaatctatctgcgtatctttgcgctgctcctcttcatttacgcctattcatttcagcttctccgcgctttcgatgacgcgatcttttacgagtcgttcgacgaggatttcgaagaccgttggattgtgtctcacatagatgagtacaatggtgtctggaaacatgccaagagtgagggacatgatgattatgggcttcctgtcagtgaaaaagttaagaaatatgctataggtaaagaacttgatgaagccgtgggtct

SEQ ID NO: 7906 - DNA, 448 bp, Glycine max
atcctgcttcccataccatccatatttcttctgttgcatacaactcactattccttggagaattcatgcaacctgactgggacatgtttcatgtaagtggaagtgtgaatttctctcctccatttataatttattaaagtgcctgatcttttctcaagagttataaatttgcttcatgttaacaaaagatctttgtaatttcagagtttacacccagcagcagattatcatgctgcagctcgtgcaattggtggatgtcctatttatgttaagtacagtgatgttttatgtcacatctttttcttagatgaaattggcacaaattgtaatgtgtgattctgtatttatgatggtttttaacagttgacagccaagcaatcacaattttgatcttcttaagaagcttgttctcccggatggttccggtcttcgtgctcagttacctggc

SEQ ID NO: 7907 - DNA, 477 bp, Glycine max
gttagttcacacactaagttctgaaaaatgagttccaaagtttttcttattctacttatgtgcatggccactatacttttgatctcctctgaggttgcacccgatgatgcataccagaattttgacaaaacagatgggaagcgtagtgcaaatggggtagatgaaagcaaatattggcgtggtggctatggcgactatggtggttggcgtggtggtggttggcgtggtggctatggaggctggcgtggtggctatggtggtgggcgtggtggctatggtggctggcgtggtggctatggtggtgggcgtggtggctacggaggttggggtggtggctttggccctaacgaacataatgaggctgggattgatgctagccctcacaactaagaaggaaacttgctaaagcttatataggatttaagttatcgtaataaataaaacttcattggaagggtagttataatagatgtggag

SEQ ID NO: 7908 - DNA, 411 bp, Glycine max
tcgcccacgcgttcgggatgacgaggacgaagacgatgaagaggaggatgacactaagactaaagggaagaagagtggtaaggcacaggctggtgatggtgatggtgagcgacctccagagtgcaagcagcagtaattgtttgtttcttcggagtatcatgtggctgatgggtgtttttgaggtcctatggtgcctgacgggaaagtgggtttcaatttcatgcaatttttcatagtccttgattcattttcctccctagatccgatagtctgaatttattgagtcaatttctcctttttcccatattttgggagaatgtggttatatatttgtagtcagggatgctgtgaaaaaaaaatatcactggaaagcaataagagtaggactaaagggatacagatgatgctatg

SEQ ID NO: 7909 - DNA, 312 bp, Glycine max
cccacgcgtccgggttgatgctaaccctcacaactaagaaggcaactttctaaagcttatatatgggtttaagttatcgcaataaataaaacttcatgagaaggttagttgtaatagaagtggaaaactttgtaaaggaataatacctttcatgaatttccttaaaaaaaaaaaaaaaaaaaaaaaaaaaaaaaaaaaaaaaaaaaaaaaaaaaaaaaaaaaaaaaaaaaaaaaaaaaaaaaaaaaaaaaaaaataaaaaaaaaaaaaaaaaaaaaaaaaaaaaaaaaaatacaaaaaaaaaaaacaaatac

SEQ ID NO: 7910 - DNA, 470 bp, Glycine max
cccacgcgtccgcccacgcgtccgcccacgcgtccgcttagtcccaattttctagggttttattcattttccgatggcttctgcagatgttgagtaccgttgctttgtcggtgggctcgcttgggccactgacgaccatgccctcgagagagccttctctcagtacggcgaaatcgttgaaacgaaggtctgtttgttgcaggcatcacatctgatctcacacgattcggattcggaattttctcgatcccgttctgatctgtgatctctgatctgtttgcgttacttgatcttatgatacttgtgttactatatgattcttttattactcacgccaatagattatcaacgatcgtgagactggcagatccaggggttttggatttgtgaccttcgcctcggagcagtccatgaaagatgcgatcggagcgatgaatggacagaacttggacggccgtaacatcactgtc

SEQ ID NO: 7911 - DNA, 475 bp, Glycine max
cgtctttgaagtttctaagatgacttctccctacattaaatgtacagtctctttcttcatagcatttggaaatttggctgatgacaccatcaattttgaggcttttccccacaagctggtgcaatttggagagattcaggaaaaagttgtattgaagttttcacaagaggaatttcttacagcttggtcaactcaggtgcgtcctgcaacaactctgttggctgatgggtgtccatatttgtatgctatggtgcatgatagttcagtgtctacaataccaggtgattttgtcattggtgttaagttgacaaccataaacaatatgtgtgcatatgggctcaatcctggtatttcaggttctcgtcttttgggcaccattcctcagtccatttcacagcaaactgtttggaatcaaatggcaacagtgagaacaccattgaattttgattctagcaagcagagcttttgtcaattc

SEQ ID NO: 7912 - DNA, 474 bp, Glycine max
  modified_base (448)..(448): a, c, g, t, unknown, or other
aaaaaagaaaaaagaaaaaaggagttagggtataaaaaagagaagaaagatggtacaccagtggtattgcgtgttggtgtgaatcaagaaccgctctgctatggctgctctgcaatacttggaatcgctgcgtaattcgcaccctgagctctccgattggtacaattcgctggcggatctgtaccagaagaagctctggcaccagctcactctcaagctcgagcagtttgtggctctcgccgtcttccaggctggtgatgctttaatacaattatatcacaatttcatcacagactttgagacgaaaatcaaccttctcaagcttgcacattttgctgttatagtttctcggcagtattctgaaaaagaagctgctgttggttatcttggaggggtcattcagaaacttcaagacactagggagcagcgcatagaagaacctattctntacattaagatgcatatagcaatatt

SEQ ID NO: 7913 - DNA, 424 bp, Glycine max
cgtccgatgcgttcgattcggatctagagtcttcagtttctcctcgttgttcttcgctttcctgttttgaatttcgattctttcgttaatgtaataagatgtttgggagggcaccgaagaagagcgataatacgaggtactacgaaatcctcggcgtctccaagaacgcttcgcaggatgatctgaagaaggcttacaagaaagccgccattaagaatcaccccgacaagggcggtgatcccgagaagtttaaagagctggcgcaagcttatgaggttctgagtgaccctgagaagcgtgagatatatgatcagtatggtgaagatgcgcttaaggaaggaatgggtggtggcggtggccatgatccatttgatatcttttcatctttctttggcggtgggagtccctttggatcaggtggaag

SEQ ID NO: 7914 - DNA, 457 bp, Glycine max
ccggaacgaccgactcgtcccacgcattctacaaaaaagccttcacatgttcaccttttaattggatgattggggtgttccacaggattacaggcatatggatggttttggagttaacacatatacgctgatcaacaaggctgggaaagcagtgtatgtgaaatttcactggaagaccactagtggtataaagtgtctattggaggaagaggccattaaggtgggaggagccaaccacagccatgccactcaagacctccatgattcaattgctgctggtaactatcctgagtggaaactggttgttcagacaatagatcctgagcacgaagacaaatttgactttgaccctcttgatgttactaagacttggcctgaggacattatacccttgcagcctgttggtcgcttggtcctgaataagaacatagataatttctttgctgagaatgaacaa

SEQ ID NO: 7915 - DNA, 430 bp, Glycine max
ctaattcagtttttttctcccatcataaaaaaccgaccctctcctttccctcttcaccggccaatggctcccccaaaggccgagaagaagcccgcggagaaaaagcccgcagagaaggctccggcggagaagaagcccaaggccgagaagaagatatcgaaggaaggaggaagcgagaagaagaagaagagaacaaagaagagcgtggagacctacaagatttacatcttcaaggtgctgaagcaggttcaccccgacatcggaatctcaagcaaggccatggggatcatgaacagtttcataaacgacatcttcgagaagctcgcccaagagtcgtcgcgattggctaagtataacaagaagcctaccattactttcaggggatccatacggcggtgcgtttggtcctccctgggaggtggccaaacac

SEQ ID NO: 7916 - DNA, 414 bp, Glycine max
cgaggactcgtgataacaatttgcttggcaaatttgagttatctggaattcctcctgctccgagaggtgttcctcagatcaccgtttgctttgacattgacgccaacggtatattgaacgtgtctgcggaggacaaaaccactggacagaagaacaagattacaattaccaacgacaaaggaaggctttctaaggaggagattgagaagatggtgcaggaagctgagaagtacaaggctgaggatgaggagcataagaagaaagtggaggccaaaaatacattggagaattacgcctataacatgaggaacacaattaaagatgataagattgcttccaagctgtctgctgatgataagaagaaaattgatgatgcaattgagcaggctatccaatggctcgatggaaaccaac

SEQ ID NO: 7917 - DNA, 395 bp, Glycine max
aagtcttccatagccccccaaaaatgaagagcaccatcttctttgctctctttctcttttgtgccttcaccacctcatacctaccttcagccatcgctgatttcgtgctcgataatgaaggtaaccctcttgaaaatggtggcacatattatatcttgtcagacataacagcatttggtggaataagagcagccccaacgggaaatgaaagatgccctctcactgtggtgcaatctcgcaatgagctcgacaaagggattggaacaatcatctcgtccccatatcgaatccgttttatcgccgaaggccatcctttgagccttaagttcgattcatttgcagttataatgctgtgtgttggaattcctaccgagtggtctggtgtggaggatcta

SEQ ID NO: 7918 - DNA, 361 bp, Glycine max
tctgctcgtgcctctagggttatcatatctccatttccatttcctctctctggggttcgaagaatcttaagctatgggaaagtcttacccaaccgtgagcgctgattaccagaaggccgttgagaaggcgaagaagaagctcagaggcttcatcgctgagaagagatgcgctcctctaatgctccgtttggcatggcactctgctggaacttacgacgtgagctcgaagaccggtggtcccttcggaaccataaagcaccccttcgaactcgctcacggcgctaacaacggtcttgacatcgctgttaagcttttggagccactcaaagcggagtttcctattttgagcttcgccgatttc

SEQ ID NO: 7919 - DNA, 335 bp, Glycine max
tcgcccacgcgttcggtgatttcagtgagtgatcggtgttcacttgatctcatcataatcgtcagcgggaattgaagaagatgccgatcagaaacatcgcctgcggaaggcctgaagaggcgactcaccccgacacgttgaaggcggctttggctgagttcatctcaaccttcatcttcgtgttcgccggctcaggctccggcatcgcctacaacaagctcaccgacaacggcgctgccacccctgccggccttatctacgacttcatcgcccatgcattcgccctcttcgtcgccgtcttcgtcggcgccaacatcttcggcggccacgttaac

SEQ ID NO: 7920 - DNA, 452 bp, Glycine max
gggaaggctcctaggaagcaactcgccaccaaggctgcaagaaaatctgcacctaccagcggtggagtcaagaagcctcatcgctatcgtcctggaactgttgctcttcgtgagatccgaaaataccaaaagagcacagagcttctgatccgcaagctcccctttcagcgtcttgttcgtgaaatcgcgcaagacttcaagactgatttgaggttccagagtcacgcggttcttgcgcttcaggaagctgcggaggcttacttggtgggtttgtttgaagacaccaacctttgtgcgatccacgccaagagagtgaccatcatgcccaaggacattcaactcgcacgccgcattcgtggagaacgtgcttaggcttaatataatggatatagcatagttgtcgccttttcgttttcaatacatttcttgttcctagggtttaagtgttattt

SEQ ID NO: 7921 - DNA, 405 bp, Glycine max
gtgagatttgcgaatctgagaaatggcggattcttctcgggaggagaacgtgtacatggcgaaattggcggagcaggccgagcgttacgaggagatggttgagttcatggagaaggttgcaaagactgtggaggttgaggagttgacggtggaggagaggaatctcctctctgtggcttacaagaacgtgattggtgcgaggagggcttcgtggaggatcatatcctccattgagcagaaggaggagagcaggggcaatgaggaccacgtggccattataaaggagtacaggggcaaaattgaggctgaactcagcaagatctgtgatgggattttgaaccttcttgagtccaacctcatttctttcgctggattttccgatagcaaagtcttttaccttaaaat

SEQ ID NO: 7922 - DNA, 402 bp, Glycine max
gaaaatcctcacccattttcttcgtagccaaacactctgaaattctcagttatgtcgtggcaagcgtatgtggatgatcacctactgtgtgaaatcgaaggtaaccacctcactcacgccgctatcatcggccaagacggaagcgtttgggctcagagcaccaacttccctcagttcaaacctgaggaaataactgccatcaataatgactttaatgagcctggatcacttgctccaactggattgtatatcggtggcaccaaatacatggtcatccagggtgagcctggtgctgtcattcgagggaagaagggtcctggtggtgttactgtgaagaagaccggtgcggccttgatcattggcatttatgatgaaccaatgactccaggtcaatgcaacatg

SEQ ID NO: 7923 - DNA, 349 bp, Glycine max
gttatttcctggaacgacgacgggtcaacgtttatcgtctggaaccctaccgttttcggcagaggcttgcttcctaaatttttcaaacacaataatttctctagcttcgttcgccaactcaacacttacggattcaggaaagttgtgcctgatcggtgggagttctcgaacgattatttccgccgaggcgagaagcggcttctttgcgaaattcagcggcggaagatctcatcgccggcgccgtcttcgactgctccgacgacggttacggtgccgatgccgttgaccgcgataccgatcatatcgccgtcgaactctggcgaggagcatgtgatattcgtcaactcgt

SEQ ID NO: 7924 - DNA, 330 bp, Glycine max
cccacgcgtccgttcacgcgtccgaacatcttcacaaactagtaaatagtaatattatgcttcgaatccattttatgattcataatgggtgttttcacatttgatgatgaaaccacctcccctgtggctcctgctaccctttacaaagctctagttacagatgccgacaacgtcatcccaaaggctgttgatgccttcaggagttgtgaaaaccttgaggggaacggtggccctggaaccatcaagaagatcactttctgtgatgatggagaaagcaagtttgtgttgcacaaaatataatcagttgatgaggcaaacttgggatacagc

SEQ ID NO: 7925 - DNA, 446 bp, Glycine max
  modified_base (336)..(336): a, c, g, t, unknown, or other
gttgtcaaggaactggtatgaaggattctataagacatcttggcccatccatggttcagcagatgcagcatgcctgcaatgaatgtaagggtactggagaaactatcaatgacagagatcgctgcccacagtgcaagggagagaaggttgtgcaggagaagaaagtccttgaagttattgtagaaaaggggatgcataatgggcagaagataacattccctggcgaagctgatgaagcgccggacacaattactggggatatcgtctttgtccttcagcagaaggaacatcccaaattcaaaagaaaggctgaagatctttttgtagagcacactntgtcccttaccgaggccttgtgtggcttccaatttgtgctgactcacttggatagccgtcagcttcttattaaatcaaatccccggggagttgtgaagcctgattcatac

SEQ ID NO: 7926 - DNA, 440 bp, Glycine max
acgccggaaaagcccccaaaggagtgaaaaccaattggatcatgcaggaatgtcgcctcgccaatgttgaccgatctgcctccaagaaaaacaacaacaacttgaggcttgatgattgggtgttgtgtcgaatctacaacaagaaagggaagattgagaaatacaacacgaccgcaccgaagatgaatcttgaaatgattcatagttttgagcacgagaacgagacgaagcctgagattcataagcttggaaatgagcaattgttgtacacggagacttcagattcggtgccaaggttgcacacggactcgagcagctcggagcacgtggtttcgcccgatgtgaggtgcgagagggaagtgcagagcgaccccaagtggaataacgatgattatgatctgggcctacagctagaaaacgcgtttgattttcagtttaat

SEQ ID NO: 7927 - DNA, 401 bp, Glycine max
cttcgttaagaccctcaccggcaagactattaccctagaagtcgaaagctccgacacgatcgacaacgtcaaggctaagattcaggacaaggagggaatccccccagaccagcagaggctgatcttcgccgggaagcagctcgaggacggacgcacccttgctgactacaacatccagaaggagtcaactctccacttggtgttgcgtcttcgtggtggtatgcagattttcgtgaagactcttacgggtaagactattaccctcgaggtggagagctctgacaccattgacaatgtgaaggccaagattcaggacaaggaaggcatcccaccggaccagcagaggctgatttttgctggcaagcagctcgaggatggaaggaccctcgctgactacaaca

SEQ ID NO: 7928 - DNA, 403 bp, Glycine max
aaagtatccatccatgaatcttgcctatgctgctggccgtgctggaggcacaatgacaggagttcttagtgcagcaaatgagaaagctgtagagatgtttattgatgaaaagattagctatttggatatattcaaagttgtggagctaacatgtgagaagcatcaaaatgaattgttatcctctccttcccttgaggaaatcattcactatgacctgtgggcgcgagaatttgctgctagtttgcaagactcttccagcttcactcctattcttgcatgaggatatgattaaactagggatgtggctgctggtgcttcccaattgcctgctttcaccataatttcttcaggcaattgaacaatttagaatgatgcattccctcagatgttgaaaaataaatag

SEQ ID NO: 7929 - DNA, 473 bp, Glycine max
aatcaatcaaattctttgagttgaacacaggggccaagattccttctcttgggttagggacttggcaagctgaacctggtgttgtagctgaagctctcaccacagccattcaggttggatacaggcatattgactgtgctagtgcgtataagaatcaagcagagattggttctgctcttaagaagctttttgatgatggtgtggtgaagcgtgaggacttatggatcacttccaaactctggtgttcagatcatgcaccagaagatgtgccaaaagcattggataaaacattacaggaattgcaacttgactatcttgacctctatctgatccactggccagtccgcatgaaaagtggaacatttggactcaataaagaatatcttgagcaaccagacattcccaatacatggagagcaatggaggcactctatgactcagacaaggctagagccataggagtgagcaatttc

SEQ ID NO: 7930 - DNA, 340 bp, Glycine max
cccacgcgtccgggaagctccccttccagaggctggttcgtgaaattgctcaggacttcaagactgatctgcgtttccagaaccacgccgtgcttgcattgcaagaaactgctgaagcataccttgttgggctctttgaacgacactaacctgtgtgccattcacgctaagcgggtaaccattatgcccaaggatatccagctggcaagaaggattcgcggtgaacgtgcttgaggtggtggttgtgaagatgaagatgaagatgggttgctgcgggtggtgtttttgttgttcagattccttttttttttttcaatggataggggttgttagggagtgt

SEQ ID NO: 7931 - DNA, 431 bp, Glycine max
gtgctgcaatggcttcaagtcaggaggaggtgacccttttgggagctactggaagcccatttgtgtgcagggttcatattgccctcaagttgaagggagttcaatacaaatatgtcgaagaaaatttgaggaacaagagtgaactgcttctcaaatccaacccagttcacaagaaggttccagtgtttattcacaatgagaagcccatagcagagtctcttgtgattgttgaatacattgatgagacatggaagaacaaccccatcttgccttctgatccttaccaaagagccttggctcgtttctggtccaaattcattgatgataaggtttttggtgctgcatggaaatccgttttcacagctgatgagaaagagcgtgagaagaatgttgaggaagcaattgaggctctgcagtttcttgagaatgag

SEQ ID NO: 7932 - DNA, 410 bp, Glycine max
ctctctgcgcttcttggcggcgacgcggcggcggcggcgtcttcgccggagagttctacttgtagagggtcctccttccactcgtcgccgcgctggcagctctacttcaacgagatcaaagataccgataagctcgttgtgatagatttctcggcgtcgtggtgcggtccttgcaaattcatagagccagcgattcacgccatggccgacaagttcaacgacgttgacttcgtcaagatcgacgtcgacgaattacctgatgtggcgcaagagtttcaggtgcaggcgatgccgactttcgtgttgtggaagaaagggaaggaagtcgacatggttgtgggcgcaaagaaggacgagctcgagaagaagattgagaaacatcgatcgtgatcttagctctgaaatcctat

SEQ ID NO: 7933 - DNA, 313 bp, Glycine max
tcgacccacgcgtgcgcccaccttccagttgatcatgcatacccacttgcaatagagtttgactatcctacgcgcgatgcacggtcgcgggccactttcatgggcgtagagcaatgcacatagtctcatgcccacgagctttcgattaactcatgacgtgaacatttccaactgcatgaccattctggaagaacttatgcctatctcaatcgagatggctaagcgaaacttgaggtgcatctggaacttcacgaatgctgcggcccagagccacaatgagattcttgagatgtacacggattacatcgatcca

SEQ ID NO: 7934 - DNA, 424 bp, Glycine max
cgtgagaggggcagtagccgagattccgtgagttgcaaaaatgaagacgattctttccaccgggaccatgaacatcccggacggcgtgagcatcaaagttcatgccaaggtcatcgaagttgagggcccccgcggaaaattggtgcgagacttcaagcatttgaatctcgattttcagctcattactgacgaaaacggtaaaagaaagctgaaaatcgacgcgtggtttggttctcggaaaacatccgccgccattcgcaccgccttgagccacgtggagaatcttatcaccggcgtcaccaagggctaccgctacaaaatgaggttcgtttatgcccattttcccatcaacgcaagcaatggcaacagcaacaagtctattgagatccgaaatttccttggcgagaagaaggtgaggaaagtc

SEQ ID NO: 7935 - DNA, 452 bp, Glycine max
atttttatcaggttgaggagctcttaaaagaatatgacaatgtgtgcaccctcagggttcgcgtgccaatttcatctgacttgagcaatccacgcaatttcatcaccaagatttctcgttataacaaagtggtcaacattccaaacagcatgaccattttggatgaacttctgcctatttcaattgagatggcaaagcgaaacttgaggggcatctggaacttcacaaatcctggggccgtgagccacaatgagattcttgagatgtacagggattacatcgatccaagcttcaagtgggctaacttcaatcttgaagagcaagccaaggtgataattgctgcacggagcaacaacgagatggatgcatccaaactgaagaacgagttccctgagcttcttttcatcaaggaatcactgatcaagtatgtctttgagccaaacaagaaaact

SEQ ID NO: 7936 - DNA, 401 bp, Glycine max
aacgccaaaggcagaatattccgtccggaaattagggttaaggttgcagcgtactccatcagcacccgggttaaataccctatgaccaccgacttgttctaccggaatccttacgctctctcactcacaaacgcacactgaattcaaagacatcgaaagagagaggcatggccgagcaaaccaccatcatgatcaagccagatggcgttcaaagaggccttattggcgagattattaacagatttgagacgaagggtatgtacttgaaagggttgaaactcgatactgtggaccgaacttttgctgagaagcactatgctcatacgtctgcaaagcctttactaaactgggttgatggattacattgtctctagccctgttgctgccatgatctgggacgg

SEQ ID NO: 7937 - DNA, 442 bp, Glycine max
  modified_base (424)..(424): a, c, g, t, unknown, or other
tagaaaacaccctctaccgcctctaagtcctacaagaacccatcccctccccagccgctccggaaatctcactcttgttactcttcttcctccaagagaagtaaacaaccctcacattcaccacagcagcacacacagacaaagacaaccttgtttgtctccaatcaaaacctttcaagctggcgttcgaaaaccaagacaaccctgtccgagaaatcaagcccaagaataggagaatcatgggcgctggaggccctgatgatgaggacaacaacaggtggccaccgtggctgaagcctctgctaaaagaaagtttctttgttcaatgcaagcttcacgctgattcgcacaagagcgagtgcaacatgtactgcttggattgtatgaacggtgctctctgctctctctgcctcgcttaccatanagatcatcgtgctattca

SEQ ID NO: 7938 - DNA, 393 bp, Glycine max
gaatcgacggacccaccgacgcgtacgcacgcacgaacaccgcccaagcagctggcctttctggaagctcaatgacaggagggcttagggcaacagatgagagaagctgggatatgcatattgatgaaaagattagctatttggatatattcaaagatgtggagctaacatgtgagaagcatcaaaatgaattgttatcctctacttaccttgatgaaatcattcactatgacctgtgggcgcgagaattagctgctagtttgcaagactctttcagcttcactcctattcttgcatgaagatatgattaaactcgggatgtggctgctggcgcttcccaattgcctgctttcaccataatgtcttcaggcaattgaacaatttagaatgatg

SEQ ID NO: 7939 - DNA, 446 bp, Glycine max
cttcttttgttgtttgtgtgtttgttttttctctcacctgaaaatgtcttgctgcggtggtgagtgtggttgcggaagcgcctgcaagtgcggcaacggctgcggaggctgcaagatgtacccagacttgagctacaccgagtcaaccaccaccgagaccttggtcatgggagtggcaccagttaaggctcaattcgagagtgctgaaatgggtgttcccgctgagaacgatggctgcaaatgtggagctaactgcacctgcaacccctgcacttgcaagtgaggtgttggagagctaaagcttcaagcagaaatggcccttagaaataatgataaaaactatatgtagtttcaaaacttcaaaattatgtagtatgtattatgttgcactctggtgttttgtgtctaaacaaacacccttagaataaagtggtcatttcttgccc

SEQ ID NO: 7940 - DNA, 403 bp, Glycine max
gcatgacgattatggacttattgttagtgaacaagcccggaaatatgctatagtgaaaaaacgtgacgagcctgtcagtcttaaggatggaacagttgttcttcagcttgagactcgacttcagaatggcctcgaatgtggaggcgcatatattacatatcttcggccccaggagagcggatggaaaccaaaggaatttgataacgaatctccatattctatcatgtttgggcctgataagcgtggagctacaaacatggtgcactatattctcaagcataagaatccaaaaagtgtggagtatgctgaacaccatatcaagtatcctccatatgtcccatctggcaaactaactcatgtatacactgcaattctgaagcccgattatgaattgcaaagtttg

SEQ ID NO: 7941 - DNA, 452 bp, Glycine max
gattcaggtactgcgtttcggaagcagacacatatggctcgtacgaagcaaaccgctcgtaggtccacaggaggaaaggctcctaggaagcagcttgcaaccaaggctgcacgtaagtctgcaccaactactggtggtgtgaagaagccccaccgttatcgtcctggtaccgttgctcttcgtgaaattaggaaataccagaagagtaccgagcttttgatccggaagctccccttccagaggctggttcgtgaaattgctcaggacttcaagactgatctgcgtttccagagccacgccgtgcttgcattgcaagaagctgctgaggcataccttgatgggctctttgaggacactaacctgtgtgccattcacgccaagcgtgtaaccattatgcccaaagatattcagctggcaagaaggattcgtggtgagcgtgcttgagttggtgg

SEQ ID NO: 7942 - DNA, 455 bp, Glycine max
cccacgcgtccgcccacgcgtccgaaactagtaatattattcttcgaatccattttattattcggaatgggggttttcacatttgaggatgaaaccacctcccctgtggctcctgctaccctttacaaagctctagttacagatgccgacaacgtcatcccaaaggctgtcgaagccttcaggagtgttgaaaaccttgaggggaacggtggccctggaaccatcaagaagatcactttcgttgaagatggagaaagcaagtttgtgttgcacaaaatagaatcagctgatgaggcaaacttgggatacagctatagcgtaattggcggagttgggttgccagacacagcggagaagatcacattccaatgcaaattggctgctggcgccaacggacggtctgctgggaagctaactgtcaaataccaaaccaaaggagatgctcagcccaaccc

SEQ ID NO: 7943 - DNA, 448 bp, Glycine max
cccacgcgtccgcatactcttctcatactccttctgatcttgattccttcaaaacctttcacagccatccgggcatttgcatacctgaaacactcaataatattactttcattgtagaaggacataccaaatttaacatcacaatactgaatcaatatctgaagcaaacttcttatatatctacaacttactagatattgcttcgtttccagacacatctgaaaacatcacatttcacttctaatcggctgctgatcccaatggaagctctgctgacaagctcactgtctaataccataccaaaagatatgctcaccccaacctagaccaacttaaatctgtaaaagccaaagctgatgctctctttaaagccattcaagcttaccttttggccaatcccgattacaactaatccaattcgatcaacttcatgattatcatcactatc

SEQ ID NO: 7944 - DNA, 442 bp, Glycine max
agatgccgacacatcatcccaaaggctcttgattccttcaagagtgttgaaagcgttgagggaaatggtggccctggaacaatcaagaagataactttcgttgaggatggagaaaccaagtttgtactgcacaagatagaagcagttgatgaggcaaacttgggatatagctacagcgtagtgggtggtgctgcgttgccagacacagcggagaagatcacattccactccaaattggctgctggtcccaatggaggctctgctggcaagctcactgtcgaataccaaaccaaaggagatgctcagcccaaccaagaccaactcaaaactggaaaagccaaggctgatgctctcttcaaggccattgaggcttaccttttggccaatcccgattacaactaatccaattcgatcaacttcatgattatcatcactatctctc

SEQ ID NO: 7945 - DNA, 449 bp, Glycine max
gcgaaatgcgatacttggtgtgaattgcagaatcccgtgatccatcgagtctgggaacgcagggtgcgctcgaagccattaggccgagggcacgcctgcctgggtgtcacacatcgtttccccaacgcaaacatgtaacaatgttgctgcgcggagtgtatgctgacctctcgcgagcacccgcctcgtggttggttgaaatctgggttcatggccgacttcgccgtgataaaatggcggatgagccacgctcgagaccaatcacgtgcgagccggtcagttctggacccatcgacgaccctatgcgtgcacgcacgctaccaacgagacctcaggtcatgcggtgctacccgctgagattaagcatatcaataagcggaagaatagaatctaacatggatttccttagtaacggctagcgaaccgtgaatgcctaccatgaaaatcgt

SEQ ID NO: 7946 - DNA, 423 bp, Glycine max
caaagggaaaaagggtggcaagaagaaggcagctgatccctttgccaagaaggattggtatgacattaaggccccttctctttttcaagtgaaaaatgttggcaaaaccctcgtctctcgtacgcagggtaccaagattgcttctgaaggacttaaacatagagtgtttgaggtctccttggctgatcttcaaggggatgaggatcatgcattcaagaagattaggttgagagctgaagatgtgcaagggaagaatgtcctgacaaatttctggggaatggatttcacaactgacaagctgaggtcattggtgcgaaaatggcaaactctaattgaagcccatgtggatgtgaagacaactgataactacacattgaggatgttttgcattggatttaccaagagaagagctaaccaagtgaa

SEQ ID NO: 7947 - DNA, 433 bp, Glycine max
  modified_base (381)..(381): a, c, g, t, unknown, or other
tcgactactacaagtgctttcttacagtcaaaaccaacatcatctatggcatgttatcaatagcactacgatgatcatggtcgtaaggttgacgagtatggcaacgttgagaagcaaaccgacgaatacggcaaccctgttcatgctgctagtgtcacctatgtagccaccagaactgctgctggtggttacagtgatgacattaataagcaacatgataccaccaatgcctacggcgtagacactggtagacagcattctagtggtggctacgatggtgacactaataaacatcatggaactactggtggctataatgatgacaccaatagacatcatggaactaccggggtctatgggatagacaccgttaggcatcancatgggactactggtggctatgccggagacactggtatgcaacatgggaaca

SEQ ID NO: 7948 - DNA, 393 bp, Glycine max
gttcatactaagttctgaaaatgagttccaaggttttgcttgttctacttatgggcttgggcactatacttctgatctcctctgaggttgcacccgatgatgcatacgagaattttgacaaaatagatgggaagcctagtgcagatggggtagatgaaagcaagtattggcgtggcggctatggtggcggctatggtggtggttatggaggtgggcgtggaggctatggaggtgggcgtggaggctatggagggggacgtggtggatatggcggcggacgatgtggctatggtggcgggcgtggtggttattgcggcccgtcgtggaggcggccgtggtggctattggcctaatgaacataacgaggcttgggttgatgctaacccttacaac

SEQ ID NO: 7949 - DNA, 454 bp, Glycine max
ccattttcaagctctcaacgccatctccagctgcttccttatcagaagcgcttcggcccagagattctcgcttcctctccttcaatccttcttccaacgctattaattacaaaattaacctctccgcttccctccgatccattcactccctccctcttaaaacctccttgcggatcaaatgctcccaaacagatgggaatggaagtcctgcaaagaggacagtgcttcatgatctttatgagaaagaagggcagagtccatggtatgataatctctgcagacctgttacagaccttcttcctcttatagcaagtggtgtcagaggcgtcactagcaaccctgcgatttttcagaaagctatctcatcatcgaatgcttacaatgatcagttcacggaacttgtgcaagcgggaaagacatttgaagtgcatattgggaacttgtaatgaaagat

SEQ ID NO: 7950 - DNA, 461 bp, Glycine max
  modified_base (428)..(428): a, c, g, t, unknown, or other
  modified_base (436)..(436): a, c, g, t, unknown, or other
  modified_base (450)..(450): a, c, g, t, unknown, or other
cggacgcgtgggggcgccactcgatgtttccatttgcctgcatgcctttggtattgtggggtgtggttcgtttagtggtgtcaagtcttgcgaacgtgagggtgcatgagtggtaatcgggatgtttttgttgcacggctccatgcttgcgcatgcaacgtgtgacatgcatccttttcattgtcaccttagccttcgtggcttaggtgctgacgattggttcctgtgttgcctacctaccaaacggtattcgtgtggctagtcagacccattccatccaggcctctttgttggggacgctggaggatttcaaagtcccacacgtgaaccacgttagtcgtccatcataacggcttcctgtggcacacgtgtggtgattgttctctcggatgcggtgcatgcagtgaacgtgggtggtctagtgcccncacattgntccttaaaatcggntgtctcggatg

SEQ ID NO: 7951 - DNA, 441 bp, Glycine max
tttgccctcactttctcgctccccaaacgctcctctctctcctccaatggccgaccagctgaccgacgaccagatcgccgagttcaaggaggccttcagcctcttcgacaaggacggcgatggttgcattactaccaaggaacttgggactgttatgaggtcacttggtcaaaacccaactgaggcagaactgcaggatatgataaacgaggttgatgctgatggcaacggaaccatcgatttcccagagttcctcaacctgatggctcgcaagatgaaagacaccgactcagaggaggagcttaaggaggctttccgtgtgtttgacaaggatcagaatggtttcatctctgcagctgagctccgccatgtcatgacaaatcttggggagaagctgacggacgaggaggtggatgagatgatccgtgaggccgatgttga

SEQ ID NO: 7952 - DNA, 464 bp, Glycine max
aaaattctcttccgtttcaggattagggtttcaccgttacagtgaaacatggcaaaaccggagcgaatctctctgcgtctctttgcgctgctcctcttgatttccacctcttcgtttcagcttctccgcgcttccgatgacgccgatgatgatgcgatcttctatgattcgttcgacgaggattttgaagaccgttgggttgtgtctcagaaagatgagtacagtggtgtctggaaacatgccaagagtgagggacatgatgattatgggcttcttgtcagtgagaaagcaaggaaatatgctatagtaaaagaacttgatgaagccgtgagtctcaaggatgaaacagttgttcttcagtttgaaactcggcttcagaatggccttgaatgtggtggtgcatatctaaaatatctccgaccacaggaggcttgatggaaatccaaagaatttgataatgaatc

SEQ ID NO: 7953 - DNA, 441 bp, Glycine max
gcgtcgtggtgcggtgctcggagcttccagattccggcgatggaagacagcgcactgcgcgaccgtgcttcattggccgccggagtagggtgtttgtcggtggccggcacctccttctggcgctcctcttcgtcaccgaagcgctctttgccattcacatgcttgagcatttcttccgatactcgtattaaggaaagtgttcaaactgaaggtgcacctgcggctttgggaccatattctcaagcaatcaaatccaacaaccttatttttgtgtctggtgttcttggccttgttcccgagacagggaagttcgtatctgatgatgttgaagaccaaactgaacagcttcttaaaaacatgggggaaattcttaaagccggtggtgctagctactcgtccgttgttaagacaacaattatgttggctgacttgaaggacttt

SEQ ID NO: 7954 - DNA, 463 bp, Glycine max
attagttcatactaagttctgaaaatgagttccaaggttttgcttgttctacttatgttgttggccactatacttctgatctcctctgaggttgcacccgatgatgcatacgagaattttgacaaaatagatgggaagcctagtgcagatggggtagatgaaagcaagtattggcgtggcggctatggtggcggctatggtggtggttatggaggtgggcgtggaggctatggaagtgggcgtggaggctatggagggggacgtggtggatatggcggcggacgaggtggctatggtggcgggcgtggtggctatggcggcgggcgtggtggcgggcgtggtggctatggtcctaatgaacataacgaggctggggttgatgctaaccctcacaactaagaaggcaactttctaaagcttatatatgggtttaagttatcgcaataaataaaacttcatgaga

SEQ ID NO: 7955 - DNA, 244 bp, Glycine max
attcgatcttcagtattcagtgatctgcaaagaccttgttttatattatatacaagagtggtcttgccttgtgtggagtgttattcaatcactttgagtgtgtggtgtggcttccaattgatgtaacgagtgtttcctttcttatttcctttttccacagaattgtgagagccagttgatgtctttgtatgtcacttcatcaataaatcaatatgttataataataaaagaaagcatcatttat

SEQ ID NO: 7956 - DNA, 448 bp, Glycine max
  modified_base (95)..(95): a, c, g, t, unknown, or other
ggcttgcttaagctccttagtgctgctccttgcagctctaattctatcccctcaagttcgtgcaaactatgagaatcccccagtgtacaagcctnccactgagaaaccaccagtttataagcccccagttgagaagcctcctgtttacaaacctccagttgaaaaccccccaatttataagcctccagtagagaagccaccagtgtacaagcccccagttgagaaacccccagtgtacaagcccccagttgaaaaaccaccagtgtacaagcccccagttgagaaaccaccagtgtacaagcccccagttgaaaaacccccagtttacaagcccccagttgaaaaacccccagtgtacaagcccccagttgaaaaaccaccagtgtacaagcccccagttgagaagcccccagtttacaagccctcagttgagaagccaccagtttac

SEQ ID NO: 7957 - DNA, 433 bp, Glycine max
  modified_base (355)..(355): a, c, g, t, unknown, or other
tctgtctctctctctctctctctcgctcttcttctcatcaagcacagagttacagactcggcgatcttccgattctctttcgtcttggtttatgagctcgaaggagagacccactcttggtggcacgcggattaagacccgcaaacgaaatattgctgcgccgctggaccctgcagcattctcggatgcagtggtccagatttatttggataatgctggtgatctggaacttattgctaagagtattgaatcttcagaccttaacttttcaagatacggtgacaccttttttgaaggtgctttcactgggggtcgtacacaacctggaactaccaagcctgatgaaggggaccgncacccatactctataatagagtgggagcctaagcgtgaagtcattttaccatctgtaatctacatacaaaagattttg

SEQ ID NO: 7958 - DNA, 437 bp, Glycine max
ttctcatctttctctcttctctctccacccaaaccctaactcccgaccctgttcccctcgggtatccgtcatgaaaggaggaaagtccaagaccgaatctaagagagccgatcccaaacttgctgtgaataagaagggagccgccaccaaggctaggaaacccgccggcaaggggaaggcagcgaaagaccctaacaagccaaagaggcctccaagtgctttctttgttttcatggaggagttcaggaaggtattcaacaaagaacatcctgaaaacaaagcagtgtctgctgtgggcaaagctgctggagcaaaatggaagaccatgtctgatgctgaaaaagcaccttatgtggcaaagtctgagaaaaggaaagtggagtacgagaagaacatgagagcctataacaagaaacaggcggaaggtcctactggtg

SEQ ID NO: 7959 - DNA, 366 bp, Glycine max
  modified_base (283)..(283): a, c, g, t, unknown, or other
  modified_base (296)..(296): a, c, g, t, unknown, or other
  modified_base (330)..(330): a, c, g, t, unknown, or other
gttctctcacacactcattcggtgctccgaatctcagattctagggttagggttcccaatgtctcgaccgatcagaaaatgagttcaactggtggttctaccaagggcggaaggggcaagcccaaagcctccaaatccgtttcaagatcgcagaaagctggtctccaattccccgttggaagaatcgctcgattccttaaggctgggaaatacgccgagcgtgttggtgctggtgctcctgtgtacctctctgcagtgctcgaatatctcgctgctgatgttntggaattggctgngaatgctgctagggataacaagaagaatcgtatnggtcctaagcacattcagcttgctgtgaagaacgat

SEQ ID NO: 7960 - DNA, 369 bp, Glycine max
atttcaatcaacggttatacccttttctatttgagcatcatcatgtccaccggggcgcagcccaaggccaagaaaacggcgtcgtccaagaagcccctctcccatcctaccttcgccgcgatgatagcggaggcgatagcgagtctgaaggagagaaccggttcgagccaatacgcgataaccaaattcatcgaaggcaagcacaaggagtggcctccaacctacaagaagcttgttctcgttcatctcaagaagtctgctgctgctggcaagctcgttaaggtcaaaaactctttcaagctcgcaccgactaagtctgctcctgttaaagccgctgctgctcccaagaagcccaccatagctgcggct

SEQ ID NO: 7961 - DNA, 446 bp, Glycine max
ctttctctcttctctctccacccaaaccctaactcccgaccctgttcccctctcgtatccgtcatgaaaggaggaaagtccaagaccgaatctaagagagccgatcccaaacttgctgtgaataagaagggagccgccaccaaggctaggaaacccgccggcaaggggaaggcagcgaaagaccctaacaagccaaagaggcctccaagtgctttcttcgttttcatggaggagttcaggaaggtattcaacaaagaacatcctgaaaacaaagcagtgtctgctgtgggcaaagctgctggagcaaaatggaagaccatgtctgatgctgaaaaagcaccttatgtggcaaagtctgagaaaaggaaagtggagtacgagaagaacatgagagcctataacaagaaacaggcggaaggtcctactggtggggatgaagaagaatc

SEQ ID NO: 7962 - DNA, 446 bp, Glycine max
cccacgcgtccgcccacgcgtccgattaaaaccctatagcatcagcccatcaactagcagaaaggagtttgtgtaagggaagaagatggtgtcaggttctggaatctgcgcaaagcgagtggtggtggacgctcgccaccacatgttgggtcggctagcgtccatcgtggcgaaagagcttctgaatgggcagaaggttgcggtggtgcgctgcgaagagatttgcatctccggcggtctggtgaggcagaagatgaaatacttgagattcctccgcaaacgcatgaacaccaaaccctcccatggccctatccacttccgcgccccagccaagatcttctggcgcaccgttcgtggaatgataccacacaagacaaagcgtggggaagctgctcttgctcgtttgaaggtttatgaaggaatccctcctccatatgacaagacca

SEQ ID NO: 7963 - DNA, 440 bp, Glycine max
gttacctccaagcacaatgatgatgagcagtacgtttgggagtcccaagctggaggttcattcactgtcaccagggatacctctggtgaggttcttggcaggggtactaagatcactctcttcctcaaggaggatcagctagagtaccttgaggagcgccggttgaaggatttgattaagaagcattctgagttcattagctacccaatttctctttgggttgagaagactaccgagaaggagatttctgacgatgaggatgaggaagagaagaaggatgaggagggtaaggtggaggatgttgatgaggagaaggagaaggaagaaaaaaagaaaaagaagatcaaggaagtgtcacatgaatggtccttggtgaacaagcagaagcctatttggatgaggaagcctgaagagatcacaaaagaggagtattctgcttt

SEQ ID NO: 7964 - DNA, 432 bp, Glycine max
ttccttttgaaggttagaagtgctacaatacaaacaatggcagctactcaggaagatgtgaagcttttgggtattgtgggaagcccatttgtgtgcagggtccagattgcccttaagttgaagggagttgaatacaaatttttggaagaaaatttgggcaacaagagtgatttgcttctcaaatacaaccctgttcacaagaaggttccagtgtttgttcacaatgagcagcccatagcagagtctcttgtgattgttgaatacattgatgagacatggaagaacaaccccatcttaccttctgatccttaccaaagagccttggctcgtttctggtccaaattcattgatgataagattgtgggtgctgtatcgaaatctgttttcacggttgatgagaaagagcgtgagaagaatgttgaagaaacatat

SEQ ID NO: 7965 - DNA, 443 bp, Glycine max
cccacgcgtccgcacaaactagtaaatagtaatattattcttcgaatccattttgttattcataatgggtgttttcacatttgaggatgaaaccacctcccctgtggctcctgctaccctttacaaagctctagttacagatgccgacaacgtcatcccaaaggctgttgatgccttcaggagtgttgaaaaccttgaggggaacggtggccctggaaccatcaagaagatcactttcgttgaggatggagaaagcaagtttgtgttgcacaaaatagaatcagttgatgaggcaaacttgggatacagctatagcgtagttggtggagttgggttgccagacacagtggagaagatcacattcgaatgcaaattggctgctggtgccaacggagggtctgctgggaagctaactgtcaaataccaaaccaaaggagatgctc

SEQ ID NO: 7966 - DNA, 379 bp, Glycine max
ctcctcttctgccctccacacaacttctctctcctctctctctctctacagatccttctttcttctcttcgctgctcactgtagcgtagccatggctttcagagttggaggagcgggaggaggaaatgcctcttctggcatgggtgttgctgagcatagcgtaagcacgttcctggaattgcagaggaagaaagttcatcgctatgtgatttttaaaattgacgagaaaaagaaagaggttgttgttgaaaaaactggaggccctgctgagagctatgatgatttcactgcatccttgcctgaaaatgaatggcgatatgctatctttgactttgattttgggacatctgagaacttgccaaagaaccaaatccttttt

SEQ ID NO: 7967 - DNA, 465 bp, Glycine max
cccacgcgtccggccacgcgttcgtccacgcgtccgcacaaaagtgttgcacttgagtgaaaagtagtgtgttaagaactaaacaatttttcaatggcgtccaagaaacaagatgagcgagctgaggcatctgcgaaagttgctgccaaagaactcgaacaagtcaacagagaaagaagagaccgtgatttccgtgttgctgctgaacaacaacaacatcatcatcaggaagatcaacaaaaacgtggtgtaatcgggttcatgtttaaagcggtgcatgacacctactagaacgccaaggaagctgtcgatggcaagaaagaagctactaataacgcgtacagtaatacagaagttattcacgatgttaacatttagaccgatgacgtgtcagctacgggggaagtacgggacatatcagccacatagactcatgatatctacgattctgtcacggacaacaac

SEQ ID NO: 7968 - DNA, 457 bp, Glycine max
gaggaagctccggcaggtgattatgccatcacagatttcaatgcaggtgctattgctgctgatggccagtggcctggtacaattgatcaatcatggagtgatgcagttccacaacctattccagcagcacctggtgtcaactggggggcacctgcagaagcacctgctgctgttgcagaaggagattggggtgaagctgttccaccaccacaacaaatccctgttcctccctctggaattgactctgtccaaccaactggctgggaataaactagtgttttttgatgctatgattttgccctgtccttcaatttagttgtctttcttagaagtaaaatatggatcagtttttttgtagcaaagcaacttggtttttttttttttctagtttgttatgagtggcaaaatattatttttaacatggtaaaaaacaaagactgaatgagctagttcggca

SEQ ID NO: 7969 - DNA, 423 bp, Glycine max
  modified_base (315)..(315): a, c, g, t, unknown, or other
  modified_base (324)..(324): a, c, g, t, unknown, or other
  modified_base (366)..(366): a, c, g, t, unknown, or other
acgctatgagtgccggaaatcgctgcccacagtgcaagggagagaaggttgtgcaggagaagagagtccttgaagttattgtagaaaaggggatgcagaatgggcagaagataacattccctggcgaagctgatgaagcgccggacacaattactggggatatcgtctttgtccttcagcagaaggaacatcccaaattcaaaagaaaggctgaagatctttttgtagagcacactttgtcccttaccgaggccttgtgtggcttccaatttgtgctgactcacttggatagccgtcagcttcttattaaatcanatccccggngaagttgtgaagcctgattcatacaaggctataaatgatganggaatgcccatgtatcagaggccattcatgaaaagggaaacttacattcacttcact

SEQ ID NO: 7970 - DNA, 457 bp, Glycine max
cccacgcgtccgcccacgcgtccgcccacgcgtccgggaagactaacagacagtaagggcagagcggtggatttcaagaacacacttcttataatgacatcaaatgttggaagcagtgtgattgagaaaggaggccgtaaaattggatttgatctggattatgatgagaaggatagcagttataacagaatcaagagcctggtaaccgaggagctaaaacaatacttcaggccagaatttttgaataggttggatgaaatgatcgtcttcaggcagctcacaaaactggaggtgaaggagattgctgacataatgctcaaagaggtgtttgaaagactgaaggtgaaagatattgaacttcaagtgacagaaagatttagggacagagtggtggaggaaggttataaccctagttatggagctagacctctaagaagagccataatgcgacttttgg

SEQ ID NO: 7971 - DNA, 467 bp, Glycine max
  modified_base (445)..(445): a, c, g, t, unknown, or other
cccacgcgtccgcccacgcgtccgggtgattcctggggagtatggtttcattgctcagctgagggagggtcgccaggtcaagaagagaccaactgagtttcgtgttgataaggtcctccagccctttgatgaaaacaagtttaacttcactaaagttgggcaagaagaggtcctgtttcagcttgaggctagcaatgatggggaggctcaattctttccaaatgcacctattgatgttgagaattctcctagttttgttgccatcaatgtgagtcctattgaatatgggcatgttctgctgattccacggatttttaagtgtttacctcaaaggattgaccatgcaagcttcttgcttgcacttcaaatggcagttgaagcaaggaatccatattttaggttgggttacaacagcttgggtgcatttgcaaccattaaccatctncactttcaggcatattacttgg

SEQ ID NO: 7972 - DNA, 441 bp, Glycine max
ggatttggaaggattggccgtttggtggccagtgttgcccttcaaaggaatgatgttgaactggttgctgtcaacgatcctttcatcaccactgattacatgacatacatgttcaagtacgacaccgttcatggccagtggaagcattttgatgtgaaggtgaaggactctaatacccttctctttggtgagaagcccgtcaccgtttttggaatcaggaaccctgaggaaattccatggggtgaggctggtgctgattatgttgttgagtcaactggtgtattcactgacaaggacaaggctgctgctcacttgaagggtggtgccaagaaggttgtcatctctgccccaagcaaagatgcacccatgtttgttgttggtgttaacgagaaggagtacaagccagagcttgacattgcttccaatgctagctgcactacc

SEQ ID NO: 7973 - DNA, 392 bp, Glycine max
cccacgcgtccgaagttctgaaaatgagttccaaggttgtgcttgttctacttatgttcttggccactatacttgtgatctcctctgaggttgcacccgatgatgcatacgagaattttgacaaaatagatgggaagcctagtgcagatggggtagatgaaagcaagtattggcgtggcggctatggtggcggctatggtggtggttatggaggtgggcgtggaggctatggaagtgggcgtggaggctatggagggggacgtggtggatatggcggctgacgatgtggctatggtggcaggcgtggtggctatggcggcagtcgtggtggccgacgttgtggctatggtcctaatgaacataacgaggctggtgttgatgcttaccctcac

SEQ ID NO: 7974 - DNA, 342 bp, Glycine max
cggacgcgtgggccgcagctgcttgtattcgcaccgcaaacagtgagccatggtcgtctgaaggaacaagcgcatcttcaaggggaagaagggtggcaagaagaaggcagctgatccctttgccaagaaggattgatatgacattaaggctccttctgtgtctcaagtgaataatgttggcaaaaccctcgtctctcgtactcagggtaccaagattgcttatgaaggactcaagcatagagtgtttgacgtctacttggctgatcttcacggggatgaggatcatgcattcgagatgattaggctgagagctgaagatgtgcaagggaagaatgttctgac

SEQ ID NO: 7975 - DNA, 323 bp, Glycine max
cgcccacgcgtccgcccacgcatccgcacaaaaggggtccactagagagaaaagggggcgcaaggggaaacaatcacacaatggcgtacaacaaacacgaggagcgagctgaggcagctgcgaaagttgctgccaaagaactcgaacaagtcaacagagaaagaagagaccgcgatttcggtgtcgctgctgaacaacaacaacaacatcaccaggacgatcaacaagaacctggcgtaaacgggaccatgtctaaggcggggcatgacaactccgagaacgccaccgaagctgaccttggcaagaaacaagctacaaataac

SEQ ID NO: 7976 - DNA, 432 bp, Glycine max
tcgagatcgacgacgatctgaaactgcgagcattttgggacaagaggatctcacaggaggtcatcggagatgcactcggtgaggaatttaagggctatgtcttcaaaattaccggaggttgtgacaaacaaggatttccaatgaagcagggagtgctgactcctggtcgtgttagacttttgcttcacaggggaactccttgcttccgtggatatggaaggcgtaatggagagcgtaggagaaagtctgttcgtgggtgcattgtcagcccagacctctctgttttgaacttggtaattgtgaagaaaggtgagaatgatttaccaggattgactgatgttgagaagccaaggatgagaggcccaaagaggagctaatccaaaattcgtaaactgttcaacctgtctaatgaggatgatgttaggaagtatg

SEQ ID NO: 7977 - DNA, 418 bp, Glycine max
gcaaagtgttgctttcagcacaaaagcacttgtttcatccatgcttaattacattcgctgcatgttttcaagcaagcgttttcattggaggcctttcatatggagttgatgatcagtctcttaaggatgtattttctgactttggagatatggttgatagtaaatttggctcactttcattgctgttacatggtgtcctatttcaaccacccgccagcctcactttaccatatgttcttcagtttcctttgttgtcattataatttttccatggcattataatcacagcaagcgtagcattttatgtcattcctaaataactataattgtttttgtgctgatgtattcaatggaaaatttcttgggttttcttaaaaaacaatatattttatattttttatgttattttttttatttt

SEQ ID NO: 7978 - DNA, 414 bp, Glycine max
cccacgcgtccggttgccattctcatcctcttctttctctctctaccattgccatggatgcctacaagcaccggccatccagcgccttcaattctcccttctggactacaaattctggtgctcctatttggaacaacaactcctctttaaccgttggagctagaggtccaattctgctggaggattatcatcttgtggagaagcttgcaaattttgatagggaacgtatcccagaacgtgttgtccatgccaggggcgctagtgcaaagggtttctttgaggtcacccatgacatttctcacctgacatgtgcagatttccttcgagcccctggagttcagacgcctgtaattgttcgtttctcaactgtttcattcatgagcgtggtagccctgaaaccttgagggaccctcg

SEQ ID NO: 7979 - DNA, 425 bp, Glycine max
cccacgcgtccgcttaaaccctagccgctcttctcttcattcttcactttggaaacaatcataatggcgttctgtaataaggttggaaatgtcttgaggcagggtgctgctcgcagcacacatgcccctgttgcgtccatgcttaattacatccgctgcatgtcttcaagcaagcttttcattggaggcctttcatatggagttgatgaccagtctcttaaggatgcattttctggctttggagatgtggttgatgcaaaagttataactgatagagacagtggaagatcaaggggatttggatttgtcaacttctccaatgatgagtctgcaagttcggcactctctgcaatggacgggaagggatccctaaatgggcgaagcattcgggtatcctatgcaaatgataaaccatctgcacctcg

SEQ ID NO: 7980 - DNA, 431 bp, Glycine max
  modified_base (253)..(253): a, c, g, t, unknown, or other
tgcatttctatttctaactaattattgtgcttattattattgttgagaaagaaaagaatggcggattaataaaattgtttgagttgaacacaggggccaagattccttctgttgggttagtcacttgtcaagctgaacctggtgttgtagccaaagctgtcaccacatccattctggttggatacaggcatattgattgtgctcaagcgtataacaatcaagcagagattggatctgctcttaagaagctttntcatgatggtgtggtgaagcgtgaggacttaatgatcaccttcaaactctggtgtacagatcatgcttcaatagatttgcccaaagcattggattaaacattgcaggattttccacttgattaccttgacctctatctgatccaatggtcaatgcgcattaaaagcctatcagtttga

SEQ ID NO: 7981 - DNA, 366 bp, Glycine max
atacgaaatgaagagtactatcttctttgctctctttctagtttgtgccttcaccatctgggacgggccttcagccaccggtcagttcgtgctcgacactgatgatgatcctcttcaaaacggtggcacatactatatgttgccagttatgagaggaaagggcggtggaatagaagtagattcaactggaaaagaaatatgccctatcactgttgtgcaatcacccaatgagctcgataaggcgattggactagtctttacatctccattacatgccctttttatcgccgaaggctatcctttgagcattaagtctggttcattagctagtatgacgctgtgtgccggcatgcctactgggtgggc

SEQ ID NO: 7982 - DNA, 384 bp, Glycine max
tccacgcgtccgtccacgcgtccgatcagttgatgaggcaaacttgggatacagctatagggtaggtggtggagttgggttgccagacacagtggagaagatcacattcgaatgcaaattggctgctggcgccaacggagggtctgctgggaagctaactgtcaaataccaaaccaaaggagatgctcagcccaacccagacgacctcaaaattggcaaagtcaagtctgatgctcttttcaaggccgttgaggcctaccttttggccaatcctcattacaactgatccaattcgatcttcagtattcagtgatctgcaaagaccttgttttatattatatacaagagttttcttgccttgggtggagtgttattcaatcactt

SEQ ID NO: 7983 - DNA, 410 bp, Glycine max
cccacgcgttcgcacacacaactactacaagtacttccttacaatcaaaaccaacaacagcgatggcaagttatcaaaagcactacgatgatcagggtcgcaaggttgacgagtatggcaacgttgagaagcaaaccgacgaatacggcaaccctgttcatgctgctagtgtcacctatgtagccaccagaactgctgctggtggttacagtgatgacattaataagcaacatgataccaccaatgcctacggcgtagacactggtagacagcattctagtggtggctacgatggtgacactaataaacatcatggaactactggtggctataatgatgacaccaatagacatcatggaactaccggggtctatggtataaacaccgatagggaacaacaatggactact

SEQ ID NO: 7984 - DNA, 387 bp, Glycine max
ctcttgctacttgaagaaagtaggatacaaccctgacaagattccttttgttcctatgctgggctttgagggagacaacatgattgataggtccacaaaccttgactggtacaagggtccaactctgcttgatgcacttgaccagattagtgagcccaagaggccctctgacaagcccctcatgcttacccttcacgatgtgttcatgattggaggtattggaactgcgccagtggtacgtgttcgataccggtgtcttgaagcctgaaatggttgtgacttttgcaccaactggactgacatctgaagtcaagtctgtggagatgcaccatgaatctcttacagatgcacatgcttgtgacaatgtcagattcaatgttaagaatg

SEQ ID NO: 7985 - DNA, 364 bp, Glycine max
cccacgcgtccgtgcatgcactttcactcgaagaaccttgaagcgagtctgggccagagcggccagcgacaacaactgaatcagctagggttgctttgcttgctatcttgttggaggattttctgttcaagagaagatggtaactagaattgtggatcttcgttcagacacagttacaaagccaactgaagcaatgagagctgctatggcaagtgctgaagttgatgacgatgttctaggctatgatccaactgcttttcgcttagaaacagagatggcaaagacaatgggcaaagaagctgctctttttgttccatctggcactatggggaaacctgtatctgtacttgttcattgtgatgtc

SEQ ID NO: 7986 - DNA, 410 bp, Glycine max
ccaagatccaggacaaagagggcatccccccagatcagcagaggctgatttgtgccggtaggacaacttgaggatggaagaacccttgctgattacaacattcagaaggaatccacccttcacttggtgcttcgtttgagaggtggtatgcagattttcgttaaaactttgaccggaaagaccataaccttggaggtggagagttcagataccatagacaatgtgaaagctaagattcaggacaaggaaggtatcccaccagaccaacagaggcttatctttgccgggaaacagcttgaagatggaagaacccttgctgactataacatccagaaggaatctaccctgcacttggtgttgcggcttcgtggtggcatgcaaatctttgttaagactttgactggaaaaac

SEQ ID NO: 7987 - DNA, 229 bp, Glycine max
acgggcgaacttgggatacagctacagcgtggttgggggtgctgcattgccagacacggcggggaagatcgcattcgactgcaaattggttgctggtcccaatggagggtctgctgggaagctcactgtcaaatacgaaacaaaaggagatgctgagcccaaccaagacgaactcaaaactggaaaagccaaggctgatgctctcttcaggccattgaggcttaccttt

SEQ ID NO: 7988 - DNA, 386 bp, Glycine max
gcgcccacgcgttcgcccacgcgtacgctccgccacttctgaatctattgaatcaacaatcatgtcggacggagagcaccatttcgagtccaaggccgacgccggagcctccaaaacctaccctcagcaagccggtaccatccgcaagaacggctacatcgtcatcaaaggccgtccctgcaaggttgctgaagtttcgacttacaaaactggaaagcacggtcacgctaagtgtcactttgatggaattgatattttcactgccaagatacttgaggatattgtgccctcttctcacaactgcgatgttcctcatgtgaatctgactgattaccagctcattgatattgctgacgatggatttttgagtctgcttactgaaaatg

SEQ ID NO: 7989 - DNA, 444 bp, Glycine max
ccgctcaacaactataataacatctttctctctccgaacagatcaaactagggccacctgaagcgccaaatcagtccatgatttcaccgttaaagatgccaagggaaatgatattaatcttggtgactacaaaggaaaggtccttatcattgtcaatgttgcctcacaatgtggcttgactaattcaaattacactgagctcagtcagttgtatgagaaatacaaacagaaaggtctggaaattctggcatttccatgcaatcagtttggggcacaggagcctggatctaatgaacagatacaagagtttgtttgtactcgcttcaaggctgagtttcccgtttttgacaaggttgatgtgaatggtgacaaagctgctccactgtacaagtatctaaaatcaagcaaaagtggactctttggggatggtatcaaatggaactt

SEQ ID NO: 7990 - DNA, 450 bp, Glycine max
cggacgcgtgggttccaccactggtggttttgaagctggtatttccaaggatggacagagtcgtgagcgtgctctccttgcattcactcttggtgtgaggcagatgatttgctgctgcaacaagatggatgccactacacctaagtactccaaggcaaggtacgatgaaattgtcaaggaagtttcttcctacatgaagaaggtcggatacaaccctgacaaaattccttttgttcccatctctggttttgagggagataacatgattgagaggtctacaaaccttgactggtacaagggtccaacccttcttgaggcccttgatcagatcaatgagcccaagaggccatcggacaagcctctccgattgccccttcaggatgtctacaagaatggtgggataggaactgtgcctgttggacgggttggaaccggtgtcttgaaacctgg

SEQ ID NO: 7991 - DNA, 434 bp, Glycine max
cactttccaatacaataatcactaactgaatattcgatcggagatgtctgccgccgccggggaagctagcgctcccgccgtcgaaaagccggttgaggaggtgaaggcgccgaaccccgcgaaggagaagaaacctaaggctccgaaggaaaagaagccaaaacaggccaaaacagcttcacatcctccatattttcagatgattaaggaggctttgatcgctttgaacgagaaaggaggatcgagtccttatgcgatagcgaagtacatggaggagaagcacaaggcggtgctccctgcgaatttcaagaagattctaggtctgcaactaaagaaccaagctgcgagagggaaactcgtgaagatcaaggcttcgtacaagttaaccgaagccgcgaagaatgagaacaccgtcaaagtgacgaatgccaacg

SEQ ID NO: 7992 - DNA, 405 bp, Glycine max
gagaaacatggcttccttaagctccttagtgctgctccttgcagctctaattctatcccctcaagttcttgcaaactatgagaatcccccagtgtacaagcctcccactgagaaaccaccagtttataagcccccagttgagaagcctcctgtttacaaacctccagttgaaaaccccccaatttataagcctccagtagagaagccaccagtgtacaagcccccagttgagaaacccccagtgtacaagcccccagttgaaaaaccaccagtgtacaagcccccagttgagaaaccaccagtgtacaagcccccagttgaaaaacccccagtttacaagcccccagttgaaaaacccccagtgtacaagcccccaggtgaaaaaccaccagtgtacaagccccc

SEQ ID NO: 7993 - DNA, 456 bp, Glycine max
gggaattcacttaggagaagaagaaatgtccatggagtcctgaatgcactgagctgggggattttgatgcccgttggtgccataatagcaaggtatttgaaggtgttcaaatctgcagaccctgcttggttttaccttcatgttacatgccaaacctctgcctacatagttggtgttgctgggtggggaactggtctcaaactcggaagtgactcggttggtattaagtataacacccatagagcactcgggatcaccctcttctgccttggaacccttcaggtttttgctctgctcttgaggcccaacaaagaccacaaaatcagaatctactggaacatttaccactacgccgttggatactccaccataatcatcagcatcatcaacgtctttaaagggttttgatgcattggagacttcttgtagggatcgctacaatgactgggaacatgc

SEQ ID NO: 7994 - DNA, 463 bp, Glycine max
gcatttttctctcgctctctgccttccatcaccctcgccatttcccttcccaagatagtagaagatggcagacgctgaggatattcaacctcttgtttgtgacaatggaacaggaatggttaaggctggttttgctggagatgatgccccacgtgctgtgtttcccagcattgtaggtcgtcctcgtcacactggtgtgatggttggcatgggccaaaaagatgcatatgttggtgatgaggcacagtctaagaggggtattttgactctcaagtaccccattgaacacggaattgtgagcaattgggatgatatggaaaagatttggcatcataccttctataatgagcttcgtgttgccccagaagagcatccagttctcttaactgaggcccctcttaaccctaaggctaatcgtgagaagatgaccccaatcatgttggagacctttaacaaccctggt

SEQ ID NO: 7995 - DNA, 437 bp, Glycine max
cttgttccttttgaaggttagaagtgctacaatacaaacaatggcagctactcaggaaggtgtgaagcttttgggtattgtgggaagcccatttgtgtgcagggtccagattgcccttaagttgaagggagttgaatacaaatttttggaagaaaatttgggcaacaagagtgatttgcttctcaaatacaaccctgttcacaagaaggttccagtgtttgttcacaatgagcagcccatagcagagtctcttgtgattgttgaatacattgatgagacatggaagaacaaccccatcttaccttctgatccttaccaaagagccttggctcgtttctggtccaaattcattgatgataagattgtgggtgctgtatcgaaatctgttttcacggttgatgagaaagagcgtgagaagaatgttgaagaaacatatg

SEQ ID NO: 7996 - DNA, 422 bp, Glycine max
atttctacacatccctagctctgtcgttccgtcgttgacgatggcgtttggtgtgcgaggccctgacctccgctctctctttcttctctctctcttgtccatcgcttccgccaatgtcttcttcgaagagcgtttcgatgacgggtgggaaaatcgatgggttaaatcagattggaaaaaagatgagaacgtggctggggagtggaaccacacctctggtcaatggaatggagacgctaatgacaaaggtattcaaaccagtgaggattacagattctatgctatttcagctgagtaccctgaattcagcaacaagggtaagacactagtctttcaattttctgttaagcacgaacagaagcttgactgtggtggtggctacatgaagttgctcagtggggatgttgatcataagaaatttg

SEQ ID NO: 7997 - DNA, 417 bp, Glycine max
gattatcctaagtctttgggaatagtgctgcaatggcttcaagtcaggaggaggtgacgcttttgggagctactggaagcccatttgtgtgcagggttcatattgccctcaagttgaagggagttcaatacaaatatgtcgaagaaaatttgaggaacaagagtgaactgcttctcaaatccaacccagttcacaagaaggttccagtgtttattcacaatgagaagcccatagcagagtctcttgtgattgttgaatacattgatgagacatggaagaacaaccccatcttgccttctgatccttaccaaagagccttggctcgtttctggtccaaattcattgatgataaggtttttggtgctgcatggaaatccgttttcacagctgatgagaaagagcgtgagaagaatgttg

SEQ ID NO: 7998 - DNA, 364 bp, Glycine max
ctgatgtacaaagtacagatgcaatgctatgaggatgctaaactgatgaagctgttccctgagattgttagatctctgtatgaccaggatgtgctggctgaagataccattcttcattggttccgaaaaggaacaaactccaagggcaggcaaacctttgtgaaggcgctcgaaccctttgttaattggctggatgaggctgaagaggaggagtaagtctggtggaggttcatggctagggctgaagaaattatcttgtcttgcagcccttgtaccattagctaagatattggctttgaagtctataagttcagttctgcctagtactaattatctatttaatttgagtttgtgtttgacttct

SEQ ID NO: 7999 - DNA, 419 bp, Glycine max
cgaattagggttttccaattcgcagagcaactcaacacaacgaaccaaaccaacaatgtggcagccgcagcctcagtcgcagccgcaacacgggcaagcggcgctggagcaggtgcagtgcttcggtcgcaagaagacggcggtggccgtgacctactgcaagcgcgggcgcggtctcatcaagatcaacggctgccccatcgagctcgtcgagccggagatcctccgctttaaggccttcgagcccatcctcctgttgggaaagagccgcttcgccggcgtcgacatgcgcattcgcgtcaagggcggcggccacaccttccagatctacgccattcgccagagcatcgccaaggcgctcgtcgcgttctaccagaagtacgttgatgaacagagtaagaaggagatcaaggacattc

SEQ ID NO: 8000 - DNA, 467 bp, Glycine max
cttgtactgttctattagttcatactaagttctgaaaatgagttccaaggttttgcttggtctacttatgttcttggccactatacttctgatctcctctgaggttgcacccgatgatgcatacgagaattttgacaaaatagatgggaagcctagtgcagatggggtagatgaaagcaagtattggcgtggcggctatggtggcggctatggtggtggttatggaggtgggcgtggaggctatggaagtgggcgtggaggctatggagggggacgtggtggatatggcggcggacgaggtggctatggtggctggcgtggtggctatggcggcgggcgtggtggcgggcgtggtggctatggtcctaatgaacataacgaggctggcgttgatgctaaccctgacaacttagaatgcaactttctaaaggctatatatggggttaagttattgcattaaataaaac

SEQ ID NO: 8001 - DNA, 397 bp, Glycine max
attagttcattctctttgcgcagatccctacctctcctttcaagatgcagatcttcgtgaagaccctcaccggaaggaccatcacccttgaggtggaaagctctgacaccatcgacaacgtcaaggccaagatccaggacaaggaaggaattcccccggatcagcaacgtctcatcttcgccggaaagcagctcgaggacggccgtaccctcaccgactacaacatccataaggagtcaacccttcaccttgtccttcgtctccgtggtggcatgcagatcttcgtcaagactctcactggcaaaaccataaccctagaggtttaaagctctgacaccattgacaacgtcaaggtcaagatccacgacaaggagggaatcctcccagaccagcaacg

SEQ ID NO: 8002 - DNA, 472 bp, Glycine max
gcagaactctgcttcttcggattccgatcgcacgcgccgtcaccatggtgaacgttccgagaaacaaagaagacatactgcaagagtaaggagtgcaggaagcacacgctgcacaaggttacccaatacaagaagggtaaggatagcattgctgcccaaggaaaacgccgttatgatcgcaaacaatccggttatggtggacaaactaagcccgtctttcacaagaaggctaaaaccaccaagaagattgttctgaggttgcaatgccagggttgcaagcatgtctcccaacacgctattaagaggtgcaagcactttgagattggtggtgacaagaaaggcaagggaacatcactcttctaggttgagaattaggatttagagctctatgtttcagcaatgttgggaatgtttgtatctctctggattttatctgctaagtatattttattattttgcaacaccttgttat

SEQ ID NO: 8003 - DNA, 405 bp, Glycine max
gattattattcttccatttccattaaaaagaaagtatcataaatgggtatttacacatgcgaggacgaaagcacctccccagaggctactgctactctatacaaagctctagttacagatgccgacaacatcatcccaaaggctcttgattccttcaagagtgttgaaaacgttgagggaaatggtggccctggaacaatcaagaagataactttcgttgaggatggagaaactaagattgtactgcacaagatagaagcagttgatgaggcaaacttgcgatatagctacagcgtattgggtagtgctgcgttgccagacacaacggagaagatcacattccactccaaattggctgctggtcccaatggaggctctgctggcaagctcactgtcgaataccaa

SEQ ID NO: 8004 - DNA, 417 bp, Glycine max
tgcttgcaaattatttgaaccaatctatgatcaaacagatggtggtgatggctatgtgtctgttgaagtatctcccaggctcgctgatgacactgagggaaccatagaagctgcaaaatggcttcataaagtggttgatcgccccaatgtgtatattaagattcctgctacagaggcatgtgtgccttcaattaaggaagttattgctaatgggataagtgtgaatgtgacgctgatattctctcttgcaagatatgaagctgtaatagatgcttacttggatggtcttgaggcatctgggttaaatgacctctctagagttacaaggggttgcttcttctttgtcagtagagtggacactctcattgacaaagcccttgagaaaattggcaccccagaggctcttaatctacgtgg

SEQ ID NO: 8005 - DNA, 419 bp, Glycine max
aatcaatcaaattctttgagttgaacacaggggccaagattccttctcttgggttagggactaggcaagctgaacctggtgtagtagctgaagctctcaccacagccattcaggttggatacaggcatattgactgtgctagtgcgtataagaatcaagcagagattgattctgctcttaagaagctttttgatgatggtgtggtgaagcagtgaggacttatggatcacttccaaactctggtgttcagatcatgcaccataagatgcgccaaaagcattggataaaacattacacgaattgcaacttgactatctagacctctatctgatccacaggccagtccgcatgaaaagtggaacatttggactcaataaaaaatatcttgagcaaccagacattaccaatacattgaaagc

SEQ ID NO: 8006 - DNA, 301 bp, Glycine max
caattatattgattccttgtatgagggtattgacttctacacaaccatcacccgtgcccgtttcgaagagcttaacatggacctattcaggaagtgcatggagcccgtggagaagtgtttgcgggatgctaagatggacaagagcaccgtccatgatgttgttcttgtcggtggttctactaggattcccaaggttcaacagttgttgcatgacttcttcaacggaaaagagctttgcaagagcattaacccaaatgaaactgttgcctatggtgcagcagtgcaagctgccattctcaat

SEQ ID NO: 8007 - DNA, 305 bp, Glycine max
atttatacctacctctccctcaagaatccaatcttcgacagaccctcactgctagactatcaaccttgacgtgggaagctatgacaccatcgacaacgtcaaggccatgattcacgacaaggaaggaatccaccctgaccagcaacgtctcatattcaccagaaagcaactcgaggacggtcgtacccttgctgactacaacattcataaagagagtactcttcaccttgtactccgtctccgtagtggcatgcagatcttctttaagacactcaccggcaagaccataaccctagatgttgaaa

SEQ ID NO: 8008 - DNA, 275 bp, Glycine max
ctcgacgtctacaactacaagatcaaacacctactcaaaccctccgattccccctgggccaaccgcatcatcttacacctcctcaacatcaaacacgactctctactacaaggcctcatcaagatggcagatctcactattaatctggctgccatttgcactcccactgattacaacacccttcctctctacaccatttacaacaatttcatctacgcgctccccgtggtgaaatacttttccgaaaacaacaagcgccttatacatttctctac

SEQ ID NO: 8009 - DNA, 414 bp, Glycine max
gtagtgttggtgggttgcaaagatgcttgggggtcttctccataggggtcataagataaaggggacagtggtgttgatgcgcaagaatgtgttggacgtgaatagcgtaaccagcgttgggggaattattggtcaaggtctcgacttagttggctcaacactcgatactcttactgccttcttgggccgatccgtgtctctccagcttattagtgctaccaaagctgatgccaacggaaaagggaaacttggaaaggctacctttttggaaggtatcattacttcattgccaactttgggagcaggccaatctgcattcaaaattaattttgaatgggatgatgggagtggaattcctggagcattttatatcaagaattttatgcaaactgagtttttccttgtgagtttgac

SEQ ID NO: 8010 - DNA, 337 bp, Glycine max
ggggaattggaactggagaaattcatcactcacacagttccattctcagagattaacgaggcttttgattacatgctgaaaggggagtccatcagatgcatcattcgaatgggggagtaaatctatatcagaccaatgatgacatgacatggtccctgttgggggactgagttctctttctggttgtgaaaagaagaaaataaatttcatatatgatatatatccctttaggattattgaatttgtgaaaacttgtgagtttgagtgtagagaatgatagggcctttgctgctgttattgtctaatgcatgataaataaaatgtcggttttttgtcg

SEQ ID NO: 8011 - DNA, 305 bp, Glycine max
ctgggaagctcactgtcaaatacgaaacaaaaggagatgctaagcccaaccaagacgaacgcaaaactggaaaagccaaggctgatgctctcttcaaggccattgaggcttaccttttggcccatcccgattacaactaatcctcttcaacttacttgtcatcactttcttgcttggagacttatccaatcactctgttctcaacttaagttgccttccaatgtatccagtctttcctttcttctttccttttcccatataattgtgagacttatgatatatctgtatctcacttcatcaataat

SEQ ID NO: 8012 - DNA, 174 bp, Glycine max
ccatcaaaaaagatcactttccttgaggatggagaaaccaagtttgtgctgcacaaaatagaaagcattgatgaggcgaacttgggatacagctacagcgtggttgggggtgctgcattgccagacacggcggagaagatcacattcgactccaaattggttgctggtcccaat

SEQ ID NO: 8013 - DNA, 473 bp, Glycine max
  modified_base (57)..(57): a, c, g, t, unknown, or other
  modified_base (102)..(102): a, c, g, t, unknown, or other
aagcccgtttgtgtgcagggtccagattgccctcaaattgaagggaattgaatgcanattggtggaagataatttggcaaacaagagtgatctacttctcanatccaaccccgtttacaagaaggttccagtgtttattcataatgagaagcccatagcagagtctcttgtgattgttgagtacattgatgagacatggaagaacaaccccatcttgccttctgatccttaccaaagatcctttgctcggttttggtccaagttcatagatgacaagattgtgggtgcttcatggaaatctgttttcacggttgatgagaaagagcgtgagaagaatgttgaagaatcgttggaggctctgcagtttcttgagaatgaactacaggacaaaaggttctttggaagagatgaatttggatttgtagatattgctggtgtcttcattgcattttcatcccaatttttcaagaagt

SEQ ID NO: 8014 - DNA, 358 bp, Glycine max
cccacgcgtccgccttaagctccttagtgcttctccttgcagctctaattctatcccctgaggtgcttgcaaacgatgagagtcccccaatgtacaaacctaccactgagaaaccaccagtttataagcccccagttgagaagcctcctgtttacaaacctccaattgaaaaccccccaatttataagcctccagtatagaagccaccagtgtacaagcccccagttgagaaacccccactgtacaagcccccagttgaaaaaccaccaatgtacaagcccccagttgagaaaccaccagtgtacaagcccccagttgaaaaacccccaatttacaagcccccagttgaaaaaccccc

SEQ ID NO: 8015 - DNA, 458 bp, Glycine max
ccggcctgaaacccgggtcggcgacgcgtccgcccacgcgtccgctgatggcaagacccaagtcactgttgagtactacaatgacaagggtgcgatggttccaatccgcgtccacactgtgctcatctccacacagcatgatgagactgtcacaaatgatgagattgcagctgatcttaaagaacacgtgattaagcctgtgattcctgagaagtaccttgatgagaagaccattttccatttgaacccttctggcaggtttgtcattggagggcctcatggctatgctggtctcaccggccgcaagatcatcatctacacctatggaagatggggtgcacattgtggtggtgccttctttgggaaggatcctaccaaggttgataggattggtgcctacattgtaaggcaagctgcaaaaagcattgtttcaaatggacttgcttggaaggcaattt

SEQ ID NO: 8016 - DNA, 416 bp, Glycine max
  modified_base (13)..(13): a, c, g, t, unknown, or other
  modified_base (147)..(147): a, c, g, t, unknown, or other
acgcccacgcgtncgaaacatggctttcttaaagctcccttagtgctgctcccttgcagctctaatgggtgtcctctcaaagtgcttggcaaactatcgagaatccccccagtgtacaaagccttccacttgagaaaaccaccagtnttataaagcccctcagttgagaaagccttcctgtgtacaaacccttcagtttgaaaacccctccaatttataatgcctccagtagagaagccaccagtgtacaagcccccagttgagaaacccccagtgtacaagcccccagttgaaaaaccaccagtgtacaagcccccagttgagaaaccaccagtgtacaagcccccagttgaaaaacctccaggttacaagcccccagttgataaacccccagtgtacaagcccccagttgaaaa

SEQ ID NO: 8017 - DNA, 409 bp, Glycine max
  modified_base (13)..(13): a, c, g, t, unknown, or other
  modified_base (25)..(25): a, c, g, t, unknown, or other
acgcccacgcgtncgcccacgcgtncgggtgttttcacattcgaggatgaaatcaactcccctggggctcctgctactctgtacaaggccctagttacagatgccgacaacgtcatcccaaaggctcttgattccttcaagagtgttgaaaacgttgagggaaatggtggcccaggaaccatcaagaagatcactttccttgaggatggagaaaccaagtttgtgctgcacaaaatagaaagcattgatgaggcgaacttgggatacagctacagcgtggttgggggtgctgcattgccagacacggcggagaagatcacattcgactccaaaatggttgctggtcccaatggagggtctgctgggaagctcactgtcaaatacgaaacaaaaggagatgctgagccca

SEQ ID NO: 8018 - DNA, 442 bp, Glycine max
ggagagcagggaatcattgaggttgctcgtcacccagatgcagtcagtgtagtcacaggagtggtaggctgtgcaggactgaagccaacagttgctgcgatagaagcagggaaatacatagctttagccaacaaagagacattgattgctggaggtccttttgttcttcctcttgctcagaagcataatgtaaaaatacttccagctgattcagaacattctgccatctttcagtgtatccaggggttgccagagggtgcacttaggagagttattttaactgcatctggaggtgctttcagggattggccagttgataaactgaaagatgttaaagttgctgatgcattaaaacatcctaactggaatatggggaaaaagataactgtggactctgctacccttttaataagggtctagaagtaattgaagcacattactt

SEQ ID NO: 8019 - DNA, 437 bp, Glycine max
cgcacactgtcacaggtgtagcggcgaaactgaggtcgtagaaagaatggcgaaaacgacgtcgttgttgctctttacactgctcctcttcggaaccttagctctcatccaggcgaagaaatcgaaggaggatttgaaggaagtgacccacaaggtttactttgatgttgagattaatggaaaagaagcaggtcgtattgtgatgggtctttttggaaaggctgttccaaaaactgcagaaaactttcgagctctttgcactggggaaaagggaactggtaaaagtggcaagcctctccattacaaaggtagctcattccatagaattattcctagctttatgctccaaggaggtgattttacacatggcaatggtatgggtggagaatcaatttatggagagaagtttgctgatgagaacttcaagttaaagcata

SEQ ID NO: 8020 - DNA, 439 bp, Glycine max
catcagcgcacgggtggtgtttttgaacgtgaggcctcaaccaaggcctggaaaaggtgtgacaaacacttgtgaagtctgcgagcgtagccttcttgactctttccgcttctggtctcttggttgcaagattgttggaacatctaagaacttccagaagaggaagaagcagtcaatggcaatgtcatcagattctgaggactcgtacagtagcatacagcgtacatggtcttaagaaaaactgcaaagttcagagcttcacaacatccactccactctcaacttccgttgattacaaaacggcctatagaagaaagggaatacctcaccgtgccccaatggtgggactaatcatagaatattagtgatagtgggtatttataggctatttgctataatgctcttacggagtctcaaaatactactatactaatgcgag

SEQ ID NO: 8021 - DNA, 435 bp, Glycine max
gagaaacaagcccttggagaagtgagtcctgagcttctggagacccaagtgaatcctgctgtgtgggaaattagtgggcacatggtgctgaagaggaagaaggactatgaggaggcatctgaagccaatgcttggaggcttcttgctgaggtttccctctctgaagagaggcttctagaagtcactgctcttgtttttcaagccattacatcatcggttgagatgaatgtcaagcctcaacgtcttgaggaagttgatgccgttagcccaaacgcacagcatgccatggtggctggttcacatgaatgccttgttctccagtaacaaggctatgaacaaattcgtagtgattatgaactaaatattgcttgccatgttacgtttcagttctaataagtgtagtaccttatattatggtccagttactggagtctg

SEQ ID NO: 8022 - DNA, 429 bp, Glycine max
tcgtctttgcgcagttccctacctctcctttcaagatgcagatcttcgtcaagaccctcaccggaaagaccatcacccttgaggtggaaagctctgacaccatcgacaacgtcaaggccaagatccaggacaaggaaggaattcccccggatcagcaacgtctcatattctccggaaagcagctcgaggacggccgtaccctcgccgactacaacatccagaaagagtcaacccttcaccttgtccttcgtctccgtggcggcatgcatatcttcgtcaagactctcactggcaaaaccataaccctagaggtcgaaagctctgacaccattgacaacgtcaaggccaagatccaggacaaggagggaatccccccagaccagcaacgtctcatcttcgccggaaagcaacttgaggacgggcgcaccc

SEQ ID NO: 8023 - DNA, 226 bp, Glycine max
ggtttctgtagcctccaaccataaagagaggtttatggctcccaaacatactattacacgtttgtgtgttttatagaacaagggtcacattgtcaccaataaggagattccttcactcccttcagatcgcaaggggaaaacacgcactcgagtgcactctgtgaggaacctcattcgagaggttgcctgctttgcaccttattaaaaacgaataactgagttgctc

SEQ ID NO: 8024 - DNA, 439 bp, Glycine max
  modified_base (416)..(416): a, c, g, t, unknown, or other
gatacaattgtttatgcttacagatcaggtgaggtgattcggctaccaaaaggggtttcaattccagtgacactaaaagttctggagtttgagcttttccacttctgtccaatccaagaaatagctccaagtatatcatttgcagcaatagggctactggatatgttcaacactggaggagcagtggagcaggttgagattcataaccgagcagcaacgaaaacaatagctcttagtgtaaggggaagaggcagatttggagtttactcctcccagagaccactgaagtgtgtggtaggtggcgctgaaaccgacttcaactatgactcagagaccgggttgacaaccttctccattccagtttctccagaggagatgtacagatggtcaatagagatccaagtttgagtcctttntaagacttggggtttgatgcatt

SEQ ID NO: 8025 - DNA, 434 bp, Glycine max
  modified_base (401)..(401): a, c, g, t, unknown, or other
gcctctttttggaattttccagataccctcatttatggacataatcactgacctcgccgtgttcattactccgctatggattgcggttatcgtcggcgtcgtcgtgggctgggcgtggaagcccaaatgggcctttcaccccaaagacgctcttctcaagtttcgctctcctcgccctaccaatccccaaaacgacaccgcttttacctactgcgccaccagatcctccgcgcgtgagaaagacgcgagtgggagtcctgtggtgacggaagacgatttgctgcatctgtggaagttggttgaggaaaaagacggagggcgggcatggattcagatgatggaccgttctaccccgaccatgacctatcaagcgtggcgtaaggatcctgagagtggaccgncgcagtaccggagcagaacggtgttcgaagacg

SEQ ID NO: 8026 - DNA, 423 bp, Glycine max
aagaggttcaagtttcccgagaacagtgttgaactttatgctgaaaaggccaacaatagggtgctttgcactatagcacaggctgagtctatccgctacaagctccttggtggcctagctgagcgcaaggcttgctatggtgtcttgagagtttgttatggagagtggcgctaagggatgcgaggtcattgagagtggaaaattgatagcccatacagccaaatctatgaagttcaaggatggttacatgatttcttctgggcaacctgtcaaagattacattgactctgcagtgagacatgtgctccagagacagggtgttcttggcattaacgtgaaaatcatgcttgattggcatcctaaagggatacaaggtcctaaaactacccttccagatcttgtcacaatccattcttcaaaaga

SEQ ID NO: 8027 - DNA, 281 bp, Glycine max
acgcacgcctcaacatccggtctgtgctccattcattatgtctccgtcgttggatcttccccccaagggtggcttcagatttgatctatgccgaagaaacgcaatgctacaaaacaagggcctcaaagccccaacctttctcaaaactggcaccactattgtcagtttagttatccaggatggtgtcattcttggggctgatactaggtcaactgatagacctatagaggcagataaaaactgtgagaaaattcattatatggcacccaacaatatattgc

SEQ ID NO: 8028 - DNA, 284 bp, Glycine max
  modified_base (19)..(19): a, c, g, t, unknown, or other
acccacgcgcccccttcgncctttaaatagagaaacaaatttcagcactgggtggctttaccgacgtcaggggagcacagaacagcatcgatatcgaaaatctcgctcgctttgctgttgatgaacacaacaaaaaagagaatgcagttctggagttagtgagggtgattagtgcaaagaaacaagtggtttctggcaccttgtactatatcactatggaggcaaatgatggtgtgactaaaaaggtttatgaaactaatgtgttggagaaaccatggttgaac

SEQ ID NO: 8029 - DNA, 452 bp, Glycine max
gcgtccgccctttcgtccgaatattttccattctctttgtgtatttccctacctctcccttcaaggtgagtcgatttcttctgtttttcttcttcgttctttccatgaattgtgtatgttctttgatcaatacgatgttgatttgattgtgttttgtttggtttcatcgatcttcaattttcataatcagattcagcttttattatctttacaacaacgtccttaatttgatgattctttaatcgtagatttgctctaattagagctttttcatgtcaaatccctttacaacaagccttaaatgttgattcattaatcgtaaattagggcttttttcattgattacttcaaatccgttaaacgttaccatagatcaaggctttttcatgaattacttcagattcgttaaacaacagccttattttttatacttctgtggtttttcaagaaat

SEQ ID NO: 8030 - DNA, 441 bp, Glycine max
cgtccgaccagcgtccggcttttcttccttcaaattgaggtctctaagtttcactttctgggcagagggcaacctcctttctctgagactctgagtatcgtatcgatttattattatttctaattctctcttatcaggtccattgaatatgtctccgtcgatggatcttcctcccaagggtggcttcagttatgatctatgccgaagaaacgcaatgcttcaaaacaagggcctcaaagccccaacctttctcaaaactggcaccactattgtcggattagttatccaggatggtgtcattcttggtgctgatactagggcaactgaaggacctatagtggctgataaaaactgggagaaaattcattatatggcacccaacatatattgctgaggaacaagcacaacatctgatacagatgctgtaacaaacaaggttaa

SEQ ID NO: 8031 - DNA, 251 bp, Glycine max
acccacgcgtccgcccttgcgtcctcaaatttatcgtttatctttgcttgcatcgcgtccgcaagctggcctgcgactgcaccggcctacaaggcttcctcgtcttcaacgccttcagcagtggcaccagttccggtctcggatctctcttactcgagcgtatcttcgtcgattactgcaaaaaatccaaattagggttcaccatttaccttttctcacaagtttcaaccgcaatcttagaaccctacaac

SEQ ID NO: 8032 - DNA, 302 bp, Glycine max
acattaacattagcttttctgtttgggattttggtggccaggacaagattcgggccttgtggaagcactacttgcagaacacccagggtcttatttttgttgtagacagcaatgatagggacagagttgttgatgccagagatgagttgcataggatgttgaatgaggatgaactgatagatgcagtattgcttgtgtttgccaacaaacaagatcttcctaatgcaatgaatgctgctgagattaccgacaagttgggtctacactctttcaaacagtgccactggttcatttaaagcatc

SEQ ID NO: 8033 - DNA, 432 bp, Glycine max
ccacgcgtccgaatcattcataatgggtgttttcacattcgttgatgaaatcaactcccctgtggctcctgctactctttacaaggccctagttacagatgccgacaacgtcatcccaaaggctcttgattccttcaagagtgttgaaaacgttgagggaaatggtggcccaggaaccatcaagaagatcactttccttgaggatggagaaaccaagtttgtgctgcacaaaatagaaagcattgatgaagcgaacttgggatacagctacagcgtggttgggggtgctgcattgccagacacggcggagaagatcacattcgactccaaattggttgctggtcccaatggaaggtctgctgggaagctcactgtcaaatacgaaacaaaaagagatgctgaacccaaccaagacgaactcaaaactgggaa

SEQ ID NO: 8034 - DNA, 217 bp, Glycine max
aggacctgttggacccggttgaggaccttaaaaacgaggcctacaagtggatcctacaccactgcaagcgatacaaagaagccgaggggataatcgggaacagcttctaggagctcgaaccgtgagcctgtaacgagctgcataaggaagaacaaggtatgcctccggattacgcggtgggaccgcttgtaagaatggaagctagtcatgcctactt

SEQ ID NO: 8035 - DNA, 287 bp, Glycine max
  modified_base (16)..(16): a, c, g, t, unknown, or other
acccacgcgaccgcgntgccagaataaagattgaactttaaggtcacttgccatagagtagagttagcgccaggctcacgtagatcaatctggtgcctttagtcaagtttacctgcctgcagatgaacgtgttgaaagttctattaggctgctagcaaaggcttatgtagtagtgaatgactcgagctatcatcaactagtcagccattggttaaacactcatgcaaatgatgagccattcatcatagcaacaaacatgcatctaatagttgttcaccctaatttat

SEQ ID NO: 8036 - DNA, 303 bp, Glycine max
  modified_base (282)..(282): a, c, g, t, unknown, or other
gacaaaataaaataatctgtggccaagttaccatctactgtactacttgttctatataaattctacccatcccttgctctcatgtcacattgtatttgcactacgaccatttcaggaagaaagaagtgcaatggacatcggaacctatggctatcctacaccagcagtgaaaaagattgagtcttactatgatgtgccagagggagtggatattcggggaagatatgatgcagagtttgcaaaaatcctcacataagatgctttgaaattcgttgctgactngcaacgtgagttcatgaacca

SEQ ID NO: 8037 - DNA, 365 bp, Glycine max
tttgctgttagggttttagctcagcttcttctagatttaaggaggatgggtaaggaaaaggttcacatcagtattgtggtcattggccatgtcgactctgggaaatccactaccactggtcacctgatttacaagcttggaggcattgacaagcgtgttattgagaggtttgagaaggaagctgctgagatgaacaagaggtctttcaagtatgcctgggtgctggacaaacttaaggctgagcgtgaaagaggaatcaccattgatattgctttgtggaagtttgaaacaacaaagtattattgcacagttattgatgcgcctggacataaggatttcattaagaatatgattactgggacatc

SEQ ID NO: 8038 - DNA, 451 bp, Glycine max
  modified_base (21)..(21): a, c, g, t, unknown, or other
  modified_base (27)..(28): a, c, g, t, unknown, or other
acccacgcgttcgcactttgnggtttnncttgactctttggtttttggacagtgggaagatcgcatgcggagggggcttttccgctatgacgttacagcctgtgaaaccaaggtgattcctggggagtatggtttcattgctcagctgaatgagggtcgccacctcaagaagagaccaactgagtttcgtgttgataaggtcctccagccctttgatgaaaacaagtttaacttcactaaagttgggcaagaagaggacctgtttcagcttgaggctagcaatgatggggaggctcaattctttccaaatgcacctattgatgttgagaattcttctagttttgttgccatcaatgtgagtcctattgaatatggtcatgtcctgatgaatccactgatttttaagtgtttaccttaaaggaatgaccatgcaagcctcttgcttgcactt

SEQ ID NO: 8039 - DNA, 316 bp, Glycine max
ctacggcgtagacactgataggcagcgttctaatggtagctacgatggtgacactaataaacatcatggaactactggtggctataatgatgacaccaatagacatcatggaactaccggtgtctattttatatacaccgataggcaacaacatgggactactggtggctattccggtgacactggtaggcaacatgggaacattggtggcccttactatggaaccaacaccgcaaacaccggtactggtcccagaagtggaaccactggctggaccggttatggaagcaactgtggcactgattattgaacaact

SEQ ID NO: 8040 - DNA, 443 bp, Glycine max
tgagaaacaatgaaaggaaataattggtctttgaaaatgcagggaggaaagaaagctgtgtagtccatcaaggggacagctgcaaacattggtgcttctgccaaggctggcatggagaaaaccaaggccactgtccaggagaaggcagaaagaatgacggcacgtgatccgatgcaaaaggagttggcaacccagaagaaagaggcaaagatgagccaggcagagctggacaagcaggcggcgcgtcagcataacacggcggcgaagcaggctgccacggcagggcacatgggacaacccatggggacccatcagacgtcagctatgcccggtcatggaaccggacagcccacgggccatgtcaccgagggagtggtgggctcacaccctattggaaccaacagaggcccgggtgggactgctacggcccataatacccgtgc

SEQ ID NO: 8041 - DNA, 411 bp, Glycine max
  modified_base (37)..(37): a, c, g, t, unknown, or other
  modified_base (385)..(385): a, c, g, t, unknown, or other
cccacgcgtccgcccacgcgtccgcccactcgtccgnccacgcgtccgctcaagtttctgagtctccggaactcggggctaccttcacttcgcacatctcgaaccctttctttccggcaactaggttaaagttcatcaatggcaggccgtggcaaacccttagaatccaccgccgccaaaaaggccacctaaaggaccaccaaacccggcctccaattccccgtcggccgaatcgcccgtttcttcaaggccggaaaataccccaaccccttcgaccccgttcttcccgttaacttcgccgttgtcctcgaatatctcgcagccgaggttttggagttggctggaaacgctgcgagagacaataagaagactcgaattgtgccgngccacattcaattggcggtgaggaac

SEQ ID NO: 8042 - DNA, 441 bp, Glycine max
ttcttcttcgtcgttatcttcttcttttgttgtttgtgtgtttgttttttctctgacctgaaaatgtcttgctgcggtggtaactgtggttgcggaagcgcctgcaagtgcggcaacggctgcggaggctgcaagatgtacccagacttgagctacaccgagtcaaccaccaccgagaccttggtcatgggagtggcaccagttaaggctcaattcgagagtgctgaaatgggtgttcccgctgagaacgatggctgcaaatgtggagctaactgcacctgcaacccctgcacttgcaagtgaggtgttggagagctaaagcttcaagcagagatggcccttagaaataatgataaaaactatatgtagtttcaaaacttcaaaattatgtagtatgtattaatgtgcactctggtgttttgtgtctaaacaaacaccctt

SEQ ID NO: 8043 - DNA, 461 bp, Glycine max
cggacgcgtgggcggatctctcttgttagagcgtctctccgtcgattacggcaaaaagtgcagattagggttcaccatttacccttcccctcaggtttcaaccgcagtcgtggagccctacaacagcgtcctctccacccactcccttctggaacacaccgacgtggctgttctcttggacaacgaagccatctacgacatctgtaggagatctctcgacatcgagaggcccacctacaccaacctcaacaggctcatttcccagatcatttcgtcgctaaccacttccttgaggtttgatggcgctatcaatgtggatatcactgagtttcagaccaaccttgtgccataccccaggatccacttcatgctttcttcttatgctccggttatctctgccgccaaggcctaccacgagcagttgtcggtgccagagatcacgaatgccgtgtttgagcccg

SEQ ID NO: 8044 - DNA, 392 bp, Glycine max
ctaattctcatttcttcatcgttcgattcttctcctcctaaagatgcagatcttcgtgagaactttgaccggtaagaccatcacccttgaggtggagtcctccgacaccatcgataacgtgaaagctaagattcaagacaaggaagggatcccacctgaccagcagagacttatctttgcgggtaaacagcttgaggatggtcgaacccttgccgactacaacatccaaaaggaatccactctccacctcgtgcttcgcctcaggggtggcatgcaaatctttgtcaagactttgactggcaagaccatcaccctcgaggtcgaatcctcggacaccattgataatgtcaaggccaagatccaggacaaggagggtatccctccagatcagc

SEQ ID NO: 8045 - DNA, 392 bp, Glycine max
ttgttgttgtaactcgttcttcttcttttgttgttctgtgtttgtgtttgtgttttctgtcacctgaaaatgtcttgctgcggtggtaactgtggttgcggaagctcctgcaagtgcggcaacggctgcggaggctgcaagatgtacccagacttgagctacactgagtcaaccaccaccgagaccttggtcatgggagtggcacctgttaaggctcaatttgatggtgctgaaatgggtgtgcccgctgagaacgatggctgcaaatgtggaccaaactgctcctgcaacccctgcacttgcaagtgaggtgttgggagagcaagcttcaagcagagatagcccttgattaggaataatgataaactattaatgggtagctgaaaacttat

SEQ ID NO: 8046 - DNA, 385 bp, Glycine max
gcttcagctgccattatgactgttaattctggcattagaaaaattcttccaggttctgagatttgtgactttgactttgagccatgtggttattcaatgaactctgttgaaggtgctgctgtttctaccattcatgttaccccagaagatggtttcagttatgcaagctttgagactgttgggtatgacttcaaagtggtgaatctgaacgaaatggttaagagggtattggcatgttttctcccaactgagttctctgttgcagttcatgtggatggtgcaagcaagttgtttgatcagacgtgttttctggatgttaagggatactgtcgcgaagagaggagccacgaagggcttggaatggttggttctcttggctaccaaa

SEQ ID NO: 8047 - DNA, 451 bp, Glycine max
  modified_base (416)..(416): a, c, g, t, unknown, or other
ggcgccactcgatgtttccatttgcctgcatgcctttggtattgtggggtgtggttcgtttagtggtgtcaagtcttgcgaacgtgagggtgcatgagtggtaatcgggatgtttttgttgcacggctccatgcttgcgcatgcaacgtgtgacatgcatccttttcattgtcaccttagccttcgtggcttaggtgctgacgattggttcctgtgttgcctacctaccaaacggtattcgtgtggctagtcagacccattccatccaggcctctttgttggggacgctggaggatttcaaagtcccacacgtgaaccacgttagtcgtccatcataacggcttcctgtggcacacgtgtggtgattgttctctcggatgcggtgcatgcagtgaacgtgggtggtctagtgcccncacattgttccttaaaatcggttgtctcggatgac

SEQ ID NO: 8048 - DNA, 452 bp, Glycine max
cccacgcgtccgcccacgcgtccgcccacgcgtccgctcttagtcccaattttctagggttttattcattttccgatggcttctgcagatgttgagtaccgttgctttgtcggtgggctcgcttgggccactgacgaccatgccctcgagagagccttctctcagtacggcgaaatcgttgaaacgaaggtctgtttgttgcaggcatcacatctgatctcacacgattcggattcggaattttctcgatcccgttctgatctgtgatctctgatctgtttgcgttacttgatcttatgatacttgtgttactatatgattcttttattactcacgccaataggtacgttcatcttcttcctttcaccaaaggcgaagatcgatcggcttctattcggttctggttttgttttttcgtgctgttttgctttagatctgataatggttttact

SEQ ID NO: 8049 - DNA, 412 bp, Glycine max
cccacgcgtccgcttctcaaactagtagtattattcttccattcataatgggggttttgacattcgaggatgaaatcaactcccctgtggctcctgctactctttacaaggccctagttacagatgccgacaacgtcatcccaaaggctcttgattccttcaagagtgttgaaaacgttgagggaaatggtggcccaggaaccatcaagaagatcactttccttgatgatggagaaaccaagtttgtgctgcacaaaatagaaagcattgatgaggcgaacttgggatacagctacagcgtggttgggggtgctgcattgccagacacggcggagaagatcacattcgactccaaattggttgctggtcccaatggaaggtctgctgggaagctcacttgtcaatacgaaac

SEQ ID NO: 8050 - DNA, 457 bp, Glycine max
gtgcttatccttattgagagaaaaaatggccaaatcaatcaaattctttgagtggaacacaggggccaagattccttctcttgggttagggacttggcaagctgaacctggtgttgtagctgaagctctcaccacagccattcaggttggatacaggcatattgactgtgctagtgcgtataagaatcaagcagagattggttctgctcttaagaagctttttgatgatggtgtggtgaagcgtgaggacttatggatcacttccaaactctggtgttcagatcatgcaccagaagatgtgccaaaagcattggataaaacattacaggaattgcaacttgactatcttgacctctatctgatccactggccagtccgcatgaaaagtggaacatttggactcaataaagaatatcttgagcaaccagacattcccaatacatggagagcaatggaa

SEQ ID NO: 8051 - DNA, 463 bp, Glycine max
cccacgcgtccggttccttttgaaggttagaagtgctacaatacaaacaatggcagctactcaggaagatgtgaagcttttgggtattgtgggaagcccatttgtgtgcagggtccagattgcccttaagttgaagggagttgaatacaaatttttggaagaaaatttgggcaacaagagtgatttgcttctcaaatacaaccctgttcacaagaaggttccagtgtttgttcacaatgagcagcccatagcagagtctcttgtgattgttgaatacattgatgagacatggaagaacaaccccatcttaccttctgatccttaccaaagagccttggctcgtttctggtccaaattcattgatgataagattgtgggtgctgtatcgaaatctgttttcacggttgatgagaaagagcgtgagaagaatgttgaagatacatatgaggctcttcagtttctt

SEQ ID NO: 8052 - DNA, 229 bp, Glycine max
cagatcagcagaggctgattttcgctggtaaacaacttgaggatggaagaacccttgctgattacaacattcagaaggaatccacccttcacttggtgcttcgtttgagaggtggcatgcagattttcgtcaagactttgacaggaaagaccatcaccttggaggtggaaagttctgatacaattgataatgtgaaagccaagattcaggataaggagggtattcccca

SEQ ID NO: 8053 - DNA, 434 bp, Glycine max
gctagtgatcaatcatcaacacagagctgagtgtgttgctctgtgaatccaccttgttcgtccattggaggaccattgcctcctggaatagaaatactaccacacttttcttttttcacttctctaagttgctaagttaattgctccttcattttttcactcttcgttctcgcgtacccgtgtcacggtaactcgtggtgaagtgttcgaaaatgactgtcacacctaagatctcagttaacgatgggaaacttgttgtccatggtaagaccattctgactggagtgccagacaacgttgtgctgactccaggttctggaaggggtcttgtgactggtgcttttgttggtgccacagcttcacacagcaaaagtctccatgtgtttccaatgggtgttttagaggggctccggttcatgtgttgtttccggttc

SEQ ID NO: 8054 - DNA, 431 bp, Glycine max
gtcagcaactgggacgatatggagaagatttggcatcacacattttacaatgagctacgtgttgcccctgaagaacaccccgtacttcttaccgaggcaccactcaatcccaaggccaacagagagaagatgacccaaattatgtttgagactttcaatgtgcctgccatgtatgttgcaattcaggctgtcttgtctctgtatgccagtggacgtactacaggtattgtgcttgattctggtgatggtgtgagccacacggtgcccatatatgaagggtatgctcttcctcatgcaattcttcggttggaccttgctggccgtgatttaacagagtacttggtgaaaatccttaccgagagaggatactccttcagcacctctgccgaaaaggaaattgtccgtgatgtgaaggagaaattggcatacgt

SEQ ID NO: 8055 - DNA, 435 bp, Glycine max
cccacgcgtccgctggagtgtgggatgtatcttggttgagttatgcacgggcggagcttggtttgagactcacgaaaattgggagcatcttgccatgatggaaagggtacttggtccattaccacagcccatgttgaagagagtcgaccgacatgctgagaagtatgttagaaggggtagattggactggcctgacggtgcaacctcaagggagagtatcaaagctgtaatgaagcttcctaggcttcagaaccttgtaatgcagcatgtagatcattcagctggcgatctcatacatctcttgcaggggttacttagatatgacccctctgaaagacttacagccaaggaagctcttagacattccttctttatgagagatcaatttagaagataattcactttctaagctgctgcatcatcgttgaccttcct

SEQ ID NO: 8056 - DNA, 435 bp, Glycine max
ctgcctcgatcatggagaggaaaacatttgggtttttgttcttgctcctccttgtcttaggttctgatgtgacggtgaagagagcagaggcgaaagattgcttgacaaggaggcacgggttccagggtagatgcttattcgacaggcaatgtgcacatgtgtgcaggagcgatggtttcatcggtggtcagtgccgaggccctcttcgcaaatgcttttgcagcaggccatgttgatcgaaattactactgccaaagaggccatgaaataaacaaacaaacaaataaataaatagctctaaccgacacatatgtacgtagtgtcggggttctagctagctaggtaggtacgtgtgtcttttgtatggccactatacttttgatctcctctgaagttgcacccgatgatgcataccagaattttgacaaaacagat

SEQ ID NO: 8057 - DNA, 259 bp, Glycine max
cccacgcgtccgcttcattggaagggtagttataatagatgtggagatctttcttcgctctggtcatataaaggaataatacttttctattaatttccttatctttgtatctctctgttcctttttgctaaactcaaataaataaaactatataaatgtgtaatttgtttcatcaaaaaaaaaaaaaaaaaaaaaaaaaaaaaaaaaaaaaaaaaaaaaaaaaaaaaaaaaaaaaaaaaaaaaaaaataaaaaataaat

SEQ ID NO: 8058 - DNA, 436 bp, Glycine max
  modified_base (420)..(420): a, c, g, t, unknown, or other
acgctgtgctattagttcatactaagttctgaaaatgagttccaaggttttgcttgttctacgtatgttcttggccactagacgtctgatctcctctgaggttgcacccgatgatgcatacgagaattttgacaaaatagatgggaagcctagtgcagatggggtagatgaaagcaagtattggcgtggcggctatggtggcggctatggtggtggttatggaggtgggcgtggaggctatggaggtgggcgtggaggctatggagggggacgtggtggatatggcggcggacgaggtggctatggtggcgggcgtagtggctatggcggcaggcgtggtggccggcgtggtggctatggtcctaatgaacataacgaggcttgggttgatgctaaccctcacaactaagaatgcaactntctaaagcttatatat

SEQ ID NO: 8059 - DNA, 441 bp, Glycine max
cccacgcgtccgcccacgcgtccgagaaaacctaagcttagaattagaaacaaagaaaagaggagaggaaagaattgatcgttgaaaatgcagggaggaaagaaagcgggagagtccattaaggaaacagctacaaacattggtgcttctgccaaggctggcatggagaagaccaaggccactgtccaagagaaggcagaaagaatgacagcacgtgatccggtgcaaaaggagttggcaacccaaaagaaagaggcaaagatgaaccaggcggagctggacaagcaggcggcgcgtcagcataacacggcggccaaacagtccgccaccacggctgggcacatgggacatggccaccacaccaccggaaccgggactggaaccgccacgtattccaccaccggggaatatggtcagcccatgggggcccaccagacgtcg

SEQ ID NO: 8060 - DNA, 367 bp, Glycine max
cccacgcgtccgattgtgagcaaagaaagatagtgagtgaagtaactgaagagaagggaggatgccgtgcctcaacctgagcaccaacgtgtccctcgaaggcgtcgacacctcttccatcctcgccgaagccacctcctccgtcgccagcataatcggcaaacccgaagcctatgtgatgattgtactgaaaggatcagtacccatagcttttggtgggaatgagcagccagcagcttatggagaattggtttccattggtggtcttaaccctagtgtaaacaaggaacttagtgctgcaattgcttcaattctggaaaccaaattgtcagtgccgaaatcgcggttcttcttgaaattctatgac

SEQ ID NO: 8061 - DNA, 286 bp, Glycine max
ctttcttctattttctgccgaggaaaataaagaaagaaaagaaaaaacagcgccctagattggctcttctttgcttcggaagaaagagaaaaacatataacaatggcgttcgcttcttacctcggcatagttctattcgcttccgtcttcatactctctgctaaccaagaatttaacgaatttggagttgatggtggacctgcagcaaagcactcagacctaattttgatgcctgtacacaatgagtgcattcttaagttggctgtcaacttcttgagattgagct

SEQ ID NO: 8062 - DNA, 377 bp, Glycine max
cccacgcgtccgttcgtttcttttcgtgaatcaaacgaaaacacaagattacgttctgggatgtcgggcatggagaggcttcacaggatgttcgcgggtgcaggtggagcgctgggccatcccccaccggattcccccaccctcgattcctccgagcaggtctacatctcctccctcgcccttctcaaaatgctcaaacacggaagagctgtggtacccatggaagtgatgggtctgatgttgggagagttcgcggatgagtacaccgttcgcgttgtggatgtgttcgcgatgcctcagagtgggaccggtgtcagcgttgaagctgttgatcatgtttttcagactaatatgctcgatatgatgtagcaaactgg

SEQ ID NO: 8063 - DNA, 147 bp, Glycine max
cccacgcgtccggtgagaagagcagtctcaaacagcaacagaacaaggtccttcacggattggtcattcttgtctgcatcagcacgcttcctgagctcctccatgattgggttctcacggttgatctccaaggtctttttgcttgac

SEQ ID NO: 8064 - DNA, 371 bp, Glycine max
gaaattgtggccgttcaaggtgattcctggccctgctgagaaacctatgattgtggggaactacaagggggaggagaaacagttttccgcggaagagatatcctccatggttcttatgaagatgaaggagattgcggaggcgtatctaggttccaccataaagaatgcggttgtcactgtgcctgcttacttcaacgactcacaacgtcaagccaccaaggacgctggtgtcatttctgggctcaacgtgatgcgaattatcaacgagcctacccgggctgccattgcttatgggctcgacaaaaagccactagctctgggaagaagatgttctcatttttgatctcggggtgggaactttgatgtctctc

SEQ ID NO: 8065 - DNA, 408 bp, Glycine max
gaattttgacaaaatagatgggaagcctagtgcagatggggtagatgaaagcaagtatgggcgtggcggctatggtggcggctatggtggtggttatggaggtgggcgtggaggctatggaggtgggcgtggaggctatggagggggacgtggtggatatggcggcggacgaggtggctatggtggcgggcgtggtggctatggcggcgggcgtggtggcggtcgtggtggctatggtcctaatgaacataacgaggctggggttgatgctaaccctcacaactaagaaggcaactttctaaagcttatatatgggtttaagttatcgcaataaataaaacttcatgagaaggttagttgtaatagaagtggaaaactttgtaaaggaataatacctttcatgaattt

SEQ ID NO: 8066 - DNA, 427 bp, Glycine max
tctcaatcgttttctacataatacaaacctctctaatttttgaagcttattataccgaatctcgatatgcagatcttcgtgaaaaccctaactggcaagacgatcaccttggaggtggagtcctctgacaccatcgacaacgtgaaggccaaaatccaagacaaggagggcattcctccggatcaacagcgtttaatcttcgccggaaaacagctcgaagacggcagaaccctcgccgactacaacatccaaaaggagtccacgctccacctcgtcctccgcctccgcggcggcatgcaaatcttcgtcaaaacccttactggcaaaacaatcacgctagaggtggagtcctccgacacaatcgataacgtgaaagccaagattcaagataaggaagggattcctccggatcaacaacgtttgatct

SEQ ID NO: 8067 - DNA, 428 bp, Glycine max
ctcgcccttctcaaaatgctcaaacacggaagagctggggtacccatggaagtgatgggtctgatgttgggggagttcgtggatgagtacaccgttcgcgttgtggatgtgtttgcgatgcctcagagtgggaccggtgttagcgttgaagctgttgatcatgtttttcagactaatatgcttgatatgttgaagcaaactggaaggccggagatggttgtggggtggtatcactcgcatcctggatttgggtgttggctttctggagtggacattaatacgcaacagagttttgaggctttaaatcaacgggcagtggctgtggtggtggaccccattcagagtgtgaaaggcaaagtggtaattgatgctttccggctgattaatccacaaactatgatgctaggtcaggaaccacgacagacaac

SEQ ID NO: 8068 - DNA, 434 bp, Glycine max
atttcttgcagttgaagccttattatacagatgcctgcaatcgacttccaccatctgctcaggagtacccaattctgggtcttaacctgttgagattacttgtgcagaataggattgctgaattccatactgagttggaattgctttcatctgctgctcttgagaatccttgcattaagcatgctgtggagttggaacaatcttttatggaaggggcttacaatcgtgtctagagtgcacgacagacagtgccacatgatacatacgtttattttatggatcttttggcacagactgtcagagatgaaatatctggttgcagcgagaaggcctatgactatgtttcaattaaggatgctaagcaaatgttgctgatctcctctgaccaggaactacttgaatgtattaaagaggagcatgctgagtgggagatt

SEQ ID NO: 8069 - DNA, 437 bp, Glycine max
tcgcccacgccgtccgggggagatgtagtttgaagaacctggaggatgatgagggacgaagtagggagatgaggacgaagatgaggacgaagaggatgacgaggacgaagacgatgaagaggaggatgacactaagactaaaaagaagaagagtggtaaggcacaggctggtgatggtgatggtgagcgacctccagagtgcaagcagcagtaattgtttgtttcttcggagtatcatgtggctgatgggtgtttttgaggtcctatggtgcctgacgggaaagtgggtttcaatttcatgcaatttttcatagtccttgattcattttcctccctagatccgatagtctgaatttattgagtcaatttctcctttttcccatattttgggagaatgtggttatatatttgtagtcagggatgctgtgatttgttac

SEQ ID NO: 8070 - DNA, 337 bp, Glycine max
cccacgcgtccggagaaacatggcttccttaagctccttagtgctgctccttgcggcgctaattctatcccctcaagttcttgcaaactatgagaatcccccaatgtacaagcctcccactgagaaaccaccagtttataagcccccagttgagaagcctcctgtatacaaacctacagttgaaaaccccccaatttataagcctccagtagagaagccaccagtgtacaagccctcacttgagaaaccctcagtttataagcccccagtttagaaaccaccagtgtacaagccctcagttgaaaaaccaccaatgtacaagcccccaatttaaaaa

SEQ ID NO: 8071 - DNA, 425 bp, Glycine max
gagcgagcagtttcagacacagagagaggggtttgggattggagggattgacgctgcgtctcttcctcttctctttcgatccatccctcattcctaatcctccaatccaaccacctcagcctcacactcacatatacacatatctgaacgcgtatcgtccctcctatggcttcaaagcgcatcctcaaggagctcaaggacttgcagaaagacccaccaacttcttgcagcgctggtccagtagctgaggacatgttccattggcaagcaacaataatgggtcctgctgatagtccttatgctggaggtgtattcctagtcactattcacttccctccggattatcctttcaagcctcctaaggttgcctttaggactaaagtgtttcacccgaacatcaatagcaatggtagcatttgtcttga

SEQ ID NO: 8072 - DNA, 435 bp, Glycine max
cccacgcgtccgagaggttcgagaaggaggctgctgagatgaacaagaggtcattcaagtatgcctgggtgcttgacaagctcaaggctgagcgcgaaagaggaattaccattgatattgctttgtggaagtttgaaaccaccaagtactactgcacagtcatcgatgcccccggacatcgtgactttatcaagaacatgattactggtacctcccaggctgattgtgctgtccttatcattgactccaccactggtggttttgaagctggtatttctaaggatggacagactcgtgagcatgctcttcttgctttcacccttggtgtgaagcagatgatctgctgctgtaacaagatggatgccactaccccgaagtactctaaggctaggtatgatgaaattgtgaaggaagtctctttctacttgaagaagg

SEQ ID NO: 8073 - DNA, 398 bp, Glycine max
accgacgcgtccgctcgtcacactggtgtgatggttggcatggtccaaaaagatgcatatgttggtggggagtgacaatctaagagggggattttgactctcaagtaccccattgaacatggaattgtgagcaattgggatgatatggaaaagatttggcatcataccttctataatgagcttcgtgttgccccagaagagcatccagttctcttaactgaggcccctcttaaccccaaggctaatcgtgagaagatgacccaaatcatgtttgagaccttcaacacccctgctatgtacgtagccatccaagctgttctttcactgtatgcaagtggtcgtacaactggtattgggttggattctggtgatggtgtcagccacactgtacctatcta

SEQ ID NO: 8074 - DNA, 447 bp, Glycine max
ttaccgggccgaccgacgcgtgcgcttatcccttcggctgcagctggtgaatccactgtgttttactataagatgaaaggagatgattatggttatcttgccgaatttaaggcaggcaatgagaagaaggaagctgctgatcagtctatgaaagcatatgagtctgctaccactgcagcagaggctgatttacctccaacacatcccatccgattgggtctagctttaaatttctcagttttctattacgagatcttgaactctccagaaagagcctgtcatcttgcaaaacaagcttttgatgaagctatttctgagcttgacaccttgaatgaggagtcatacaaagacagcaccttaatcatgcaacttctcagggacaacctaactttgtggacttctgacatcccagaagatggagaagatgcccagaaagtgaatggcact

SEQ ID NO: 8075 - DNA, 434 bp, Glycine max
gtctcatcaagatcaacggctgccccattgagctcgtggagccggagatcctccggttcgaggccttcgagcctatcctcctgttgggtaagagccgcttcgccggcgtcgacatgcgcatccgcgtcaagggtggcggccacacctcccagatctacgccatccgccagagcatcgccaaggcgctcgtcgcgttctaccagaagtatgtcgacgaacagagtaagaaggagatcaaggacattctcgtgaggtacgatcgcaccttgctcgttgcggatcccaggcgctgcgagcccaagaagtttggtgggcgtggcgcacgtgcgaggttccagaagtcttaccgttgaagaagaatggtggtggtgttttcgtgtttttggcttttggtttcggttcatgttttatgctgtggaaaaaatgaatactta

SEQ ID NO: 8076 - DNA, 169 bp, Glycine max
ggataagtctccaagcactctgttctcaacttaagttgccttccaatgtatccaatctttgctttcgtctttccttttcgcagataattgtgagacttatgatatatctgtatctcacttcatcaataataaattataataaagatgagcaatcattacaacttttgtt

SEQ ID NO: 8077 - DNA, 436 bp, Glycine max
gcgaaaagagattcgaatccaaggaagggaaaggaaagtaagagaagagaagaatggccgaagagggacaagtgattggtgtccacagcgtggaggagtgggaggaacatctcaagaagggacaagagtccaagaaattgattgtggtggattttactgcttcttggtgcggcccatgccgtttcattgccccaattcttgcggatatggctaaaaagttgccgaatgtcaccttccttaaggtggatgtggatgaattggcgactgtttccagggagtgggaagttgaggctatgccaaccttcctattcttgaaagaaagcaagctggtgaagaagcttgtgggtgccaagaaagaggagctgcaagacataatagtcaaacttgctgcaattgatgctgcctgaagtgccatatgaatatgttgagaataatt

SEQ ID NO: 8078 - DNA, 344 bp, Glycine max
gcgtacgcctattcgtccggtaattttttgattgcttaattctctaaaattcgaaattctaatttcgttagggtaaagagagtgtttgtgtgtgagtgagtatggctggaaaaggcgagggtcctgctatcggaatcgatttgggaacgacgtactcttgcgtcggcgtgttgcaacacgatcgtgttgaaatcatagccaacgatcaaggtaacagaactaccccatcctacgtggctttcaccgacacagaacggttgatcggcgatgcggcgaaaaaccaggttgctatgaacccaccaacaccgttttttgatgctagccgtttgattggatggcgtttt

SEQ ID NO: 8079 - DNA, 453 bp, Glycine max
ctttctctctttcttccttggcatatctcctctgaggaatcatcgaagaaaagcatcgtgtctcacatgtggatcagtctaactttcacgacactgtcaacaatcacgatttcatcatcatcgagttctacactccatgatgtcgccactgtaagaaccttgctcccgagtatgagaaagctacttctatctcgagtaatcatgatcctccggtatgacttgactagaattacatgccaatgatgagaagaccatacaccttgcatctcaatattatgttaggggatacccaacaattaacattctaacaaatgatggacagaatgttcatgaatacaaacgtccccgtgaagcatatggcatcgttgactatttgaagaaacaaagtggtcctgcttcaactgaaattaaatctgcttacgaagctactgctttcattggtgaaaataaagt

SEQ ID NO: 8080 - DNA, 448 bp, Glycine max
gaccgacgcggccgcagacgcttaggcagaagtccttttgaaggaagctattcaagaacagatagaactctattgactggtgtatctcgtagggagaaattgattaatcatttaataactatataatttcactttcaaattcttataattagtatcttttaatatcttcatatttcatttgaatataatattaatatataaataaaatgaattctaatgaaaatagaaaataacacaaaaaactatacaataaataaaatagaacgacaaggtataaattgcatatatttgcatatatatgcaaatatatgcaaacaatttgcgtccaataggatttgaacctatacctaaggtttaaaatacctctgtcctatccattagacaatggacgcttctatttttctgtattacttttattccttaaccttattaactaaaaaaggttaaa

SEQ ID NO: 8081 - DNA, 420 bp, Glycine max
cggacgcgtgggcggacgcgtggggtaactttttgattcctaaattctctaaaaggcgagattctaatttcgttaggggaaagagattgtttgtgtgtgagtgagtatggctggaaaaggcgagggtcctgctatcggaatcgatttgggaacgacgtactcttgcgtcggcgtgtggcaacacgatcgtgttgaaatcatagccaacgatcagggtaacagaactaccccatcctacgtggctttcaccgacacagaaacgttgattcgcgatgccgccaaaaaccaggtcgctatgaaccccaccaacaccgtttttgatgctaagcgtttgattgaaaggcgtttttccgatgcatcagtacaaggtgacatgaaattgtggccgttcaaggtgattcctggccctgctgagaaacc

SEQ ID NO: 8082 - DNA, 439 bp, Glycine max
cacaactactacaagtacttccttacaatcaaaaccaacaacaactatggcaagttatcgaaagcactacgatgatcagggtcgcaaggttgacgagtatggcaacgttgagaagcaaaccgacgaatacggcaaccctgttcatgctgctagtgtcacctatgtagccaccagaactgctgctggtggttacagtgatgacattaataagcaacatgataccaccaatgcctacggcgtagacactggtagacagcattctagtggtggctacgatggtgacactaataaacatcatggaactactggtggctataatgatgacaccaatagacatcatggaactaccggtgtctatggtatagacaccgataggcaacaacatgggactactggtggctatgccggtgacactggtaggcaacatgggaacatcggt

SEQ ID NO: 8083 - DNA, 442 bp, Glycine max
aaattccagaaacatcgtgtgcacagtaccccagaagatcgaacaaggatctccacgaagacaaacctctgttctcaactgtgtttctttacctctcacctactttcagaccataccagattgactaggctgagaagatgcagcagacaccgcctatgattcctatgatgccttcgttcccacctacgaacataaccaccgagcagattcaaaaataccttgatgagaacaagaagctgattctggcaatattggacaatcaaaatcttggaaaacttgcagaatgtgcccagtaccaagctcagcttcaaaagaatttgatgtatttagctgcaattgctgatgcccagcctcaaacaccagccatgcctccacagatggcaccacaccctgccatgcaaccaggattctatatgcaacatcctcaggctgcagcagcagc

SEQ ID NO: 8084 - DNA, 391 bp, Glycine max
cccacgcgtccgcggagagagagagagaggttttgacgcaacacactttcactgagaaaggatctctatctaccaaggagcagaataaaacccttctctctggtaagtgaataagagaatggcttcagatcggaaacttcacactttcgaggaggtggcaaagcacgaccagaccaaggattgctggctcatcatttctggcaaggtgtatgatgtcacccctttcatggaggatcatcccggaggtgatgaggttttgttatctgcaacagggaaagatgcaaccaatgattttgaagatgttggacacagtgattctgctagagatatgatggaaaaatactacattggtgagattgattcatcaactgtaccactaaaacgtacctac

SEQ ID NO: 8085 - DNA, 437 bp, Glycine max
aaaaaacaaacaagaaaaaaggagttagggtatgaaaaagagaataaagaaggtacacggggggtatcgcctgtgggagtgaatcaagaaccgatctgctatggctgctctgcaatacttggaatcgctgcgtaattcgcaccctgagctctacgattggcacaattcgctggccgatctgtaccagaagaagctctggcaccagctcactctcaagctcaatcagtttgtggctctcgccgtctttcacgctggcgatgctgcaatacaatcatatcacaatttcatcacagactttgagacgaacatcaaccttctcaagcttgcacattatgctgctctagttgctcggctgtattctgaaaaagaagctgctgatgattatcttggaggggtcattcaaaaacttctagacactatggagcagcgcatagaac

SEQ ID NO: 8086 - DNA, 423 bp, Glycine max
  modified_base (398)..(398): a, c, g, t, unknown, or other
cccacgcgtccgaaacaagccaagtgaaagagagaagaaaagtcaaagacaatgtcaggggtcatggacaagattgaggagacccttcatgtgggaggccacaagaaggaggaggagcacaagggtgagcagcaccatggtggagaatacaaaggggagcatcatggtgaacacagtactgaatacaaaggagagcatcatgttggtgagcacaagccggagcaccatggaggagaagagcacaaagaggggttcctagacaagatcaaggacaagatccacggcgaggagggtggcgccaccgccgagggcgagaagaagaagaagaagaaggagaagaagaagcatgaacatggccatgacagcagcagcagcagtgacagtgattagattatctnccactgctgcatcacctatatatct

SEQ ID NO: 8087 - DNA, 434 bp, Glycine max
  modified_base (388)..(388): a, c, g, t, unknown, or other
gcagagcaaagcaaagcagagccaacaacaagaagaacaaaaccaacatcaacaaccacaggaagaagaagcttgcaaattagaagaatcttcagttgaaagggaagaacacacaagaacaaagagaggaagaaacgcgaatgaagggagaattagagttgccaccagggttcagatttcaccccactgatgaagaattggtgaatcactacttgtgtaggaagtgcgcgggtcaaccaatcgcggttcccatcatcaaagaggtcgatttgtacaagtttgatccatggcagcttccagaaattggctactacggcgagaaagaatggtacttcttttctcctcgggatcggaaatacccgaacggttcacggccgaaccgtgccgncggaagcggctattggaaagccaccggcgccgataaggcgatcgga

SEQ ID NO: 8088 - DNA, 428 bp, Glycine max
  modified_base (403)..(403): a, c, g, t, unknown, or other
cctttgctcactcttcttctcttgcggctagggttttagcgcagcttcttctacatttaaggaagatgggtaaggaaaaggttcacatcagtattgtggtcattggccatgtcgactctgggaaatccactaccactggtcacctgatttacaagcttggaggcattgacaagcgtgttattgagaggtttgagaaggaagctgctgagatgaacaagaggtctttcaagtatgcctgggtgctggacaaacttaaggctgagcgtgaaagaggaatcaccattgatattgctttgtggaagtttgaaacaacaaagtattattgcacagttattgatgcgcctggacatagggatttcattaagaatatgattactgggacatcccaagctgactgtgctgntcttatcattgattcgaccactggt

SEQ ID NO: 8089 - DNA, 429 bp, Glycine max
ggaaactatcctgagtggaaactctacatccaaacattggatcccgaaaacgaagacaggcttgactttgacccccttgatgttactaagacctggcccgaggacgttttgcccctccagcctgttggccgcatggtcttgaataagaacattgataacttctttgccgagaatgaacaacttgcattttgccctgccattattgtacctggtgtatactactccgatgataaattgcttcaaactcgcgtattctcctatgctgatacccagagacacagacttggaccaaattatctgcagcttcctgctaatgcccctaagtgtgcccatcacaacaatcaccatgatggtttcatgaatttcatgcacagggatgaagaggtcaattacttcccttaaggtatgatcctgtccgtcatgcggaaa

SEQ ID NO: 8090 - DNA, 304 bp, Glycine max
cccacgcgtccgcgagcagcgagagagagaaaccctagcaaaaatgccggctggtcacggtttgagatcccgcaccagagattccttctctcgtcccttcaggaagaagggtaccatcgccctcaccacatacctcagaacctaccacgtcggcgattatgtcgacgtcaaggttaacggcgccgtccacaagggaatgcctcacaagttctaccatggccgcaccggtcgcgtctggaatggtcaccaaacgtgctgttggggtcgaagtcaacaagcaggtcggcaacagaatcattaggga

SEQ ID NO: 8091 - DNA, 464 bp, Glycine max
cacaaagcgggttactgtctgttcaagctaccatctctctctctctttcttagtgcctgcttgccagaagttaaaatggcccaagaaactttcctattcacatctgaatcagtgaacgaggggcaccctgacaagctctgtgaccagatctccgatgctgtgctcgatgcatgcttggagcaggaccctgacagcaaggttgcctgtgaaacctgcaccaagaccaacatggtgatggttttcggagagatcacaaccaaggccaacgtggactatgagaagattgtgcgtgacacatgcaggaacattggttttgtctctgatgatgttggtcttgatgctgacaactgcaaggtcctcgtcaacattgagcaacagagtcctgatattgctcaaggtgtgcacggccacctcacaaagaggcctgaggagattggtgctggtgaccaaggtcatatgttcgg

SEQ ID NO: 8092 - DNA, 460 bp, Glycine max
acaaaaccaagttaatgttgcaatcgcataataataaccatccaaagtttattgagagaaatttgcaagtttgaaaagaaacatggcatctcatcaacaaaacaagcaagagcttgatgaaagggcaaggcaaggagagactgttgttccgggtggcactggtggcaagagccttgaggctcagcaacatcttgctgaaggaaggagcaggggagggaaaacaaggaaggagcagctggggacagaagggtaccatgaaatgggacgcaaaggtgggttgagcactatggacaagtcaggagaagaacgtgctcaagaggaagccattgacatcgatgagtccaagttcaagactggtaataaccaagacaagaaccagaacaagtgatcatgcaacacccttcactatcatatgtagtgtgttcttatgctagcttaaatgctagtgtcttagtgtttt

SEQ ID NO: 8093 - DNA, 456 bp, Glycine max
cccacgcgtccgcccacgcgtccgcccacgcgtccgcccacgcgtccgtgaacaagggggtctctgtctgcttcttcactttctctcgtttcaatcgaaaccaaaacaaaatcatgggcagaaaattcttcgttggtggcaactggaaatgcaatgggaccactgaggaggtaaagaagattgttactactttgaatgaggctaaagtccctggagaagatgtcgtagaagttgttgtgagccctccttttgtgttccttcctgttgtaaaaagtttgctgcgccctgatttccatgtttcggcacaaaactgttgggttcgcaaaggtggtgcttataccggtgaggttagtgctgaaatgcttgttaatttgggaattccttgggttattattggtcactctgaacggaggcagcttttaaatgaatcaaatgagtttgtgggagataaagttg

SEQ ID NO: 8094 - DNA, 443 bp, Glycine max
  modified_base (305)..(305): a, c, g, t, unknown, or other
attcaataccatttaccaaactcactcatcaattctcatctttcttctcactaactattagtggatcatgtcgagcgcagctggccaagtcatcaaatgcaaagctgcggtttcatgggaggcagggaagccacttgtgattgaagaagtagaggttgcgccaccacaagctggtgaagtgcgtttgaagatcctctacacctctctttgccacactgatgtttacttctgggaagctaagggccaaactccattgtttcctcgtatatttggtcatgaagctggagggattgtggagagcgtangtgaaggtgtgactcatctgaaaccaggggaccatgccctccctgtgtttaccggggagtgtggggactgccctcattgcaagtcagaggagagcaacatgtgtgatcttctcaggatcaacactgataagggtgtca

SEQ ID NO: 8095 - DNA, 453 bp, Glycine max
cccacgcgtccggtgatgtctgggaatgcagcagtcaaaaggagtgattgggcctcatgggtacaagtgtttttaacaaacagcaacagtacagagcattttgatgcatgtaagtggacaaaatcggaaccacattcctgggaattgatcttcccaatagaggtatgtggtcctaataatggttttgaaatgtggagttctgagtgggcaaatcaaacttcatggcatttgagtttccttattgacaatcccaaacagtctacagtttttgatattctcttgggaatttctcaagattttgaaattgctggtaatactcttatgccagctttttctgttccacaggctactgccagatcttctgaaaatgcggaatcctctgcatgatctggaatttgtgttttctttcgcttgttcgtttgtttaattcaataaaggaaattaggcatgacc

SEQ ID NO: 8096 - DNA, 471 bp, Glycine max
tttaggttcttcttcttcttcggtgagagttagagagagagagagagagagagaaggctctttttttcttttgggttggtttctcttgtttttttttttgtaggtactgaggaagaaagaccaaaactttatccgcttgcttcacttagctcaagagcgtacaattcaggcaaaggccttgaagtcggagtgtgtgttaaggaatttcttaggagttgcttctgtcttgactgaagaaatggaggtatatggcaaatctatggttgcaggtcctgcaaatgttatttttctgtcaagtattttgggccaagaaggtccagttcccggtcacaaatgcgactggaaatgtcaaaatgaacatgtttgtggaaacatgtatcgctgcaagctaactgggctgactcacatctgtgataaaaactgtaaccagagaattctgtatgacaaccatagctccctttgtcgagctag

SEQ ID NO: 8097 - DNA, 437 bp, Glycine max
gttctacatataatcattcataatgggtgttttcacattcgaggatgaaatcaactccggtgtggctcctgctactctttacaaggccctagttacagatgccgacaacgtcatcccaaaggctcttgattccttcaagagtgttgaaaacgttgagggaaatggtggcccaggaaccatcaagaagatcactttccttgaggatggagaaaccaagtttgtgctgcacaaaatagaaagcattgatgaggcgaacttgggatacagctacagcgtggttgggggtgctgcattgccagacacggcggagaagatcacattcgactccaaattggttgctggtcccaatggagggtctgctgggaagctcactgtcaaatacgaaacaaaaggagatgctgagcccaaccaagacgaactcaaaactggaaaagcca

SEQ ID NO: 8098 - DNA, 436 bp, Glycine max
gtgctgtactattacttcatactaagttctgaaaatgagttccaaggttatgcttgttctacttatgtggttgggcactatacttctgatctcctctgatgttgcacccgatgatgcatacgagaattttgacaaaatagatgggaagcctagtgcagatggggtagatgaaagcaagtattggcgtggcggctatggtggcggctatggtggtggttatggaggtgggcgtggaggctatggaagtggtcgtggaggctatggagggggacgtggtggatatggcggcggacgatgtggctatagtggcggacgaggtggctatggcgcttgtcgtgggggctgacgtagtggctatggtgctcatgaacataaccaggctgaggttgatgcctagccttacaacttagaatgcaactttctaaagcttatatat

SEQ ID NO: 8099 - DNA, 453 bp, Glycine max
gaaacatggcttccttaaactccttagtgctgctccttgcagctctaattctatgccgggatgttcttgcagactatgataatcccccagcgtacaagcctcccactgagaaaccaccagctgataagcccccagttgagaagcctcctgttaacaaaccttcagttgaaaaccctccaattaataagcctccagtacagaagccaccagtgtacaatgcccccagttgagaaacccccagtttataagccaccagttcatgaaaccaccagagtacaagcccccagctgaaaaaccaccagtgtacaagccctcagctgataaacccccagtgtacaagcccctagttgacaaaccaccagtgtacaagcccccagttgagaagcccccagtttacaagcccccagctgagaagccaccatgttacaagcccccacatgagaagccaccagt

SEQ ID NO: 8100 - DNA, 442 bp, Glycine max
ctcacgcgtccgctcaatcctctgttactcgcaaaacatacacctcttctctatgctccggggggctctctctctcgctcactctgcaactaacaaggcaatcgcaaaccaagacaccgttgtcagagaaatcaagcccaagatcaggacaatcatgcctgctggagggcctgatgatgaggacaataggtggacaccgctgttgaagccactgctgaaagagagctgctatgttcaatgcaagtcgcatgctgattctcacaacatcgaatgcaacatgtatagcttggactgtatgaacggtcctctctgctctctctgcctcgaccaccacacagatcaccgtgcaatccagattaagaggtactcataccatgatgcgatcatggactatgagattcacaaggcgttggacatcactggcgttcaaacctacattatg

SEQ ID NO: 8101 - DNA, 291 bp, Glycine max
acgccacgcgtcacgcgtccgcagccctcacaactaagaaggaaacttgctaaagcttatataggatttaagttatcgtaataaataaaacttcattggaagggtagttataatagatgtggagatctttcttcgctctggtcatataaaggaataatacttttctattaaaaaaaaaaactaaaaaaaaaaaaaaaaaaaaaaaaaacaactaaaaaaaaaaaacaaacaaaaaagcaacacaaaggcacaagaagaagaacataaatgaagcgaaaatactaggggaac

SEQ ID NO: 8102 - DNA, 447 bp, Glycine max
ctcacgcgtacgctccgcaccagtttcaccggacgaatatctcgttgcttggagcgatccgagaaaatctctgtaaacatgttggtttaccaggaccttcttacaggtgatgagcttctctctgactccttccgttacaaggaaattgagaatggaatgctgtgggaagttgaggggaagtgggctgttaaaggagcagttgatgcagacattggtgctaacccttctgctgaaggtggaggagaagatgatggagttgatgatgcagctgtcaaggttgacgacattgttgacacattcagacttcaagagcatcccgcattcgataagaagcagattgttaccttcatgaagaggtttatcaagaatctgactgccaagctcgatgcatagcatcaggagctgattaagaagcacattgagggagcaacttattacctgctctat

SEQ ID NO: 8103 - DNA, 490 bp, Glycine max
  modified_base (56)..(57): a, c, g, t, unknown, or other
  modified_base (84)..(84): a, c, g, t, unknown, or other
  modified_base (163)..(163): a, c, g, t, unknown, or other
  modified_base (185)..(185): a, c, g, t, unknown, or other
ttcccgggttcgatcccacgtcgtctcgttccatctttcaatctggaatcacatanntcctgaaacataaaacattcttagcantttaatcatactactgagacgaacatgaccatccacattgtgaaagagagtttctcggaagagcaatgaagctctggtnggtgaagtcattggaatgtcantgaagaagaattctggagagttgggtctcaagtttttcttgaaaatatttgagattgctccatcagctcagaaattgttctcattcttgagagattcaacggttcctttggagcaaaatcccaagctcaagccccatgccgtgtctgtctttgtaatgacctgtgattcagcagttcagctgcggaaggccgggaaagtcactgtcagagaatcaaacttgaaaaaattaggtgctacccattttagaaccggcgtatcatacgagcatttcgaggtgacaaagtttgcacttttggagaccata

SEQ ID NO: 8104 - DNA, 417 bp, Glycine max
cgacgcgtccggtactgttctattagttcatactaagttctgaaaatgagttccaaggtttggcttgttctacttatgttcttggccactatacttctgatctcctctgaggttgcacccgatgatgcatacgagaattttgacaaaatagatgggaagcctagtgcagatggggtagatgaaagcaagtattggcgtggcggctatggtggcggctatggtggtggttatggaggtgggcgtggaggctatggatgtgggcgtggaggctatggaaggggacgtggtggatatggcggcagacgacgtggctatggtggccgacgtggtggctatagcggcggacgtggtggcggacgtggtggctatggtcctaatgaacatatcgaggctgtggctgatgctaaccctcacaac

SEQ ID NO: 8105 - DNA, 350 bp, Glycine max
  modified_base (307)..(307): a, c, g, t, unknown, or other
cccacgcgtccggctgactgtgctgttcttatcattgattcgaccactggtggttttgaagcgggtatttccaaggatggacagactcgtgaacatgctctgctctcattcacccttggtgtgaaacagatgatttgctgctgtaacaaaatggatgctactacacccaagtattccaaggccaggtatgatgaaattgtgaaggaagtctcttcctacttgaagaaagtaggatacaaccctgacaagattccttttgttcctatctctggttttgagggagacaacatgattgagaggtccacanaccttgactggtacaagggtccaactctgcttgatgcacttga

SEQ ID NO: 8106 - DNA, 426 bp, Glycine max
attctctttgcgcagttccctacctctcctttcaagatgcagatcttcgtcaagaccgtgaccggaaagaccatcacccttgaggtggaaagctctgacaccatcgacaacgtcaaggccaagatccaagacaaggaaggaattcccccggatcagcaacgtcttattttcgccggaaagcaacttgaggaccggcgtacccttggcgactaccacattcagaaggaatcaacccttcaccttggccttcggcttcgtggtggcattcaaatcttcgtcaagaattttaatggcgaaaccattacccttgaaggctaaaggtctgacaccattggacaacgtcaaggccaagatccaggacaaggaaggaatccccccagaccagcaacgtctaatcttcgccggaaagcaacttgaggacgggcg

SEQ ID NO: 8107 - DNA, 415 bp, Glycine max
tttctgtgtttatacaaacctcatgtatgtgggagagagagtgtctttcttggctcatagcgtagcatcactatggctcttctgagtcgagcctcttcacgcttccctcagctggtttcccctcaaagagttgtttccctccacacaacgctcccatctcttaacgcatcaacatccacacccacgcccgccccatatgccccggcaccgactccgtccgcttaccctcccgacggcgtgtctaaggccgcggagttcgtgatctcgaaggttgacgatctgatgaactgggcccggcgcggctccatctggcccatgaccttcggactcgcctgctgcgccgtcgaaatgatgcacactcgcgtccgccgctacgatctcgaccgcttcggcatcattttcaggcccagccctc

SEQ ID NO: 8108 - DNA, 445 bp, Glycine max
  modified_base (413)..(413): a, c, g, t, unknown, or other
cccacgcgtccgttccaatatattccattctctctgtgtatttccctacctctcccttcgagatgcagatcttcgtcaagaccctcaccggcaagaccatcacccttgaggtggaaagctctgacaccatcgacaacgtcaaggccaagatccaggacaaggaaggaatccccccggaccagcaacgtctcattttcgccggaaagcaacttgaggacggccgtacccttgctgactacaacattcagaaggagagctctgacaccattgacaatgtgaaggccaagattcaggacaaggaaggcatcccaccggaccagcagaggctgatttttgctggcaagcagctcgaggatggaaggaccctcgctgactacaacatccagaaggaatcaacccttcaccttgtcctncgtctccgtggggggttttaagctcgttgtgt

SEQ ID NO: 8109 - DNA, 452 bp, Glycine max
gaaccatcctggtcagattggaaatggctatgcccctgttcttgactgccacacttcccacagtgctgtcaagtttgctgaactcatgaccaagattgacaggcgatctggcaaagagcttgagaaggaacccaagtttttgaagaatggtgatgctggttttgttaagatgattccgaccaaacccatggtggttgaaactttctctgagtaccccccacttggtcgctttgctgtcagggatatgcgtcaaactgttgctgtgggagtcatcaagaacgtggagaagaaggatcctactggagccaaggtcaccaaagctgcccagaagaagaagtgaatcgtgcggtttggttcatcaggggatgtcgtttcttatggttacaataaatgttggtttcttgcccttgtgtcttcgtttctaggtagcttgtttttcggacatagtttga

SEQ ID NO: 8110 - DNA, 376 bp, Glycine max
gttccctacctctcctttcaagatgcagatcttcgtcaagaccctcaccggaaagaccatcacccttgaggtggaaagctctgacaccatcgacaacgtcaaggccaagatccaggacaaggaaggaattcccccggatcagcaacgtctcatcttcgccggaaagcagctcgaggacggccgtaccctcgccgactacaacatccagaaggagtcaaccccttcaccttgtccttcgtctccgtggtggcatgcagatcttcgtcaagactctcactggcaaaaccataaccctagaggtcgaaagctctgacaccattgacaacgtcaaggccaagatccaggacaaggagggaatccccccagaccagcaacg

SEQ ID NO: 8111 - DNA, 444 bp, Glycine max
acttgttatgcagctgcaagatgtacccagacttgagctacaccgagtcaaccacgaccgagaccttggtcatgggagtggcaccagttaaggctcaattcgagagtgctgaaatgggtgttcccgctgagaacgatggctgcaaatgtggagctaactgcacctgcaacccctgcacttgcaagtgaggtgttggagagctaaagcttcaagcagaaatggcccttagaaataatgataaaaactatatgtagtttcaaaacttcaaaattatgtagtatgtattatgttgcactctggtgttttgtgtctaaacaaacacccttagaataaagtggtcatttcttgcccttgagcaagttcaagtgttttggacttgtgatgggtgtgttaaggtcatggttgccttttttttatatatatatatatatataaatgtttggt

SEQ ID NO: 8112 - DNA, 443 bp, Glycine max
cccacgcgtccgcctctctctcctccaatggccgaccagctcaccgacgaccagatcgccgagttcaaggaggccttcagcctcttcgacaaggacggcgatggttgcattactaccaaggaacttgggactgttatgaggtcacttggtcaaaacccaactgaggcagaactgcaggatatgataaacgaggttgatgctgatggcaacggaaccatcgatttcccagagttcctcaacctgatggctcgcaagatgaaagacaccgactcagaggaggagcttaaggaggctttccgtgtgtttgacaaggatcagaatggtttcatctctgcagctgagctccgccatgtcatgacaaatcttggggagaagctgacggacgaggaggtggatgagatgatccgtgaggccgatgttgacggtgatggacagatcaacta

SEQ ID NO: 8113 - DNA, 450 bp, Glycine max
cccacgcgtccgtaaggctgtttggacggtcacacgcagttgtattgtagaactgaacaggggtttctctttctctttctctgtctgcttcttcactttctctcgtttcaatcgaaaaaaatcatgggcagaaaattcttcgtcggtggcaactggaaatgcaatgggaccactgaggaggtgaagaagattgttactactttaaatgaagctaaagtccctggagaagatgttgtagaagttgttgtgagccctccttttgtgttccttccttttgtaaaaagtttgctgcgccctgatttccatgtctcggcccaaaattgttgggttcgcaaaggtggtgcttatactggagaggttagtgctgaaatgcttgttaatttgggaattccttgggttattattggtcactctgaacggaggcagcttttgaatgaatcaaatgagttt

SEQ ID NO: 8114 - DNA, 440 bp, Glycine max
tgaaaattttggttgagcaagagccttctctttgttccgttccgcgaccatgtctcatgggacatgcccttccgtaaagaacttccttcttttggattctgatgggaaacgtgtcgcagtcaaatacttctctgaagactgggcaacgaatagtgccaaggaaaattttgagaaagttgtcttcaacaagactcagaagaccaatgcccgcacagaagcggaaatagcaatgtttgagaataacattgttgtttacaagtttgtccaagatcttcacttctttgttaccggtggtgattatgaaaatgagcttatcttagccacagttctgcaggcattttttgattctgtgggccttctgctcaggttgtggtcttacataaacaatttatatatgttccatgttcaagggtgtttttaatctatcactattaacacag

SEQ ID NO: 8115 - DNA, 442 bp, Glycine max
cccactcgtccgcccaatcgtagccgtcgcactctgtgttttcagcgccgtctccgatcggcgacaatggcgacccaaatgagcaagaagagaaagttcgtagctgatggagtgttcttcgctgaactgaacgaggttctgacaagagagttggccgaggacggttactccggcgtggaagttagggttacgccgatgcgcaccgaaatcataattagagccaccagaacccaagctgttctcggtgagaagggaaggagaataagggaacttacctctgtggttcagaagaggttcaagtttcccgagaacagtgtcgaactttatgctgaaaaggtcaacaataggggtctttgcgctattgctcaagctgagtctcttcgatacaagctccttggtggactcgctgtgcgcatggcctgctatggtgttttgaggttgg

SEQ ID NO: 8116 - DNA, 448 bp, Glycine max
gtaaatagtaaatataaataccaacgctggagtgatggtagtttagggcggtgttactcgttctctcgttgattcggatctagagtcttttttcactcttcagttctcgttgttgttcttcgctttcctgaaactagggttttcaatttcgattcattcgttaataattaaagatgtttgggagggcaccgaagaagagcgataatacgaggtactacgaaatcctcggcgtctcgaagaacgcttcgcaggatgatctgaagaaggcttacaagaaagccgccatcaagaatcaccctgacaagggcggtgatcccgagaagtttaaagagctggcacaagcatatgaggttctgagtgaccctgagaagcgtgagatatatgatcagtatggtgaagatgcgcttaaggaaggaatgggtggtggcggtggccatgatccgtttga

SEQ ID NO: 8117 - DNA, 430 bp, Glycine max
aatgggcgttctcacattcgaggatgaaatcaacttccgtgtggctcctgctactctccggacggccctaattacagacgccgacatcgtgataccaaacgctcttgataccttcaagagtgttgaaaacgttaagggaaatggtagtccaataaccatcaagaagatcactctacttgaggatggagaaaccaagtttgtgctgcacaaaatagattgcattgatgaggcgaacttgcgatacagctacagcgtggtaggcagtgctgcattgccagacacagcggacaagatcacattcaactacaaatcagatgctggtcctaaagaatggtctgctgggaagctcactgtcaaatactaaacacaaggagatgctgatcccaaccaagacgaactcaaaactggaaaagccaaggctgatgctctc

SEQ ID NO: 8118 - DNA, 439 bp, Glycine max
  modified_base (350)..(350): a, c, g, t, unknown, or other
  modified_base (387)..(387): a, c, g, t, unknown, or other
cccactcgtccgcccactcgtccgatttgcctgcatgcctttggtattgtggggtgtgggtcgtttagtggtgtcaagtcttgcgaacgtgagggtgcatgagtggtaatcgggatgtttttgttgcacggctccatgcttgcgcatgcaacgtgtgacatgcatccttttcattgtcaccttagccttcgtggcttaggtgctgacgattggttcctgtgttgcctacctaccaaacggtattcgtgtggctagtcagacccattccatccaggcctctttgttggggacgctggaggatttcaaagtcccacacgtgaaccacgttagtcgtccatcataacggcttnctgtggcacacgtgtggtgatggttctcttcgatgcngtgcatgcagtgaacgtgggtggtctagtgcctccacattgtccctaaaatc

SEQ ID NO: 8119 - DNA, 395 bp, Glycine max
cccacgcgttacgaagaacaaccccatcttgccttctgatccttaccaaagagccttggctcggttctggtccaaattcattgatgataaagtttttggtgctgcatggaaatccgttttcacagctgatgagaaagagcgtgagaagaatgttgaggaagcaattgaggctctgcagtttcttgagaatgagataaaggacaagaagttctttggaggagaggagattgggttggtagatattgctgctgtctacatagcattttgggtccctatggttcaagacattgcagggttggagttattcacaagtgagaaatttcctaagctccacaattggagccaagaatttttgaaccatccaattgtcaaagaaagtctgccccctagagatc

SEQ ID NO: 8120 - DNA, 231 bp, Glycine max
cttcactggtgttttcccccaattcccagtcccacatagcttaaaacttaccatctacgattggacaaatacaaatacccttctgcctcgctcaaaacacaaacaagctcgcttctttcttctctcattaacaacatgcagatcttcgtcaagactttgaccggcaagaccatcaccctcgaggtcgagagcagcgacaccatcgacaacgtcaaggccaagatccaagac

SEQ ID NO: 8121 - DNA, 308 bp, Glycine max
cccacgcgtccgggaaataattgatctttgaaaatgcagggaggaaagaaagctggagagtccatcaaggaaacagctgcaaacattggtgcttctgccaaggcttgcatggagaaaaccaatgccactgttcatgagaaagcagaaagaatgactgcacgtgatccgatgcaaaaggagttggcaacccagaacaaagaggcaaatatgaaccaggcagagctggacaagcatgctgcgcgtcaacataacacggcggcgaagcatgctgtcactgcaaggcacatgggacaacccatggggaccca

SEQ ID NO: 8122 - DNA, 374 bp, Glycine max
  modified_base (68)..(68): a, c, g, t, unknown, or other
  modified_base (330)..(330): a, c, g, t, unknown, or other
  modified_base (345)..(345): a, c, g, t, unknown, or other
gtactgttctattagttcatactaagttctgaaaatgagttccaaagttttgtttggggtacgtatgntcttggccactatacttctgatctcctctgaggttgcacccgatgatgcatacgaaaattttgacaaaataaatgggaagcctagtgcagatggggtagatgaaaagcaagtattggcgtggcggctatggtggcggctatggtggtggttatggaggtgggcgttgaggctatggaggtgggcgtggaggctatggagggggacgtggtggatatggcggcggacgaggtggctatggtggcgggcgtggtggctattgcngccggcgttgtggcnggcgttgtggctatggtccttatgaacat

SEQ ID NO: 8123 - DNA, 380 bp, Glycine max
cactttcactggaatcacaatcctgaaacaaaaacatcttatcatttaacatgctacgagacaacatgaccaccacattggaaagaggtttctcggaagagcaagaagctctggtggtgaagtcatggaatgtcatgaagaagaattctggagagttgggtctcaagtttttcttgaaaatatttgagattgctccatcagctcagaaattgttctcattcttgagagattcaacggttcctttggagcaaaatcccaagctcaagccccatgccgtgtctgtctttgtaatgacctgtgattcagcagttcagctgcggaaagccgggaaagtcactgtcagagaatcaaacttgaaaaaattaggtgctacccatttt

SEQ ID NO: 8124 - DNA, 376 bp, Glycine max
cttgcggctagggttttagcgcagcttcttctagatttaaggaagatgggtaaggagaaggttcacatcagtattgtggtcattggccatgtcgactctgggaaatccactaccactggtcacctgatttacaagcttggaggcattgacaagcgtgttattgagaggtttgagaaggaagctgctgagatgaacaagaggtctttcaagtatgcctgggtgctggacaaacttaaggctgagcgtgaaagaggaatcaccattgatattgctttgtggaagtttgaaacaacaaagtattattgcacagttattgatgcgcctggacatagggatttcattaagaatatgattactgggacatcccaagctgact

SEQ ID NO: 8125 - DNA, 306 bp, Glycine max
gttaaagttcatcaatggcaggtcgtggcaaaaccctaggatccagcgccgccaagagggccacctcaaggagcagcaaagccggcctccaattccccgtcggccgtatcgcccgtttcctcaaggccggaaaatacgccgagcgcgtcggcgccggtgctcccgtttacctcgccgctgtcctcgaatatctcgcagccgaggttttggagttggctggaaacgctgcgagagacaataagaagactcgaattgtgccgcgccacattcaattggcggtgaggaacgacgaagaattgagcaagc

SEQ ID NO: 8126 - DNA, 453 bp, Glycine max
ctcgcattcttcctcatagatggtctcaactactacccctaattgattcaaacccctcatctgtttctctcggggctctttctttgaattgaatcgctcttatgcactatgcacaggacacacttctgaaaagatttttcaatgctttaattataatcatattcataggtattgttattcactgtaataagatcaataacgggtgagaaaactggaaatagcaacagttccagggcgatagcgatgaggcttcttgactccaccggttgtcggtgcagatttccttgtagcctacacagaaatcacgcgtttattgaattattaatatccaaaatcacataattacgtaattgaagaatcaattgtcaataaaccttcgggaaattaagaataaaaggtaattgaaatcgagaaaccctaactagaaaaaaaaaacgaaacacttaataaaaa

SEQ ID NO: 8127 - DNA, 251 bp, Glycine max
cccacgcgtccgatttccattaaaaagaaaatatcataaatgggtattttcagattcgaggacaaaatgagctcccctgtggctcctgctactctttacaaagctctagttacagatgccgacaacatcatcccaaaagctcttgattccttcaagagtgttgaaaacgttgaaggaaatggtggccctggaacaatcaagaagataactttcgttgaggatggagaaaccaaagttgtactgcacaaaat

SEQ ID NO: 8128 - DNA, 249 bp, Glycine max
  modified_base (79)..(79): a, c, g, t, unknown, or other
caaacatcgggtttttgatgtctcattggctgatctccaacgcgattaaggccacttcttcaaagaagagtcgtttganaacttatgaccttcaaaggaaaaatgttctgacaaacttcttgggaatggatttcacaactgacaagttgaggtcttttgttccaaaatggcaaactttaattgaagctcatgttgatgttaagaccactgataattatacattgaggatgttctgcattggctttacta

SEQ ID NO: 8129 - DNA, 409 bp, Glycine max
  modified_base (69)..(69): a, c, g, t, unknown, or other
cccacgcgtccgtatgcttccatttccattaaaaagaaaatatcataaatgggtattttcgcattcgangacgaaatcacctcccctgtggctcctgctactctttacaaagctctagttacagatgccgacaacatcatcccaaaggctcttgattccttcaagagtgttgaaaacgttgagggaaatggtggccctggaacaatcaagaagataactttcgttgaggatggagaaaccaagtttgtactgcacaagatagaagcagttgatgaggcaaacttgggatatagctacagcgtagtgggtggtgctgcgttgccagacacagcggagaagatcacattccactccaaattggctgctggtcccaatggaggctctgctggcaagctcactgtcgaatacc

SEQ ID NO: 8130 - DNA, 342 bp, Glycine max
gtaatattattcttcgaatccattttattattcataatgggtattttcacatttgacgatggaaccacctaccctgtggctcctgctaccctttacaaagctctagttacagatgccgacaacgtcatcccaaaggctgtcgaagccttcaggagtgttgaaaaccttgaggggaacggtggccctggaaccatcaagaagatcactttcgttgaggatggagaaagcaagtttgtgttgcacaaaatagaatcagttgatgaggcaaacttgggatacagctatagcgtaattggtggagttgggttgccagacacagtggaagaagatcacattcgaatg

SEQ ID NO: 8131 - DNA, 404 bp, Glycine max
acatactagaagtattattattctttcatttccattaaaaagaaaatatcataaatggggattctgacattcgaggacgatatcacctaccctgtggctcctgctactctttacaaagctctagttacagatgccgactacatcatcccaaaggctcttgattccttcaagagtgttgaaaacgttgagggaaatggtggccctggatcaatctagaagataactttcgttgaggatggagaaaccaagtttgtactgcacaagattgatgcatttgatgaggcaaacttgggatatagctacagcgtattgggtggtgctacgttgccagacacagcagtgaagatcacatatcactccaaattggctgctggtcccaatggaggctcttctggcaagctcac

SEQ ID NO: 8132 - DNA, 419 bp, Glycine max
ggaggttctttttttcttgctggaactgaaagggctggggggctgagtgtgtccttgtcagggccagatggccgtgtcttgggcggtggagttgcacgtcttttggtagctgcttcccctgttcagattgttttggcaagctttgtttctgatgtacgcaagcacttcaagcatgctaagcagatgctgaatgcagaggttttcatagcagcaggccaaagcagctcaccatcaagaggcactctcagtgagtcttcatgtggggttgggagtgggagcccactaaaccaaagcacaggagcctgcatcaacaccatgaacaactgtaccaccccaacacacagctttcaaggcatgccctgcaagtagaacttgactcacctcacatgtttgtgtagtaggtttggtgtggtgaaaga

SEQ ID NO: 8133 - DNA, 441 bp, Glycine max
aaaagtctatcacagggaggtacacctccacgattcctcatcatagatgatggttggcaacagattgaaaataaagcaaaggatgctactgaatgtttggtacaagaaggagcacagtttgctactaggttgactggtattaaagagaatactaaatttcaaaagaaattacagaacaatgagcagatgtcaggtctgaagcatctagtacatggagcaaagcagcatcacaatgtgaaaaatgtatatgtatggcatgcactagctggttattggggtggagtgaagccagcagcaaccggcatggaacattatgacactgccttggcatatccagtgcagtcaccaagcgtgctaagaaaccaaccagacattgtcatggacagcttggctgtacatggccttggcctagtgcacccaaagaaggttttcaatttctac

SEQ ID NO: 8134 - DNA, 438 bp, Glycine max
cccacgcgtccgctagaagtattattattcttccatttccattaaaaagaaaatatcatagatgggtattttcacattcgaggacgaaatcacctcccctgtggctcctgctactctttacaaagctctagttacagatgccgacaacatcatcccaaaggctcttgattccttcaagagtgttgaaaacgttgagggaaatggtggccctggaacaatcaagaagataactttcgttgaggatggagaaaccaagtttgtactgcacaagatagaagcagttgatgaggcaaacttgggatatagctacagcgtagtgggtggtgctgcgttgccagacacagcggagaagatcacattccactccaaattggctgctggtcccaatggaggctctgctggcaagctcactgtcgaataccaaaccaaaggagatgc

SEQ ID NO: 8135 - DNA, 360 bp, Glycine max
gttgaacaccatcttaagaatcccccttctgtcccgtctgacaaattatctcatgtgtgcactggcattttgaagcctgacaatgagttgcaaattttgattgatggggaacagaagaagaaggtaaatttcttatctgctgatgattttgaaccccctcttatccctcccaagacaatcccagatcctgatgataaaaaacctgaggactgggatgagagagagaaaattccagactcaagtgcagtaaagccagatgactgggatgagaatgcacccttggaaattgttgatgaagaagctgagaaacctgaaggatgggacaatgaacctgaggagatagatgatccagaggcaaca

SEQ ID NO: 8136 - DNA, 394 bp, Glycine max
  modified_base (357)..(357): a, c, g, t, unknown, or other
cccacgcgtccgcccacgcgtccgcccacgcgtccgctccttctcaaactagtaatatatagtattattcatccattccattctatatatttcataatgggtgttttcacattcgaggatgaaaccacctctcctgtggctcctgctaccctttacaaagctctagttacggatgctgacaacgtcatcccaaaggctgttgacgccttcaggagtgttgaaaacgttgagggaaatggtggccccggaaccatcaagaagatcactttccttgaggatggagaaaccaagtttgtgttgcacaaaatagaagcgattgatgaggctaacttgggatatagctatagcgtagttggnggagatgggttgccagacacagtggaagaagatcaca

SEQ ID NO: 8137 - DNA, 328 bp, Glycine max
cccacgcgtccggcaatgggcggtatactttctgcgcttcttggcggcgacgcggcggcggcggcgtcttcgccggagagttctacttctagagtctcctccttccactcgtcgccgcgctggcagctctacttcaacgagatcaaagataccgataagctcgttgcgatagatttctcggcgtcgtggtgcggtccttgcaaattcatagagccagcgattcacgccatggccgacaagttcaacgacgttgacttcgtcaagatcgacgtcgacgaattacctgatgtggcgcatgagtttcaggtgcaggcgatgccgactttcg

SEQ ID NO: 8138 - DNA, 385 bp, Glycine max
gtactgttctattagttcatactaagttctgaaaatgagttccaaggttttgcttgtgctacttatgttcttggccactatacttctgatctcctctgaggttgcacccgatgatgcatacgagaattttgacaaaatagatgggaagcctagtgcagatggggtagatgaaagcaagtattggcgtggcggctatggtggcggctatggtggtggttatggaggtgggcgtggaggctatggaggtgggcgtggaggctatggagggggacgtggtggatatggcggcggacgaggtggctatggtggcgggcgtggtggctatggcggcgggcgtggtggcgggcgtggtggctatggtcctaatgaacataacgaggcttgg

SEQ ID NO: 8139 - DNA, 436 bp, Glycine max
cccacgcgtccgcccacgcgtccgtccacgcgtccgattcattttaatcctaatggtgcagttcttgatcattcgatttttctcctcaagatgcagatattcgtaaaaactttgaccggcaagaccatcacccttgaggtggaatcctccgacaccattgacaacgtaaaagctaagattcaagacaaggaagggatcccacctgaccagcagagacttatctttgcgggtaaacaacttgaggatggtcgcacccttgccgattacaacatccaaaaggaatcaaccctccatctcgtgcttcgcctcaggggtggcatgcaaatctttgtcaagactttgaccgggaagaccatcacccttgaggtggaatcctcggacaccattgataatgttaaggccaagatccaggacaaagagggcattcccccagatc

SEQ ID NO: 8140 - DNA, 401 bp, Glycine max
  modified_base (378)..(378): a, c, g, t, unknown, or other
ctcgctctatttctcagtctctgtgtttgcggctgaagattccgaacgagtgaccttctgcgttgctcgcaaagtttaagtaatcatgggtaaggaaaaggttcacatcaacattgtcgtcattggacatgtcgactctgggaagtcaactaccactggtcacttgatctacaagcttggaggtattgacaagcgtgtgattgagaggttcgagaaggaggctgccgagatgaacaagaggtcattcaagtatgcctgggtgctcgacaagctcaaagctgagcgtgaaagaggaattaccattgatattgctttgtggaagtttgaaaccaccaagtactactgcacggtcattgatgctcctggacatcgtgactntatcaagaacatgattactggta

SEQ ID NO: 8141 - DNA, 469 bp, Glycine max
ctcgctctatttctcagtctctgtgtttgctgctgaagattccgaacgagtgaccttcggggttgctcgcaaagtttaagtgatcatgggtaaggaaaaggttcacatcaacattgtcgtcattggacatgtcgactctgggaagtcaactaccactggtcacttgatctacaagcttggaggtattgacaagcgtgtgattgagaggttcgagaaggaagctgccgatatgaacaagaggtcattcaagtatgcctgggtgctcgacaagctcaaagctgagcgtgaaagaagaattaccattgatattgctttgtggaagtttgaaaccaccaagtactactgcacggtcattgatgctcctggacatcgtgactttatcaagaacatgattactggtacctcccatgccgactgtgctgtccttattattgactccaccactggtggttttgaagctggtatttct

SEQ ID NO: 8142 - DNA, 446 bp, Glycine max
  modified_base (298)..(298): a, c, g, t, unknown, or other
  modified_base (320)..(320): a, c, g, t, unknown, or other
  modified_base (339)..(340): a, c, g, t, unknown, or other
accatttaccaaactcactcatcaattctcatctttcttctcactaactattaattcatggtgtcgagcacagctggccaagtcatcaaatgcaaagctgcggtttcatgggaggcagggaagccacttgtgattgaagaagtagaggttgcgccaccacaagctggtgaagtgcgtttgaagatcctctacacctctctttgccacactgatgtttacttctgggaagctaagggccaaactccattggttcctcgtatatttggtcatgaagctggaaggatcgtggagagcgtangtgagggtgtgactcatctganaccaggggaccatgccctnnctgtgtttaccggggagtgtggggactgccctcattgcaagtcataggagagcaacatgtgtgatcttctcaggatcaacactgataggggtgtcatgatccatga

SEQ ID NO: 8143 - DNA, 440 bp, Glycine max
  modified_base (382)..(382): a, c, g, t, unknown, or other
aaacaagtgtacgtgggacccttccttcgcaagcaagagagagaaagtgctgctgacaaggcaaaattcaacaatgtttttgtgaagaatctatcagaatcaaccaccgatgatgagttgaagaacacttttggtgaatttggaactattactagtgctgtagtaatgagggatggggatgggaaatcaaagtgttttggatttgtgaattttgagaatgctgatgatgctgctagggctgttgaggctctcaatggcaaaaattttgatgacaaagaatggtatgttggaaaagctcagaagaaatctgaaagggagaatgaattgaaacaacgatttgagcagagcatgaaagaagctgctgataaatatcaaggcgcanacttgtatgtaaaaaatttagatgatagcattggtgatgaaaaactaaggagctgttc

SEQ ID NO: 8144 - DNA, 463 bp, Glycine max
gaaaatcatttcctaattattggcctgttttgtgtatatagatgaatagagtttcactaggggatatttacaagagaaaaacgacaaatatgaaaaatatcgtcgaaataaaagtgatgcttttacaaactaaaggtgaatatggaactattactagtgctgaaataatgaaaggatggagatgggaaatcaaagtgttttggatttgtgaattttgagaatgctgatgatgctgctagggctgttgaggctctcaatggcaaaaattttgatgactaagaatggtatgttggaaaagctcagaagaaatctgaaagggagaatgaattgaaacaacgatttgagcagagcatgaaagaagctgctgataaatatcaaggcgcaaacttgtatgtaaaaaatttagatgatagcattggtgatgaaaaacttaaagagctgttcttcccttttggtaccatta

SEQ ID NO: 8145 - DNA, 404 bp, Glycine max
  modified_base (119)..(119): a, c, g, t, unknown, or other
  modified_base (193)..(193): a, c, g, t, unknown, or other
  modified_base (382)..(382): a, c, g, t, unknown, or other
cgtgtcctaactctgaaactctactattctttctcctccgcagaaccttaacaaccaaaaggaagcattacagttcccaatttcacagaaacaccagaattgatcaaaacacataacanaaaaaaagtgaaaatggcgagcgctgtagagaaagagggtggcgcgagagaggaaactttctctttggagcttnctgctccacctggttggaagaagcagttcatcccaaagaaagctggcacccccaagaaaaatgagattgtgttcactgcagcaacaggagaggagatccataacaggaagcagctggaaaaatatttgaaagcacaccctggtggtccagctgtatcagaatttgactggggcactggtgagaccccangaagatctacaagaattagtga

SEQ ID NO: 8146 - DNA, 176 bp, Glycine max
gtcgtcattggacatgtcgactctgggaagtcaactaccactggtcatttgatctacaagctcggaggtatcgacaagcgtgtgactgagaggttccagaaggatgctgcttagatgaacacgaggtcattcaaggatgcctgtgcacttggcaagctcaaagctaaccgcgaaaa

SEQ ID NO: 8147 - DNA, 389 bp, Glycine max
gccaaatcaatcaaattcttcgagttgaacacaggggccaagattccttctctggggtggaggacttggcaagctgaacctggtgtcgtagctgaagctctcaccacagccattcaagtcggatacaggcatatcgactgtgctagtgcgtataccaatcaagcagacattggttctgctcttaagaagcttatcgatgatcgcgtggtcaatcgcagaggacttatggatcactttcaaactctggtgcacaaatcatgcaccaaaagatgtgccaaaagcatcggataaaacattacacgaattgcaacttgactatctcgacctctatctgatccactggccataccgcatgaaaagtacaacatctggactcaatagagaatatc

SEQ ID NO: 8148 - DNA, 299 bp, Glycine max
ctgctatgaaacaagatgtggatgacatgtatccaacaactctttctcacacgatgaagtgggggacaaaaagtcatgcagaatgtgcttgcttttcaccagatgggcagtttcttgtatcatgctcagttgatgggtttattgaggtgtgggattacataagtggaaagctgaagaaagatctacagtaccaggctgatgaagtgttcatgatgcatgatgatgctgtgctttgtgtagactttagcagagattcgaaaatgcttgcatctgggtctcaaaatggaaagattaaagtc

SEQ ID NO: 8149 - DNA, 384 bp, Glycine max
tcaacgccatctccagctgcttccttatcagaagcgcttcgccccagagattctcgcttggtctccttcaatccttcttccaacgctattaattacaaaattaacctctccgcttccctccgatccattcactccctacctcttaaaacctacttgcggatcaaatgctcccaaacagatgggaatggaagtcctgcaaagaggacagtgcttcatgatctttatgagaaagataggcagaatccatggaatgacaatctctgcaaacctgttacagaccttcttcctcttatagcaagtggtgtcagaggcgtcactaggcaccctgcgatttttcagaaagctatctcatcatcgaatgcttacaatgatcaattcaaggaa

SEQ ID NO: 8150 - DNA, 331 bp, Glycine max
  modified_base (288)..(288): a, c, g, t, unknown, or other
ccaagacgaccttaaaattggctaagccaagtctgatgctcttttcaaggccgttgaggctgaccttttggcccatcctgattacaactgatcctcttcatcactattcagtcagcaacgaccttgctttatattatatacaagagttttcttgccttgtgtggagctttatccaatcactgtgtgtggtgtgtgcttaagttaaaaacttgccttgcaattaatgtcacgagtgattcctttctcattcacttgtgccacagaattgtgagagtcagtggatatctntgtatgtgacttcaataaattttaataaaagaaagcatcattt

SEQ ID NO: 8151 - DNA, 393 bp, Glycine max
cccacgcgtccggcggcatgcaaatctttttcaaaacccttactggcaaaacaatcacgggagaggtggagtccttcgacacaatcgataacgtgaaagccaagattcaagataaggaagggattcctccggatcaacaacgtttgatcttcgccggaaaacaactcgaagacggcagaaccctcgccgattacaatatccagaaagaatcgactctgcatttggtgcttcgtctccgcggagggatgcagatcttcgtgaaaaccctaaccggcaaaacgattactctagaggtagagtcctctgacacaatcgataacgtgaaagcgaagatccaggataaggaaggtattccaccggatcagcaacgtcttatcttcgccggaaagcacc

SEQ ID NO: 8152 - DNA, 305 bp, Glycine max
cccacgcgtccgattcttccatttccattaaaaagaaaatatcataaatgggtgttttcagattcgaggacgaaatcacctcccctgtggctcctgctactctttacaaagctctagttacagatgccgacaacatcatcccaaaggctcttgattccttcaagagtgttgaaaacgttgagggaaatggtggccctggaacaatcaagaagataactttcgttgaagatggagaaaccaagtttgtactgcacaagatagaagcagttgatgaggcaaacttgtgatatagctacaagcgtatg

SEQ ID NO: 8153 - DNA, 298 bp, Glycine max
ctcgtcctccgccttcgcggtggcatgcaaatcttcgtcaaaaccctaaccggtaaaacgagtacgctagaggtcgagtcctctgacaccatcgataacgtgaaagctaagatccaggacaaggaaggcattccaccagaccagcagcgcttgatcttcgccggaaaacagctcgaagacggcagaaccctcgccgattacaatattcagaaagaatcgacgcttcatctggtgcttcgactccgcggagggatgcagatcttcgtgaagacgctcaccgggaaaactattactctgg

SEQ ID NO: 8154 - DNA, 433 bp, Glycine max
gccgcggatattcaaccccttgtttgcgacaatggaactggaatggtcaaggcaggattggctggtgacgatgctcctagggctgtctttcccagtattgttggccgacctcgacatactggtgttatggttgggatgggtcaaaaggatgcctatgttggtgatgaagcccaatccaaaagaggtattcttactctcaagtatcccattgagcatggtatagtcagcaactgggatgacatggaaaagatctggcatcacacattctataatgaacttcatgttgctcccgatgagcacccagtgcttctcactgaggcccccctcaacccacaggccaacagagaaaagatgacccaaatcatgtctgagaccttcaatgtgcctgccatgtatgtggccatccagactgttctctccttgtatgcgagtg

SEQ ID NO: 8155 - DNA, 250 bp, Glycine max
cccacgcgtccgatatattccattctctctgtgtatttccctacctctcccttcgggatgcagatcttcgtcaagaccctcaccggcaagaccatcacccttgaggtggaaagctctgacaccatcgacaacgtcaaggccaagatccaggacaaggaaggaatccccccggaccagcaacgtctcattttcgaccgaaagcaacttgaggacggacgtacccttgctgactacaacattcagaaggaga

SEQ ID NO: 8156 - DNA, 441 bp, Glycine max
  modified_base (364)..(364): a, c, g, t, unknown, or other
ctctctctctctgtctctctctctctagacttagattttgtgaatggctgaagtggaagagggacaggtcatcggcgtccacaccgttgatgagtggaagctgcaactccagaatgcaaaagactccaaaaaactgattgtggtggattttactgcttcctggtgtggtccatgccgttttatggccccagttcttgcagagattgcaaagaaaactcctgaattgatcttcctcaaagtggatgtggatgaagtgaggcctgttgctgaggaatattccattgaagccatgccaaccttcctcttcttgaaagaatgcgagatcgtggacaaagtggttggtgctagtaaagatgaccttcangccaccatagccaagcatgcatctgcttgtgctgctgcttcttcttcttgaagtgaagtatcataatatgaaagaag

SEQ ID NO: 8157 - DNA, 412 bp, Glycine max
cccacgcgttcgcaggcttattatctggctctgctcttcccaattgagaaggcccccactaagagaattgcaagtgtaaatggtggggtgaagatatctgaactgttgaagtatccggttagaggctttgtctttgagggcggcgaaatgctggaagatctatcaaacgttgtttcagatgcatgtatatgtcttcacaacaacaacatacctttcaatgttcttatctctgactgtggaaagcaagtgtatctgttaccacagtgttatgcacagaaacaagctcttggagaagtgaatgctgagcttcttgacacccaagtgaatcctgctgtgtgggaaattagtggacacatggttttaaagaagaagaaggattatgatgacgcgtctgtaagcaatgcttggaagc

SEQ ID NO: 8158 - DNA, 295 bp, Glycine max
ctacaaattttcaatttttcaatggcgtctttgcttcaaaaagaggatcgagctgatgggggtgcgaaagttgctgcgaaagaactcgaacaactcaaccgagaaaaagaccgtgatttcagtgttggtgttgcagaccaacaccaacaagaataacatcagttagatcaacaaaagccttgtgtaatccgatccatgttcaatgcggtgcaagacacctactagaacgccaaggaagctgtcgttggcaagaaagaaccttcgactacgactaactcgtacagtaccatagagg

SEQ ID NO: 8159 - DNA, 439 bp, Glycine max
  modified_base (393)..(393): a, c, g, t, unknown, or other
aaaaaatgaaatgaatcatttcatattgattgtattgctatgcttagtccccaagggacgagatttcgttaacaacatagaggaagaatgaaaggaatatcctatcgagggaatcatatttgcttcggaagatatgctcttcaagcacttgagccagcttggataacatctagacaaatagaagcgggacggcgggcaatgtcacgaaatgttcgccgaggtggacaaatatgggtacgcatatttccagacaaaccggttacagtaagacctactgaaacacgtatgggttcaggaaaaggttctcccgaatattgggtagctgtcgttaaacctgggaaaatactttatgaaatgggtggggtaccagataatatagcaagaaaggctatntcaatagcatcatccaaaatgcctatacgaactcaattcattattt

SEQ ID NO: 8160 - DNA, 424 bp, Glycine max
cggacgcgtggcgtggatgtctctgttgtttacctcacagtgaggctggagaaagaagcgtcctacgatgaaattaaaaatgctatcaaggaggaatcagagggcaagttgaagggaattcttggttacactgaagatgatgtggtctccactgactttatcggcgatagcagatcaagtatttttgatgcaaaggctggaattgcattgaataagaactttgtgaagcttgtttcttggtacgacaacgagtggggatacagctcacgtgtcattgatcttcttgtattcgttgccaagaagtctctttaaggtgttacttcaaagtagcttgtcttcacattattaccgtatgtttatgtttagctgcgatttagtgtcttgctcgagcaaaaaatgagaggtctgaataaatcggcttctg

SEQ ID NO: 8161 - DNA, 449 bp, Glycine max
  modified_base (311)..(311): a, c, g, t, unknown, or other
gtagaaaagaaggcattaggttaagagtgatggcagtgagcgaaagagagcatagtggtgcgttactgagtgcttacagttgctgcgtcgcaaggtaccggcggcgacggagaactatcttctcaattttcgatcactgcattggttctgttgtcaagggttttgttcttcctgacttgcatacttgatggcttcaaagttgcagaagttgcaggccacagcatctcaagcgtctcaatttgtatgcagtcgtggaactaactactacaagcaattgctggaacagaacaagcaacacattcaggagcctnctacagtagagaaatgcaacctgttggcaaagcaattgttttacactcgccttgctagtattccgagtcgtaatgagtccttttggaaggaacttgattatgccaagaatttgtggaagaacaggaaagagcttaagg

SEQ ID NO: 8162 - DNA, 450 bp, Glycine max
  modified_base (442)..(442): a, c, g, t, unknown, or other
gttttgttagttcacacactaagttctgaaaaatgagttccaaagtttttcttattctacgtatgttcatggccactatacttttgatctcctctgaggttgcacccgatgatgcataccagaattttgacaaaacagatgggaagcgtagtgcaaatggggtagatgaaagcaaatattggcgtggtggctatggcgactatggtggttggcgtggtggtggttggcgtggtggctatggaggctggcgtggtggctatggtggtgggcgtggtggctatggtggctggcgtggtggctatggtggtgggcgtggtggctacggaagttggggtggtggctttggccctaacgaacataatgaggctgggattgatgctagccctcacaactaagaaagaaacttgctaaagcttatataggatttaagttatcgtaatanataaaact

SEQ ID NO: 8163 - DNA, 435 bp, Glycine max
  modified_base (392)..(392): a, c, g, t, unknown, or other
  modified_base (412)..(412): a, c, g, t, unknown, or other
tagatctctgtgaagtcgctttataacacttaacctaagatgcagaacgaggaaggacagatcaccgagctttacattcctaggaagtgctctgccacaaaccgattgattaccgctaaggaccatgcttcggttcaggttaacattgggcatgtggatgagaatggcgtctacaatggccatttctccacttttgctctctgcggcttcatacgtgctcagggtgatgctgacagtgccctagatcgcttgtggcagaagaagaaagttgaagttaagcaacagtagacacccatgatagtttgttactttgctatgtattaatttctacgcttgctagagatatttgagtactatgattgtcgtcttgagcaaatactcattctaaattntcgttggtatttggtaccgncagctaaatttgcttttttgacc

SEQ ID NO: 8164 - DNA, 421 bp, Glycine max
ctcgggaagctgctttcagaaacatctatacaattgctgaatgcttggccggggaacgtattaatgcagccaaaggttcatccaatagttatgctatcaagaaaaaggatgaaattgagagagttgccaaggctaatcgttaagccaacccaacaaccagtattgtggccagaaagatttcgacctttgtacttcatttatttaaattttgaatattgtgtattacttttgatgaatttagttaatttttagttcgcgtaaggattttacatgaacgatttatttagttaatttagtttgcgtaaggattttacatgaacgatttattcagttaatttagtttgcgtaaggattttacatgaacgatttatttagttaatttttagtttgcgtaagtattttacatgaacgatttttgttc

SEQ ID NO: 8165 - DNA, 435 bp, Glycine max
gcaccgtggtcctgactggagtgggctccaccaatatggtgataactattgggctcagcaacggttagccatagttgatccagcttctggtgatcaacccctcttcaatgaagacaaaactgttgttgttacggtgaatggagagatctacaatcatgaagaactcaggaaacaattgcctaatcacaccttccgtacaggaagtgattgtgatgttattgctcacctgtatgaggagcacggagaaaactttatggacatgcttgatggtatattttcatttgttctgctggatactcgtgacaacagttttatagtggcacgggatgcaattggggtcacttccttgtacattggttggggtttagatggctctgtctggatttcctctgaattgaaggggttgaatgatgattgccaacattttgagtcttt

SEQ ID NO: 8166 - DNA, 423 bp, Glycine max
ctcgagtacgcgtccgctcattgcttctctcatgttacaatcttcttgccgctgagctccctttctggtacgtgcacagagacaaaatgtacgacaggtgccaacagttcatcacgaaagaaaggactagctgagccgagatcactaactaaaacgaatctaatactaatcgaatatactaatagaatagaaatagaactgtcttttcatatagatatcccttcaacacatcataggtcatcgaaaggatctcgaagacccaccaacgcacgaaagccgggatctttcagaaaatggattcctattcgaagggtgcataaccgcatggataagctcacactaacccgtcaatttgggatccaattcggatccttaggaggtatcgggaaggaattttggaatgtaataatatcgattcataca

SEQ ID NO: 8167 - DNA, 432 bp, Glycine max
cacgcgtccgcagacactaagctctgaaatatgagtttcaaagtttttcttattctactggtgttcagtgccactatacttttgatctcctctgaggttgcacccgatgatgcataccagaattttgacaaaacagatgggaagcgtagtgcaaatggggtagatgaaagcaaatattggcgtggtggctatggcgactatggtggttggcgtggtggtggttggcgtggtggctatggaggctggcgtggtggctatggtggtgggcgtggtggctatggtggctggcgtggtggctatggtggtgggcgtggtggctacggaggttggtgtggtggctttggccctaacgaacataatgaagctgggattgatgctagccctcacaactaagaaggaaacttgctaaagcttatataggatttaaggtat

SEQ ID NO: 8168 - DNA, 297 bp, Glycine max
acggccacgcgtccgtccacgcgtccggcgagtgaccgttagcgaacaagtaccgctagggagagatgagaaggactttgaaaagagagtcatagagtgcttgaaattgtcgggagggaagcggatgggggccggcgatgtgtcccggtcggatgtggaacggcgagagcctttccgccgatcgactcgggacattgaccgacgcggattgcgatggtggcccaagcccggtctgttgatatgctcatggagacgtaattatcgcgattgtggatggcagcgcgcgcccttggcgtg

SEQ ID NO: 8169 - DNA, 452 bp, Glycine max
  modified_base (88)..(88): a, c, g, t, unknown, or other
  modified_base (305)..(305): a, c, g, t, unknown, or other
gatctctctctatctgggatctgcttccttctcttctctttctcaattctcattcataatgctaattcattcctccgatctgcgactntctatttctccctcaacacaacacgagacaacatgttcctctttgactggttctatggcattctcgcttccctcggtctctggcagaaagaagccaaaattctcttccttggtctcgataatgccggcaaaaccaccctccttcacatgctcaaagacgagagattagttcagcaccagccgacccagcaccccacttcggaggaattgagcattgngaagatcaagtttaaggctttcgatttggggggccatcaagttgctcgcagggtctggaaagactattatgccaaggtggatgctgttgtgtacctggttgacgcctttgacaaagagaggttcgcagaatctaagaaggagctcga

SEQ ID NO: 8170 - DNA, 419 bp, Glycine max
aaataaaaaaaaaatctgcttactttctattcaatatatcaattataattacataatggtagtgtcattacctacgatctgcgactttctaatttctacctcaacacaacacgagacaacatgttcctctttgactggttctatggcattctcgcttccctcggtctctggcagaaagaagccaaaattctcttccttggtctcgataatgccggcaaaaccaccctccttcacatgctcaaagacgagagattagttcagcaccagccgacccagcaccccacttctgaggaattgagcattgtgaagatcaagtttaaggctttcgatttggggggccatcaagttgctcccaaggtctggaaagactattatgccaatgtggatgctcgtgtgtacctgggtgacgcctttgacaa

SEQ ID NO: 8171 - DNA, 421 bp, Glycine max
gccaccatctgttggtcctcgtgtgccaatgtatcccccaggtggtccaggtattggtgaacaattattttatagccaaggccctcctgctatcattccttcccaggtaatctcttctactctgtctatacttagacttcaatcagtgcaatcttgaatggtgcttgatgttattcctctgattttgctccatggagtaatttcctaatcattctcctttctgtccatgaaatttttttctcagcctggatttggctatcaacaacaacttatgcctggtatgaggccaggtgcagctcctgtgccgaattttttcgtgccaatggttcagcagggacaacagggacagcgtccctgtggaaggcgtccaggtgcagttcagcagtcccagcagccagttcctatgatgccacagcagatg

SEQ ID NO: 8172 - DNA, 436 bp, Glycine max
  modified_base (288)..(288): a, c, g, t, unknown, or other
  modified_base (380)..(380): a, c, g, t, unknown, or other
ggagcaatgatgtttatcttccaagagatgaggcttttggacacttgaagtcatctgactttcttacttatggactaaaatccgtatctcaaaatgttcttccattattgcaatctgcttttgatttgaatttcacaccccgtgagtttgatagctttgatgaagttcatggactctattcaggcggaattaagctgccaacagatataatcagcaagattagtccactacccgtgcttaaggaaatcttccgaactgatggtgaacaggcccttaagtttcctcctnctaaagtaattcaagtgagtaagtctgcatggatgactgatgaagaatttgcaagagaaatgcttgctggtgtaaatccaaacttgattcgntgtcttaaggatttcccttcacgaagcatgctatatagccaagtctatggtgatca

SEQ ID NO: 8173 - DNA, 430 bp, Glycine max
ctgaactcttggttcactctgtcttgatgtcttccattttatgcttttctgatatggctcttcaaccactacattcactttattggcctagacccaaccaccaaagcaccaagagaccttaggtgaaccttttctctctagctctgtttgcagaaattcaagcgcaggaatggaggttgcaacaaacacaaccgcgaccacgtcaaattcattcgatgctctaactgtggaaaatgctgccctaaggacaaggctattaagaggtttctggtgaggaacattgttgaacaggctgcagtcagagatgtgttggaagcctgtgtctatgagcataattttcttctttaccttctctcttttttttgaggaaaatttcacatgtgtttatgttatttatttagtttttaattgctatttacagaatatactc

SEQ ID NO: 8174 - DNA, 373 bp, Glycine max
aacgccatctccagctgctgccttatcagaagcgcttcgccccagagattctcgcttagtctgcttcaatccttatgccaacgctatcaattacaaaattgacctctccgcttgcctccgatccattcactccctgcctattaaaacctacttgcggatcaaatgctcccaaacagatgggaatggaagtcctgctaagaggacagcgcttcatgatctttatgagaaagaagggcagagtccatggtatgataatctctgcagacctgttacagagcttgttcctgttatagcacgtggtgtcagaggcgtcactagcaaccctgcgatttttcagaaagctatctcatcatcgaatgcttacaatgatcag

SEQ ID NO: 8175 - DNA, 441 bp, Glycine max
gcctcacaaaagcaaagatcaaacaaaccaaggacgagaacacgatgttgcttgaacttgcacttggtttattggttttggctctgtttctgcacttgcgtcccacacccactgcaaaatcaaaagcacttcgccatctcccaaacccaccaagcccaaagcctcgtcttcccttcataggacaccttcatctcttaaaagacaaacttctccactacgcactcatcgacctctccaaaaaacatggtcccttattctctctctactttggctccatgccaaccgttgttgccttcacaccagaattgttcaagctcttcctccatacgcacgaggcaacttccttcaacacaaggttccaaacctcagccataagacgcctcacctatgatagctcagtggccatggttcccttcggaccttactggaagttcgtgagga

SEQ ID NO: 8176 - DNA, 432 bp, Glycine max
caagattacaggcatatggatggttttggagttaacacatatacgctgatcaacaaggctgggaaagcagtgtatgtgaaatttcactggaagaccactagtggtataaagtgtctattggaggaagaggccattaaggtgggaggagccaaccacagccatgccactcaagacctccatgattcaattgctgctggtaactatcctgagtggaaactgtttgttcagacaatagatcctgagcacgaagacaaatttgactttgaccctcttgatgttactaagacttggcctgaggacattatacccttgcagcctgttggtcgcttggtcctgaataagaacatagataatttctttgctgagaatgaacaacttgcattttgccctgccattgtggttcctggtgtatactactcagatgataagatg

SEQ ID NO: 8177 - DNA, 431 bp, Glycine max
  modified_base (224)..(224): a, c, g, t, unknown, or other
  modified_base (306)..(306): a, c, g, t, unknown, or other
tcgcaaaaacgcattaattaagtgcctgttgggaattgggtgagccaaagagagaggaagagaagaagaaggaggagaagaaggagctttggatttcaactttttccgttcctcgagaccggtggtgtgcttgttgctcttcaaacaaatctgacatggatttactaagatttgtccatgttcttgcgttctaaggtgacctgggattgaatctaaaagatctngatttacattttgagatatgggaggagtttgttctggacaaattgctaccagtatcgggtttttgcattccaagaagtgctngattggcgagttttcatccttggagattttcttcgggtttcctttggtaattgcacttaaggttctgctccgctttaatgatcagcacaaggtacgtgatgctacattcttctgatacaggtgct

SEQ ID NO: 8178 - DNA, 430 bp, Glycine max
gttggagttaaccagaaaaatttaggtagagccggatctaaatgttggctaggtaagggtactgtactaagaggagtagttatgaaccccgtagaccatccgcatggaggtggtgaatggagggccccaattggtagaaaaaaacccgcaactccttggggttttgctgcacttggaagaagaagtagataaaggaagatatatagtgataattcgattcttcgtcgtcgtactaaatagtagagaaaatagaaattgattcttagtctttacaagaaataggagtaattaactgtgacacgttcactaaaaaaaaatccttttgtagcgaatcatttattaagaaaaattagtaaacttaacacaatagcggtgaatgatataataataacttggtccagagcatctaccattatacctacaatgattg

SEQ ID NO: 8179 - DNA, 396 bp, Glycine max
gctagccaatcaaacactcaatcacttcacgatttcacagttaaagatgccaggggagataatgttaatctcgccgactacaaaggaaaggtccttctcattgtcaatgttgcctcacaatgcggcttgactaattaatactacacagagcttaaccaattgtatgagaaatacaaacggaaaggacttgaaattctggcattcccatgcaatcagtttggggctcaggatccagtaactaatgaagagattgtggagtttgcttgtactcgcttcaaagctgagttacccattctcgacaaggcggatgtgaatggtgacaatgctgctccactgtacatgtttctgaaatcaagcacatgtggactctgtggggatagtatcaaatggaacttc

SEQ ID NO: 8180 - DNA, 434 bp, Glycine max
cccacgcgtccgggaactaccaaaagccgaacgtcgcacaaaaaccccaaacgtagcaggcattgagttttgtttgctttgaaacatcgtgtgcacagtaccccagaagatcgaacaaggatctccacaaagacaaaccccagttctcaactgtgttttacctctctctcacctactttcagaccatacccagggtttttgctttttctttttaaattagtttcagtgacattaacgaggctgagaagatgcagcagacaccgccaatgattcctatgatgccttctttcccacctacgaacataaccaccgagcagattcaaaaataccttgatgagaacaagaagctgattctggcaatattggacaatcaaaatcttggaaaacttgcagaatgtgcccagtaccaagctcagcttcaaaagaatttgatg

SEQ ID NO: 8181 - DNA, 397 bp, Glycine max
ggtgataacaggtctagcatatttgacgccaaggccggaatttctttgaatgaaaactgtgtaaaacttgtttcctggtatgacaacgaatggggttacagttcccgtgtgattgatttaattgcccacattgcatccgtggcttaaacagttgaggctgatcttggatatcatcgctaaaccgttccaaatttttatcttaatcgagtttattttagtgtgaattcggaataaacacgtgttgctgtgtgtgatatcattgaaaaacacagtgcaatatttgtatttatatttttgagtttgatagacggccttaggtttttcctcctcttgtaagggacggttgactattctgtttcgtcatcacaatcataatataagcaacattttgttttcc

SEQ ID NO: 8182 - DNA, 439 bp, Glycine max
  modified_base (337)..(337): a, c, g, t, unknown, or other
cccacgcgtccggcctcgaagagatcaaaaacgagaacgtcgatctggaacggattccaatagaagaagtgtttgagcagctgaaatgttcaagagcaggtctaacatcagaggaagggggcaatcggcttcaagtctttggaccaaacaaattggaagagaaaaaagagagcaagtttttgaagttcttgggttttatgtggaaccccttgtcttgggttatggaagctgctgctataatggccattgctttggcaaatggaagaggaaggccaccagattggcaggactttgtcggaattatcgcgctgctagtgatcaactccacaattagttntattgaggaaaacaatgctggcaatgctgctgctgctcttatggctggtttggctcccaagactaaggtactaagggataaccgatggagtgaacaagatgc

SEQ ID NO: 8183 - DNA, 319 bp, Glycine max
tgtttgctgttgtaactcgttcttcttcttttgttgttctgtgtttgtgtttgatttggctctcacctgaaaatgtctagctgcggtggtaactgtggttgcagaagctcctgcaagtgcggcaacggctgcagaggctgcaagatgcacccagtcttgagctacactgagtcaaccaccatcgagaccttggtcatgggagtggcacctgttaaggctcaattagagggtgctgaaatgggtgatcccgctgagaacgatggctgcaaatgtggaccatactgctcctgcaaccactgcacttgcaagtgaggtgttg

SEQ ID NO: 8184 - DNA, 414 bp, Glycine max
  modified_base (376)..(376): a, c, g, t, unknown, or other
taccattaaaggtgacaatccagatgcagtggtttctggattgatggctgctggggaaacggcctgtgcatcagtccatggtgccaataggcttggtgcaaattcacttctcgatattgttgtttttggtagagcttgtgcaaatagagttgcagaaatccgtagaccaggagagaaacaaaagcctctagagaaggatgctggtcagagaacaattgcatggctggacaaattgagaaattcaaatggctcattgccaacttcacaaattcggttgaatatgcaacgagtaatgcaaaacaatgctgctgtgtttcgtacacaagaaacattagaagaaggttgtcaattaattgataaaacatgggagagcttncatgatgtccaggtgaaggaccgcagtttaatctggaa

SEQ ID NO: 8185 - DNA, 410 bp, Glycine max
aaaaatggaatcatcggagatcgaagacaggaagccggagattctgaaaagcggaggaggttgtcttctgccgccggttccgccgccgcaagcgaaggcggcggtgaagacggattacatgtacttcgacccgtcggattcaatcccgaagctgcacacggactcgagctgttcggagcacgtggtatcgccggaattcgcgagcgaggtgcagagcgagccaaagtggaaggagtgggagaaaagcctcgagtttccgtttaattacgtggatgccactctgaacaacagcaacagcttcacgacgcaattccagggcaataatcagatgatgtcgccgctgcaagacatgttcatgtactggcccaacaagcccttctgaacaaaccgatccaacgccgccattcgca

SEQ ID NO: 8186 - DNA, 387 bp, Glycine max
cccacgcgtccggttgcacagaacacaaaagactatgctgcagagaaggctaaagaaggaaaagatgctactgtgaataagatgggagagtataaagattatacggcggagaaggctaaagaggggaaagatacgacgttggggaagcttggggagctgaaggactctgcggctgatgcggcgaagagggcagtgggttacttgagcggcaagacagaggaaaccaaagagaaagtctcggagacggcagaggcgacggctaataaggcggcggagatgaaggaggccaccagggagaaggctgccgggactgcggaggcggccaagaacaaggccgcagaggtaaaggacagagctgcagaaaccgcggaggcggccaagaacaag

SEQ ID NO: 8187 - DNA, 410 bp, Glycine max
cccacgcgtccgcggacgcgtgggtgccattctcatcctcctctgtctctctctctcgaccattgccatggatccttacaagctccggccatccagcgccttcaattctcccttctggactacaaattctggtgctcctgtttggaacaacaactcctctttaaccgttggagctagaggtccaattctgcttgaggattatcatcttgtggagaagcttgcaaactttgacagggaacgtatcccagaacgtgttgtccatgccaggggagctagtgcaaagggtttctttgaggtcacacatgacatttctcacctgacatgtgcagatttccttcgagcccctggagttcagacgcctgtaattgttcgtttctcaactgtcattcatgagcgtggtagccctgaaa

SEQ ID NO: 8188 - DNA, 301 bp, Glycine max
gtgaactcttgagggtcgtggtagtttggcaaccacacttatcttcatcaatagtcgcggaaacagtttccggtgcatctcatgcgcttcctaaatgaacgacgcatatgtctcgaagcatatccagcatattgtgcgtgtcatccgccacgaatcttatgagaaagccatcgagatctctgtatctgtcgaagaggatttcaatatcgagaagctgcatttggtcgaagccgaagagcagaagatcaggcgagaatacgaacgcaaagagcgccaagtcaaaattcgcaagaagattgag

SEQ ID NO: 8189 - DNA, 417 bp, Glycine max
gttcattctctatgcgcagttccctacctctcctttcaagatgcagatcttcgtcaagacccttaccggacagaccatcacccttgaggtggaaagctctgacaccatcgacaacgtcaaggccaagatccaggacaaggaaggaattccctcggatcagcaacgtctcatcttcgccggaaagcagctcgaggacagccgtaccctcgccgactacaacatccagaaggagtcaacccttcaccttgtccttcgtctccgtggtggcatgcagatcttcgtcaagactctcactggcaaaaccataaccctagaggtcgaaagctctgacaccattgacaacgtcaaggccaagatccaggacaaggagggaatccccccagaccagcaacgtctcatcttcgccggaaagcaact

SEQ ID NO: 8190 - DNA, 449 bp, Glycine max
actactacaagtacttccttacaatcaaaaccaacaacaactatggcaagttatcaaaagcagtacgatgatcagggtcgcaaggttgacgagtatggcaacgttgagaagcaaaccgacgaatacggcaaccctgttcatgctgctagtgtcacctatgtagccaccagaactgctgctggtggttacagtgatgacattaataagcaacatgataccaccaatgcctacggcgtagacactggtagacagcattctagtggtggctacgatggtgacactaataaacatcatggaactactggtggctataatgatgacaccaatagacatcatggaactaccggtgtctatggtatagacaccgataggcaacaacatgggactactggtggctatgccggtgacactggtaggcaacatgggaacatcggtggcccttactatgg

SEQ ID NO: 8191 - DNA, 410 bp, Glycine max
gagaattttgtcaaaatagatgggaagcctagtgcagatggggtagatgaaagcaagtattggcgtggcggctatggtggcggctatggtggtggttatggaggtgggcgtggaggctatggaagtgggcgtggaggctatggagggggacgtggtggatatggcggcggacgaagtggctatggtggcgggcgtggtggctatggcagcaggcgtagtggcgggcgtggtggctatggtcctaatgaacataacgaggctggggttgatgctaaccctcacaactaagaaggcaactttctaaagcttatatatgggtttaagttatcgcaataaataaaacttcatgagaaggttagttgtaatagaagtggaaaactgtgtaaaggaataatacctttcatgaattt

SEQ ID NO: 8192 - DNA, 441 bp, Glycine max
cttcaagattcaggtactgcgtttcggaagcagacacagatggctcgtacgaagcaaaccgctcgtaagtccacaggaggaaaggctcctaggaagcagcttgcaaccaaggctgcacgtaagtctgcaccaactactggtggtgtgaagaagccccaccgttatcgtcctggtaccgttgctcttcgtgagattaggaaataccagaagagtaccgagcttttgatccggaagctccccttccagaggctggttcgtgaaattgctcaggacttcaagactgatctgcgtttccagagccacgccgtgcttgcattgcaagaagctgctgaggcataccttgttgggctctttgaggacactaacctgtgtgccattcacgccaagcgtgtaaccattatgcccaaggatattcagctggcaagaaggattcgtggtgag

SEQ ID NO: 8193 - DNA, 431 bp, Glycine max
acaataaattattggaccgttaaaatcagcttacagctcactaaggttttgtcctcaagccaaataattgaggagtaagactatgaatatcaggaatagtttatttaataaaagaatttgtgtttgatttttaatctagtaaagtaagagaaacttgtgatttcttacacaggataacacttttgatttaattttgagataaaagtgatacgtgtagatctaggaagaggcgttgcctatttaaagaagctaaccctccacaaggaattaaggtgcaagagtttgttgtgagctataagctagtttatcgtgaggagaatatgaagttgtttgttttctttgttgctgcagtagttttggtagcatggccatgccatggcgcaggctaccaaaggttccctctccgaatgaaaactggctatggtgagcat

SEQ ID NO: 8194 - DNA, 400 bp, Glycine max
gttattgtacaggattggcttcctacggagagaaagagtggtacttcttttcaccacgggaccggaaatacccgaacggttccaggccgaaccgggcggcgggaaccggttactggaaggcaaccggggcggataagcccattggccaccccaaaccggttgggataaaaaaagctttggtgttttacgcagggaaagctccgaaaggggacaagagcaattggatcatgcacgagtatcgtctcgccgatgtagatcgctccgttcgcaaaaagaacagcctaaggttagatgattgggtgctttgccgtatttacaacaagaagggcacgatcgagaagttccaaccaagcagcgatgttgttgttagccgaaaaatggaatcatcggagatcgaaga

SEQ ID NO: 8195 - DNA, 465 bp, Glycine max
gaatttgggggtagtcgtacgcgtgcttgcgtctgctccaggtgcttccttacattcaaaaccaacaacaactatggcaggttatcaaaagcactacgatgatcagggtcgcaaggttgacgagtatggcaacgttgagaagcaaaccgacgaatacggcaaccctgttcatgctgctagtgtcacctatgtagccaccagaactgctgctggtggttacagtgatgacattaataagcaacatgataccaccaatgcctacggcgtagacactggtagacagcattctagtggtggctacgatggtgacactaataaacatcatggaactactggtggctataatgatgacaccaatagacatcatggaactaccggtgtctatggtatagacaccgataggcaacaacatgggactactggtggctattgccgtgacactggtaggcaacatgggaacatcgg

SEQ ID NO: 8196 - DNA, 395 bp, Glycine max
cccacgcgtccgcgaggacggacgtacccttgctgactacaacatccagaaggagtcaacggtccacttggtgttgcgtcttcgtggtggtatgcagatcttcgtcaagacccttacgggtaagactattaccctcgaggtggagagctccgacaccattgacaatgtgaaggcgaagatccaggacaaggaaggaatcccaccggaccagcagaggcttatttttgctggcaaacagcttgaggatggaaggaccctcgctgactacaacatccagaaggagtcaactctgcacttggtgttgcgtcttcgtggggggttttaagctggagctgatttctgtgtgatgttcgatgttggattttcccaaacattttaagaagaaatgtgatgtg

SEQ ID NO: 8197 - DNA, 394 bp, Glycine max
acgaaaccctaggttttagtgagtggctaaaatggcggtgattttttcaagtgcaataccaggaggggcagcaccagcagcaatcgagcaagtgcagtgcttcgggcggaagaagacggcggtggcagtgacctactgcaagcgcggccgaggcctcattaagatcaacggctgcccgatcgagctggtggagccggagatcctccgcttcaaggccttcgagccaatcctcctcctcggtcgccaccgcttcgccggcgtggacatgcgcatccgcgtgaagggcggcggtcacacctcccagatatacgccatcaggcagagcatagccaaggctctcgtcgcttactaccagaagtacgtcgacgagcagtccaagaaggagatcaaggac

SEQ ID NO: 8198 - DNA, 345 bp, Glycine max
cgtgatggcaccaaaggcagagaagaagcctgcctagaggaagccttgggaggagaaaaagtcgccggtggaagacaaggttccggcggagaaaaagccaaaggccggaaagaagcttccgaaggagggaggcgccggcggagaaggtaagacgaagaagagaaacaagaagagcgtggagacatacaagatctacatcttcaaggttctgaagcaggttcaccctgacattggtatctcaagcaaggccatgggaatcatgaacagcttcatcaacgacatcttcgagaagcttgcccaggaatcttctagactttgccgctacaacaagaaacccaccatcac

SEQ ID NO: 8199 - DNA, 403 bp, Glycine max
agcccacgcgtccgcccacgcgtccgcacacgcgtccgcccacgcgtccgcccacgcgatccgaagaaaccttatcttggtattttgattggttctgtggagagtttttttttctttggtgtggattttggtttgtgctgtttttggctgggaataacaatggccgatgatggaaacagaagcaattacttccagtccatcttggggttgcagaatgagtgcactgaattggagctaatgaatgcgtataagaaacatgcagagaaatggtacccagatcgttgttcagctagagggaattcagatttagtggaataagctactaaaaaatttcatgaaattccggaagcctattcaattttatctgaagccaacaaagcgttaatgtacgacatgggagtct

SEQ ID NO: 8200 - DNA, 333 bp, Glycine max
agaaaaaaaaaaaaaaaaaaaaaaaaaaaaaaaaaaaaaaaaaaagaaaaaagggcagcagctcaaaaggttccatacttaagtaagcgggcagccgatctaaaggatcatccataatgtcacataaattcaattcaatgagccctccttttatgacatcgaaattgagatcactgtgccatattatttacattattcgccttgcaaaaaatctgcctttcgccatcttaattactatgcagcagagcctcatttctcgaccttccgaacaattgtacaggctgaatgggatcgcccatccaacctgttacgaagcattaatcgcgaatggta

SEQ ID NO: 8201 - DNA, 233 bp, Glycine max
aaaactccagcaggatttgcattgttttcgttgaaataagcaaaagagatcaaaggaagataacgaaaacttgattatattataagatagcaataaaaataagaggtagcggacgcgtgggtttttttttttttttttttttttttttttttttttttttttttttttttttcttttgtttttttttttttttttgtgtctttttttctttttttttcttttttgtttttttt

SEQ ID NO: 8202 - DNA, 419 bp, Glycine max
  modified_base (362)..(362): a, c, g, t, unknown, or other
attcctcgatgccttcctcccccaattccaattgcacaccgacgaaaggcgcaggtggtgaaatcgtgtcaccaaaacgagagctctgcttcggctcacacagaccactcctcaaatccaaaggcatccgctgctgatggaaatggaatcatggaaaaacctgtgtgcagaaattgcttgggaagcggtgctgtgctttgtgatatgtgtggtggcacaggaaaatggaaagctcttaaccggaagcgagctaaagatgtttatgaatttactgagtgtccaaattgttatggtcgaggaaagcttgtctgccctgtttgtttgggaactggttttactaataatacaggtctccctaaggngcctgaaacaacgaaactgcttgataagatttataatggacggctacttccaaactc

SEQ ID NO: 8203 - DNA, 343 bp, Glycine max
ggagaagcgtacttttttggttggttattcattgtcaattgcagacctagcaatctgggcaggtcttgcaggttctggaaagagatgggaaagtctaaggaagtcaaagaaatatccaaatcttgcacgatggttcaattcaatagtggaagaacatggtactgccttaaatgaagtcacatcagtatatgctggcaaaaaaggattgggtgaaccaacagcaaccaagtcaaaagaacagtcagtaaacactgataaagtgaagaaggtgaatggagatgtgtctgagaacaacaaaggaggaagcaaaccttcagcagaaatagatcttccagatgctgaa

SEQ ID NO: 8204 - DNA, 445 bp, Glycine max
agcccaggtttgaattgtgttctatgctaagattttgtgtcattgtcagatatataaggaggggtacaccagatgctggctttgctctttttgaatctgagtctctgaagtggccaggttttgtagagtttgatgatgtaaatgggaaggtattaacatactctgctcaagacagcatatacaaggtatttgacctaaaaaactatacaatgctgtactctatttctgataaaaatgtccaagagattaagatcaggtaatttttcttaccgtgcttgtattatttttacttttagaaaacacttccatccatagatgtgatgttctatggtcaattggtcatgcacaactttctgaaattatatcacattaactattaaatttttaagaatatattagttttttctacattttatagtttctttgggcgatcctggtttctata

SEQ ID NO: 8205 - DNA, 452 bp, Glycine max
ggtttttatatttgatcttcagcagaggattgttcttggtgaacttcagaccccttttattaaatatgttgtctggtctgatgatatggaacatgttgctttactcagcaaacatgccattataatagctagcaagaaacttgtgcaccaatgcactctccatgagactatccgtgtaaaaagtggagcttgggatgaaaatggtgttttcatttatacaacactaaatcacatcaaatactgtcttcccaatggagataatgggataataaagacattggacattccaatttatatcacaaaggtctctggcaacacaatcttctgcttggatagggatggctatgattgcttatcttcagcagaagggctttcctgaggttgcactgcattttgtgaaagatgagaaaattcggttcaatttggctttagagagtgggaacattcaaatt

SEQ ID NO: 8206 - DNA, 324 bp, Glycine max
cttcagcatgatgcacatggggtttaacaacttctctgggaagttccctccagagattgcaagtattcccattgtggtgctaaacatcacaagtaaccagttttcaggtgaaatccccgaagaaattggcaacttgaagtgtttgatgaatcttgacttgtcttgcaacaacttctctgggacgtttccaacaagtttgaacaaattgacagagcttaggaagttcaacatctcatacaaccccgtaatatccggtgtgggtccatcaacacgacagtttgctacctttgagaaagattcatatttaggcaacccctttcggat

SEQ ID NO: 8207 - DNA, 421 bp, Glycine max
gctacttgaaattatatcaaagttaaaggatgaagaaggatgtctcatgggtgtcagtacttcaaatcttataattgccaactctggaaatgatttacctgttattgatcttacaagggtgtcacaggaacttgcataccttgccaatgatgcagatcttgtcatcttagaagggatgggtcgtggaatagaaacaaatctctatgctcaatttaaatgtgattccctcaagatagctatggtaaaacatcctgaagttgcggaatttcttgggtcacgtttgtatgattgcgtgatcaaatatgatgaactttagagcttaaaattaacgctgattctttactttgataaatacctaacactacatttgcaattagtccaggcttattgtttcaactgcatatgcctccaactttccaag

SEQ ID NO: 8208 - DNA, 429 bp, Glycine max
cgtttcttctcttcactctgcccgctgcatcaatggcttcagagaagaaactttcgaacccaatgagggagataaaagtgcagaagctcgtcctcaatatctctgttggcgagagtggagatcgtctcaccagagcctccaaggtgttggaacaacttagtggccaaaccccagtgttttccaaaggttatttctcaataagtttctaaatgggtagtattcagggatgctggtaatgggcatagatctcaaatctgtgttcattgaaacgttttgttgatcattttttgtgattctatcattttcctaaaatatagattgctgctggtgaagtgattttgaagaattcctaaggtttacggtagtttattttagtgtttttaatggagagtttgttttgtttttttaattgtattgtcaacattcaaa

SEQ ID NO: 8209 - DNA, 430 bp, Glycine max
aagagatcagaatcggcatctccacgatgtggatcttgattcttctgttgatgtgcttggggacagtgcacctcctgaatgggcgttgcttctcattggttgcctcattggactcaccactggcctctttgtggcactttttaataaaggggtgcataatacatgaatgggtatgggctggcactccagttgagggtgctgcctggcttcgtattcagagattggctgatacatggcatcgaatccttttaatacctgtcactggaggagtcattgtcggcatgatgtgtggtttactggaaatactggaccaaataaagcaatccacttcctctcaaacacaacgttttgattttcgtgcaggaatctttccaacaataaaggctatccaagctgcagttactttaggtacgggctgttcaatgggccc

SEQ ID NO: 8210 - DNA, 434 bp, Glycine max
tggtgctggagatcctcggcttgcaaattttaggttccgtcaggtacttattgatgagtccactcaagcaactgaacctgagtgcctcatacccttggttcttggagcaaagcaggttgttcttgttggtgatcattgtcagcttggtccagttattatgtgcaagaaagcagcccgtgctgggttagcacagtcactttttgaacgcctagttctacttggtgtcaaaccaattaggttgcaggttcagtaccgtatgcatccatgcctttcagaatttccctcaaacagtttctatgaaggcactctgcaaaatggagtcactgttaatgaaaggaagtcttctggaattgattttccttggccagtgccaaaccgtcccatgtttttctatgttcagatgggacaagaagagataagtgctagtggaacat

SEQ ID NO: 8211 - DNA, 441 bp, Glycine max
  modified_base (241)..(241): a, c, g, t, unknown, or other
gcttgcttgagttgccaactttaagtttgtcaatttccgtgctgcttggttggttgcaattgcaagtgaacaattggctagtgtgtactagttttgaatcacaatggcagaggatgatggttacacgaaagatggaacagtcgattactgtggaaatccagctaataaaaaggaaactggaacctggaaagcctgcccctatatcttaggtaattgttgtgttcgtttaagtccaaggtangatgtgatgtgtatgtactgtgttgtgtgtgaaatatttatcgtttcaagcttctatttgcaggaaacgaatgttgtgagagattggcttaatatgggatgagcacaaacctggtgctttatttcaagaaccggctaaatcagcatagtgctactgcttccaagaatgtctctaattggagtggaacttgctatatcaca

SEQ ID NO: 8212 - DNA, 425 bp, Glycine max
cccaaagcatgttttccaaccagtttttgaatttgcttctgtaagctgtcaaaatgcaaacccgaagtttcgggaagcatctgttactgctttgggtgtcatttcagaaggttgtttggaactcatgaaaagtaagctagaacctgttctccatattgtcctgggagctctgagggacccagaacaaatggtcagaggggcagcttcctttgctttgggtcaatttgctgagcacttacagcctgaaattgtatcccattatgagagtgttcttccctgcattttaaatgctcttgaggatgtatctgatgaagtaaaggagaagtcatactatgcgttggctgctttttgcgagaacatgggtgaagacatccttcctttcttagatcctttgatgggaagactgttgacagctctccaaaata

SEQ ID NO: 8213 - DNA, 379 bp, Glycine max
attcataccttgctccagatcctactattcaagctctgttttagggttcgattccgatcgatccctaaccggcgagcgcgagttccttcgattcgtttcgtttcgacgactaagcttcttctccgtttaggatccgttgatcgattcatcatccatggcggcgatcgaggacttgtcggagctcgccgattcgatgcgccaagccgcggcgctcctcgccgacgaagacgtcgacgaatcctccaccaattctcgaagaccttccactttcctcaacgtcgttgcactcggcaatgttggtgctggtaaatccgcagttctcaacagtttgattggacatcccgttttgcctactggtgagaacggagctactcgaagc

SEQ ID NO: 8214 - DNA, 439 bp, Glycine max
atgcaattgcagggtaacaacaacaaatgaagaggtgcaaaccctaaacacaaacactcacttcaacccacaggtcccacccctccgaaccctctcttcctcgaagcggttcgagggttcctcggagttcgtgaagctcctcatcaaggacttcctcaactcaatctccgacgaccaccaccgcgcctccccctctccctccgtctccgactggtggcgcactgtctccctctacaccgaccagaccggcgccaacatctcccgctccgtctccatcgccggcgagtactccgacctccgctactcccacggcacacacctcacccgcctctccgtgcaggacgtcatcgccaccgccgtccaggccaagcccttccccgtcgaccaccgcaacgggatctacctaatcctcaccgccgaagacgtcaccatggaagac

SEQ ID NO: 8215 - DNA, 443 bp, Glycine max
ggaaatggcaacaaagatggactgttctctgtgctactgagagactatagagcacatgctgctgcatcttgcatgaatcgtttagctaaattgagtgcacgatggattggcaatcatgggttctcaataggcattgatgatgtccaaccaaaagagattctgattaacaagaaagatgaaacaatttcagaaggttatagggaatgtgataaacacatagaagctttcaataagggaaaactagaactcttagctggttgtgatgctgcgcagacattagagactcggattactggggtattaaatggacttcgtgatacggcagggaaggtctgcatgcaaaccctacactggagaaatagtccattgatcatgtcacaatgtggctccaaaggatcttctattaatatcagtcaaatggttgcctgtgttggtcaacaatc

SEQ ID NO: 8216 - DNA, 133 bp, Glycine max
gttcactttagtttgaaggcaagttttgaaacattgtttgtcatttcagtttcatgatgaagcatatggattaacatgagccctgtttaaactgcacttttattgcaaagaacttgtgaaccccacgttatgc

SEQ ID NO: 8217 - DNA, 440 bp, Glycine max
attttagaatatatgtggggattctattataagtgaagagtgaagcaacagaaaaacttctcatagatcaattctgttctatttttctctgattttcttaaagctgaaagccatttttatctcccctatgactgacttgatttatttgcagcccacagtagacatcaagacagtgttatctcagttaatggacaggttgtcaaattatgctgcctctagtactgaagtattgcccgaatttctgcaagtggaagcatttaccaaattaagcacagcaattggcagggtgatagaagcacaagttgacatgcctattgtgggagcaatagctttgcatgtttctcttcttacatttactctccgtgttcatccagatcgacttgattatgtggaccaagtactgggatcatgtgtcaagaagctttatggaaaaccaaagc

SEQ ID NO: 8218 - DNA, 409 bp, Glycine max
acggtgtctgatgcggttcacttgacttttggttgtggtcttcttacattttcgttatttgttatggctgcgtctaggaagaaagccgatagagagtatacttatgggtataaaaggctagaagtcttgtctgcatttacaaatgccctgtttcttttgtttatgtcattctccctagcagttgaggcacttcatgcattcatacaagatgaatcagagcacaagcattacttgattgtttctgcagtgaccaatttatttgtgaatcttgttggtgtatggttcttcagaaactatgctcggattaatctcacttacagaaatgcagaagatatgaataatcactctgttttcctgcatgttgttgcagattccattcgcagtgcaggtctgatattggcatcctggt

SEQ ID NO: 8219 - DNA, 389 bp, Glycine max
  modified_base (313)..(313): a, c, g, t, unknown, or other
agggaaaaggtgggaaccacttttggaagtccattgggcttggatttaagactcccaaggaatccattaaaggtatctctctcattcactactatctcttataaaatgtttattctatgcaatgtgaatctatcaggttattgttctatgatgaagatccaccttaaagtgtacagaagtatgttcttcattagtgtaggaaatggaatttggtttgggtgggaaggaataaggttgctgcattagagcctaatgaagtagaaacattgttgggcttcccaaggagccacactagaggaggtggaataagtangactgacagaaagtgacccattatcaggtttctctccatttctccttgtctggctactttaagataagtttcgctg

SEQ ID NO: 8220 - DNA, 252 bp, Glycine max
tcttctttttcttttttttctttcttttttttttttttgttctttttttttcttttcttttttttctttctgtttcttcttgtttttctttcttttttttttttttttttttttgtctttttttttttttttttctgtttttttctttttttttttttttttttttttttcttttgtgttttctttcttttttttcttttttttctttttttttttttttttgtttttttgttcgttgtttttttttttttt

SEQ ID NO: 8221 - DNA, 262 bp, Glycine max
gagatcagtcagtgatccccatgtctacgttcaacatatgtgtgcgcagttgtgtctaacctaagtcacatggggagatagtgtggacatgggagatttgtgcccgcagtgttctatctaattcagctatggctgactcggcatagaccatccaactcaagcttggcgaattgtgagatctgcatttcgagcggctctagggtgaagcaagttggcgtccctgcattgcacatgacagcgactattggcctgactgttatgt

SEQ ID NO: 8222 - DNA, 295 bp, Glycine max
cccactcttccgcccacacgtccgttttgcttttgcatgcatcaatcataaaggatgtattctatctaatttctgactaaaattagcttttttatttcatttacatatgttttataaatgtttctaattctataatataatattgtattcattattttttatttattatatcattatttatttttttatatttttttttatatttattttttaattttttttattttatttaatatatatattaaatttttatattttattttattatttttttttatatttatattttttttta

SEQ ID NO: 8223 - DNA, 370 bp, Glycine max
gtgagatacactaagttatcctcataaatacactctaattatgtggcaagatgagtgtctaaccttagtaacattgccacatattgtgttcatttttgaattatgccactaatattttatttattacatttatatcttcttttattttttcttttctttatttcatatcatttatttttatacttttttatttcttttttattaatttattttttttttatttttttttttattttttatatattatttttatttatttttttttttttttattatttaatttattttaatttttagtttgttttttttaatatttattattttatatattttttattttttttattaattttttttttattattttttt

SEQ ID NO: 8224 - DNA, 258 bp, Glycine max
gcgcgatggaaaaggtagctttgtaaggcttgaagttgtcacagcttcactgggcttcggtaactgattttgattatgtgtataaatttatggcttttgatgtatatattttaaacattacatttatcataataaatatttataattatatatttaatattgtatctatattattataattaatattatattttatatatattttttataatattaaatattattatattatattttatattatattataattatatt

SEQ ID NO: 8225 - DNA, 287 bp, Glycine max
cccactcgtcctaaaaaaaaataaaaaaaaaaaaaaaaaaaaaaaaaaaaaaagaaaggaaaaaatataaaaatataaaaaaattaaataatcataaatacaaaataataaaatataaaataatgtaacctaaattaaatataattttcaataattttataacataaaataatagaaaaaccattaacttttacataacttaataacatttttattatatatctatttttttcaatatatcttatttatctaaaaggtttttactaatattctattttcaatatttt

SEQ ID NO: 8226 - DNA, 392 bp, Glycine max
  modified_base (57)..(57): a, c, g, t, unknown, or other
  modified_base (365)..(365): a, c, g, t, unknown, or other
  modified_base (377)..(377): a, c, g, t, unknown, or other
agaatgtatcaatgtttggttcaaacataggtccagataaatcacttgaagtctttntgcatattttacctgctgcttctgaatttgatgaactacctgtgcgtcataatgaggaaaaatacaatgaagcactgtctgagaaagttaaatatccagtggataagaaccgtctagatgaccctcacatcaaagcacttcttctatttcaggctcatttttctcaattggagttaccaattagtgactatgtcacagacttgaaatcagtattagatcagagtatacgcgtaattcaggccatgattgatatttgtgcaaacagtgggtggctttcaagctcaattacttgcatgcatcttctgcanatggtcatgcangggtttgtggtttga

SEQ ID NO: 8227 - DNA, 355 bp, Glycine max
acgcgtccagatgaattgattgtatataggatactctgtccagatgaagttattgggagtgttattgggaagaatgggaaagtgataaattcaataaggcaagaaaccagggcgaaagtcaaggttgtcgatccgtttcctggctccaaggatcgggtaataacgatctactgctatgtcaaggagaaggaagacgttgagattgatgatgagtttgctggtaaagaacctctgtgtgctgctcaagatgctcttctaaaggttcatgtagccattgcgagttccatagcacctattggagattccgagaagaagcgaaaggatagagatgaatgtcaaatccttggttccagca

SEQ ID NO: 8228 - DNA, 233 bp, Glycine max
cacatgtatggttcattatatatatcatacctgaaaagaatgtcaggggtagggagaaactatcaattataaatatcactgtggagagtgcaagggaaagaaggttattgaggatatgacagtccttgaatttattgacgagcacgggatgtagaataggcacaagattacattcactggcgaagttaaggaggctggggagagtagtattggggatatcgtcattgtcatta

SEQ ID NO: 8229 - DNA, 116 bp, Glycine max
aaaaaaaaaaaaaaaaaaaaaaaaaaaaaaaaaaaaaaaagaaaaaaaaaaaaaaaaaaaaaaaaaaaaaaagggaggcaaaagaagagaataaaacaagaaagaaggaaagaaaa

SEQ ID NO: 8230 - DNA, 393 bp, Glycine max
agctaccttacgctctctattgctgctccatgcaggtctaaatccattccctcaggttctggcattctatgacaatccctcagtgttcaagcctcccattgaagaaccacagtctagaaggccccagttgagaagcctcctgtttagaatcctccagttgaaaaccccccagtttagcagcctccagtacagaagccaccaggtgtcaagcccccagttgagatacccctagtttataagctcccagttgagaatccaccagtgtacaagctcccagttgacaatacaccagtgtataagcccccagttgaataacccccagtgtatcagcccccagtatagaaaccatcactgtaaaactcccagttgagaagccccagtttacaagccccc

SEQ ID NO: 8231 - DNA, 445 bp, Glycine max
  modified_base (9)..(9): a, c, g, t, unknown, or other
cgggtcggncacgcgtccgaagtactgaggttcttcattctggctcaggcgttgcgacatccccgtcccactctcttcttcagccttcttggagtctctcacgccagttgcacacacatctactggggctaaggtcggaacgatggctgcctcttaaaaacatgtgcatgacgcatgtactcagacctagtcatagccattctcagcgaattcggcaatggtccaaccccataaacgaaccgtgctggtcactgggaccccacagtcaattcctgcacaatgtacagctctgagttcgaagactgctactgcgaatgtatcaaggtgttgctttcattaggtggtcgcattggatgctacactttggcgtcactacaatacgcatgagtcgtttcaatgttgctgtggaacactttcttgggaggcaagtcatctacttcgccac

SEQ ID NO: 8232 - DNA, 383 bp, Glycine max
cggtcggcccacgcgtccgaacaagcgtatgcccacgcatccgcgcgggcagccgctgcgatctacccaatgcgaccgaaaatgttcgtctgcacctatacacgcaccgggaacagatttagcgcgtagaggcacctccattggcggcaagcaactcgatccgcaatgggaatcgatttgcatgcaggatgtaggtcaactataacgaatccatgcgcccccagatgcgattaaatctacctcaagctgtccgtaaagctgtaccatgttcatggtcagaagactgggagtaacttcaacgctgttgtctccaaacgccattgcatgagcagggtcaacaagccgtcgctgtccctctcgtgattgatccgttacacgattgg

SEQ ID NO: 8233 - DNA, 281 bp, Glycine max
agaaggtatcacagcagcctatgacacgctcagcattggctcgaaatatcttgaatacggtacaacccgtgctgactatcacgtccatagggattctaccctgaagttggagttgcagcttcgtagtggcatgcattctttgtcagaactttgagatggattctccatcactttagttgttgatagttcagatatcaatgaaaagctcaatgcaaatatccaaagacaggagggtattccatcagatcagcagaagcgtatttttgctgggatgcatatgc

SEQ ID NO: 8234 - DNA, 324 bp, Glycine max
accaatatattccttgacatatgttttttctttattggcaaggatagagtcaatgttacagagatattaaaaggttgtgatctgcatgctgaaattggaataacaatcctggttgaaaggagcctcataaagcttgaaaagaataacaagatcaaaatgcacaatttgctacgtgacatgggaagagaaattgttcgtcaaagttctctagaggaacctgagaagcgtagtcgattgtgggttcaccaagaagtgcttgatttgttgttagaacatactggaacaaaagcaattgaaggcttggctttgaagttacaaagaact

SEQ ID NO: 8235 - DNA, 434 bp, Glycine max
  modified_base (294)..(294): a, c, g, t, unknown, or other
accatttaaaggcagcaagaagcagcattcaatgcccaatgctcatgtgcgttcagaactcaaagatatggatcaaattcgaaaggagaggcagacaaaggccaacagggtttcttatataaagagcaagtcgacaaagggtaaaaggtttggtaaaaatggtaaaaaaaggaaaaggcaaatagagtttgtttgaagctctagaaattaattagttaaggagaaaaggcttgccaatgaatttttatattttggagtggtaaggggggggggggaaaggagaaacccaactgnagaaaaagtgactttttgattttgtttttttttcttggttcaccaacaaattttgtttgttcaaagtaatgattcttgcacttgttgctgtacatggatcacacatctgtgcgcttccttttatatttgaagttcccctt

SEQ ID NO: 8236 - DNA, 412 bp, Glycine max
accacagcgtccgcagatttttagttgtttaaaattctgttttaaaattctaaaattttaaattctttataaaaagtatccaaacaataaattctaaattacagaaattcaaattctctgataaattactttcctcggttaaaattttctatccaaacgtactctaaggttaatcagttttaagatagaatttcaacagtgaaataaacttgattaacaacttaaccttttgttgatcattttttttttctgaatcaagatatctcttaattgaaagtcaaagattaatcttttgagataccgagatttatttaagagattaacatctttcaaacatatgtatgttttttcatatgtgcaggccaaaaatcaaacttatgaccacatatttttgttgaacatattgggttta

SEQ ID NO: 8237 - DNA, 429 bp, Glycine max
accacgcgtccgcttttctttattttattctcttctgttctccgctacctatggcgaatttcacctcttcctcctcctcctcttgttctcccttacctctatctctaactatgtcacacatttcacctccgtcatcttctgcggctttcgacgacagttccgaggacgcctgcagcatatgtctagagccattcagcacccatgaccctgccaccataaccagttgcaaacatgaatatcatctgcactgtatccttgaatggttgcagagaagcaaagaatgcccaatatgttggcagttacttatcttgaaagaccctgccagccaagagcttctaaatgcagtggaagctgaaaaacgcttaagttcaagaactgtatattcacatgcattcatggattctcgtagcccccttcaacggcttaaca

SEQ ID NO: 8238 - DNA, 385 bp, Glycine max
cgatccagttcactacttccatgatgctagtttcaaccatgtgaagttgttgtgcgtgctgtgtttgttgttgtgtactgtattggaccttcataaccaaccatgaatctcagcatcggcaacggatccacttcgagttctcctccgaaagccggagattctgtcgccgaccagtttccggcgggtccccgggtgctagtggtgaatcatgaacccacctatcttatgatcattgatacgatgcgccgtgcatgtctctactaagtgacgatgtgtcatcgaactcaggttgcatcgtacttctcgatgacagacgatcaccggtttgataacgtttaaagcgatgtgcatatgccacatatggatggatttaagcttttggggc

SEQ ID NO: 8239 - DNA, 325 bp, Glycine max
cggtcgaccacgcgtccaactcagtcacagccctcatcttcatatcagacatctcaacctcaaggttcatagaaggagaatgatccaaatactacaactacttttgtgggtaatttggatcctaaggtcgctgatgatcatctgacgcaagttttcatccagtatggagaattattgcatgtgaagattccagcatgcaaacgatgtgcgtatggccaattcgcatacaggagctgtgcgtaacaggcatttcaggtgtataatgggacactgttgagtgagtaaaatgttcgtctttcatgtggccgcattcattcaaacaaac

SEQ ID NO: 8240 - DNA, 318 bp, Glycine max
cacgcgtcaactcaatcgtacgctccttctcaatcaaattatacatacaattcatcatacattccacactaaaggtttcatcaagggtgttgtaacattcaacgatccaagtagctctgctatgggttatgctaccctttttaaaggtccagttaacgttagcgaaaacgttgtttcaaacggtatggatgccttcaagatttttggaaatgtttacggaagtagtagccccaggatcattttccatatcgattgtcatgacgaatttgaaatccaatttgttgtagcccattgttgaagctaatgttgaagctaact

SEQ ID NO: 8241 - DNA, 429 bp, Glycine max
aggaagacattccgcgtttgcgggaggaggatcgagcagaaagttgctatctgctgtttttggatcaattgaacagacagaaacagaaggatcaatcctcgcagccatcagttttgaggacaataattttatgccattggaaagaaattttaatatcaggattctttgcattgcttaaggtagttgctctgtcttcaggacctcttcttttgaattcttttatattggttgctgagggtaacgagagtttcaaatatgagggttttgtgttggccatatcacttttctttacaaaaaacatagaatccttatcacaaaggcaatggtacttccgctgcagactcattggtgtgaaagttaggtcgttgctaactgcagccatttatagaaaacaattgaggttatccaattctgctagattgatgcact

SEQ ID NO: 8242 - DNA, 410 bp, Glycine max
gacgacgcgtcagagcagacgcaccacatgtccacgtttgattcgcagagtgagaagcacatgcggtataccgataccaggattgatgaacaggagaggaggatttcgatcaaggcggttcccatgtcgctcgtgctggaggatagcaattccaagtcctatttgtgtaacatcatggacacgcctggccatgttaacttctccgacgagatgaccgcggcgttgcggctcgctgatggcgctgtcttgattgtagatgctgctgaaggagtcatggtaaacacagagagagcgatacgtcacgcaattcaggagcggttgccgattgttgttgtaattaataaggttgacaggcttataactgagcttaagttgccaccgaaggatgcttatcataaactaaggcatac

SEQ ID NO: 8243 - DNA, 399 bp, Glycine max
  modified_base (291)..(291): a, c, g, t, unknown, or other
  modified_base (367)..(367): a, c, g, t, unknown, or other
acgcgtcagcccacgcgtccgcccacgcgtccgcccacgcgtccgcactttccttgcagattcttttccaaggaaaaatttgggagttttgggggaaaaattaaaagtttaattaaaaaacggaaaggttaagttgaaccggaataaaaggataatcttgttgcttcaactctgtcagtcaagtggtccgagggcgttcttcatgttactccgggcaaaggcaagagcagtcagtcctcagtcaagtatggccatagcctagttaaagggaaagcaaaccatccgatggangactaccacgtagcaaaatttgtgcagttcaaagggcgagagcttgggctttttgctatatatgatggacacctgngtgacagtgtaccagcctatttacaaaagcat

SEQ ID NO: 8244 - DNA, 430 bp, Glycine max
agcccacgcgtccgcacaaagttgggacgtggcttgtacaaaagcacaagacggctttgctcgaagctctggaaaaggtcaaggctgagttgatgattttaggtttcatttcactgcttttaactttcgggcagagttacattgtcagaatatgtattcctgaaaagctcgcagacattatgttaccatgtccgtataaggaagccaaaaaggcatcagatagtgaagaggaacatcgtaggaaacttttgtcctatgagcgtagatatttagctgctgatactgcctcgttcaaatgcagcagggagggacatgagccacttttatctgtcaatggattgcaccagttacacatcctcatattcttcttagcagtcattcatgtgttttacagtgctatcacaatgatgcttggaagactaaagatacg

SEQ ID NO: 8245 - DNA, 411 bp, Glycine max
aggcgtgctcagcggcagcggcactgtcaccaacgtcacgctccggcagccggcctcgccgggagcagttgtgacccttcatggaagatttgagattttgtccctgtccggttcttttctgccgccgccggccccacctgcggcgtcaggactagccatatatctggctggcggacagggacaggtagtaggtggaagtgtggtgggaccccttgtggcctcaggtcccgttgtcatcatggctgcttcatttggtaatgctgcttatgagagactgcccttagaggaagaggaaactccggtggcagttgctggcaacggaggattaggatccccaggaatcccaggaacccagcaacaaccgtaacagcaacagtacagagcattttgatgcatgtaagttggacaaat

SEQ ID NO: 8246 - DNA, 191 bp, Glycine max
agcccacgcgtccgcccacgcgtccgaaaaaaaaaaaaaaaaaaaaaaaaaaaaaaaaaaaaaaaaaaaaaaaaaaaaaaaaaaaaaaaaaaaaaaaaaaaaaaaaaaaaaaaaaaaaaaaaaaaaaaaaaaaaaaagaaaataaaaagaaaaagacatcgaaaaaaaaaggtcgagagaggagaaaaagg

SEQ ID NO: 8247 - DNA, 293 bp, Glycine max
gttacctagtcgtggccccagagcatcccttgttgtcatcattggtttccattgcccagagcaaacatgtagaggattatgtagaccttgcctcaaggaagagtgaccttgagaggactgaacttcagaaggaaaagactggggtctttactggctgttatgcaaaaaatccagcaaacggggaagccattccaatatgggtggcagattatgttttggggagttatggaacacgagctatcatggctgtgcctgcacatgattcacgtgattatgaatttgccttgaagtat

SEQ ID NO: 8248 - DNA, 376 bp, Glycine max
cgacccaagcgtcagcccacgcgtccgcccacgcgtccgcttttggtgaggtttgtacttgcgtcctccttaagcttgttctgtctcgctagaacagaattgtttactgggctcatgagtctagactctagaagttccaatttatatatttatcctttattattgaataaaggaggatgcggtttggaaaaaaaaaaaaaaaaaaaaaaaaaaaaaaaaaaataaaaaaaaaataaaaaaaaaaataaaaaaaataaaaaaaaactgaatgaagaaaaaacagataattaaattcgaagagttgtgaatgtaataaactaattgcggtgaacatttataacaatcggcaggacctctagatgacagtaactataac

SEQ ID NO: 8249 - DNA, 177 bp, Glycine max
agattacttcaacactataattatatcataaaaaaaaaaaaaaaaaaaaaaaaaaaaaaaaaaaaaaaaaaaaaaaaaaaaaaaaaaaaaaaaaaaaaaaaaaaaaaaaaaaaaaaaaaaaaaaaaaaaaaaaaaaaaaaaaaaaaaaaacaaaagataaaaagggtggccacccaa

SEQ ID NO: 8250 - DNA, 339 bp, Glycine max
agctcaagctttcagaaaaagaaagagccagattgcttctgctgttgaggatgctttagaagttgcagaatttaaggggtatagcctacgcactcgagattcgttgtcctgctggtgccctgactcaattggttttaaccttattgaacatgtgctttgccacattgttaagaatgaaacgccaggtgctgttttggtttttatgactggttgggatgatataaactctttgaaggatcaacttcaagttcatcctttgttgggtgatcatagccaagtagtgattcttgcatgccatggctccatggccagctctgagcagaggttgatatttgaaaa

SEQ ID NO: 8251 - DNA, 429 bp, Glycine max
atcaactgaaatctccttttggcacttcacttactataccttggtcaactgaaggtattgagtgcaacaaatgctggctggggccccgtcttcccatatgagttcaactgtcccaacatctcaaggaatatttccaacttcaagaattggaagtggtgaatcccccaatagtggggcctcttcttttacccagcctattgcagatatgaatgaaaatgacgaaacagacttgctctcaatatcatggaatcaggactatggttgctttgctgctggcacaagtcatggttttcgtatctataattgtgaaccttgcaaagaaactttcagacgtgatttaaaaagcggtggttttaaaattgtagagatgctgttccgctgcaatattctagcacttgttggtgctgtagctaattctcactatccacc

SEQ ID NO: 8252 - DNA, 270 bp, Glycine max
acgcgtcaggtatagtgtcattattcttcgattctgttcgacctagatttactcgtaattggtgttttcacattcaaggataatatctacatccccgtcgctcatgctactcgttagcatgtctctacttacatctgcctacaatgtcggcctcattgctcttgaggctcttaagagtgttgcagtcatatatcgaaatggtggcctcttaacgatcaatcagatcactttccttgatgatggcgaaacgagctttgtgctacctgctct

SEQ ID NO: 8253 - DNA, 434 bp, Glycine max
attctccggtcgatctatgcatccacgttttttatttctcacataactcctcttttcctcacctcaatctcacttttttttgtggttttctcttttgggtcttcagcttttcaagtgaagtcccaaagatcaaaatttcaggtttctggaagctaattaattattggcaatgagcaacctcaagctaggtgtggaagttgtgggtgctcatgaccttatgcccaaagatggacagggctcatgtagtacttatgtggaacttcactttgatggttggaaatttcggactacaactaaagagaaagatctgaatcctgtttggaatgagaaattttacttcaatgttactgattcaagcaaattgccgaatctcactcttgatgcctgtatctaccattatagcaagagaaataatttcaaaattttcccggggt

SEQ ID NO: 8254 - DNA, 395 bp, Glycine max
  modified_base (367)..(367): a, c, g, t, unknown, or other
ccaacgcgtccgaaatgtaggttccttaaggagctggatttgcaggaaaatgaagttgatgaccacagaggccagtggctaagctgctttcctgattgctgtacatcacttgtttctcttaattttgcttgccttaaaggacagattaatctgggggctcttgagagacttgtggcgagatctcctaaccttaaaagcttaaggttaaatcataccgtgcccctcaatgcactccaaaggatattgaggcgagcacctcaaatagtggacttgggtattgggtcatttatccctgatccaaattcaaatgtcttcattaagctaatgaacaccattatagagtgcaagtcaataaccagtttgtcanggttttttgaggttactcctcgatgcct

SEQ ID NO: 8255 - DNA, 347 bp, Glycine max
aatcgtttgaagtgacatgtttcaatttttaaaggagagaaagaatattatgaaagacagtttgctactctaaaatcatttgaagaagttgactccatagtaatatcggactgcactgatgtagaagacattggaaaacaagctgaacatgaacgggcaatgaagatttctaattatgcaaatgcagttttattggcattgaagatttatgtgactataaggagtggatcaatagctgttgcagcatcaacattggattctcttcttgacttcatggctggtggcatactttgctttacccaccttgcaatgaaggatataaatatgtacaaatacccaattggaaa

SEQ ID NO: 8256 - DNA, 377 bp, Glycine max
  modified_base (159)..(159): a, c, g, t, unknown, or other
cacgcgtcagcaaacgcgtccggaaaaacaatttccggaaaattcaaaaagcttcaaatatttcaaactaaaatgggtcggtcttgcaataagatggtacttgtttgatgatccagatgatatgatggcaatgaagatgatcagccaagcacatgtgangaatgggaaaataaagtctttcacttcttaatgtggtggacttccatctcctgaagctgctaacaatccattagcatatagattcagttggaatcctgcaggagccatccgagctgggcgcaatcctgccacctacaaatggggtggtgaaactgtacatattgatggggacgatctttatgattcggctacaagactaaggctaccggaccttcctg

SEQ ID NO: 8257 - DNA, 319 bp, Glycine max
aacattctaggatcttcaaagagttccaaacaaaatgggtcagtcatgcaatcagactggacttgtttgatgattcagattagatgacggcaatgaagaagatcaaccacgcacatgtgaggaacgggaaaagaaagtctttcacttcctacagaggtggatatccagctcctgaagctgctaccactccagtaggagtggcattcagttggagtcctgcaggagccatctgagctgggcgcaatcctgcgagctacaaatggggtggtcaaactgtacatattgatggggacgatctttaagattcggctacaagact

SEQ ID NO: 8258 - DNA, 335 bp, Glycine max
acgcgtacggatgatcatgtcatatcagagcacttttgaccgtcatggatatcaatggactagttgagcagaacgttcaatctagaagccctgtatctactatttcaggccagatggcatctcttgaagtggactccattgagaagcttgcaatggaactgtggtaacagcctgagaaatctggttctaaagtttcaacagttctgcatagatcagtaaagctccgtcacatgatttaaacgcttcatgcatcggtttcgatgtagaacaagttgtatgaggaagagcagttccttcagttcacgcagacccattcgtcacaaacacttgcagct

SEQ ID NO: 8259 - DNA, 404 bp, Glycine max
tcgacccaagcgtacgggagttttggtgttgtgcgtttgtcatattgcataaacgaatttacggctgacacgacagatgagtaagctcagcctatttgaaaatttcgacacctctttaaattgtccaagaggtatgtgaaatgtgtgtaacttggacttacaaaagatggttcaagcacttccacaatacagtgaataaattgacaagctctccctccatgtagagattgcaggaaaaattaacagaatcattagggagtcatgacttcgggaacgtgggaagctagagcaagatcttgtttttggagatgcacggatgaaagatgtgatcaaatttttgactacatacgaagatacaagtcgttgaaaaaagttgcgcttgataatgattcttgcgtccatat

SEQ ID NO: 8260 - DNA, 357 bp, Glycine max
acttgagaagacatcaaaaagcagatgttgaggtttgcatgctcttccaaactttgaatttaagtatgactgtactagtatgttacctaagtcatctaaaaaaaacaaagctcattgtggatgaaagttatgctgcttaatttaatagggattgttggctttctatggtcttcctctaccacacacactggttcaaggaactacccaacccctttcatccttgcctgatggagttcaatttgaaatgcacaccttgccggttgatgcaaaggcagtagcagatggagacactataactgtgtatgttagcacaacagaccccagggaatcagcatttgtccctggaaatgtgcatgc

SEQ ID NO: 8261 - DNA, 419 bp, Glycine max
gacccacgagtcagcagtgaaagacgtggtgtcgaaattgacgccgcttttgacgaataacaagcttttggattcggtcgctgctggtaccaaattgaaagatcttcaggaatgggctgggaacgacagatttataagagtgatgcctaataccccagcagctgttggccaggcagcatctggtattatatataacttcttcgttttttttactttttaagagcatattgtgtttagttcctcagttactttcaatacacagcagaatgtgagaatggatgctgcgtgaattagttgtttaacttggtagttccgtaattgactctctgaattcaaaattgtcagttatgttgatgatgaatgatgctattttatatgatggaagttgcacatgatttgctataagagtccatgttttg

SEQ ID NO: 8262 - DNA, 420 bp, Glycine max
acgtcagtgatagtccaccaacatggcatccttctgatgaagaagggaatcttctaagcatacattttacttattctgagatcatctggccttggactggttatttggcccttcacatgcaaatcaaggaagaaggtgcacagttttctggaaagattgaaggtaatgtgactctcagggtttctagccccccggctcatggagagaaggaccctcgaattagcatatgtgtgcttcaattaaagttaaatgtggtgccaacaccaccacggtcaaaacgaattttgtgggatcagtttcacaatatcaaatacccacctggttatattcccagagattccttggatgttcgtaatgacattcttgactggcatggggatcatctgcatacaaattttcacatcatgttcaacatgttac

SEQ ID NO: 8263 - DNA, 381 bp, Glycine max
cgacccacgacgtacgaaaaaaagtcaaaaaaaaaaaaggaagaaaaacaaaaagaaaaaaaaaatgaggataggggtggtagaggatgtaggactcactgtctacgttctcgtgaagtcaaagttcttcgacagtgtcagtgaaatttaattccagggcagtggctgtcgtttttcaacattgggacagggaagacgttgcccattttaatcgcagtcgacttgatgaacatgtcgctagctgtagtagtagtaaacaggaccgcgccgatagcgattcccaagacttgcactgtctcaacggaaaaggcgacgcggattgtcccggtacatgcagcgtaaccgctgtggttgttatggtcagcgtgaccgtgacatttg

SEQ ID NO: 8264 - DNA, 389 bp, Glycine max
aagttttggcgctgtattgtatgagatcctcacaggaagaaggtcattggaaagaaaccgtcccacagcagaacaaaagcttctagattgggtcaaacaataccctgccgacaccagcagattcgtcatcataatggacgctcgtctcagaaaccagtattctcttcctgcagctcgcaaaatagctaagttggctgatagctgcttgaagaagaatccagaagatagaccctccatgagtcagatagtggaaagcttgaagcaagcattgcaatattcagacactacttctcaggacattgctgaatcctcctcctcatctcgttctaaattggtccgaaaaaagtaaatatggagctttttttttttttgaaggacttgtgggaaat

SEQ ID NO: 8265 - DNA, 320 bp, Glycine max
gaaataaccgggaagccacacaaaggtaaagatgtaaccgaaaggtttgaagaagccccaacaaagttttaaggccttgtgcctaagcaagcacaatttcctaacaacacaacaaactcaagtggctgatctattaattccattgagagagttaacccacacagatgctaatgttgcataccacttgtgggtactggtatttccaattgtctgggttacattgaataaagacgaacaagtaacacttgctaaaccaatgattaatcctttgtccaaagaattacataagaggcagcaagccaacagaccaaatgttgtgc

SEQ ID NO: 8266 - DNA, 328 bp, Glycine max
cgactcaagcgtcagataatagagaggcagctaagaaatgcaggcttaagatcaaagcacatgttcaacagctaaagtcgaatacgattatgctgaatcagcttgaacaagagctacaacgtgctaaaactcagggcatgttgttgggtgtatgcacacttttgggtggagagcaaggcgttccggtcataactactactaggattacagatgcagcagtgttttaagtccaatcatcgtgacagatcttttagcaacacatcctaggattggcacggaggctagagatcttcgtcgtgcctccagttcacgctcttagcactgtttg

SEQ ID NO: 8267 - DNA, 357 bp, Glycine max
taatagggatgcagctaagaaaagcaggcttaggataaaagcacatgttcaacagctagagtcgagtacgattatgctgaatcagctgtgaacaagagctacaacgtgctacaactcagggcatgttcgttgggtggaggcgcacttttgggtggagagcaaggccttcctgtcactatgaatactattagcacggatgctgcaatgtttgacgtagaatatgctagatggcaagaggagcaccaccgcatactgtgtgagctaagagctgcagtgcaagagcaccttcctgaaaacgagcttagactgtttgtggacaattgtttggcgcattatgatgaagtgatgaacctcaag

SEQ ID NO: 8268 - DNA, 402 bp, Glycine max
aaataacggagagtaataggactagatgatcatattgacctgtatattcataacctgttgattatttatttgtttgttttttattcatgccaggcccaggcatgtatagtcaagcattcagtttctgtgagaaagttaaggggaagttgagcagttcagatgattaccagacattcttgaagtgccttcatattttcagcaatggaataattaaaaggaatgatttgcaaaatttggtaactgatttacttggaaagcattcggatcttatggatgaattcaatgatttcttggagcgttgtgaaaatattgatggattccttgctggtgtcatgagtaaaaagtcactgtctactgatgctcatttatcaagatcatcaaagttggaagaaaaagacaaag

SEQ ID NO: 8269 - DNA, 431 bp, Glycine max
gacccacgcgtcaggaagaatattactaatggctaaaatatttcctacatgtttctcggccaagatgctttttgatagtagtattgttttacagggttgttgacaagtatttgtttttaccaaatttttggccacagaaataaaatatggcgtgattagagtaaaatgatttaaaaaatgaataaagaaaataacttggattgagctttggtcttttgcaattctaaatatagttcatttctgatagttgaatgtggtatagatgactaggcgttagtcaaataattaaatatgtaaatatttaattttataaaaataagagatgttttaattgtcaataataaatattttatttaaagaatattaaaatttaaaaatattatataatgaagaaattaaagatgtagtttttaatatcgagaaaaaataac

SEQ ID NO: 8270 - DNA, 426 bp, Glycine max
gacccaagcgtcagcccacgcgtccgcccacgcgtccgcccacgcgtccgcaagattcttgcaggtcgaaggagatatatgggtcacaaaagaacaattagaccaaatgcaaagaagcttagcacgatattggcaggaaggcatcaaatggactgggatacctttgccaaaaaggttaagtcatgccagagaggattcatgggagagccagatgagatgagacctggtcgaggtgaatttcatgaatttccaagttcttgcgtgtgcaagagaccatatgtggatgaagaactcagcaaagaggtatatcgttccccaaaactcgttgcaattaaccttactgcaaaagcttattcctcctcgaatggaattagaagaggcaggacatgaagttaacttgaaccatgaggttatccggaagggggg

SEQ ID NO: 8271 - DNA, 349 bp, Glycine max
gtcaggctagtactagtcgcgagcgcccttttttttttttttttttcttttttttttttttttttttttttttttttttttttttttttttttttttttttttttttttttttgaaagggatacgactcaataccaaatgctattggaataaacaccaacctgcgttaatacctaaatttccaacccaatttgggctccacataattaaatacaataaatggaaaaaaatcctttgagaccccttatttccgggcaacctccattttacccttagacgaatgcctagcatcccaaagctaaactcctaacaggacctggtcccccgcgaaatttaccccccataccgtg

SEQ ID NO: 8272 - DNA, 402 bp, Glycine max
aggatgcttatagaattggtgaatttccctattggtttcaccagacttggacaacaagcttacagctatgtatctcattagttatactttttcgtgctgttggatgggcaacaattgcctccttggtggtgatagtaatcactgtgctttgcaatactccacttgcgaagttgcagcacaagtttcaaagcaagcttatggtgacacaagatgagagattgaaggcttgttctgaggctcttgtgaatatgaaggtgttgaagctgtatgcgtgggaaaccaattttagaagttctatagagcgattaaggaatgaggagctcaaatggttgtctgcagtgcaattaagaaaggcatacaacacctttctcttttggtcctcccctgtcttggtctctgctg

SEQ ID NO: 8273 - DNA, 434 bp, Glycine max
gaccaacgcgtcagcccacgcgtccggagaattgttcctctcttctcttccattcgtgtacgcgcaaaagaatcatgacgagttcctctgctgccgctcgcaagaatctgagtaagattgcctgcaataggctccagaaagagctcgtggagtggcaggtcaatccccccactggtttcaagcacaaagtcacagacaatctccagaggtaccagattcttctcaatccacaccctaaatattatcgatttcgtgcttccattattcctttacattcctttgctttgtttctctctggaaggtgggtggttgaagtcactggagctcctgggacactttacgctaatgagacgtaccagcttcaggttgattttcctgagaattacccactggaggctcctcaggtgatattcttgcatccggctccgctgcat

SEQ ID NO: 8274 - DNA, 450 bp, Glycine max
aattctagggctcgacgacgcgtcagcccacgagtccgcccacgcgtccgcccacgcgtccgcaaggaagaaattagtcctcaaagtaactattgtgattccaccaacacacaatggccttgttatccaggacaaagttacaaaggcagaggaccaattcaactctcatggaactacaactatgggccagcagggaaggctttgggatttgatgggttgagaaacccggatgtggtgtcaaacaattcattgattgcctttcaaacaggtctctggttttggatgacagagcaaaagcccaaaccttcttgccacaatgtaatggttggaaaatatgtgccaacacaagctgacatagcagctaatcgaactaaagggtatggcctagtgactaacataatcaatggtggacttgaatgtggaattcctgatgattcaagggtgaatgat

SEQ ID NO: 8275 - DNA, 421 bp, Glycine max
agcgagaacaaaaaaaaaaacgtgattcgctcttctcttcgaataaaccacaaaaccaacaaacgagaagaggagtgagagaagatggggttgtcgttcacgaagctgttcagcaggttgtttgcgaagaaggaaatgaggattctgatggtaggtctcgatgctgctggtaagacaaccatcttgtacaagctcaagcttggagaaatcgtcaccaccatccccaccatcggatttaatgttgagactgtggagtacaagaacatcagcttcactgtgtgggatgttggtggtcaggacaagatccgtcctctgtggaggcattatttccagaacactcagggtctcatttttgtggttgatagcaatgatagggatcgagtggttgaggcaagggatgagttgcacaggatgttgaatg

SEQ ID NO: 8276 - DNA, 389 bp, Glycine max
aagtggagtgattcttgctcagtttggaagctacaaaaagaaagaaaacatgggttctgcttcaagagttgaaagtagcaactacgattactcctttaaggttttgttgattggtgattctggtgttggcaagagtagtcttcttctcagctttatctccaactctaactccatcaatgacctctcccccactattggtgtggatttcaagataaagctttttacagttggtggtaaaagattgaagcttactatttgggatacagctggacaagagaggtttggaacagtaataagttcttattatagaggcgcacatggaatcattcttgtctatgatgtgacacgacgtgagacatttacaaacctcatcgatatatgggcaaaag

SEQ ID NO: 8277 - DNA, 387 bp, Glycine max
  modified_base (309)..(309): a, c, g, t, unknown, or other
aggggacctcaaagataagtgtaggattggatcagggcctcagaatgagtggtatttcttcagccataaggacaagaaatacccaacaggaaccagaacaaatcgagcaactacagctggtttttggaaagcaactggaagagacaagtccatataccacactaattccaagaggattggcatgaggaaaaccctagttttctacactggtcgtgctcctcatggccagaagactgattggatcatgcatgagtatcgccttgatgaagatgatgctgatgttcaagaagatgggtgggtggtatgcanggtcttcaaaaagaaaaaccaaagccgaggtttccaacaagaacttgaagaagaagagcacttaaccacccacatgag

SEQ ID NO: 8278 - DNA, 389 bp, Glycine max
acgcgtcaaccgacgcgtccgcatttcccgacgaccaatcggagggaaggggctcgacgtgctgcatcttcgtgacagcaccttcacgccgacgaccttctgagatggccgcggacgaatcagcggtcaaacaatgcgtgtccacgcacgatcatgcccacctacacgactctgtgcaggtgcactatctcaaccgcggctagttccatgcaccaaggattggccacggaacgaagcatgtccccgagtaggtgaaatcagccacgaccatgagtagacacgattcaccagttgtgatggtgaaaagcaagtccaatgcggagaccaactaatagactgcgtcaccatacgatgccaggggaatggccccagatctgattctgcgacat

SEQ ID NO: 8279 - DNA, 294 bp, Glycine max
cacgcgtcagccaattgatgctccgcctctcctcgctcgtctccaacgccaccctccaacagggcttcttcctcagtaacatctccctcggaaaccccgatgaggtcaagggactcttcctctgccgcggtgaagtcaccccctccgtctgtcacgactgcgtcgccgccgcggcaaccaatatcacagacctctgcaccatcccaacagattccgtgatccggtatgaccagtgtatgttgcgctactccaagctttccttcctcaataacatagtccctggagttcacttga

SEQ ID NO: 8280 - DNA, 435 bp, Glycine max
cgggccgacccacgcgtcaggtgtattataaatttaagagtgcaagagattatgattcaattcccatggacggtcctttcatctctgttggtacattgaaagaaaaaatatttgaatccaagcatttaaggaggggtactgatttcgaccttgtggtcaccaacgcccagaccaatgaagaatatcttgatgaagaaatgttgattcctaaaaatacctcagtgttaattcgtcgggttccatgaaggccacgtttaccaattgttactgaaatagaacataaggtggaaaataaggtggtggaatctgaacctgaaaatggaagcctaccagctgaagatacatctgccatgaaatatcctgaagattcagattgggatgaatttggcaatgatttgtattcaattcctgatcaagtgcctgttcaatcaagca

SEQ ID NO: 8281 - DNA, 357 bp, Glycine max
atcaggttcaaaagcatataagagatggggttagaagggaaggaaacgccgtcgtttatgagggattttctcgataagtgtggtggctgcgccgttattgacggtggttttgccactgaacttgaaaggcatggggcggacctcaatgacgaactctggagtgccaaatgccttattagctccccacatcttgtccgaagggttcacctagattacctcgatgcaggagcaaacataatattaacagcatcttatcaggtaattatcatattaattttttttttcatccctacaactctacattttaattttgccgtctttttggggttggggtgcaggccactattcaaggttttg

SEQ ID NO: 8282 - DNA, 405 bp, Glycine max
  modified_base (302)..(302): a, c, g, t, unknown, or other
  modified_base (381)..(381): a, c, g, t, unknown, or other
cccacgcgtcagcagtttaactcagttaaccaagttgaacccttaaacaaaaatttaacaaaaggtaaacttcaattccaaatgaacaacaacaaaagcaaccccaacccaaatggaataataaaataataaaagtgaagccgaaatttccggttgaaacccaacaagcttttaacttgaataaaggtaattcagaggctttcaacttaaaaagaaaaaatgcacggaaatgttgctgcaacttgcccggtggtgctgctggtgcatcatcccttttgtttgtttactctcttgactatgcncgttaccgtcttgcaaaatgatgcaaagctgcaaaaaagggtggagagagacattcaatggtctcgttgatgtctacangaagacattggcatctgatggtgt

SEQ ID NO: 8283 - DNA, 372 bp, Glycine max
agcgagaacaaaaaaaaaaacgtgattcgctcttctcttcgaataaaccacaaaaccaacaaacgagaagaggagtgagagaagatggggttgtcgttcacgaagctgttcagcaggttgtttgcgaagaaggaaatgaggattctgatggtaggtctcgatgctgctggtaagacaaccatcttgtacaagctcaagcttggagaaatcgtcaccaccatccccaccatcggatttaatgttgagactgtggagtacaagaacatcagcttcactgtgtgggatgttggtggtcaggacaagatccgtcctctgtggaggcattatttccagaacactcagggtctcatttttgtggttgatagcaatgat

SEQ ID NO: 8284 - DNA, 359 bp, Glycine max
cgtcaggccagccttcctcgcccgcgttagctctgtccatttccgtgctgcctggttggttgcatgtgccagtgagcaactggcctgtatgtacgactgttgactcgaactggcataggatgatggttacactaaagatcgaccagtcgagcactgtgtacatccggcttcatccttgggagcctggaacctggaatgcctgcccctctatcttacgatacgaatgttgtgatagattcgcttatgatgggatgagcactaacctggtgctttaatcctagaaccggctgattcagcatagtgctactgcttccatgaatgtcgctaattggagtcgaacgtgctctatcacaccattg

SEQ ID NO: 8285 - DNA, 404 bp, Glycine max
agcaggcctcaagtcctctgcatttgaacaaaatttcaatacaaaagtcctgtccgcggtgaagaaattgactaaaaaatctccccctgatattgtgctgtacgtggatcgcctggacctgcaaactagagatatgaatgatctgccaatgttaagatcaattaccagtgtcctgggttcatcaatatggcgaaatgtcatagtcactctgacccatgctgcctctgctcctccagacgggccatcaggtgccccattgagttatgatgtatttgttgctcaaagatctcacatagttcaacaaaccattggacaagctgttggggacctacgtcttatgaatccgagcttaatgaatccagtttctcttgttgaaaatcatccttcttgtcggaaaaatagag

SEQ ID NO: 8286 - DNA, 409 bp, Glycine max
agcccacgcgtccggcttacgttttggcccatcccgaatacaacaaaccctcttcacattacatgtcatcacatttcatgcatggatacatatccaatcactctgttctcaacgtacattgccttccaatgtatctaatctttcctgtctacgatccatatcccagattggtgtgagacttaggagatatctgtatctcacatcagtactaatcacatttgctaaacatgaacactcattgcattgaagggtctgatatggaatttgccgcttacaacttgctttgtgtcataatgcattcaaataataacagagatcttgtatcatcaatggcaaggttatctcacgaagcaaagaacgatgaagctgtaaaagatgcccttgccgttcgtgctgctgtaacttcagg

SEQ ID NO: 8287 - DNA, 415 bp, Glycine max
aggtctgattgcagatgtttgatatagtgctagctccaactcccaatcatctgcattcacttcttcacaatacacctatcactaatccaacgattaacatcatcgaatgttttatctaaggtaagctgcacaatctctgcctcactgccgtttgcgcatctatcaccgccagctcgcaacggttgtcatcgtgtcagagacacacgatcacagtcgcggtgcgtatggaaacctcgacatacagaggatctccactcttccatatgtatatgataagcactcacagtacatcatcaactgagtgtcaatcacacgagtaataccatcattagcagttactccactaatcacagtgcacaatgttcctacggatgaagggacacaatagcagtagatatgcttcatgccatcggag

SEQ ID NO: 8288 - DNA, 422 bp, Glycine max
agcacaaacaccaaaccctacaaccaacaacaaccctccaaacaccatcaccccagcttccttccccaacttctccgcagatctcttgtcgaattcgagtttttcatcgacttcgtcggaggaaacaacgacgatggggggagggggaatgaggcgcaagaggaagaggaagtggaaggacttctttgagaggctgatgaaggaggtgatagagaagcaggaggggctgcaaaggaggttcttggaggccattgagaaaagagaacaagagcgtgtggtgagagaggaagcgtggagaatgcaagagatgcaaaggatcaacagggaaagggagattctagcacaggagaagtccattgctgcagcaaaagatgctgctgttatgacatttttgcaaaagatagccgaacatcaacaacaag

SEQ ID NO: 8289 - DNA, 600 bp, Glycine max
  modified_base (11)..(11): a, c, g, t, unknown, or other
  modified_base (97)..(97): a, c, g, t, unknown, or other
  modified_base (108)..(109): a, c, g, t, unknown, or other
  modified_base (114)..(114): a, c, g, t, unknown, or other
  modified_base (116)..(116): a, c, g, t, unknown, or other
  modified_base (118)..(119): a, c, g, t, unknown, or other
  modified_base (121)..(121): a, c, g, t, unknown, or other
  modified_base (134)..(134): a, c, g, t, unknown, or other
  modified_base (165)..(165): a, c, g, t, unknown, or other
  modified_base (184)..(184): a, c, g, t, unknown, or other
  modified_base (221)..(221): a, c, g, t, unknown, or other
  modified_base (237)..(238): a, c, g, t, unknown, or other
  modified_base (249)..(249): a, c, g, t, unknown, or other
  modified_base (288)..(288): a, c, g, t, unknown, or other
  modified_base (290)..(290): a, c, g, t, unknown, or other
  modified_base (408)..(408): a, c, g, t, unknown, or other
  modified_base (410)..(410): a, c, g, t, unknown, or other
  modified_base (433)..(433): a, c, g, t, unknown, or other
  modified_base (462)..(462): a, c, g, t, unknown, or other
  modified_base (519)..(519): a, c, g, t, unknown, or other
gggtggggggntggggggggggcgggtggggggggggggggggggggggggggggggggggggggggggtggtggggagagtagctgacgggcaggntaggtgtggannggggncnanngnggggaagaggggnggggggggggggggggggggggggggggggnggggggggggggggggggnggggggggggggggggggggggggggggggggggggngggggggggggggggnnggggggggggnggggggggggggggggggggggggggggggggggggggngngggggggggggggggggggggggggggggggggggggggggggggggggggggggggggggggggggggggggggggggggggggggggggggggggggggggggggggggggggggngnggggggggggggggggggggganggggggggggggggggggggggggggggnaggggggggggggggggggagaggggggaggggggggggggggggggggggggggangggggggggggggggggggagggggggggggggggggggggaggggggggggggggggggaggggaggggggggggggggg

SEQ ID NO: 8290 - DNA, 427 bp, Glycine max
actcatctgttttgacacagcacaagaaacagagtgaacacagaaccatcgccatgcttgatccaagaacacagcacaccaccaagtcttttgaattgtacgacgcagcaccacacagacctcacacatgggaagctacgaacagttccggtttgtggccctcgaaagcagctttcgacgaggtacaggttgatgattccggactatgtcacctccatgtggacaacgagccctgcacgccgcaagaacaacctccgtagcctctcgccgacgtcgatgacgcaagccatagtgagtgggcagacggagctcatggagatggtgaagaacatgccagagtccaactacgagctctctttgaaggacctcgtggagcaccacagggttgttgatgctactagacatgagacaaatgtggtggaagaga

SEQ ID NO: 8291 - DNA, 547 bp, Glycine max
  modified_base (137)..(137): a, c, g, t, unknown, or other
  modified_base (179)..(179): a, c, g, t, unknown, or other
  modified_base (195)..(195): a, c, g, t, unknown, or other
  modified_base (212)..(212): a, c, g, t, unknown, or other
  modified_base (410)..(410): a, c, g, t, unknown, or other
gggggggggggtgtgggggggggtgtgtgggtgtggggggcgggggggggggggggcgggggtgcgggggggggggggtgatgggtatgggagggtagcgtcagtacggtgtagttccggtcgaccagcgtcgaagnggggggggggggggggggggggggggggggcggggtgggggngggggggggggggggnggggggtgggggggggngggggtgggggtgagggggtgtggttgtgtgtgggtgtggggggggggggggggggggtgggctgtgtaggcgcgtgggggggagggtcgttgtttgtgaggtggtgggggggggggggggggggggtggggtggcggggggggggggggggggaggccggggggggggggtgggggcgtgggggggggggggggganggggggtgggggggggggggggggttggggggggtgtgggggggtgggggggggtggggggggtggggtgggggggggggcgtgggcggtgggggggggggggggggggggggggggggggggtggggggggggggg

SEQ ID NO: 8292 - DNA, 428 bp, Glycine max
actaaatgtttcaactatgaaggagaatgtggcggttcggcttttcactgacattgatcctaactatgaccctctgcagtatgagtatcctgtgaagacaaattttccgcagtttgtgttccatcagagcgggacggggacaggttgtgagtgtgcggacaggtgtgttgaggggtgcttttgtgccatgaagaatggatgggattttccttagaatcagagtgggattctcttgagagggaagcctttggtttttgagtgtggcccattttgtcgttgtcctcctcactgtcggaatcgtgtcacgcagaaggggttgaaaaatacgttggaagtgttcagatctacggaaactggttcgggagttaagtccatggaccttattcaagctggtgcttttatatgcgagtacacatgggttgttctga

SEQ ID NO: 8293 - DNA, 397 bp, Glycine max
accatgcgtccgcactcttgcccgtatttgctaatacatacgctcttcccaatgcaactaatggggctgtcgattatggtcaatctgggtctccactctcgcagatttggccactggttgatccaaagcacttgtggaatctcgggggagggtcgttattggggtttggtatggctttccagtgaacatagcatatagcgcttgatgctttctggtaatcttcttgaggatagggtattcgagatgcaggggtgaacagtaccgattatgtatttttggtatctcgcatgagcaaatttggcattatgtaaatgtaccagtgcataagacatatttttggctataattacagtacgaacattgtgtcatgggatgtctacatacttttgagttatgt

SEQ ID NO: 8294 - DNA, 365 bp, Glycine max
  modified_base (296)..(296): a, c, g, t, unknown, or other
  modified_base (299)..(299): a, c, g, t, unknown, or other
ttcggccgccgacccacgtccagtattatctggttcataattatatatgtttatcctcatttttgactcagtcgtatgcttgtgattaaagatgggatttgctgtctgggaaccaccacatggtcattacaaaatgcttaagtatccatggaagaattatgtgaaattaagtggggctctaaggcactgtgcgtttatggtcatggctatgcatgggtgcatactttctgaaatacaggcccgagctgagaagagacaagttttccgcagtgagcttcagagggtaggttctgaangancaaaagtgttgcgtgaacttggaaacaaagttaaaaggatggagaaactaggtcgtggaaacttgc

SEQ ID NO: 8295 - DNA, 240 bp, Glycine max
aaaaaaaaaaaaaaaaaaaaaaaaaaaaaaaaaaaaaaaaaaaaaaaaaaaaaaaaaaaaggaaaaaaaaaaaaaaaaaaaaaaaaaaaaaaaaaaaaaaaaaaaaaaaaaaaaaaaaaaaaaaaaaaaaaaaaaaaaaaaaaaaaaaaaaaaaaaacaaataataacgaaaaaaaaataaaaataaaaaaaaaaaccaccatataaaaaaaaaaagtaataacaaaaaaaaaaatataa

SEQ ID NO: 8296 - DNA, 255 bp, Glycine max
ttctgttacaccctctacttttcttaattactctcatccttctttctttcaagtgcgaaatcgatctctcactgcctcagcaatggctgcagatgatggtgtgaaacctccaactctcgagtgaatcagcatctgcaagtctctcctcgccagcggagtggccggaagagtagcacgaagtactgtagctcctctggagctattgaagattctgctgcaggttcaagatcaacaagatataaaatacaatggaac

SEQ ID NO: 8297 - DNA, 264 bp, Glycine max
agagacacgtgatttgattgatcggtataagaggttgaacggtaggatgatcaggctattccgttcaatgatatgtgcaaatgcgacagtagactcacaacgattcaaggggaatattgaagaagttagcactgctggacatctagtgggcacagagtgctaaattacatggacagtgaggctgtcaaaactcaagccaacaactagtctgcttcacaaggagggcaaaatcatatcataagcgagtagacaagtagctttatg

SEQ ID NO: 8298 - DNA, 195 bp, Glycine max
acccacgcgtccacaaaaaaaaaaaaaaaaaaaaaaaaaaaaaaaaaaaaaaaaaaaaaaaaaaaaaaaaaaaaaaaaaaaaaaaaaaaaagaacaaaaataaaaaaaaaaaaaatgattatgcatgtggggcgggggccccagcgtttccgtctttgggtttcctttctttggctttcgttttccttcttcttt

SEQ ID NO: 8299 - DNA, 436 bp, Glycine max
aggagtttaaaagaggacatgaagaaaaacctttgaaatgaccgaccttggtttgatgagttacttcctcggcatagaggtaagtcagagaaatgaagggatattcatctcgcaaaagaaatacacagaaggcttacttaagaaattcaagatgtatggttgcaaacctattgctactccactcataacaaatgagaaactacagaagaatgatggagcaccagaagctgatgcatccaaataccgaagtctaattggaagcctcctatatttgacagctacacggcctgacataatgtatgctacaagtcttctatcaagattcatgcaaagcccaagtcaaatacactttggagcaggaaaaagaattttgaggtatctacaaggaacaaaagagttcggtatatggtatactaccgaaaccaactcaaaatta

SEQ ID NO: 8300 - DNA, 419 bp, Glycine max
acaggtgtatttactggtgtcttctgcttcttgcaagtagcaagtgcagagctgcaacaagcattacacattcatcgcatatctgaacaaacttcattgaaaagactgacagatttaacttatttgaagcggcaaatcgagattcctttatatgggattatgttctctcggaaattgttacagggtactgaattgggagctgaagaatgacaatttctgcaaatgggcagtcggtgtcaacgccagattagcaaaattctggatgactcggatcttgaaagcatcattgatggctacatggattttgatatggctgaattcattttgcatgaagttctggttgactctctaagctcgagtcatgatcaagagtaatgcacaaggtattcgagtattcaatgaagttgatgagaagatca

SEQ ID NO: 8301 - DNA, 313 bp, Glycine max
cacgcgtccgattgctgaacgtgacactaatcgaggactacaccaaaatctgggagaactttggtaggttcataaaattaggttgcattgaagacactggacttcactacgcgcattacaccagtactgcacgttttacacttccaccagtgaggaggaacttacgagcctagatgattatgttgaaaacatgggagaacaccaaaaggctatcttttacctagcaactgacagcttgacgagtgcaaagactgctccatttttggagacattggttcagacagatattgaggttctttatctggttgaacct

SEQ ID NO: 8302 - DNA, 335 bp, Glycine max
aattcggggccgacccacgcgtacacggaagcgtgggaaaaaattgaagaaaaaaaaagaatatgttaatttaacgggttagagaaaggaggggagtccaaaaggatagagacagatataggtgtacatgagaggtgatagctcgtataatgtgagataaattcaggacactggagagtggttataataacagcttttaaccaggtgaaagaaatggtggttattaaacttaatcggcttggtggaaaacggtcttttgtgagctggcgtaatagggaaaaggttagtactgaatgggcttcgcaatagttgcgcatcatgaaaggtgaatggga

SEQ ID NO: 8303 - DNA, 246 bp, Glycine max
atatagttctgacatcggtaataatatatactataatacataggtcattgatgcatgtactgtgcataacggctgagttatgtacttatgttaagaataaaataaagtgctgttgttgcaaaaaaaaaaaaaagaaaaaaaaaaaagaaaaaaaaaaaaaaaaacaaaaaaaaacaaaaataacaaaccgcacaacatgagagaccaaactggggtcgaacaaaacgcaacttccaccacaaagga

SEQ ID NO: 8304 - DNA, 259 bp, Glycine max
  modified_base (26)..(26): a, c, g, t, unknown, or other
  modified_base (31)..(31): a, c, g, t, unknown, or other
  modified_base (33)..(33): a, c, g, t, unknown, or other
  modified_base (52)..(52): a, c, g, t, unknown, or other
  modified_base (56)..(56): a, c, g, t, unknown, or other
  modified_base (61)..(61): a, c, g, t, unknown, or other
gggggggggggggggggggggggggnggggngnggggggggggggggggggngggnggggngggggggggggggggggggggggggggggggggggggggaggggagggggggggggggcgacgggggggggggcggggggcgggggggggggggggggggagcgggggggcggggccggcggggcgggggggggcggggggggggggggggcggggcggggggcgggggggcgggggggcgggggggggggggggggg

SEQ ID NO: 8305 - DNA, 129 bp, Glycine max
ttttttttttttttgtttttttttttttttgttttttttttttttttttgttttttttttttttttttttttgttttttttggggtttttttgtgttttttttttttttttttgttttttttttttttt

SEQ ID NO: 8306 - DNA, 388 bp, Glycine max
caatggattctcactaatgatggaacacgacagagaaaggaaaatagcacttgttgcggctggtgcagcagctggtatttcttcaggcttcaatgctccagttgctggttgtttctttgctattgaaactgtgctgaggcctcttcgtgcagagaactcacccccatttacaactgccatgattatattggcttctgttatctcgtcaactgtatctaatgttttacaggggacccaatcagcttttacaatacccgagtatgatttgaaatctgctgctgagctacctttatacctgatattgggaatgctatgtggtgttataagtgttgccctgactcgtttggttgcttgggtcaacaaattacttaagattattcaagataag

SEQ ID NO: 8307 - DNA, 425 bp, Glycine max
cccacgcgtccgccagatctcactctcactctcactctgttttgctcagtgcggagaggagaagaaaatatggcggtgatggcggttcaccaattcgcgcaatgcatcacttgccacgcttggagccccgatcaatccatggttgctttatgtccaaacaataatgaagtgcacatctataggttggttgaagacaaatgggaaaagttgtatgttcttcaaaagaaaacaaatttgcagtgggaagtggagccaaaactgtttgtatatgctactatgagcaggagaacaactggtgggtcatcaaacttatcatgaaaagacatgattcttctgtgacaagtgtttcttggcatcccgataatattcttcttgctctacctccacaaattggaaatgcttaatattcatcacctttattaaaa

SEQ ID NO: 8308 - DNA, 417 bp, Glycine max
gtggtctccaactgatccaattaacgctctttttgctcctgagatcggacgccgtcggcagcctgacaacgtctatctggttcaaatccccagcaaaatggaactcaggcagataaacctcttcagtgtcactgactgcaatatgtactggcaaatcaatggagactacctggctgttaatgtacagaggtacacgaaaacgaagcataccacatacacacgcttcgagcttttccgtataaacgaacaggatatacccattgaagttttcgaacttgagaataagaatgataagatcattgcattagcttgggatccaaagggccacaggtttgcacctattcatggtgataaccctaaacctgaactgaacatttactccatgcatactggtcagaacatccgactatcaaaact

SEQ ID NO: 8309 - DNA, 381 bp, Glycine max
gtcctggattgggtctttgctgatggtccacctaagaaggcagttgtctatgataagaatcgtaaacaagattgccatgccattgtccctggggctatacctgatgaacagtattgggttgaggaagagcagctgatatacagaaaatttcaggaggagaggaggttaagagaggatgcgatacgtgcaaaggctgaaaaaacagcacaaatgaaagctgaaacaaaggaaagaactttgaaaggatttttgctttctcaaaagcatattgtattcactgaccctctcgatgttcaagcaaggagtacagtgacaatattttataacccgtccaacacaaatcttaatggaaaacctgatgtttggtatatatgtacattt

SEQ ID NO: 8310 - DNA, 400 bp, Glycine max
gacccacgcgtcccaaaaatcccacttcctttttcttctttttatgatccttgtgattaggctcattagaagcttgcatatataaagcaggcggtacaatcctaccttattggcaataacgccattgctaaggagctaagtattaatgggcaactgcacaacatgcatatgaaatcagctcatggaaaagctcaagaatctatttaccgccagaggaatcccgttgctccagagaatggaagagggcaccagagaatgatagacctacacggtctgcacgtaagtgaagcgattcacgtgctgaaacacgaactgagtgtgctaagaagcacggccagaaccgctgagcagcttttgcaggtttacatctgtgttggcacttgtcaccatactcggggct

SEQ ID NO: 8311 - DNA, 177 bp, Glycine max
atcctgagggacgtgctactcacataatcatcctcaatgctgctaacattctccccttcaacacaccaatcaccaaaataccatactactatacaatgatatttgacaagttcttccctcataactcatccattccttatgttcctagattaccaaatgtcacatgtaacacatcca

SEQ ID NO: 8312 - DNA, 149 bp, Glycine max
gacccaagcgtccgaagaaaaaaaaaaataaaaaaaaaaattaaataaaaaaaaaaaaaaaaaaaaaaaaaagagaggaaaaaaaaaaaaatgggaaaaaaaaaaaaaaataaaaaaaaaaaaaaaaaaaaaaaaaaaagtgataaaat

SEQ ID NO: 8313 - DNA, 280 bp, Glycine max
cacacgcgtacattgacgcatgtgtatcaataccataactataggataaataggcggacatatataattaccacggaatatccaataatatatacatatatatagttctatatggcaatcacaactgtggggctcgaatactacaacataccatcatagtctgcaacatcctctatacctactagatatcagcggatgacgactgtagcactacactggcacctaatgaaaattcaaagactctgagttcaagatggactctggctgacacgctgaaact

SEQ ID NO: 8314 - DNA, 336 bp, Glycine max
tactcttcttctcttgctgctagggttctagcgcaacttcttctacatttaaggacgatgggtaaggaaacaggttcacatcaatattgtggttattgcccctgttgactctgggatagctcactaccactggccacctgctctacatgcttggacgcattgacaagcgtgccattgacagatctgataaggatgctgctcagatgcacaatacggcttatgagtatgcctgggtgcttgatcagctcatagcttagcgtgaaagacgaatcacaattgatcttgccctgtggaagtttgaaaccactcagtactattgcacagacattgatgccc

SEQ ID NO: 8315 - DNA, 364 bp, Glycine max
  modified_base (274)..(274): a, c, g, t, unknown, or other
atgtgctcatgtattttttgagaggaagtctcgcatggcaaggcttgagagctggcaccaaaaagcaaaaatatgacaagataagtgagaagaagatgcttactccaatagaggtcttatgcaagtcatatccattggaattcacatcatacttccactactgccgatcattgcggtttgaagataagcctgattattcttatcttaagagactctttcgggacctatttatccgagaaggttagcttcatatatatatatatatatatatgtngcttaatgagtcatgaaattctattaggcttgtaaaatcttgcttttacaggttatcagtttgattatgtatttgattggactatgctga

SEQ ID NO: 8316 - DNA, 426 bp, Glycine max
aaaaaaaaaaaaaaaaaaaaaaaaaaataaaaaaaaaaaaaaaaaaaaaaaaaaaaaaggaaaggaaaaaaaaaaaaaaaaaaaagaaaaaaaaaaaaaaaaaaaaaaaaaaaaaaaaaaaaaaaaaaaaaaataaaaaaagggaggaataaaaaaaaaaaaaaattataaaatgacaaaaaaaaaaaaataaaagagcatataggaaaaaataaaaaaaatatgaaaaacgaaaaaattaaaaaaaataaaaagtaaaaaaaaaattaaggaaataaaaataaaacaataatgaaaaaaaagcaataaaggagaaagttatataaacaaaaaaagaactaaaaaagaaaattagaaaaaaggtataaaacattaaaaatgaaaaaatgaaaactaaaatgtatataaaaaaaaaaaataaaaaga

SEQ ID NO: 8317 - DNA, 192 bp, Glycine max
cccacgcgtccggggagtacaggaagaagcacaagcatgtgtccatgagggccttgagggagtggtccaagcatatcttggaagggctgaattacttgcatttgcatgatccttgtatcatccacagagacctcaactgcagtaatgtgttggtgaatggtaatactgaccaggttaagattggtgacttgg

SEQ ID NO: 8318 - DNA, 139 bp, Glycine max
aaaaaaaaaaaaaaaaaaaaaaaaaaaaaaaaaaaaaaaaaaaaaaaaaaaaaaaggggggaaaaaaaagtaaattggggaaaaaaaaataaaagaaaaaaagaaaaaaataaaaaagaagaaagtaaaataaaaaaaa

SEQ ID NO: 8319 - DNA, 148 bp, Glycine max
cccacgcgtccggcggaggcagatcggagatctgtgatagatatagatggagggagggggggcccggcttgggcgggcctcgacccgctacagaccgggcacagtgttcactggaccggtgcggaagtggaagaagaaatggatccac

SEQ ID NO: 8320 - DNA, 419 bp, Glycine max
cccacgcgtccgtccacgcgtccgccaaagcctctgatggttgcgaggatattgtttttaatcccaatgttttcactgaattcaaacttgctgggagtccagaggaaatagcagctgatgaagataatgttagaaaagttagtcaatatcttactgatgtggtacttccaaagtttatacaagacttgtgtacacttgaagtttcaccaatggatggccagacattaactgaagcattgcatgctcatggaattaatgttcgctatattggcaaagtggctggagggactaaacatctacctcatctgtgggatctttgtaataatgaaattgttggcagatctgctaagcatattatcaaggacttattgagagagacagaggaccacgatcttgcaccagcactatctcatttctta

SEQ ID NO: 8321 - DNA, 430 bp, Glycine max
cttccggttatgaccggtgtgaaccaaactccggggaaaagtccctggtccagttggaagactttgcaaatcacaatgcttttgagttacttgctaaatatgggacaactcatctcgttttcaatgacgatatacaggggactgcatctgttgttctagctggagttgtagcagccctaaaactcattggtggtacattgcctgagcacacattcctcttccttggtgctggagaagcaggaactggtatagccgagctaatagctcttgagatgtcaaagcaggtgatcaagccaacagttttgattggatcatcaggagtgggaagaacatttacaaaggaagtagttgaggctatgacttcaaacaatgataaacctctcattctggctctctccaatcctacctcacagtctgagtgtacagctga

SEQ ID NO: 8322 - DNA, 432 bp, Glycine max
aaattcttccaaaatcacgttattcagggatagtatcatggcaactgcaaccatggctactgcagcaggtgcagctgcccttttgtactacacattgaatcggaaattgcagactcacgatgcaatcgacgaagatggtgaagaaaatgggagtgatacgcccactgatacgccattaggtattggccgtgtttctcatcggttaatccaagcccctgcaacatggttggagacaatttcaacattgtcagagactctcaagttcacgtattcggagacacttgggaaatggccaattggggatttggcgtttggcatcagctttcttctaaagcggcagggaaactatcatgttgacagtgaattttgggtacggacagtgtacagctgaaaggatctgagattactgctgaacttaagtatctcttaaac

SEQ ID NO: 8323 - DNA, 236 bp, Glycine max
ctgatactttcttttaggatctactgtggagacctcaaaatcagagatcttttgctagtacaaccaatgtagaaggactccacatcagaattacttttatcaggattcggaagaattagttagcgttgtttatgtatgttaaaagagaaattaagggttagtcaatttaatgcaaatcccagctttacatcgtatcacaatgctagagatcaatgttaaatataatattttatcct

SEQ ID NO: 8324 - DNA, 447 bp, Glycine max
  modified_base (406)..(406): a, c, g, t, unknown, or other
atccttttaatcaggagcctgcttctgtggctttctcagctctcaatctcgcaatgcattttcatggttgggtttcctttttcattcttatacactataaattgcctctaaaagatggaaagaaggcatattatgagtatgctggtttgtggcatatgtatggacttttatcacttaactcctggttctggagtgctgttttccacagtcggtaagttacttatgtggatattttcagtattttgcactgattctaaagaatgattgattgttatgctgtctattggtatttcttagtgcagtgatactacttagttcttatattgaagttttaatcacctggcaaactatgtgacacaaattgaataacaatatatgcatacaacatgctaatgcataaactatntcttatgttaatttttagtatatgattattcctaatacttc

SEQ ID NO: 8325 - DNA, 277 bp, Glycine max
aaaaaaaaaaaaaaaaaataaaataaattaaaaaaaaaaaaaaaaattaaataataaaaagaaaaaaaaaaaaaataaaaaaaaaaaaattaaaaataaaatgggaggatcgttctaagtgttccagtgttagttacccttgaatggggcttctttttttttggatacaggtatttaaattcattgctattggcggttgttttttatattggggcctggaaaatccatggcgttgccgaactttttagctttgctagcacttgcaaatttttgtagt

SEQ ID NO: 8326 - DNA, 417 bp, Glycine max
aaaaaaaaaaaaaaaaaaaaaaaaaaattataaaaaaaaaaaaaaaaaaaaaaaaaaaaaaaaaaaaaaaaaaaaaaaaaaaaaaaaaaaaaaaaaaaaaaaaatttaaaaaaaaaaaaaaaaaagggccgccctttttaagggttcaagttttccttccccttctttccaactttttatttttttttttggtcccctaaatttaatttatttgccctttttttaaaaacttcttatttggaaaacccttgcttttcccaattttattccctttgaacaatttccctttttcccaatttgctttattaccaaaaggccccgccccattcccttttccaaaaatttccccaccttaattgccaattggacccccccttttaacggccttttaaccccgccggttttggtgtttccccc

SEQ ID NO: 8327 - DNA, 402 bp, Glycine max
gtcttccatttgtgtgtcatacacttgttgcgaagcctgttcagctgtcatataacaagtctttaatcctgatcataccatgtcatacccacaatgtacgaaacaagggctcactgtttaacacattatctgctattacagcgatctcagtttgaccttggattgcccttcttccactatgagcttgttgcttcgcaatgctaagcccctatttgactgtatatgagactcaatcgactactctttcaattactaccattcattccattactatcattgtacttaaatgactccaacaccaagtacagttttcacgacagcactggtcaaacatggatactatatgctacctacgctcatgaaggacgcaccagcactcttgctaagatagcttctaatgca

SEQ ID NO: 8328 - DNA, 159 bp, Glycine max
aaaaaaaaaaaaaaaaaaaaaaaaaaaataaaaaaaaaataaaaaaaaaaaaaaaaaaagaaaaaaaaagaaaaaaaaaaaaaaaaaaaaaaaaaaaaaaaaaagaaaaagaggaaggggggtctaagttttttaggtttgattgctagtgctggggac

SEQ ID NO: 8329 - DNA, 348 bp, Glycine max
aaaaaaaaaaaaaaaaaaaaaaaaaaaaaaaaaaaaaaaaaaaaaaaaaaaaaaaaaaaaaaaaaaaaaaaaaaaaaaaaaaaaaaaaaaaagaaaaaaaaaaaaaaaaaaaaaaaaaaaaaaggccaaaataaaaaaaaatgaaaagaaaaaaaaaaaagcaaaaaaaaaaaaaaaaattgccgaaagcaaaaaaaaagtactgacgtacaaaaagctgaatacaacacagatatagagaggacaacgaaccaggtactgagtgtacgtggtggcatgcacatattggtaaagacaattggcatttacaccataacgctagactaagaaagctattggatcagccat

SEQ ID NO: 8330 - DNA, 187 bp, Glycine max
aaaaaaaaaaaaaaaaaaaaaaaaaaaaaaaaaaaaaaaaaaaaaaaaaaaaaaaaaaaaaaaaaaaaaaaaaaaaaaaaaaaaaaaaaaaaaaaaaaaaaaaaaaaaataaagagaaaagtaaataaaaaaaagaagacgaaaagaaaacaaaaaaaaagcatataaaaaccaagacgaaaaacaa

SEQ ID NO: 8331 - DNA, 384 bp, Glycine max
atcaatcgtgcgattcataacaggcgatgatacattcaacgatgaaatgaactccgctgcggcttatgatactctatacacagacctagttaccgatgccgacaacgttatccaaaacgctcttgatagccttcaacagtgttgaaaacgctgagcgaaatactgtcccaaaaaccactaacaagatcactgtacttgccgatggagaaacccacatagtgctgcgcataatagaaagcatcgatgaggccaacttcggatacagctacagcactgttagcggcagctgcattggcaaacacgacgtttaacatcacattggactccaaaccgaatgctggtcccaatggaaggcctactgggaagctcaatgtcaaatgcgac

SEQ ID NO: 8332 - DNA, 439 bp, Glycine max
cccacgcgtccgcccacgcgtccggctgatatgactggaaaagagattgaacgggctctactgaaggaagttatcagtaatcccagaatttttgtgtttgaacaccattttgctatagatcttctcacttgtcaggatcgatctgatatgatttgtcttggtgttgacacactgaattctaaaaccctagagcttttaggtgattagatttctttcaaaggtcactttacttgcgtcaggtggagctggacatatttatcctaaaactacaaatcctctggtagccactggagatggaattgccatggcacaccgagctcaagctgtgatttccaacatggagtttgtgcaattccattcaactggcttaactgatgaaaggcttcctattaaaccaaccaagcctcgggaaaatgcatttctgattactgaagctgtc

SEQ ID NO: 8333 - DNA, 234 bp, Glycine max
aaaaaaaaaaaaacaaaaaaaaaaaaaataaataaaacaaaaaaaaaaaaacaaaaaaaagaaaataaaaaacagatcaaaaacaaaaactattaaaatacttaaagaaaaaaaaaccaaaataataacagaaaatatatgcaatgaattaataaaaacctaaaacaaaaaaaacacaatgaaactaaaagacaataaaacaattagatgaataaacgaaagggaaccgtaagt

SEQ ID NO: 8334 - DNA, 403 bp, Glycine max
cccacgcgtccgaaaaaaaaaaaaaaaaaaaaaaaaaaaaaaaaaaaaaaaaaaaaaaaaaaaaaaaaaaaaaaaaaaaaaaaaaaaaaaaaaaaaaaaaaaaaaaaaaaaaaaaaaaaaaaaaaaaaaaaaaaaggggcggcctttaaaagaaccaaagttaacgtccccgtaaatgcaacgaaaaaccttttttaaagggaaactaaaataaaattaatgggccgaaatataaaaagttgggaaagggaaaaaccttggcataaccaaattaaatcgcttggaagaaaatcccctttaagccagttgcggaaaaaccaaaaagcccgaaacgaatcccatttccaaaaagtgcccaacctaaaagggaaaaggaaacccccctttaacgggacataaaacc

SEQ ID NO: 8335 - DNA, 397 bp, Glycine max
gaaggtttggaagaatcgcgatggagggtgaggaaggaggaggcataaggctgagcaagcgaatcgcaaacggagaggttgactacaagacgaaatccggcaccgcctggagccactcctatctcaaccagaagccatggcaccctctttcttaccccaaccaacgccgcaagtggatcgccgaacagacccacgccaatcgccaacgccgcaccgaagaggtttctcgcgagttcgctcaggagcaagagttctttcgccaaaccgctctcatctccaaaaaagagaaagaaaaggtccgaatcggattcttttttctttctctgcgtcttccctcgtttcatgaattttgaaattagggtttggggtaggtggagctcatgcaagctggtaagtt

SEQ ID NO: 8336 - DNA, 440 bp, Glycine max
cccacgcgtccgtgcagtgaagaagattgaagacaacaacactgtggatttgatagtcgacttgcgggctgacaagaagaagatcaaggatgcagtcaagaagatgtatgatattgagaccaagaaagtaaacaccttaatcaggtgagtctttatgtagagatgcttttagaatttgttagatgatatgatattgctaatgacaatggtatgcttgcagcgaatactattactgagacatacatgtggtgtgctttatggtttgtggcatgctggtgtgacaacgggttcatgttgcgcacagggaaactttgaaatgtggcatatgaaactcaatgttgccataacatgcaaatgagacagcaaatttgtatgagatacttgcatcgatacttacaacatatcattacttctgaatgtagattgttctgttgcacgcc

SEQ ID NO: 8337 - DNA, 427 bp, Glycine max
cccacgcgtccgcccacgcgtccggttggacccgaattcgtgggaagcatcgaattcggtgtttgtttataatttcttgtcggcgaagtggcgccgcggggcggacatgccgggtgggcctcgcacattcttcgcgtgcgcgtcggattccgaggagacagtttttgttgccggcggacacgacaacgagaagaacgcgctgcggtcagcgttggcctatgatgttacctcggacctgtgggtcatgcttccggacatggaggcggagcgcgacgagtgcaagggcgttttctgccgcgggaggttcgtcgctgttgggggttccccgacggagacgcatggaaggttcgtgaagagtgcggaggcgttcgatcccgccacgcggagttggagcggaatgaacgaggacttcttggattgcgccacg

SEQ ID NO: 8338 - DNA, 226 bp, Glycine max
cgcgatataacgtataccagaccaaaatcaatctgaggagtcagaaagccatggatccctacatgaatagggcatcaagcgcgtgcaattatcactaatggactacatattacggtgctcccatatggaacaataactgatcgataactgatgaatatagaggtgcaattgtgttggacgattaccatttggagcataagcttgcaaactctgacagggaacggat

SEQ ID NO: 8339 - DNA, 424 bp, Glycine max
cccacgcgtccgcccacgcgtccggccaggggcaccgtccagggcctccgtgaggctgagtccggcgactccctcaaaatccgactcaaccgagtcctcaactcggggggccacgcgggtcgcagactcgggaactcgctcggcgtggtgggcctcatcttcgcgggactcgagagtgggatgacctacttaaggggcaccgatgacctcgtcaacagcgccgtcgccggactcggcaccggaacgctctttagggccgccgccggaccccgatccgccgctattgccggcgccatcggcgggatcgccgccgccggcgcggtttccgggaagcaagctttgaaaagatacgttccgatctaggaaacaattaggttaacgaccatggggatggtggtacaaattagattaatattttggaata

SEQ ID NO: 8340 - DNA, 443 bp, Glycine max
cccacgcgtccgtgctgttgtaacatctgctggtcaattatttacttttggtgatggtacatttggtgctttgggtcatggagacaggaaaagtgtttcattaccaagggaagtagagtctctcaagggtcttcgaacagtgcgggctgcatgtggtgtttggcatactgctgcagttgtggaagtcatggttggaaattcaagttccagcaactgctcttcggggaagctgtttacttggggtgatggagacaaaggtcgacttgggcatggtgataaggaagcaaaacttgttccaacccgtgttgcccttggtaatgttaaacccaatttttgtcaagttgctttgtgtcatagtctcactgttgcacttaccactaagggccatgtctatacaatgggtagtccagtctatggccagttaggaattccttaagctgatg

SEQ ID NO: 8341 - DNA, 441 bp, Glycine max
gtaattttaatgaatattgaaataaatttaaaaaactgaacaagctggagcagtttactcaggtgattaattctttgctcatgtatatttctgatcttcagccaaaatattagtcaaggctctattcaattgaaaaagtttttttttcttttaacaggaactgagtgatatgactgccattaaagctgaagacatattaaccactctgcagagcctagaattgattcaatacaggaaaggtcagcatgttatatgcgcagatccgaaagtgttggatcgccatcttaaagctgctggcagagggggcctggaggttgatgttagcaaactgatctggactccttataaagaacaaagttgatggtcattggtcatatccatcaaggaaatactatgataatcctttggcgtgctatagctgcagctgccagtgtaacgttt

SEQ ID NO: 8342 - DNA, 437 bp, Glycine max
cccacgcgtccgctttatgaatataaaattttggtggatgcccaaaaaactaacctttttattttttgcaggttggacagcatttggattcttgtgtttttcttggagcaaacagtagctattcagctttagaggatgatcatgtctacttggaagaattagttgaaagccctcagtctaggtctttgagaggaagtgtggatgaattaccatctcagaatagtgcagttaacaactccacagaattgatcattgagcttcaggctgttggcccagagcttaccttttataacacatcaaaagatgtaggagggttattaaacctgtctaataaacttctacttgcacagttggatgcattttgcaggtgagttcctctacttaatagattaatatgttaggagggctgaacatttggcatggtattcaagtgtatc

SEQ ID NO: 8343 - DNA, 410 bp, Glycine max
cacacgcactagatggactatattgcggttataaccttcttcatatatcgcttgttatgagaagctctagaaatgatcacaggcacctaaggttgacattgtgttctagatccttcactcaaatctgacactccgacaacgctgatagagctgctagcttcagatatcaccccaccaacactgacgctggtggtaacagagatcacatttacacgcggcaccatacctgcattgactacatcattgacactaatatacagatttctagtattatatacgacagtgacactactagacatcatgaggctacactgggttatcaaggagacacagagatacagcatgtgctctaccggtgtctatggtataggctcctaggagcggcaccatgaatcatccgaatgctaatc

SEQ ID NO: 8344 - DNA, 446 bp, Glycine max
ggtgtatcagaatggcaacgatcagcgctgttcatgtggagttcctggagtttccagcggtggttacttcaccagcctccggcaagacctatttcctcgtcggcgcaggggagagaggattgacgattgaggggaagttcataaagttcacaggcataggagtatacttggaggataaggcggtgccatcactcgccgctaagtggaagggtaaaacttcagaggagttagttcacaccctccacttctacagggatatcatttcagggccgtttgaaaagctaattagagggtcgaagattctgccattggctggcgctgaatactcaaagaaggtgatggaaaactgcgtggcacacatgaagtctgttgggacttacggtgatgctgaagccgcagccattgaaaagtttgctgaagccttcaagaatgtgaattttgcacct

SEQ ID NO: 8345 - DNA, 334 bp, Glycine max
cacacacacacagacccacagacccacacttaacacatgcacctaaccacacttggttaatctcttcttcaaggcactatgtaataactggcatttctcgaatgttctgtatgtgattggatccattaaaaggttttttgagtctaaagttattatgtaagtggacaaaaaaaaaaaaaaaaaaaaaaaaaaaaaaaaaaaaaaaaaaaaaaaaaaaaaaaaaaaaaaaaaaaaaaaaaaaaaaaaaaaaaaaaaaaaaaaaaataaaatataaaaaaaaaaaaacaaaaaaagaaataacaaaaaaataatgtaccctaaaattaaattaaat

SEQ ID NO: 8346 - DNA, 251 bp, Glycine max
gtgattatgttcaatggattggctgaactttccatggtcgtttcacggcttcctgttttctacaagcaaagggactatctcttcttcccttcatgggtatatgcacttcctgcatggatcctaaaaatccccttgacttttgtggaagtgggtgtttgggtattccttacctactatgccattggttttgatccatatgttggaagattgtttaggcaataccttgttcttgtactagtaaatcaaatggc

SEQ ID NO: 8347 - DNA, 411 bp, Glycine max
agcacgcattcgattacatgagctcagatgttgtcaccgttgacatctgtgtgtacgactaggagcttatggcatgatttcgttgaagtgtaaagtacggtgctggaatctgccatggagagtatgacttccactgtggatgcttacaatgaactgaaaagatcgatgacagaatctacttgacgatgtcatagctcgagaagaacatttatgaaacataccatggctgatgactctagaccaataggatcactgatgtgtacactgaacctctaaacatatatgccatgagtcatctctttcatagcgtacttgtcaagtgaatggcatacgattgtggaatctgactggtcatttggtcatgactaatattataatacaccaatcttataattaactatatattgcact

SEQ ID NO: 8348 - DNA, 232 bp, Glycine max
gaattttatgcaagcaagcactctgtgaatgtaaagaaggaagctggtgtgcttcctgtcataaatgttgacatgggcacagtccagctgactagaactaatggagagaccactaataaatgcctaaattggctctatcagcattgtacccattactacgaagctgttgcacattgtgccaaatggcgtgcagaagtgaagatcggtgctaactagccatatgatctgacta

SEQ ID NO: 8349 - DNA, 448 bp, Glycine max
ctcacgcgtccggtcttggtaagatcaatttggctcacgatgaagtcagatctagggtgtcaagagctttgcatgctgtaagcctgtctgactacatgaaggtattaaggatgacaaccttgagcactcatacaaatgtgtgaattatacaataaatgaactgtccttctgtgacaatattcacagatctgtccaaactctgagtggcggtcagaagcagagggatgccattgctggtgctcttgcttaagcttgtaaagttctggagtcggatgagctcacaacatacttagatgaagctgaccaggttgcggtcatcaaagctgtgaggaactcattggatacctttgcagaaggtacagcattatgattcacccatcgcttggataaactggagtatgcaaatggtgccatctacatggaggatgggaaagtaaccatgcatgga

SEQ ID NO: 8350 - DNA, 445 bp, Glycine max
  modified_base (323)..(323): a, c, g, t, unknown, or other
ttttctctctctctctctctctctctctctctctctcatcattacttgcgcatatactagaacatgccattcctagaactgacatgagtatcttcatgtgtagctggatggtctttttaactcatggtgtgaatcttggaggaggaagatgtggttgaaaacatctgttggatcatatgagtgaatgtgtatgctcttacggtgttaaacatgtagatatagggtaagataaatacctgcattgtatgtatatttggaagggttatattagaggaaataaggctcgtttctgtgagtcttgctaactaatgtgttatgctgantattatgcaatcaattttataatctatttattatagtatcatgtataacattattttacgcagttatacttcaagttactcaacttaatataatagttaatatttggtatatatgtaattca

SEQ ID NO: 8351 - DNA, 445 bp, Glycine max
cccacgcgtccggtttaattcaaagacacttattccatttgacattagaggccgtgttcgaatacttcatcctccagttatgacttgtttcccattctcatttggtaagaaagtgcgctttgtggcaacacatgatccagatattgatgaagtactctcaggcattcaaaatgtaagaatctatacctacaaagaactaaaagttgcctctgacaatttcagtccggccaataaaattgggcagggtggatttggttcagtttataagtgaaaccttaacaatattatggtggatgatcagggactgctaaaagatgggaaagtagctgccataaaagtactttcagcagaatcaagtcaaggggtaaaggaatttatgacagagattaatgtaatctcagaaatagagcatgaaaatttggtaagctatatggttgttgtgtgg

SEQ ID NO: 8352 - DNA, 398 bp, Glycine max
acggcacgtgcagcgcgatactcagccttcggaacacgctactgctgtatcacagttaccgattgaattacccacacgctactatgtcgacattgggcttcttctttcctggacattgactttgaccttgcttcgtcctacgatggccactgttctgcacccattatgattcagatgactagctgaagctaactagatcctcctccatctacagatccactatcaaatgcttgactcaatatcctctttattcactagttgacaactcccataactatctcgagagcttacacgaaggggaacgtcattcctctcttatgctgcatagtctacgatcacctcactcagatgcttgcgtaccgctccctgattaaggaggacgagagagatgctcccag

SEQ ID NO: 8353 - DNA, 458 bp, Glycine max
  modified_base (429)..(429): a, c, g, t, unknown, or other
gttcaaaccactcagcttcgtcttcataccacaacacagagacatgttcccatcatcatctcccacctcactccacaccccaatccttcaccaccgttactgtcaccaccctacaccgtcccgcacccagttctcccctctcaccctcccacccttccgtcacaccctctccttcctcgtccctccgccgcttcttccggctgcgcgcgccatccccgccgcatccgccgcgaagggcgacaagtccggcgagcagaagtgggtcctcgagggtctggtcatggagtccctcccgaacggcatgttccgcgtgcgccttgacaacgaggacttgattctaggctacatctccggcaaaatccgcaagaactacgttcggatcctccccggcgatagagtcaaggtcgaggtcacccgctacgactcctncaaaggacgcatcgtttacaggctccgca

SEQ ID NO: 8354 - DNA, 369 bp, Glycine max
ggagcattggtggaccccaaatgccattacttatggtgccgtgatgcatgggctacgtagggagggaaaattgtccgaggcgtgtgatttgaccagggaaatggttgaaaaaggcttgttacctactacaggtgaaattaacctgctaatacagtctctctgtcaaaatcagaaggtagtataagctaagaagtatacagaggaatgtctgaataacgagtgtgccattaatgtagtacacttcactactgtaattcatcgcttttgtcagattggtgacatggaagctgctctatccgtgctagatgacatgtacttaagcggcaaacatgctgatgctggcacatatacggcattgattgatgcatt

SEQ ID NO: 8355 - DNA, 447 bp, Glycine max
atgtcttcttctcttcctcctcgtactctccgacttctccatttccgaatcacaatccccctgggctgccaagaaaaaacgcatgagagacaaagttcgcaatatcttttaccacgcatatgacaactatatgactcatgcatttccgcatgatgagcttaagcctatctctaaaactttcaccaactctctaagtgagttgggaaatttgaagcttgaacacttgcctcaagactacaacggctctgcccttacgcttattgaatcactgtctagccttgttattatgggaaattatactgaattcgagagggcagtgctctggctttcagaaaatctgacatttgatgttgatgcgcgcataaatctttttgagtgcaacataagagttcttggaggacttgtctctgctcatttacttgcatctgattcttcaaagaagttttt

SEQ ID NO: 8356 - DNA, 386 bp, Glycine max
cttactcgtacgattgcttttagcatttgttatagtattatgaaacatgacatcagcaagcagacacaatacaagagttatattatttgtaaaccgtgcttctcacagtccaagtgaattattcagagtcatatatagttaactaaacaagctctttgcttgagttattaagacctggaactgaaaggaaagcactgcatttctattttttaaaaatctggatatccctccaacgagattccatgtagttggaagcaccatgctgtgcgtaaaccccaaacttgaagtagtgagtgctggctccacggacaggtccattgtacctgggattatcctgcccattaagaaaaatcttgacattgtttgcacccacatgatggatcacg

SEQ ID NO: 8357 - DNA, 410 bp, Glycine max
cccacgcgtccgttgcagtgtacccaggaaatgtcttggccttgcacatgtctaaaccacaaggatttaagtactctagtggacagtatatttttctgagctacccagatgtctcgccttttcaatagtaagtgaacattggttttcttaatatttatatagcttattaccattaaaatcagggagagacgttaacaaaaaaattaatttgcttctttgtaaatttcccatttcttttagttgttaggaagtagtagatatatatcagacttgggaaaatgacatggttggaaggattgacaacagtttcacattttattgcatgttatttattatgagatttatttttattataactataaagatttatttgattaaagtttttagttttttttaaggaaaaagatttt

SEQ ID NO: 8358 - DNA, 337 bp, Glycine max
cggacgcgtgggcggacgcgtgggtttactcgtgggaaaaaaaaaaaaaaaaaaaagaagaaaaaaaaaaaaaaaaaaaaaaaaaaaaaaaaaaaaaaaaaaaaaaaaaaaaaaaaaaaaaaaaaaaaaaaaaaaaaaaaaaaaaaaaaaaaaaaaaaaaaaaaaaaggaggaaattaaataaaattaaagttaaaagaaaaaaaaatggaaaaaaaaagttttttttaagagaaattaaaattaaattaaattgggtatttaattaaaaaggaataaaatggaaaaaattatggattaatataatttattagtagtgaaaaaaattttatttttta

SEQ ID NO: 8359 - DNA, 376 bp, Glycine max
cccacgcgtgcgggatcccatggcttctcttaattggccttcttggaggtatggattgaggcattgataccggctattcaagcagagaatcaccaaggaaggtcaggaggacgtagcagaggactggatcgagaagtatagcccctgggatgtcgtgaggcatgacattttataccccatcagagtctatgctcatgttgaggttaatcctgattgaagccgaaaatgggttgtacgagaggttgcgcatgcactggcttatgaagtgccaattacaggttaccacaccaagatcaccatcagtcttggtctatcgaatgcaaaagctagtgctgaagatttcaataaatatggatataatgatgctcatcatgat

SEQ ID NO: 8360 - DNA, 280 bp, Glycine max
cccacgcgtccgcgaacgatttgattgtttggaatgcattaacaaagcaacgagtgttcggttcgaaaccagcagagagaaaaaaaaaaaaaaaaaaaaaaaaaaaaaaaaaaaaaaaaaaaaaaaaaaaaaaaaaaaaaaaaaaaaaacaaaaacaaaaaaaaaaaaaaaaaaaaaatataaataaaaaaataaaaaacaaagagaatcaaaaggaatagagtcagattaaatagaaggcttttaacagaaagtgaaggttacgattaagacgagcaga

SEQ ID NO: 8361 - DNA, 404 bp, Glycine max
  modified_base (363)..(363): a, c, g, t, unknown, or other
ctcatgatcgttgtgaagccgttgtcacaatcgcttatgatgtttaggctcgtatcagagaccctgtctatggctgtgtctctcacatttttgccttacaacaacaggtaccattatatatgttattacaaacctcatcaaaacttttaaacttttttttctctagaaataatagatcttgtcatgctcatctttaatgtttatatatcctgttagacatcaaataagtaacacattaacacctatttaatgtaggacaaaacttagatggagttctaatggtgtttttgatgttatttaatcagaattggagtttccaaaatacctaaagaattgtatgtaggttatattcttttatggttntcaataacggaagaaatagacttaaatatctaaacatttgc

SEQ ID NO: 8362 - DNA, 373 bp, Glycine max
  modified_base (258)..(258): a, c, g, t, unknown, or other
cccacgcgtccgacaacccatcggtgaaattcaaaagccccgaaagcgtgacgcgcccactctcctcacagcgcgtaaacgacgacgtcgtcgtcgtcttcttattactactcctcaacgacagcttcccagcctgcgttttcttaaccgttcgatccgccgtcaagtcaacggaacagtcaatgtcttcaatcactataattgaacggttcgtcgtttggatcagtaatgagcgtaactcggagttatcagagactntggttagttccaagtcgtaaacgtcgtaacagagaaaattcgccattgccggtattaagctcgaattacccgagcccgggtggccgtggagtaaatacccacgcttccaggcccc

SEQ ID NO: 8363 - DNA, 358 bp, Glycine max
  modified_base (67)..(67): a, c, g, t, unknown, or other
agaacatacaccttttctcgtggcccgagcactgccgtacttatttgactagggtggctgccggcangatgaggcatccacaatggcaaaccaacactccagggaatgatatagctgatgaagagtctttcaatgactcactaaaggatgttcaggacatgtcccttaggctctcaattgatgctgacttagcaggtttaagttctggacccgacatgcaagaccaagtgaagcgtctcctaagcaggatgaagaagccagattctggtggttcaaatgacactgatggtgggaataagatgcctgacaatgtaactgggaaatatcctctactgtggagaagacgtcggttgattgt

SEQ ID NO: 8364 - DNA, 357 bp, Glycine max
ctagcgtgtgccaaatatgctgtgttcggtatggattatgaagggcatggacgttctgaaggtgctcgttgttacataaaaaaatttgataacatcgttaacgattgttatgactttttcaagtcagtcagcgagctgcaagagtataaggcaaaggctagattcttgtatggagagtccatgggaggagcagtgagccttcttttacataaaaaggacccttcattctgggacggtgcagttctcgtcgcacccatgtgtaagatatcagagaaggtgaagccacacccggtggtggtcaacatattaactaaagttgaagatataatcccaaagtggaagatagttcccacaaag

SEQ ID NO: 8365 - DNA, 215 bp, Glycine max
aaattaaaaattaaaaagatctatttaaaaaaacaaaattttaaaaaattaaaattcaaataaaaaattatttaaaattaaaacataaattaaatttattaaacttatttttaaaaaaaaaccaatttaaaaaacattttattttcctaaataaaaatcctattaaaaaaaattatattatataaattagaattatataaaaaattcccttaaaa

SEQ ID NO: 8366 - DNA, 285 bp, Glycine max
cctgactcttgtacacatatgcacattttcgagaattaagtgcaaggtaagtgcttcaagtgactagcatgaagcgcatattacggacaaatgaacgtagacagtgctggtgaagagagtgcagatctcatcctcacggccactggacttacggtgcactcacgctatcttcgtatcaactatccattcacccattagagagcacttctgttgcactcaaagtgctatccttggaatcctgatcctgatatatataagacttggagacagagtacgactgtctat

SEQ ID NO: 8367 - DNA, 188 bp, Glycine max
ttcgccacgcgttcgtctgatattggaaactcggaagattaaaggcggccagtccagaattgggaccctgaaaaataaagccattgattcctcctctaaattcactcattctctttaaaaaagagggaaaagggaaatttattatccggttccatcaatgtccctttgagattttagaaattccccgg

SEQ ID NO: 8368 - DNA, 425 bp, Glycine max
cacacatcgtacgaccgaattcactgcaatcctaattctgcacttcgcgagcattcgaagatggggctgatgatacatctcatcatccttactctgtcagacactactatcaccgttatcgcagagtacatatacaccattgactccggaatggccctgattcagcgacacggggactatcccaggaccagtgcacagccttatctatcttgctaagcagctctatgatggttgcagcataggcgatgctaacatacaagacggatcaaccattatatacgcacttgccattagcagtgacccactcatattgggcaacactatcaccgttatgaccgatactcacactgcagcttgataacacattattactaacgtgaggcacgatactcacaacgtttacagccttcctgatgatcatgctg

SEQ ID NO: 8369 - DNA, 348 bp, Glycine max
tcatgacttcttcaatggtgcctgcagaaaccttgtttgtactgatcttttcactaggggaatagacattcaagcagtcaatgttgttattaattttgattttccaaagaactcagaaacttatctgcacagggttggtcgttcagggaggtttggacacctaggtttagcggtgaacttgatcacctatgaggatcgcttcaatttatataggattgaacaagaacttggcactgaaataaaacaaattccaccacacattgatcaggcaatatattgccggtaactggtggtaaatacccagattgtattcacaaccgtggtgaatagcattggttgatgcgaatg

SEQ ID NO: 8370 - DNA, 422 bp, Glycine max
cttcaaggctgtgtgcacattgtgctttctttatgggtttgcagaggaaacagggagaggttggtcaagaaggtcagcaatttgatatacgagggacagttgaagaatttcggcattctgttaatatgtacatgttctggaaaccggggatggagatttatgtttctcatgttcgtagaaggcaaattccattctatgttgttcctgatggttataaacgatctcggctatcaaggccaacatcacaagttgagaattgtaaatcatttcataatgaggtttcggggactgaacatgttgagagaatccgtaagaggaagaacaatgactgtgtggatgtgaggggggatgctatagttaaaaggcaatctgctagtccttctgaagatagattggcaagacacaggcaccttggtactggt

SEQ ID NO: 8371 - DNA, 380 bp, Glycine max
cgaaaaattgaggattttgttgcaagagcaaaggaaacagcatgtggcagagttattggagaaggtggaatcgaatgctcttcatttgttgagacagaaagatgaagaaatagcgcaggcaacaaagaaaagcaccgagttgaaagaatttatgacaaggctgaaggaggttgaagccgtttgcaacccaatcatcagtgctgcgtatcagagatcaggaggagccccaggtggtgcaggtggcgaaggcgaagacgaggatgattctcacgatgagctctagattagtctaaatttttatcatatatgggaaattaagaattcccatgcgctctgcgcttgctttcttggtgccgatgataagatacttgtgaaattac

SEQ ID NO: 8372 - DNA, 309 bp, Glycine max
ggatggcccttctgcttcggctggaggttgctgcagtggaagagtacctatcataacctatctgcatcaatgtagtcctttatgtcttctcttctttcattttgggtttggatatgaagatatatatgttctacgtccattcataaaatcagataattgtataatgttttctttttaatcttgactttgtttctttgaaaaacccaaactcgtgctggacacgatagcaaagaccaacatgattctctcgatatgcatctacttacgtctaaattattaccaggttcgcccactctagagttcccatgc

SEQ ID NO: 8373 - DNA, 424 bp, Glycine max
cccacgcgtccgcccacgcgtccgatatatttatcttttcttggaagaaggaatccatagaatggcaatgcacaagagcagttcaggttcagcattgggtccgggaggcttggacttaactcaagccttcttcaagtcgatcatgaacgctgcagcttcttctcccaccaaacgccacaacaaaatctctgttgttggggcaggcaacgtgggaatggccatagcccaaaccatcctcactcaggatctcaccgacgagcttgtgctcgtggatgcaattcctgacaaactccgcggcgagatgcttgacctccagcacgccgctgccttactgccccgcaccagaattcaggcctacaccgattactcggtcacgctagtctctgacctttgcattgtcacagccgtagctcgtcaaattaac

SEQ ID NO: 8374 - DNA, 426 bp, Glycine max
cccacgcgtccgggtgccctgtctaatctaggccatatatgctcgatgctgttggacggtaggttgtcaatgcagctgactcatctatgttcggacaagatggtagacttatctgaacttcaaaaccactatctggaaatggaaacgaaacatggaatgagaaaggatatgcagtcagaatgtctacatgtaacccttgacgaggtactatgaaaataaacgatggtgcatacctaactctaaagatgatatacagcaacaacgagtgccgcattggagtaatgaagattttctacatctaggaggctgaacaactgtcgcacgaacacctgctatgacatgatgcatgcgtactaagtgaatagatcttggaatggatccaacagactattatcttatatgatatctatatgagcaaatgaatat

SEQ ID NO: 8375 - DNA, 315 bp, Glycine max
ccactcgtcctaaaaaaaaaaaaataaaaaaaaaaataatttaataaaatataaaataatataataaattagtaagttataatataaaaattaataaataataaaaaaaaaaaaaaaaaaaaaaaaaaataaaaaaaaaaaaaaaaaaaaaaaaataaataactttatcattttaaaaaacaatatttttcttattcattctattcttaaaaaaatcatataaattattattaataaaatatattacaattactactattaaaattttttaatttaaaaatattaattatatcaaatttaaattcccttatataa

SEQ ID NO: 8376 - DNA, 367 bp, Glycine max
agccgaagtaggccgagtatctcttgctgaagtgagtgaccgaggtgaagccgcagggcagggccacctctagcaccgacagggtggagtgctgcagcaggcgccgtccttcggtgatgcgcaattccaggtagtagcgcatgggcgcggtgtcgagctgctcgcgaaacagccgctcgacctggcgccgagagcggccggcgtagtcgcacagctgctcgatggtcaggggctcctcgatgttggcctccatcagggtcaccacctagcgcagcggcggcgtcatctgcaccttgagcgtctgattgacctggccgaagcgcgattcctcgaaagccaggatattgaccaggccatcggccagggc

SEQ ID NO: 8377 - DNA, 414 bp, Glycine max
tcgaccacgcgttcgatcactcgttcgcattcattggcttaatgctagcaatgtcttcctggttgtgcattcatttctttcctcttctctcaataacccttttttcaatttggtgcttaacaacatctcaagcctccaataacatatcacacccctatatccttcccattaataaaggccccggcacaaaatatgtactacacttcagttggcattggaactcctaggcacaaccttgattcagtcattgatctttctggtgaaaacttatggtacgattgtgacactcattacaactcatcatcctacagacctatatcttgtggctcaaagcaatgcctcgaaattggatgtgttggatgcaatggccccttcataccaggttgcacaaacaatacattccctgttaatgta

SEQ ID NO: 8378 - DNA, 429 bp, Glycine max
atgacacattactagtaaatgtgtactctcatgttacgaacacatttctcaatcaagagcatgagcactgaagtatgctcgcataacatccctaaggtgaattacatcatatggtcagagatgcagttctaattcaaacagtgatgcattgcatctaatcagatcactcagagcatgcatatcactatacaccttatacattgaaagaagctgagtggatgagcatggtgtatgatgattatttttgcactcatttgttgctatacggacaccctaatgagatattgctttgaaagcagagaatgaatcactagctatccagatatcggagaagctgcattcggaaaatatggtcgtattattgtctcaatcatattgtacactgaattatattcatgttgtgtggaattcatcaccttggaaggagac

SEQ ID NO: 8379 - DNA, 400 bp, Glycine max
tacttgcgatctctgcttgagttgcacccaatgaatacgaaaattttaacaaaaaaggatgcaagcatgctccaaatgggttatatgatagcaaatggggttacggttgttggggaggatcatgttaaggtcgcaggagcaagtcacaccaatatttcctgcccaattagaaaggattcgcaacaaaattgtactacacttcagttggcattggaactcctaggcacaactttgatttagtcattgatctttctggtgaaaacttatggtacgattgtgacactcattacaacttatgattctacagacctatagcttgtggctcaaagcaatgccctgaaattggatgtgttggttgcaatggccctttcaaactcatgtgcacaaacaatacatgccc

SEQ ID NO: 8380 - DNA, 337 bp, Glycine max
gcccgtcttcttgaacttggttacaaacaacaactcaagcgtgatctttcgtaggaggcgatttcaaatttctccctctcgtcatccgtttcatcagtgctgactggtatcaccactctatacaacactgggttgaactacagtgtccccgtctcactgcagtacgcgggactctattataggagtgccaagctagctgtccctacattggcactctatgactcctggattactggctgcatacaatatcatcaggtcagtcttcaggttcaacatgcttacatcttacactcgcacagcttatccactcttattattcatactacaacctcctgct

SEQ ID NO: 8381 - DNA, 366 bp, Glycine max
tatactagcatgggtgtatgcccacagcatgacttgctgtgggaatccctaacaggaagagagcacctactcttttacggcagacttaaaaatcttaaaggttcagccttaacacaagcagtggaagaatcgttgaaaagtgtaaacctttttaatggaggagttgctgataaacaagctggaaaatacagtggaggaatgaagaggaggcttagtgtcgcaatttcattgattggagatcctaaagttgtttatatggatgaaccaagtactggattagaccctgcatcaagaaacaacttatggaatgttgttaagcgtgcaaaacaggatcgtgcaatcattcttaccacacattccatggaa

SEQ ID NO: 8382 - DNA, 383 bp, Glycine max
aagcaattgtgattcctgaagattttctttgccctatatccttggaactaatgaggggtcctgttattgtagccactggtcagacatatgagagatcttacatacagagatggatagattgtggaaatacaacatgtccgaaaactcagcagaagctccagcatttgacccttacaccaaattatgttttaaggagccttatttctcagtggtgtatagagcacaacattgagcagccaacaggactaaccaatggaaaattaaagaaaagtgatggatcgttcagagatgttacaggtgacatagcagtaatccaaactttggtccagaagctctgctgcctaactgatcacgagcgtacagcagctggcactgatctctta

SEQ ID NO: 8383 - DNA, 429 bp, Glycine max
agaaaaagttaaccataacaaatatcccgccacgtccagaaagaagtgccgtcgggagggctgacgtgtacttgtatcatcgtttgacttgccagctttacagtgttagctgcctcctatgatgggaggagtgtcgggcggcgacgactacttcgttcaaatccaccaaccgaacaagcccggcgaccctttcatcatcaccttcaattgccccgacaaaaccggtctcgcttgcgatatctgcagaatcattctcgatttcggtctctgcatcaccaaaggaggtctctcactttcatggaattcttcgtttacagatcctattccattttattcttatcttaatttaatggaccttcttttgaatatcattcagatgtttcaaccgatggagtgtggtgttactttgtgttatgggttattccacac

SEQ ID NO: 8384 - DNA, 354 bp, Glycine max
ctcgttggcgaaaccggtagcggcaaaaccactcagattcctcagtttgttttggaagctgtggatatagaaaccactgataaacgtaggaagatgatgattgcgtgtactcagcctcgtagagtggctgcaatgtctgtttccaggcgtgtggctgaggagatggatgtgagtatcggagaagaggttggctacagcatcagatatgaggattgcagtagtgccaggacagttttgaagtatctcactgatggtatgctttcgagagaggcattgacagatccgctattgtagcgatacagagttattattctggatgaagcacatgataggactttggctactgatgtgcta

SEQ ID NO: 8385 - DNA, 337 bp, Glycine max
cgacaagcaaacgaaaagtaaatcaatcaatcgttggaatctctcaacttatcgctgcttcctggtacgtccattttctcttttgtttctatgttatcttgttagggtttccttctcaattgcaattgcaattcgcacattattattgattagttttagatttgggggtttccgtttcaatggacgacggcgagctggatttctcgaaccatgaagtgttttcgagtccgaacatgggggagcttccgagcagcggttcaatggacagtttcttcgacgagcttctcaaggacacgcacgcgtgcacccacacccacacgtgcaacccttccgggcc

SEQ ID NO: 8386 - DNA, 388 bp, Glycine max
cccacgcgtccgcccacgcgtccgcccacgcgtccgaaaaaaaaaaaaaaaaaaaaaggaaaaaaaaaaaaaaaaaaaaaaaaaaaaaaataaaaaaaaaaaaaaaaaaaaaaaaaaaaaaaaataaaaaaaaaaaaaaaaaaaaaaaaaaaaaataaaaaaaaaaaaaaaatgggcctccttttaaaaattccaatttttaatatcctttcttttaacattaaaatttttttttatggtccccaaaattaaaatatttgtcccattttttaaaaatcgtgattttgaaaaacttttgggttttccaaattatactcttttaaaaaaatccccttttttcaaattgggtatataccaaaaaggcctcatcaaatagctttttcaaaaa

SEQ ID NO: 8387 - DNA, 343 bp, Glycine max
cccacgcgtccgaaaaaaaaaaaaaaaaaaaaaaaaaaaaaaaaaaaaaaaaaaaagaaaaaaaaaaaaaaaaaaaaaaaaaaaaaaaaaaaaaaaaaaaaaaaaaaaaaataaaaaaaaaaaaaaaaataaaaaaaaaagaaaaaataatacataaatctatctatttagaatattattatcaaccttattgacaattaatactatcacaaaaactcaaaattatcatcactgaattaatacctattatcaaggttgatacattttgctaaatgatatttattaatcatactttcattcagtattataatattagatttaaaagagaattgccattatatta

SEQ ID NO: 8388 - DNA, 415 bp, Glycine max
cccacgcgtccgaaagactccttttctctctggtcacgaaggcattactcaatcagcatcgtggaaggaaggtttagtgcaaaaacatttatctggtgaattacccattggtcgtgagtgcagctttcttcaaacagttttcaatgcaactaatgtgatggctggagtaggcattctgtctacaccttatacattgaaagaagctgggtggatgagcatggtgttgatgattctttttgcagtcatttgttgctatacggccaccctaatgagatattgctttgaaagcagagaaggaatcactagctatccagatatcggagaagctgcatttggaaaatatggtcgtattattgtctcaatcatattgtacactgaattatattcatgttgtgtggaattcatcaccttggaa

SEQ ID NO: 8389 - DNA, 409 bp, Glycine max
cccacgcgtccgcttttgcattgaatttagcagacgcagagccaagtgtcgctgattctgaattgaaggatgatcttaaaccatcatatcatgtggctcttggttcagataacacatggtatctatttacagaaaagtggattaaaacggtatatgggacaggctttcctaatgttccattggctgaaggggatgctcgacctcgagaaattatgagtattctccttgataaggaggacatgaagtgggataagctttctcactccgagcatggtggtttatggttcatggaaggatctctagatacatggtcttggagcttgaatgttcctgttttgagtagcttgtcagaaaatgatgagctactactacagtctcaagactacaaagatgccattgaacgttacaa

SEQ ID NO: 8390 - DNA, 347 bp, Glycine max
gtgttgttccaactttgtggacggcagtgcgtgttaaaggatgttgattgtaacagcagattttaagatttttttttatgaatcaactaaaataaaaaaaaaaaaaaaaaaaaaaaaaaaaaaaaaaaaaaaaaaaaaaaaaaaaaaataaaaaataaataaaaaaaaaaaaaaaaaaaaaaaaataaaaaaaaaataaaaaaaaaacaaacataaaataaaaaaaaaaaaaaaggggaatcctataaagaagtccaaactttaaagcacttgatatatatgttataagtcattaatatgagaccatataaataatgaattacccttttaataaaaacatttgattg

SEQ ID NO: 8391 - DNA, 410 bp, Glycine max
  modified_base (402)..(402): a, c, g, t, unknown, or other
ctcgctgtgggtgtcaagcttacatgcggattagcaaaacaacagaatttggagctccagaatggcgtgtgactggttttgctaaccatcacaatcatgaacttttagaaccaaaccaagttcggttcctccctgcatacagaactatctcggatgctgacaaaaaccgaatactcatgtttgccaaaacaggaatatctgttcatcaaatgatgaggcttatggagcttgagaagtgtgtggaacctggatatttgccttttactgaaaaagatgtaaggaatttactccagtcatttaggaaattagatccagaagaagaaagcttagatttattaagaatgtgcagaaatattaaggagaaagatcctaattttaaatttgagtacacacttgatgcanacaaccgt

SEQ ID NO: 8392 - DNA, 414 bp, Glycine max
ctttggcgctgcgcagaagagagagaacgaacgaacgaacgagcataacacgctttaataatctgtggcagtgagtagtgatatgcagcaaggtgatccaacggtcctaagcttgaggcctggtggtggtcgtggcggcggaagcaggcttttcggtcactcctcctcctctctctccgccgatctccctctctgccgccctcatgcctatttctctctcaaggaatggaatgggagttgagagtttgaaacttggaatgtcctgattcttggtgggggcacttggttatgtgttcttgctgtaatatggacagaaagcaacagcatgtgggctgtaggtgtgcttcgttgagttttagattgcccataaaggacccacacacattcctgctcgtttgcctttccaactagggt

SEQ ID NO: 8393 - DNA, 400 bp, Glycine max
  modified_base (319)..(319): a, c, g, t, unknown, or other
  modified_base (382)..(382): a, c, g, t, unknown, or other
cccacgcgtccgaagacttcttgttcgcaccctacggaccctattggaagttcatgaagaaactctgcatgtccgaactcctcggtggccacatgctggaccagtttcttcccgtgagacagcaagagacaaaaaaattcatcaaacgtgtcctccaaaagggtatttctggtgaggccgtggattttgggggagagttcatcacgctctcgaacaacatcgtgtcgagaatgatcgtgagtcagacgagtactactgaggacgagaacgaagttgaagagatgaggaagctggtgaaggatgccgcagagctctcggngaagttcaacatatcggacttcgtttcgttcttgaagcgctttgatttgcaggggttcaacangaggctcgagaggattcg

SEQ ID NO: 8394 - DNA, 424 bp, Glycine max
cccacgcgtccgcgggtgtattcctgatgataagtttggtgggttcaaagatgtgggcaccaatgtgtcttgtgttgtttcaaggagggacatggcaacccagatgagcccacaggggatgtgcaggtagatgaacacttaccgtgacaagatggtccaagaaacatagggccttattcactggctgaggctcagaacaagtcaaaagctggaaaaaagaaaaagtaagcactcaattgtcaacttgggatgtttctgaaacgccaaaacctgccccaaaggcaaaaagtgaggaagccaaaatctctgcatgggagaacttgcaaaaggcaaaagcggaggcagcaatacggaaactagagatgaaattggaaaagaggcgagcatcctctatggattagattatgaacaagcgtatattggc

SEQ ID NO: 8395 - DNA, 406 bp, Glycine max
  modified_base (398)..(398): a, c, g, t, unknown, or other
aaagagcgtgtacttgttcttgctgctacaaacaggccttttgatcttgatgaggctgttattaggaggcttcctcgacgattgatggttaatttgccagatgctccaaacagagaaaaaattctcagagtcattttagtgaaagaagatttggcacctgacgttgattttgaagcaatagctaatatgactgatggatattctgggagtgacctaaaggttgtatgtatatttatgtatttttcacttcctttcttggtttctggagaaggtaccatctgtttctacataaaatattctcattgttatcttttgattgcagaatctgtgtgtcacagcagctcactgtccaatacgagagatcttggagaaggaaaagaaagagagaagcttagctntgtctgag

SEQ ID NO: 8396 - DNA, 268 bp, Glycine max
gcacaagtctattcagagcatgctggaaaatctgcaattgactgtgacgacgttaagcttgcgattcagtccaaggtcaacttcagcttctcgcaaccaccccctcgtgaggtgcttctggagttggctcaaaaccgcaacaagataccgttgccaaagactatagcaggacctggtatcccacttccacctgatcaggacacattaatcagtcctaactaccagtttgcaattcctaacaaaaggcctgccgaacctttagaagaaa

SEQ ID NO: 8397 - DNA, 205 bp, Glycine max
ataaaagccctagttagaagagttggtcgaatgagggatagctcaataattaatgtagaggaaaactcttaagtgcctttgaagactattaaaaggattcgttttttacataaaaaaaaaaaaaaaaaaaaaaaaaaaaaaaaaaaaaaaaaaaaaaaaaaaaaaaataataaaaaaaaaaaaaagcaaaaagaatagcagccat

SEQ ID NO: 8398 - DNA, 437 bp, Glycine max
gctatcttgcccctttcagaaggaacatatatcatttgcgcgatttttgtgaaggatgtggacgtccacatggaaaagaagaattattcaattacagacagtcttcattaaggaatgtcattgaaagatgcgttggagttttgaaagcaagatttccaattttgaaattgatgccaagttatcccattagaagacaaagattaattctcattgcttgttgcactatacataattttataagaatgcaaaatggcgtggatacactctttgaccaatatgctgaacaactcgtggacatggatgagcaatggttaagtgtagagcaacaaggtgtcaacaaaaatcaagcagctaaagtggcacaagttcgacaaaccataacaaatgaaatgtgggaagattaccgtaaatcttaaaagaatttatattaaatgtta

SEQ ID NO: 8399 - DNA, 432 bp, Glycine max
cttgtgtcatatgtttggaggaaactgatgttggtcagattttttcagttgatggctgtcaacaccgctattgcttctcatgcatgaaacagcatgtggaggtgaagttgcttcatggaatggtgccaaagtgccctcatcaggggtgcaagtatgagctcctagttgacagctgccagaagttcttgactcaaaagttaaccgagaccatgcagcaacgaaaattggaagcttcaattcctgttgctgaaaaaatttattgtccttatcctacgtgctctgcattaatgtcaaaaactgaggtcttagagtactccaaagatatcactggtcaatctgaacaatctgaacccaagatatgcctaaaatgtcgtggccttttctgttttaactgcaaggtcccttggcatagtggtatgacatgtaatactt

SEQ ID NO: 8400 - DNA, 395 bp, Glycine max
gagagagagagagagagatctagtagagaggctagtaggtggtcctcgaacgaagatgttggcggtgttcagcgggcaggtggtggaggtgccggcggagctggtggcggcgggcagccggacgccgtcgcccaagacgaaggcgtcgcagctggtggggcgcttcctggccgcctccgagccggccgtgtccgtgcagctcggcgaccacggccacctcgcctactcccacaccaaccaggcgctcctccgccccaggtcgttcgcggccaaggacgaggtgttctgcctgttcgagggggtgctggacaacctgggtcgtctgagccagcagcacgggctgtcaagcaagggcgccaacgaggtgctcctcgtcatcgaggccctacagacgc

SEQ ID NO: 8401 - DNA, 430 bp, Glycine max
  modified_base (355)..(355): a, c, g, t, unknown, or other
aaaactactgcctgcaaggatgctgaaactaagaagtatgtttcagaattgaatgctgaggaggatgatgttgatggcaatggagatgaatgtcgcttgtgtggcatggatgggaccttgctttgttgtgatggttgtcctgctgtttatcattcaaggtgtattggtgtgatgaagatgcatataccagaaggggcatggtattgtccggagtgcaaaatagatatgattgggcctactattgcacggggaacatcacttaaaggggctgaagtattcggaaaggatttgtatgggcaagttttcatgagtacttgcaaccacttactggtgtatgtttaacttcttttgtgtntcttccactccttcatttgttatgctggatgattctggctcaatgtcaacagtgatgggctttggtcttaaatac

SEQ ID NO: 8402 - DNA, 447 bp, Glycine max
caaaatccttagtttgaacaaatgataatctcccagctctcgaagttgtttatcttttgtttcatatgcattacactcatatgtttctcttcaagttctaatttcccagtgcaatactccatattaggccctaatttggacaagcttccttcacaggatgaaaccatccaactattccaactatggagaaaagagcatggactagtgtataaagacctaaaagagatggcaaagagatttgagattttcttgtccaatttgaattatatcattgagtttaatgctaaaagaagctccccttctggctaccttcttggtctaaacaattttgctgattggagccctagtgagttccaagaaatctacttacatagccttgatatgcctacagatagtgctcctaagctgaatggccctcttttatcatgtattgctcctgcatcggta

SEQ ID NO: 8403 - DNA, 261 bp, Glycine max
gtcagactggcagacgcacttcgctgcgtacctaatgaacatgaagcaaagcttcaagtggtggaggttgagaagatctccctttatgcatccagttcatccatcactgaacttcagaaacttgtacttgacccaacacttgtcgcccagatcggttcttgagatcctaatgagactgcagtgtggtcctagaattactcgacgatggttaacctgaggcatattacttgcgctcgaacttacacactccgtcattgaatc

SEQ ID NO: 8404 - DNA, 448 bp, Glycine max
gttatggatgaggctgataagcttctctcccaagagttccaaccttcaatagagcagctgattcaatctcttcctggaaaccggcaaatcctgatgtatgctgctacatttactgttactgtcaaggacttcaaagatcgatatcttcgtaagccatacatcgttaaccttatggatgagctaactctgaaaggtattacacaatatgacgcatttctggaagagaggcagaaagtccactgcctaaatacacttttctctaagctgcaaataaatcagtcgatcatcttctgcaattccgtgaatcgggttgagctactctccaagaaaatcacagaacttgggtattcatgtgtctatattcatgcatagatgttgcaagatcaccgaaatagagtgattcatgacttgtgcaatggtgcctgcagaaacctttgttgtactgatc

SEQ ID NO: 8405 - DNA, 378 bp, Glycine max
gtactgtgcataacggctgagttatgtacttatgttaagaataaaataaagtgctgttgttgcaaaaaaaaaaaaaaaaaaaaaaaaaaaaaaaaaaaaaaaaaaaaaaaaaaaccaaaaaaaaaaaaaaaaaaaaaaaaaaaaaaaaaaaaaaaaaaaaaaaaaaaaaaaaaaaaaaaaaaaaaagggccgcccttttaaaagaaccaaagttaactaacccttccttccaacttaaaacctttttaaaagggcccccaaatttaaattaattgcccgtattttaaaaactttgaaactggaaaaacctgggcttaaccaaattaaatcccttggaaaaaaatccccttttcgcaagtttgcataataccaaaaagc

SEQ ID NO: 8406 - DNA, 426 bp, Glycine max
gtgaaggttccgtgattatcattctcgcagcgattcggatcgcgaaagcggtccgccagccttaattttgatttgtgtcgaggaaaggacaggtcttggaaccctaacacgcacctctttctttcttaccgagtgcgtcaaagcgaagcaacactacacgatggtgttctacttcaaagcgcgcccctaagcccgcgatttcaccatcttcatgggccttgacaagtacgagaacgaggaactcatgaaatacaggtttgccgaagacatgtggttccatgtcgataaaatgtcttcagcccatgtctatggcatgtttcacaaaggccagaccattgatgacatgactgatggtttactggaagactgtgctcatcttgtcaaagcaaattcaattcaaggaaatgaaatgaacaatgtcgatgt

SEQ ID NO: 8407 - DNA, 435 bp, Glycine max
cgacggaaccgcgtccatgcggttcatgaccacgtgggccaagttggctaggaaggaaaatttggaccacgtggaaatgatgccgtgctgtgatcgaaataagttgaattcgtacaaggttgatgattcgaggtcccacgaccattcggagtttcgcactcctccgaattggttaggttcattaggaggcagagacactaatgttgtggttgcaatagtgaagctcacagatgcacaagtgaagaagctcaagcacaaggtaaattacgttaacataattaacactactagagctagtagtacttcacgaccttattcaacttttgaggttgttgctgggtatttgtggaagtgtgtgagtaaagcacgttatgaggggaaaagtgaccaacctacgaggttgtctactttggttaattgtaggaaccgaataac

SEQ ID NO: 8408 - DNA, 448 bp, Glycine max
  modified_base (398)..(398): a, c, g, t, unknown, or other
agagattcaatgacagttctatcgatttcaaaggaaatagctttgagtatataccttttggggcaggaaggagaatgtgtccaggcatgacatttggattggctagcattacgcttccattagctttattactctatcattttaattgggaactcccaaataagatgaaacctgaggatttggatatggatgaacacttcggaatgacagttgcaagaaaaaacaagttgtttttgattcccactgtttatgaagcttcatgatacacgtattttttttataggccaaaagagatttaataagaataccagtggtactcaaaataaaaaaaagttatggagaataaagaaacttaaaacacacacaaatataatatttgtagtgtctgttgacacctncacactttggggagtctagtttgatgtaattttttggttgttattgaatc

SEQ ID NO: 8409 - DNA, 429 bp, Glycine max
acgcgttcgcactctaaggctgtattatatgacaaatgatacatgagcaggtgttcaaaaccaggtataaatctacatgctgatacaaaaacataaaaaatcacttaaataaaaaatcacatgaaccaaaaatatgaaaaatcacatgtttttcgattttcacatcttgttttaaaaatcaaatcagtatatcataattatattaatgtttatattgcgataattaataacgagtattaactaattcattactaagatttaatatataatcacgatgtatatggaattctcatgtacttatatagctaaaaacgaatgttacatatcatgggatacacgaattactattatattataaaataagttgataatattattatattgtaatactaaatagaagtgaagagtataattgttaattaaaatata

SEQ ID NO: 8410 - DNA, 325 bp, Glycine max
cccacgcgtccggaagaaccagatctctctttctcaaatcaccaagttgaaaatggggctgtctttcacgaagctgttcagccggctctttgcgaagaaggagatgcgtattcttatggtgggtctcgacgccgccggtaagaccaccattctctacaaactcaagctaggagagatcgtcacaaccattcccaccattgggtttaatgttgaaactgtggaatacaagaacatcagcttcactgtctgggatgttggtggccaggacaagatccgtcctctgtggagacactacttccaaaatacccaagggcttatctttgtg

SEQ ID NO: 8411 - DNA, 435 bp, Glycine max
gtgccaagctcgagagtctaaaattcaaatcctagcttgggttaacttagatatgagtggtctatttttaattttccttatccttcttgttgccgatggggtccttgtccgaggaagtataaatattacagaaataagcttcgatcaaaactatgaggttacgtggggtgataatcatgttgtctccttaaaccaagggaaagaaattcagctcacaatggataactcttcaggatccggttttggatccaagatgtcatatggctctggactattccatttgaggatcaaagtaccagataggaattctgctggagttgtcacagcttactactattcttaatgtatttgatgcagttaacttcacaaggaagaagtcatgacgagttagactttgaattcttgggcaatagagaagggaagccatatagatta

SEQ ID NO: 8412 - DNA, 337 bp, Glycine max
gtactgccctattacaccatactatgctcttaaaatttgatccatggcctaacttgctcgacttatcagcttgaccactataccttagatatggtatcatgttacacgatcagattcatacgacaaatcttacagattgactgagatgccatagaccagattgatcagatgatcgctcagcgtcacgctcatgactatccttatcggatatggacatggctaatgatgactgagtccttgctataccatgatgacaccgatgatatagtgacagtcgtaagggctatagcaactgtcaaatataatgtggcaacaaacttcgcgactattactccag

SEQ ID NO: 8413 - DNA, 437 bp, Glycine max
cacccccatcacatgtggttgcaattacaaatggtgatgcccgtcttcttgaacttggggacaaacaagaactcaagcgtcatttttcattaggttctctctttctcgtttaattgaattccttccttcattttgtgttcttttttggtttatcattaatttccaattctaggttcttagcttgatcagggccatttgaattttcgccctctcgttttctgttttatcagtgctgactggcatcaccaattcaccaccctctacaacactgggttgaactacggtggccccgtttcaatgcaatatgggtggtttatggctttagctttcaccatgcttgttgcactctcaatggctgaaatttgttcttcaatccaactactggaggtctctattattggagtgccaaacttgctggccctagatgggcacccttt

SEQ ID NO: 8414 - DNA, 453 bp, Glycine max
aaaaaaaaaaaaaaaaaaaaaaaaaaaaaaaaaaaaaaaaaaaaaaaaaaaaaaaaaaaagaaaaaaaaaaaaatataaaataaaaaaaaaaaaaaaaaataaaaaataaaaaatataaaaaataaaaataaaaaatataaaaaaataaaaataatataaaaaaataaaagtggatgaatttttatgactttaattttaaatatgtttttttagataataattttttttttttgattaattctaatttaataattttggattttttttaaaaagatattatttttaaaaaactgttaatttttcaaattttatttattttaaaaaaatttcttttttcaatatttgatattttttataaatgctttaaactttctgtttttataaaatttttcaatattaatttgtaaatttgccccctctttttatcggtttttttaccctttgattttttt

SEQ ID NO: 8415 - DNA, 387 bp, Glycine max
gacctacgcgtacgcttactgcttatggtgggggctccagaattcgagtacacttggccagggacttcaaactagcacctatcctggggaggttatcttttcaatagcactagctataagtggcctcatcctttttgcccttctgattggcaacatgcagacatatcttcagtctctcaccattaggcttgaggaaatgagagtcaaaaggcgtgattcagaacagtggatgcaccatcgcttactcccacaagatcttaaaaaaccttttaaaccgtattacccatattagtggcttgccacacctggtgtaaaatgaagaaaatttagttcaaagtttaccaaaggatcttcgaaaagatattaaccgtaatctttgttgggcct

SEQ ID NO: 8416 - DNA, 342 bp, Glycine max
atggctcgtgggccttaaccgacagtgtcccttctaacatgactcttatggtccaggttgacaataagtagcgcatgcaattgttcctcagcaccaaaccttgcaaattgagaacccaagtgaacttggaccctacatcggctagtaccgtgaccattacagaatgctaagcatcttcaactattcattcgacgtgggtttgtactacatcacgccgcataccgtgactctagcttagatgatatggctccaacgctctgatcagacatcccgattggcttgagaggccaatatgggcatcccagttggagaaaatgccactatatcacttggtactgatgg

SEQ ID NO: 8417 - DNA, 347 bp, Glycine max
cccacgcgtccgcccacgcgtccgcccacgcgtccgcggacgcgtgggaaaaaaaggaaaaaaaaaaaaaaaaaaaaaaaaaaaaaaaaaaaaaaaaaaaaaaaaaaaaaaaaaaaaaaaaaaaaaaaaaaaaaaaaaaaaaaaaaaaaaaaaaaaaaaaaaaaaaaaaaaaaaaaaaaaaaaaaaaaaaaaaaaaaaaaaaaaaaaaaaaaaaggggaataaattataatgattcaaactttaaatgcatgtgcttaaaaattataatcttatatttaggagaactaaaaaaatagaaggggggctattgataaaagctatagagatggaaaaaactggagtttta

SEQ ID NO: 8418 - DNA, 364 bp, Glycine max
ctcttacagaattctgcacgccaagtaactgcccttcaatgactgcaggaccaaagtatgagtatcgatgggctgatggtgttactataaagaaaccaatagaggtgtctgctccaaaatatgttgagtatttgatggactggattgaatctcagctagatgatgaaacgattttccctcaaagattgggggctcccttttcaaccaatttccgagatgttgtcaagacaattttcaagcgattattccgtgtatatgctcacatttaccactcacattttcagaaaatagtgagtttgaaagaagaagcttaacttaatacttggttcaagcattttggtttatttacttgggaattcccgtt

SEQ ID NO: 8419 - DNA, 423 bp, Glycine max
  modified_base (382)..(382): a, c, g, t, unknown, or other
  modified_base (399)..(399): a, c, g, t, unknown, or other
gggggcccatgttcccaaggctgcatgtgaatgatgcagagaaaggagggccaagagcaccaccaaggaacaagatggctctttatgaacagttcagtattccatctcagaagttcaatccacgccttcttccacgaaaaccaaattcttcttctaacatagttccttccccaacccagggaaatggccatgagagaagttatgtctacccagttcgtttctcttcacatacacccactcatcgagctgaaagttatatttctcgccaatctgatgatggatcaaggtcgaacacttcattggtgcaacttgaacggagaaaaaaagtagatgatgacattcacgtgtacacttgctcggggattgatcaatctaatgatanaacgatggacagtgtanatgggaaaaaattcactcctttcg

SEQ ID NO: 8420 - DNA, 316 bp, Glycine max
taaacctaattctaatttcttcatcgttctacacttctcctactaaatatggggatcgtctttaaatcttttaccactaataccatcaccctatatgtggaatcctccgtcaccatctatcactagaacgctaacattcactacaacgaaagatatactacctgaccatcatatactaatatgtgcatctaaactgcttgaggatttcctaaccctaacctactaccacatccaaactgaatccactattcacatctagcttcttctcatacttgacatgcaaatctttgttaagactttcactgacattaccatt

SEQ ID NO: 8421 - DNA, 391 bp, Glycine max
ctctttctaaacatttggatttcaaagggattacatccgaccttgttactctgaacatcctcatcaactgtttctgccatctgggtcagatcactctttccttttctgtattggccacgattctcaaacggggttatcacccagatgtaataaccctcaccacactcatcaaaggcctctgtcttcgtggggaggttaagaaagcactgaaatttcacgatgatgtcgttgccctagaattccagttagaccgaattagttatgggacattaatcaatggtttgtgtaaaataggagaaacaaaggctgccatacagttgatgaggaatctggaagaacgctccattaagcctgatgtggtaatgtacaatataataattgatagcttatg

SEQ ID NO: 8422 - DNA, 365 bp, Glycine max
gactgaacaagtgatcaaagcatcagaagagaaagtagctctacaaggattgaaagtcacgcgcagcacctaaatgtaaaaaaagcaagaagagccagaacaagagtgtggtgaagcaggtgacaacagcagaaggtcttgatgatgcatgggcatggcgaaaatatggacagaaaccaataaagggttcaccctatcctcgaagctattatagatgcagcagttccaaagggtgtttggcgaggaaacaggttgaaaggagccacttagatcctgcggtttttctggtaacctacactgctgaacacagccatccccacccaactcgaagaaactctcttgctgggaccactaggaagaacaat

SEQ ID NO: 8423 - DNA, 388 bp, Glycine max
cccacgcgtccgctcagattatatatatactccacatctgaagccacaccatcaaactcaacactgaccaaaatggcctcaccccaaacccctctatcccttctcacaattgcactcctttccctaatccctctcttcatcttcttcttcttcaaccgctccaaaggcaaacaacccaaagaaccaccaaccattcccggcgcatggcccatcctcggccacctccccctcctagcccgctccccaaccacccaccacctcctcggcgccatcgccgacgaccacggccccctcttcaccatcaagctaggcacagtaaaagccctagtcgtcagcaactgggaaaccgctaaagaatgcttcaccacaaacgatgtcgcccgttctt

SEQ ID NO: 8424 - DNA, 347 bp, Glycine max
tccacaccttcaaaagacaacaaatactttcacttttttactacaactgactcacactactgggaatgttcacctatcatcttgaggatatctttccaataacactaactataactcacctaatcctttatgcccttctcatttccaacatccaaacatatcttcatactctcaccattactatcaccttacactaaatcacaacgcattaatcatatcattttatgcaccatctcttacttccacaagatcttataaagctattgatacattatgaccaatataagttactggcaactcatcctttaaatgaagaaaatttaattcaaaatctaccaaatgatctt

SEQ ID NO: 8425 - DNA, 428 bp, Glycine max
ctatgaccaagtaatgaacctgaagagcatggtggccaaaaccgacgtattccaccttgtttttggcgtgtggaagaccccagccgaacgttgctttatgtggattggtggcttcaggccatctgaactcatcaagataattctgggtcaaattgagcctcttacggagcaacaaatacttgggatatgtgggttgcaacaatctacacaagaggcagaagaggctctttcccaagggcttgatgctcttaatcaatctctctcagagactataacatcagactctctgtggtgtcctccaaatatgactaactacatgggacaaatggctgtggcaatcaacaaactctccacccttgaaagctttgtgagacaggtacgttacatatatgctttgactagtactatattatataaccattatttct

SEQ ID NO: 8426 - DNA, 442 bp, Glycine max
cttttccgtcagcaacattctttattctatatgcctcagcagtataaagaagttgcttactcataagcatgctcaatttcttgtttccctgttgaaactggttggtaatctttgaaccactcgcatacattaagtgggacctgcacaatgcaagacattattagactgaaatgatgataccgctccagcaaggataaaatgtacaacattcagatggttcttactttcaggatcttcttctcaaatatgtcaaacttgtttaagaataacatgaaggatgttttctgtgtagaaaagagaatgacatcatttttttgtgagataagtagaaaagttaactgacaaaaaagtacaaagggacctgagaaagaaaagtatggcatagaaatttctacgtaattgtagtagaagttgaagttaaaaaagactataaaaaggaaac

SEQ ID NO: 8427 - DNA, 405 bp, Glycine max
  modified_base (394)..(394): a, c, g, t, unknown, or other
gcaccaactatccaactcacacgaaacctaatggacaagggcatgattggaagcattggtcgagccacatattaccaacctatgcagctgtgggacaaagccacagggaatctcacagatttcacaacccatttttcttttgtcatagattcacagaaccgaagtaaatatggagatgggattgcattcttacttgcccctgctggttcaaagattcctaatgccacaaaaggagcttctatgggtcttacacttgataaccaacaattgaactccacagacaattcatttgttgctgtggagtttgatatctatcagaatggctgggatccaccccatgaacatgttggaatagacatcaactctatgagatctgcttctaatgtaacatggntggctgatatc

SEQ ID NO: 8428 - DNA, 431 bp, Glycine max
gtcttcactactatcctcctggaagggtgttgcattttcagcatttggtttgggagttgtcactctactcatgcacatcttgatcatgttctcacaatctgagcgttcaaccccttccaaggttgcccctacaaaaaagtccaagaatagcgaacaactggaagctagggataacaaacaagactagatcacacacgttacctgaatattctatacataagagaattcttctgaggtcacatcttgaacttgttttgcatttatgtgcttttttttataaaaaaaattgcattaacgtgtgtttagggactcactaccccctttctttatttgtttgctttggaattgtacctcgtatgtgttcagttcttgtattatgtattatgcatatactattcattactttcaaattaattaagatgaatttgtat

SEQ ID NO: 8429 - DNA, 370 bp, Glycine max
atttattaataattagaactttcttttttcttaaaaaaaaaaaaagtaaataaaaagatttgatagaatcgtaatttcaattcgattatatagatacatagaaaaaaagaatatataataatagaagtaggaattattgatagaaattcattcaaaaatgaattcttaattaatagtaatagtaatataaaagattttatttagaagagaatatctattataatagattatatctatatagatataatctattatatacatttattttgaattacccctaatagaatatcaggccgatctctgtacaaataaaataacatatcaagtacattaaaaacgcggatatagtccaatggtaaaatttctcttt

SEQ ID NO: 8430 - DNA, 400 bp, Glycine max
aaactcctcaacatctccaaaatttctgaccagagaagaagctgaccagattcctttctcatgcaaacacctaccatcccttctcaaattcttctccatcccacaacactctccccaagccaaggcaatgaaatataccctcaaacaatgtgaatttgaacccatggaaggagagaccaagttctgtgccacttcgttggagtccttgtttgattttgcgcactatctgtttgggtccaatgcacaattcaaagttctgaccactgtccatctcacaaattcaacagccctgctacagaactacacaatctcagaagtgaaagtgatttcagttccaaatgttatagggtgtcaccccatgccttacccttatgcagttttttactgccacagtcagcat

SEQ ID NO: 8431 - DNA, 330 bp, Glycine max
gtggaagatagggttacgccgatgcgcatcgaaatcatcatcagagccaccagaaccctagccgctctcggttagaacgtaaggagaatcagggagcttacctacgtggctcagatgaggctcaagtttcctgagaacagcgttgaactctatgctgaaaaggtcaacagtaggggtctttgcgctatagcacaggctgagtctgtgcgatacaatctccttgttggcctagctgtgcgcaaggcttgctatggtgtcttgaggtttgttatggaaaggggtgctaacggatgctaggtcagtcgtagtggctaattgagagcccatata

SEQ ID NO: 8432 - DNA, 424 bp, Glycine max
ttcaacctggtgctgatcaccaacgtcgcacgtgcaggggatatcgtgcgcgtgagcgtgaaaggaagcaaaaccgcgtggatgagcatgagccgcaactgggggcaaaattggcaatccaacgcggatctggtgggccaggccctttcctttagggttaccggcagtgaccgacgcacctcaacctgctggaacgtggcaccacctaattggcagttcggacaaaccttcaccggaaagaatttccgtgtctaaatccaagaagaagaagaagaagaagacaagagagaagaaaataacaatactcttaaattaatggctcctggtatttttgagtttgtttgcttcagtttccctgcttctaacttccctctattttcctgggaaagctttggaatgggtggtaaggggttaaaagaaaatt

SEQ ID NO: 8433 - DNA, 334 bp, Glycine max
aaaaaaaaaaaaaaaaaaaaaaaaaaaaaaaaaaaaaaaaaaaaaaaaaaaaaaaaaaaaagaaaaaaaaaaaaagaaaaaaaaaaaaaaaaaaaaaaaaaggaaagaagaaaaaaaaagggccaagcttacaaaagggatccaaaataatgaccgagttgaaaaaaaagacaaaaatggtaaaacgattgccaaaagaaaaaaaacgggacgacggtaaaaacacagtggactggaaaataaatgggataaaaaaacataaccgtttggaaataaagccaatttgacaaaagggctgaacaaacgaaaaggccaaaaaagtgggcatttaaaa

SEQ ID NO: 8434 - DNA, 296 bp, Glycine max
aaaaaaaaaaaaaaaaaaaaaaaaaaaattaaaaaaaaaaaaaaaaaaaaaaaaaaaaaagaaagaaaaaaaaaaaaaaaaaaaaaaaaaaaaaaaaaaaaaaaaaaaaaaaaaaaaaaaaaaaaaaaaaaaaaaaaaaaaaaaaaaaaaaaaaaaaaaaaaaaaaaaaaaaaaaaaaaaaaaaaaaaaaaaaaaaaggggattgattaaagatatattaatttaagaagagggaaaatataaaatggtttgtttttataggggtaaaaaaaaaaagataattgggagaatttttt

SEQ ID NO: 8435 - DNA, 253 bp, Glycine max
gttcatctcttgaggaagaagtcttgctttaccctgcatctacacttataaaggttgcgaatgcttacgcggtttcgttgttgattccaactgatgtagtcatagcatacaagtatgcttctgatgctaacactaaaactgtacccgcatcaatcaaaccaaactggaggatgggattacatatatgaaccgagtccaacaaaacattaggtgaaccatttgatatgtcccatacctgcattctaaatgtacc

SEQ ID NO: 8436 - DNA, 316 bp, Glycine max
gtcctattatactcccaatgtaccccgttcactcgatgattactgcaatcattgacaatggctatcaacacttcatgaatccctcattgctgctcaatacattgtaggaggtttgtaatgacccagatagcttggtgagctaatcaccataccagaaagcacacgctagatcactgggctgattatgctgatctgaagatatctgcgtctcgcaaggccgatatggacatgtcaatgagcagaccttgtagctgaacctaaggagtttattgaaccacatcaattgtcggatgcacagctacgagacatgacttat

SEQ ID NO: 8437 - DNA, 360 bp, Glycine max
cgaaaaaaaaaaacccaacctaacccattacctcattcctcaattcaattcaatgttttccctctcaaaacccatcctttctccggttcgccccacccttcctccggttcgctgcgggtcccgcgagctccgcgagcgaatcaagaccgtccaaaccactcaaaagatcaccgaagccatgaaactcatctgcgccgcgcgcgtccgccgcgcccaggaggcccgtgtcagtggccggcccttctcctcaaacctcgccgcaatgctaaacgacatcacccagcgcctgcaaaacgacgacgtctgcacccctctcaccctcgccagacccgtcagaaccgttgcactcgtcgtcgtcac

SEQ ID NO: 8438 - DNA, 385 bp, Glycine max
aaaaaaaaaaaaaaaaaaaaaataaaattaaaaaaaaaaaaaaaaaaaaaaaaaaaaaaaaaaaaaaaaaaaaaaaaaaaaaaaaaaaaaaaaaaaaaaaaaaaaaaaaaaaaaaaaaaaaaaaaaaaaaaaaaaaaaaaaaaaaggggaggagtttttaggggtctaaatttaactatatgtatattggaaagttatgattttttttagggtatcctaatttaaattatattgcacggtttttaaaatcttgatatttggaaaaatttgatgtttaccaatttattaagttttttaaaaaatcctcttttaatgatttggtttataagaaaatgggcattctctatagattttttcaaatatttgtagattttaatggatattt

SEQ ID NO: 8439 - DNA, 402 bp, Glycine max
cccacgcgtccggggaagtaagatatttctcaccacaaggaattgggatgttgctttacatgttgatgcttgtagcaatccgcatcagttgaggccattgacagaagatgagagtttcagattgctctgcaacaaagcgttccctggagcgaagggcatcccgttagagttggtccagttggagagtcttgcaaaggagattgtggttaaatgtggagggttgccattggctgtggtagtggttggtggttcgctgtctaggaaactcaagtcaagtggtgaatggaaacggaggctgcataatatcagctggcacttgctagaagagcatgagaagatagcatgaattttggccctaagctacaatgatctgcctgctcatttgaagtcatgctttctata

SEQ ID NO: 8440 - DNA, 429 bp, Glycine max
caccctcctccgtcgccgtggccaacttcctcgtcaacatgtacggcaagtgcggtgacctaaccgccgcgcgccaagtgttcgacgaaatcccggaccgagaccacgtgtcgtggaactccatgatcgcgacgctgtgtcgcttcgaggagtgggaactgtcactacatttgttccggttaatgctgtcggaaaatgtggaccccacttcgttcacgctggtcagcgtggcacacgcgtgctcgcacgtgcgtggtggggtgcggctcgggaagcaagtgcatgcttatactctgaggaatggcgatttgagaacttacacgaacaatgcgttggtaacgatgtatgcgagattgggcagagttaatgatgctaaagcattggttgggtgtttttgatggtaaaagacttggtgtcatggaaacactg

SEQ ID NO: 8441 - DNA, 427 bp, Glycine max
gaaactttttcacccccttgataccgcttcaattcaccaatggcaagtcgaggaaaaacccagggatctggcacaaccaaaaagggcatctcccgaagcaacaaagctggtctccaattcccagttggtcgtattgctcgatacctcaagattggcaagtatgctgaccgtatcggttctggcgctcccgtgtatctcgcctctgttcttgaatatcttgctgctgaggcaatttttcttaatcgcctttgatttttgttttcgtgtgttgtcattggatttagggtttataaattagggcttattttcctaaagtttagtggatggttttggtttaatgatcaaccttgaataattgaaatgataaatttactttaatcaatattaattacttttttgaaaggtttatatcacacttggtgtgttc

SEQ ID NO: 8442 - DNA, 267 bp, Glycine max
aaaaaaaaaaaaaaaaaaaaaaaaaaaataaaaaaaaaaaaaaaaaaaaaaaaaaaaaaaaaaaaaaaaaaaaaaaaaaaaaaaaaaaaaaaaaaaaaaaaaaaaaaaaaaaaaaaaaaattaaaaaaaaaaaaaaaaataaaaaaaaataagaaaaaaaaatatatagataaaaaaaaaaaaaataaataacaaatataaattaatctaaaaataagcttatttccaatatcatctataacgacgaggtcaaatataacaaaggta

SEQ ID NO: 8443 - DNA, 426 bp, Glycine max
cccacgcgtccgcagcatttgagtgaggaattgaaacgtaggttctacaagaactggtgcaagtccaagaagaaggccttcaccaagtactctaagcagtatgaaactgaggagggaaagaaaaacattgaggcgcagctggagaaactgaagaagtatgctactgtggttcgtgttttggctcacactcaggtactaaccccacattaatgtgattgcataccttttctttgtttccctgatttcattttatataatggttgttacatatataatgatagtttagcactttcttttcaagcatttatccattttatgggtttattttgccttgtgtcctgagaatgatgaaattcttgttcttgtgcaaatgcagcaccatgaattaggtgctatgagcggcactttccacacgagatttctgac

SEQ ID NO: 8444 - DNA, 294 bp, Glycine max
aaaaaaaaaaaaaaaaaaaaaaaaaaaaaaaaaaaaaaaaaaaaaaaaaaaaaaaaaaaaaaaaaaaaaaaaaaaaaaaaaaaaaaaaaaaaaaaaaaaaaaaaaaaaaaaaaaaaaaaaaaaaaaaaaaaaaaaaaaaaaaaaaaaaaaaaaaaaaaaaaaaaaaaaaaaaaaaaaataaaaaaaaaaaaaattaataaaaataaaaaaaaataaaaattttataaaaaataaaatattaagggaaatataataatattggaattgaaaaaaaaaaaattattaaaaggaaaa

SEQ ID NO: 8445 - DNA, 438 bp, Glycine max
cccacgcgtccgaaaaaaaaaaaaaaatttaaaatataaaaaaaaaaaaaaaaaaaaaaaagaaaaaaaaaaaaaaaaaaaaaaaaaaaaaaaaaaaaaaaaaaaaaaaaaaaaaaaaaaaaaaaaaaaaaaaaaaataaaaaaaaaaaaaaaaaaaaaaaaaggggggggcctttttaggggtcccagttttattttccctggtttgggttttcttgttttttttttggggtccctaaatttaatttatttggccgtgtttttaaacctttggttttggaaaacctttgggttttccaattttattccctttgaaataattccccttttcccaggttgggttattttaaaaagggcccgtccggttggcttttcataaagtttgccattcttgattggtattgggaacctcctttttttgggctttttaacgtgggg

SEQ ID NO: 8446 - DNA, 414 bp, Glycine max
cccacgcgtgcgtccacgcgtatgaaaataaaaagaataaaaaaaaaaaaaaaataaaagaaagaatgaaaaaaaaaaaataaaaaaataaaaaaaaaaaaaaaaaaaaaaataataaaaaaaaaaaaaaaaaattaaaaaaaaaaaaaaaaaaaaaaaaaaggtgaaaataatagatggctttacattaatcttcggtgttgtaataaagatctgtaactttttaaaagagatagatggatagactgaactctttctttaaaaacctaagatactggataaaatctgtgtttatctatttagatgattttgatatctatataaacttataatatttgtatatatcattaaatgatttgatcaaaaccatttagtaaagaatgttgaaactttataagtgtatgatgaatgtca

SEQ ID NO: 8447 - DNA, 318 bp, Glycine max
aaaaaaaaaaaaaaaaaaaaaaaaaaaaaaaaaaaaaaaaaaaaaaaaaaaaaaaaaaaaaaaaaaaaaaaaaaaaaaaaaaaaaaaaaaaaaaaaaaaaaaaaaaaaaaaaaaaaaaaaaaaaaaaaaaaaaaaaaaaaaaaaaaaaaaaaaaaaaaaaaaaaaaaataaaaaaaaaaaaaaaaattaaaaaataaaaaaataaataaaaatataaaaaaaaaaaaataataagattttagaatagtaatcgagaaaaaatacaatagaatatagttaaaaaaatttgtaatgttataattattgtaaaggggaata

SEQ ID NO: 8448 - DNA, 426 bp, Glycine max
cccacgcgtccgcccacgcgtccggttttcaggtcatatatgttaacagattcttaccatcatcaaggaagcaggctgttagggaaataaagaaatctgctttcaaggaactgaataacagagaagggcctcttgtgataaatttcctcgagtactattatttcccgagggaacaacaactaatggcaggaaccttatctccttccaacttggtgcatttatccctggatacccaatccagcctgtaattatacgctatcctcatgtacactttgaccaatcctggggtaatgtttctttgggaaagcttatgttcagaatgttcactcaatttcacaacttttttgaggtagaatatcttcctgtcatttatcccctggatgataaggaaactgctgtacattttcgggagaggactagccgtgc

SEQ ID NO: 8449 - DNA, 425 bp, Glycine max
  modified_base (408)..(408): a, c, g, t, unknown, or other
cggacgcgtggggtacgtagtgtgaagatatagtattgtatgctgcagaatatgattgtcttttgcaatggcggttgttgcgcaaacccctgacatcgccggcgagcgacagtccggccaagacgttcgcacccaaaacgttgtggcatgccaagccgttgccaacatcgtcaaaagctctttaggccccgttggcctcgacaagatgctcgtcgacgacattggcgacgtcactatcaccaacgacggtgccacgattctcaagatgcttgaagtggagcatcctgctgccaaggttttggtggaactcgccgagcttcaggaccgagaagtcggaaacggcactacttcggtgcgaattggctctgctgagcttctcaaaagggcaaatgaccttgtcaggaacangattcatcctacctcga

SEQ ID NO: 8450 - DNA, 426 bp, Glycine max
caaatgtgctcaatgatgccttccccatttctcatgatggagagtttggaacaattaacaattttcgacttggaagacttcctaaaattcctgttgaatgggatgagataaatgctgcctggggccaagcttgcctccttcttcacactatgtgccagtatttccgaccgaagtttcaatatcgaataaagataattcctatgggtagctaccctcgaatcacagacaccaataacagtacttacgagctgtttggtccagtcaacttgttctggagtactcgctatgacaaagcaatgacattgtttttagcatgcctcaaggattttgcagactttgccaaatccaaggatcaagagaataacataccacctgagaaatgtttcaaactgccttacaagattgagaatgacaaggtggaaaact

SEQ ID NO: 8451 - DNA, 428 bp, Glycine max
gcggccatctttcccaaaactgggcatagaagttttatctcacaaggctcaaaatcttcaacaataatttatcaggcagtatttcaccagagctaagtcaggcaaccaagttacatgtacttcacctgtcttcaaaccatctgacaggaggcattccagaagattttggtaatttgacctacttggtccatctttcttttaataacaataatctttctggaaaaggtcctattccaatagcatcattgcaagaacttgaaccttagaccttggagcaaattattttgctagcttaattccaaatcaacttggcaatttggtcaagttattgcatttgaatttgagccaaaataattttagggaaggtattccatccgagtttggtaaattaaagcatcttcaaagtcttgatcttagcagaaactttt

SEQ ID NO: 8452 - DNA, 310 bp, Glycine max
cagagagcaacactggatattaagagagctgatggtaatgaggccatcattgctgaagaagcatatataggagtcgattggggagatggatgcccttttggtgctgctatagttcataatgatgaaatagtttctagttaccacaacatggttctgtgtaacacagacccaacttctcatgctgaggtgacatcaataagatatgcttgtaagaatcttaagcagatagaacttgcagattgtgaaatatatgctttttgagaaccttgccccatgtgcttaagagcaattcacctttcttgaataaata

SEQ ID NO: 8453 - DNA, 439 bp, Glycine max
cccacgcgtccgcccacgcgtccgaatacaacgaatggatgagccattcgtgaccgtgaattcgggctccatattttacccacaactcaaagacctaccacgaaatccagcatcatccatcattacccacccattaaccaatcgaattaagactcaacagaaagcaccacccttttctatgtgggagcagtgaagggcgttcaacgccggcggcggagccataacctggttccccggccacatggccgccgctacacgtgccatccgccaccgtcttaaactcgctgacctcgtcatcgaagttcgcgacgctcgcattcccctctacttcgccaacgccgacctccagccacacctctccgctaaacgacgcgtcgtcgcactcaatagaaaagacctcgccaaccctaacatcatgcataaatggacgcattatttt

SEQ ID NO: 8454 - DNA, 425 bp, Glycine max
gtgatgttcaagctttcagaaagatcagtctattcacgatagttaacccttcaatttgggggaaatttccatgtaaaatcaatgccagattttgaagtggtttttattttgcatgaatcttcaattgaattttatattacaaaaaccaaattgattacatacttgaaaataacccaaagaaaatgaattatgtcaaaaagatttggtaatcattacccaaaacacagtacaccatagaggagcatctgtaccgaagaacaagatcaagtatagctgtaaaggtggatggaaatggagggacacttctaagccaaacccaaatacaattgttggtgccatggttgccggtcctgacaagcatgatggcttccatgatgttcgtacaaactacaattacacagagccaacacttgctgaaaatgccg

SEQ ID NO: 8455 - DNA, 330 bp, Glycine max
gccacgcgttctgccaagcgttcgcacatcgttacagatccgtttcaagtttcactggggacttcatctgttgatgaaactgctgatttgaggtaataccataccagaaactatgcttattctaaccgctgctgattgtgctaacaacctctcactattcagccagaatgctgaacgttttcggttggttcttgctagtggattggtggttagggcaacgaaaggatccactaaccagatgtcgctgatcggaatgatgattgaaccgatccaataggcgaagaacgagctcgcattgaatcccacctcaaggtatgctagactcgtgcg

SEQ ID NO: 8456 - DNA, 432 bp, Glycine max
gaaaaaatgggcagattatagtgcctgttttttaccatgttgacccaacccatgtacgccatcaaacgggtagctatggacatgcttttgcaatgcacgaacaacgttttgttggcaacatgaacaaggttcaaacttggcggcttgtgctgggtgaagtagccaatatatctggctgggattgcttaaccacaagggtggagtctgaactagtagagaaaattgcaatggacatattacaaaagttggactctattacaagcgggggcctagaaagacgcatagcaacgtacaagcaaatggcacagcaaaagctagaaaagtcactgaagacgagtaacatgagagacatggaagacttgatcacgacactgctccaacttggggagctgaaattggagaaagccatgcgcactgatgattcgagcgttt

SEQ ID NO: 8457 - DNA, 405 bp, Glycine max
cccacgcgtccggtagaattcacaaaggagtatgttcaacctggatgaagaatgctattcccttagaaaaaagtcccgactgtagctgggctcctatttttattaggccatcaaatttcaagctaccagttgatcattcaattcctattattatggttggacctggtactggtcttgcacctttcaggggatttttacaggaaagatttgccctcaaagaggctggtgttcaacaaggccctgcaatactcttctttggatgtaggaatcgtcgattggtaaattaattgatctttgtgctttagatccaaatgggttttcagagcaatttctgatttcccaatatgtttgtataggattttatttatgaggaggagctaaagaattttgtggaacaaggttctc

SEQ ID NO: 8458 - DNA, 347 bp, Glycine max
gccagtggagagatctgggagaaggagctgaaggaggaggaggtgcaaggtttgatataataatttgcccaccaaagactcgccggccgcctggaaggcctaaaaagaaggttatacgagtggagaactttaagcgtcccaaaagagttgttcaatgtggtcgctgtcatatgttaggacattctcaaaagaaatgcacaatgcccatttgaaaaatttgtttacttgttgaaatatcttttgtttatgggacatatatgagatagaacgaatgttgtgtttgtattgtaatttaaatgtattctgaacaaaataagaatccattagtttttgccaaggttctcatc

SEQ ID NO: 8459 - DNA, 367 bp, Glycine max
cccacgcgttcgaaaaaaagaaaaaaatttaaaattttaaaaaaaaaaagaaaaaaataatgtaaaggtaaaaaaaaaaagataaaagtaaaaaaaaaagaagaaaaaaataaaaaaggacaccatcttacaagacaaacgcttgagtggatgcacattaaagaataaggatcttaaagcagttcacgagataatgaaattggctcacaaagcgatagagactaatgatgtaatagtggatgtgaagctcaagatggctgtgtggaaccagtggatactcagcgtggtaagtaggattaggattcggattgctcgaaagaggaactacgatgaggatgcaaaggaagagcttaattgtaacgttact

SEQ ID NO: 8460 - DNA, 213 bp, Glycine max
gtgctggtataactacaactttttagtctatgctctagatctcacgacaagggatttgggcctgtcttagatggctacaactgttattgttggcagcgattagcctcttagaagatctgatggtaatgcaactaacttcaactttcgggataaatcatgggcaccaagttctaacttgtacttgaaggcaaacatctcaagtttaagaagtcg

SEQ ID NO: 8461 - DNA, 193 bp, Glycine max
aaaaaaaaaaaaaaaaaaaaataaaaaattaaaaaaaaaaaaaaaaaaaaaaaaaaaaaaagaaaaaaaaaaaaaaaaaaaagaaaaaaaaaaaaaaagaaaaaaaaaaaaaaaaaaaaaaaaagaaaaaaaaaaaaaaataatatagagaaaccaaaataaaataaaaatggaagaggtataaaaaaataaa

SEQ ID NO: 8462 - DNA, 428 bp, Glycine max
gaaaatgggaggaagaaggaaagaaagggtatcatggattattcaacatctaaacgccgtcgtcggcataatttgtgtgtctgtagaatacaactcattccccttcgaaacttgaaataaacaaaaacccacacaacctgcgatcatcaacacaattaggttttcccctcaatggtcgccaattcccacagagtgggttcttcctacggtggcgctgccccttaccgatcaagagatgggcttagcccccgacccgttggtgcctcagaggagatccaattacgaattgatcccttggacttggacgatgagatcactggtcttcatcgccaagttagaagattgaaacatgtatgtatctgaagacctttttttcttaatttcttttttctatctattcactttgtacttgttatttctttgttttt

SEQ ID NO: 8463 - DNA, 340 bp, Glycine max
gagagagagagagggggcaaggcaccggtaaaagtgccactaattgtgatgccgaatcccgaggctcaccacccctcccggtcccgggcccggccctccacgtcagccgcggcccgccccccggcccgggcccgcgtctccctccgccagcttctgcgcgtggcatcagtcgcgagcggcatccagttcgggtgggccttacagctctctctgctgacgccctacgttcagcagctggggatcccccaccaatgggccagcatcatctggctctgcggcccagtctccggcctcttcgtgcagcccctcgtcggccacatgagcgaccgctgcaccagcc

SEQ ID NO: 8464 - DNA, 257 bp, Glycine max
cccactcttccaaaataaaaaaaaaaaataaaaaaaaaaaaaaaaaaaagaaaatttaaagaaaaataaaaaaaaaaaaaaaaaaaaaatataaaaaaaaaaaataaaaaaaaataataataatataaaaactaaaactacaaaatataaaacaacaattacattttataaattcaaattctatctactaaacatttcaaacatacataacttttctatacacataaacattatattatattacaatttttacatta

SEQ ID NO: 8465 - DNA, 317 bp, Glycine max
ggtacagccccacttcacctgggtacagccccacttcacccgggtacagccccacctgtcctactgagagtcctagctctccgggatatagtcctacaagtccagcttattcgcccaccagtccatcctactctcccacatcaccgagctacagccccacatcacccttcttcagtcccacatcacccagctacagccctacctctcccagctatagcccaacttcaccagcttacagccccacttcacctgcttacagtcctacttcaccagcatatatcccctcatcttctttctatatttcgacttcaccttct

SEQ ID NO: 8466 - DNA, 433 bp, Glycine max
  modified_base (415)..(415): a, c, g, t, unknown, or other
caagacctgcaggtgtaggtcttgcaggtgtaactgcctgtccgttgcggaggattccggagtcgtagacgggagtgaaatcaggttggaagacctacacctacaagacctgcagctcctacaaaacctgcacctgcagtaggaggtcaaaaatggtgtgtgccaaaggcagatgctagcaaccaagctttgcaagcaaacataaactatgtgtgcagccaaggagttgattgtaggccaattcaaccaggaggagattgctttgcagccaacaacgttaaggctcttgccacttatgccatgaatgcctactaccaggccaatgggcgccatgatttcaactgtgacttctctcaaactggtgttattactactactaatccaagccatgataaatgcaaaatctgagcatgtntatttaaaggttataatc

SEQ ID NO: 8467 - DNA, 440 bp, Glycine max
cttggaactgcaacaatggtgccgcaacccattttgcatctaacccttttgtcattaataatctctgtgaccactctttccttggtcgatgccgccgatcccacatttggcttcacccctcttggattatctagtagctcaaacttgcaaatccaaaagccttacgacgttgcagtcaacgagcgctacagcttttcaaatggagtgcacagattttgggtatactccacggacaagcctcatatgcaaggcagcaatacgaagccacgaactgagattcgtatcgctgtaagccccaactcgtagcttgcttaatcattgtctatgagaaatattagtaatacattcatgacccttatttttcagggtcttgctgattaatattcctaaaacacaacactatggtttttttttggattagatatatttttaatttccct

SEQ ID NO: 8468 - DNA, 278 bp, Glycine max
aagagaacgttcatctcgttatggagctttgcgccggcggagaactctttgatcggggcgtctcgcgggggcactacagcgagcgtgcggcggcgtacgtggcgaggactattgctgaggttgttagaatgtgtcacgccaatggagttatgcatcgtgaccttaagccagagaattttctgtttgcgaataagaaggagaattctgttctcaaggctattgactttggactctccgtgttttttaagccaggggagagattttcggagattgtggtg

SEQ ID NO: 8469 - DNA, 243 bp, Glycine max
aaaaaaaaaaaaaaaaaaaaaaaaaaaataaaaaaaaaaaaaaaaaaagaaaaaaaaaaagaaaaaaaaaaaaaaaaaaaaaaaaaaaaaaaaaaaaaaaaaaaaaaaaaaaaaaaaaaaaaaaaaaaaataaaaaaaaaaaaaaaaaaaaaaagggttttttctatattaaatatacatttttaaattattgccctaaatttaaattaattgcctttttttaaaaacctttaaatttataaa

SEQ ID NO: 8470 - DNA, 173 bp, Glycine max
tcttcctaaaaaaaaaaaaaaaaaaaaaaaaaaaaaaaaaaaaaaaaaaaaaaaaaaaaaaaaaagaaaaaaaaaaaaaaaaaaaaaaaaaaaaaaaaaaaaaaaaaaaaaaaaaaaaaaaaaaaaaaaaaaaaaaaaaaaaaaaaaaaaaaaaaaaaaaaaaaaaataataa

SEQ ID NO: 8471 - DNA, 396 bp, Glycine max
ggaatcaaggactcaattcctgcttggattaaatttgctgtacaggctcccggtgaaattccatacagcggaatatactatgatcccctagaagaggtaagattctagacttcttacatgtaggatacacttagaaaaagagatgacaaatctaaatatctctttttccattatgggatagaattgtatctatgacctctctttgtagtactcatcatgacagaacttttaatggtgatatgcaatgatgttgaaagttttgtagtttcttttaagccattggcacactctggctttattcttatattaggaagaaatattccccactcttttgcccaaagggataatggtatgatcgatgtatataagaagtgtatataagaagtgcgatatttt

SEQ ID NO: 8472 - DNA, 304 bp, Glycine max
aaaaaaaaaaaaaaaaaaaaaaaaaaaaaaaaaaaaaaaaaaaaaaaaaaaaaaaaagggaaaaaaaaaaaaaaaaaaaaaaaaaaaaaaaaaaaaaaaaaaaaaaaaaaaaaaaaaaaaaaaaaaaaaaaaaaaaaaaaaaaaaaaaaaaaaaaaaacaacaaaaaaaaaaaaaaaaaccatgacataacaaaacaaaaatcaaaaaacaaaaaatccccttttcgaaagctgacaaaaaagctaagagaccctaacatatcgaccttacaaacagtagcgcaacccaaaaggcaaatggaac

SEQ ID NO: 8473 - DNA, 276 bp, Glycine max
taaaaaaaaaaaaaaaaaaaaaaaaaaaaaaaaaaaaaaaaaaaaaaaaaaaaaaaaaagaaaaaactaggactataataaatcctaaacttacttacacatccttccaacaacataacaaatctttaaattacacctaaattaaataaactaccacgccattttacaacttcataacttctaaaacctcgtcgtctctcaacttattatcctttctgcaaatcatcctttttccatcttccttaataacaaataagccccctcctattacccttc

SEQ ID NO: 8474 - DNA, 285 bp, Glycine max
taaaaaaaaaaaaaaaaaaaaaaaaaaaaaaaaaaaaaaaaaaaaaaaagaaaaaaaaggaaaaaataaaaaaaaaaaaaaaaaaaaaaaaaaaaaaaaaaaaaaaaaaaaaaaaaaacaaaaaaaaataaaataaaataaaacaattaaaataaattaaaaaaatctaaactaaaaaattaaaagaaacactaacataatataaatctaaatactaataataactttaaaacaacatacataaagaatattacataaaaataacacaaattatataaaaattaa

SEQ ID NO: 8475 - DNA, 126 bp, Glycine max
gcagatattacatacacgtgaatcactaattaagccatggagaagaaatcaatatctgtgttgttcttcctcttccttgttctctttgttgctcaagaagttgtggtgcaaactgatgcaaatact

SEQ ID NO: 8476 - DNA, 354 bp, Glycine max
cccacgcgtccgaaaaaaaaaaaaaaaaaaaaaaaaaaaaaaaaaaaaaaaaaaaggaaaaaaaaaaaaaaaaaaaaaaaaaaaaaaaaaaaaaaaaaaaaaaaaaaaaaaaaaaaaaaataaaagggggggcctttttaaaggatccaattttacttccccttgttttcaaatgtattagctttttttttgggtcacttaaattaatttaactggccgtggttttaaaaattcttgattggaaaaaccttggtgttaccaatttaaatccctttttagaaaattccctttttgccaattgggttaataccaaaaggccttccacaaattgcctttccaaaaatttggaaagct

SEQ ID NO: 8477 - DNA, 414 bp, Glycine max
tatgatttgaatcagcaactgacgcctgaactttacgtttgaacctgaggtggaactttgcataattcgaccttggaggcatacttccatatgtctgtcagtcataaggaacttcatttagaaatgtgattttgcttaattgtagttatgtattatcggcttaataattacaattgtggcacaacttaaggagtattttgcacctgacattcgctcaaaaaaaaaaaaaaaaaaaaaaaaaaaaaaaaaaaaaaaaaaaaaaaaaaaaaaaaaaaaaaaaaaaaaaaaaaaaaaaaaaaaaaaaaaaaaaaaaaaaaaaaaaaaaaaaaaaaaaaaaagggggggcccttttaaaggacccaagtttaattccccgggcttggaacagtaaagctttttttaaggggcccctaa

SEQ ID NO: 8478 - DNA, 350 bp, Glycine max
ggcagaagagatgaatttgttatcatcgccttccagtgccgcttctacttctctatcaccttgctgttttcttccttgctaccctcatcatggtttcacttctctctctctctctctctctctctctctctctctgacatgggtttctggtttggttagcagggttctcttctggtaccttcaaattctccaagaaagagagtagatgtataaagaaagctggaagtatcactgcaaagttcgagttgaagccaccaccctatccactgaattctttggagccaattatgagtgaagagacaatcgaataccattgggggaagcatcacaggacttatgtagaatatctg

SEQ ID NO: 8479 - DNA, 283 bp, Glycine max
cccacgcgtccgatttatgtaatgttctacctgaaaaataataatataatctgttttagtattgttaaaaaaaaaaaaaaaaaaaaaaaaaaaaaaaaaaaaaaaaaaaaaaaaaaaaaaaaaaaataaaaacaaaaaaaaaacaaaaaaaaaaacaaaatcaaatagacacctaaaaacaaagaactggcacaaagcaataaaacgataacgaaatacaaaaccactgaagctaaccaacttaattgccttctacaacatacttgttttcgaaaatgtcaaa

SEQ ID NO: 8480 - DNA, 419 bp, Glycine max
gaaaaagaaggatgcagagcaatctgcagcagagattgctatagagaagcttggcgatttgtacagaggccattgatcccactccacaggaagcacaagaaagtttagtatctcgaattgcctacatattttctgaaaagtttgttgtatgtgatcatccactcagtggtcacattcgagcaactttgttgaggaaaggtgatctttgtggttccattcctatttctgtcattgctttctatgatgcaaagcttttcagcttgtgtaaatgtattaatcctgaggtggagtcaaacccatttttagttatttcatacataatgaatgccactgcaaacttacaccagtttcttgctacttctgaacgacatctctggattagaaggctgagtccatatccacaagatattatagagtca

SEQ ID NO: 8481 - DNA, 342 bp, Glycine max
cagattcggtccttccaatcatcccgagttctggtcaacttttctccattcggcggatttgatcattctgctcctgattctgctcagacaccgcacagagaacaaatccaccattcattatgctttttcgcaacagcgcactggctctaagatccttgccgatactgaagcacctactctagcggtggatcccggaccgatccatgacgtacatgcaccgaccgtgctatgggacactgcggtcggtgacactgatccgggtcgacaggatcgggccgatggtgactggcgcggagtaaccggtcatggaggccatgcacacgcccgtctacgtcaagaaga

SEQ ID NO: 8482 - DNA, 301 bp, Glycine max
ctcacttcctcttggtgaccaagcagagcactgtgattctttgttttcggacggtgtaatgagttttttttttatccttgagagctttggtatagaagggatatagaaaaagataggagcagggagagggaggaggatagggacaggagacaagaaaaggaaagagataggagctgggatacagtgatggagagggataggagaagggaaaaggaaagagatagaagtagggacagaataagaggtggcaagagagataaagacccagagaatgaaagggatgataagcatcgggcaagag

SEQ ID NO: 8483 - DNA, 425 bp, Glycine max
  modified_base (356)..(356): a, c, g, t, unknown, or other
cgccgctgcctcatttctgttctgttctcgtcacagattgtggtgattctattaggcgttggctgggttcaattgatgagagacaattgtggggatgcttgtttctgtcaattggctctgttttctttgttgggtatttctctattgctgttctttgcaagcttttcccaccttcacacattcccctcatttctgcactgcaaaatgactggtactactgcttcttggtgccattgactctccctataattgtggttgctgtgtactttcattggctcagcatgaagctgttcaagcatgcttaattagcttaactttgccagattttgaaggcagaaagaaatacatgtatgctngtggagcaagcaacaactacctatgacaattgctgcactcctctctcctaatcacctcaaaaagagttc

SEQ ID NO: 8484 - DNA, 373 bp, Glycine max
cccatcttccagggtccggtgatagctgctgcaaaatgaaccttcagtttgtagatcgtaattcaagtgttgttggaaaatcttttaaattaaccctacctgaagtgaccagtttcccagattttcttgttgaaagaaccaggtttgacgctgctatgcaaagaaattggacacgcagggataaatgcagggtttggtggaagaatgaggatagttcctctggtaattggtgggatggtcgaattctgtgcatgaaagccaagtcttctgaatttccagaccgtccattggaaaagtattccggtccgtaccaggagggacttaattgaaccacattggcttagtccttggaagctttttgatgctgatactg

SEQ ID NO: 8485 - DNA, 426 bp, Glycine max
  modified_base (340)..(340): a, c, g, t, unknown, or other
gcaacctggaacctcaactaggacactccttcctatggttatgttccagaacatgtcccaaggtcctcctagctcacttttgcaggttgctgtaaaaaacaaccaacagcctgtgtggtattttaatgataaattctcattccatgtactttttactgaggatggtagaatggaacgttccgctttcttagagacttggaggtcccttcctgattcaaacgaggtttccaaggacttcccagacattgtgattggcggtgtggaagcgacactggatcgactagctgcatcaaacgtgttctttattgcaaagcgcaagaatgcaaaccaggatgtgttntacttctcagctaagattcctcgagggataccattataaattgaacttaccacattggccggaaaccctggcgtcaaatgtgcaat

SEQ ID NO: 8486 - DNA, 227 bp, Glycine max
attaatcctatgtctttttggtccaaaaaaaaaaaaaaaaaaaaaaaaaaaaaaaaaggaaaacaaacaatataataaaatccaaacttacatacacatgcatgcaactttataaaatattatataaagtaacctaaattaaatatgactgaccttttttatacaaccaacttactggaaaaaccttgccgttacctaacttaattttcttgcaatacatcttcatt

SEQ ID NO: 8487 - DNA, 284 bp, Glycine max
cccacgcgtccgaaaaatgattctcaaattcagagactaaaacaccaattaaatcgttacttttttacctttcaaaaaaaatttaaaaaaagaataaaaaaaaaaaaaaaaaaaaaaaaaaaaaaaaaaaaaaaaaaaaaggaaaaaaaaaaaaaaaaaaaacaaaaagtataaaaaaaagaaaaataaagtataagtacttaaaaaatgacaactaaaaaaaaaaaactgaaccggaggataccaaaataaatactaggaaaaaccaggtagtatacaacgaa

SEQ ID NO: 8488 - DNA, 129 bp, Glycine max
aaaaaaaaaaaaaaaaaaaaaaaaaaaaaaaaaaaaaaaaaaaaaaaaaaaggaaggaaaaaaaaggaaaaacgataataaaagatccaaactaaaaaaaacatacatacaaaagggtcggcctttttt

SEQ ID NO: 8489 - DNA, 278 bp, Glycine max
aaaaaaaaaaaaaaaaaaaaaaaaaaaaaaaaaaaaaaaaaaaaaaaaaaaaaaaaaggtaaaaaaaaaaaaaaaaaataaaaataaaataaaaaaaaaaatataaaaaaaaaaaaaaaaaaaaataaattatatagaatcactaaataatgggactagtgttaataatttaacaattttaataatgttaaaactataacaattacttttttttagggcatactattattaatttctttccccagttttatacacatttatatttggaaaatcgttgt

SEQ ID NO: 8490 - DNA, 339 bp, Glycine max
gtcatttcagaggaagcagttagctctgtatgaagatgatgaatttggattgtcagatgaacaagctctttctctcctagcttctaaggcgtgcagatctggtcaaggagagggtttagccaatgctgctgcaatacaaatacagacaaagtttcgtggttggacgaagagaaaagaattcttgattattcgccaaagaattgttaaaatccaggcccatgtaagaggtcaccaggtcaggaagcagtataaaccaatcatttggtctgtgggaatcctgcaaaaggttatattacgctggagacgcactggcagtggattacgtggatttcgaccagc

SEQ ID NO: 8491 - DNA, 318 bp, Glycine max
gccaccttcgtggactctgagctgagcttgaactgagcttactaaggctggggctcgttacgatgtgaagttgttcgatgagacagctagtgggaagtctaatgggtaattgtcagagttcaggtttattgacccttctgctggcactgcttgataagaacggatgaatgggcatgtttttaatgggacgccgagtgttgttgcgtccgcatcgccttttacagttaagaaaatgctggaggctcagatcaatagcaatcagcagatgaacccttctgctgttcctcagggaatgctgacgcctgctgatgcacgggc

SEQ ID NO: 8492 - DNA, 431 bp, Glycine max
  modified_base (403)..(403): a, c, g, t, unknown, or other
gagacgatccttagcattatcacagctcccttaatttgattttctttttgcttgcaatgttttttgtataatcgttgttaggttaaaacttgacaagacgaaatgattatctaaattttcctaggcttatatattatgattgtaatgtaaggattacctgtggtttctttttaaatgttactgaccagactcaattgtcatgtgctatgcttttgtttctcagatactttaaggggcctgaacttctagttgatttgcaagactatgactactcattagacatgtggagccttggctgcatgtttgctggaatggtgtgaattataactataagttactggttatatatggcatactcttgacatttatgcagatggtctaaatttgagcgtacatgattaanaatgtaaaattctcgtcataatttgttc

SEQ ID NO: 8493 - DNA, 426 bp, Glycine max
  modified_base (339)..(339): a, c, g, t, unknown, or other
cacattctcagactctgcacacaccttagaagaacagagcagaaccaccagtgctttaggaagacggtttcagcaatggcgttcttaaataaaattggaaatctggtcaagaattctgctgtcaagcacatcagtcaagatttttcagtgtctaccccatcacttttccaagcaattagatccatgtcatctgcaaagctttttgtctgaggtattgcttacagcactgatgatatgagtttgcgagagtctttagctcgctatggagaagtaatagatgtcaaggtcattatggatcgtgaaactggcacgtcaagacgttttggcttcataactatngcaacatgtgatgatgcatcttctgccattcagggcatggatggtcaggatcttcatggtcgcaggatacgggtgaattatgctaca

SEQ ID NO: 8494 - DNA, 420 bp, Glycine max
caagcattcgatactatgttatgcccatcagttgcaaggatccgtgcgttctacccatgaggtctgcggctatactaccgatcttcgctcatagtgctactccagatgcgtacccataattcacactttacatatgcgagatctcacccactgtggataatgagttgctgctctctgtgcttcaattatgtggaactattatagacctggaactggctgaggatttatcaactggaactgctacaagttttgcgttttatgagttcgagtctgcaaaaggggttctccgggccttgcgtctccttactaaactgaatattgatgggcaagaactgaaagtcaacgtgaatcaagctatgaaagacattctggagctgtatgttaagacaaaaactgagaacttgaagaacaaagaaactc

SEQ ID NO: 8495 - DNA, 415 bp, Glycine max
  modified_base (355)..(355): a, c, g, t, unknown, or other
  modified_base (388)..(388): a, c, g, t, unknown, or other
cccacgcgtccggagagatggaagcaactggaaaattcaaaatgcaaaggaagaaactgttccagttggtgggcaaggcaaattcaaatcttgctgatgtgattctaaagcttggactatttgagagatcagatattgcttggaaagatgccaaatatgctcagatatgggaatatctcatggatgaatttgaattaactcagagatttgctagtcttgatttcaagttgaaatttgtggagcataacatccgttttctacaagaaattcttcaaaataggaaatctgatttcctagagtggctcattattgcattgattggtgctgaaattcttctgtctctctatgacattgntcatcggtctgccatgaaattttagcagcattntttctggtggcatgtaaggttagcatg

SEQ ID NO: 8496 - DNA, 327 bp, Glycine max
  modified_base (270)..(270): a, c, g, t, unknown, or other
  modified_base (273)..(273): a, c, g, t, unknown, or other
ctaacttgtttatgagagctataagtcaccaccttctagtttcactactcgagtggagaatctctacctcacgatcccttttttctcttagaaccatcatgtcacaatctgatcattcctctgcttttaccacacccagattagttctcaagaaggttttggccaaatctcaacatgaaggggatggagctgttgttagaagaggcattggaaggagcgagttgaagaacttggatcccttcctaatgttggatcacttctcagtatctnccncagcaggatttccggatcatccacaccgaggttttgaaaccgtcacctacatgc

SEQ ID NO: 8497 - DNA, 286 bp, Glycine max
aaaaaaaaaaaaaaaaaaaaaaaaaaaaaaaaaaaaaaaaaaaaaaaaaaaaaaaaaaaagaaaaaaaaaaaaaaaaaaaaaaaaaaaaaaaaaaaaaaaaaataaaaaaaaaaaaaaaaaaaaataaaaaaaaaaaaagtgcacccttttttaggttttcatttttaattacccttttttccaaaattttattttttttttagtttcccttaattcaatttaattgtccctttttttacacattttaatttggaaaaccttttgctttcccaattttaatccttt

SEQ ID NO: 8498 - DNA, 254 bp, Glycine max
agcgtccgaacaacaacggcaaaccacgacaaaaacggagagactgattccgagaatcgggacggggcactatcactgttatggacccaaggtcaacttcggccggacgatccaggcggtcgacattatcatatgcgagaattcaactgttgtcggcacatctatgaaaagatcacgcatgtgtccctggacgagcttaaccacaactagaatctccgaatacaacaaaatggccaaacctagtccgattctga

SEQ ID NO: 8499 - DNA, 395 bp, Glycine max
tggaaaactacagctaattgccgagaaagagacaaaaggagctgtttattgcttgaatgcatttaatggtaaattgcttgctgctattaatcaaaaaattcagctgtataagtgggtgctccgggatgatggtacccatgaattgcagtctgaatgtggacatcatgggcacatcctagcactttatgtgcaaactagaggagattttattgtagttggtgatctgatgaagtcgatttccttgttaatctacaaggtaaattttaaactgttgtgacactagtttctgtctggttttggtaaatttcaactgttgtgctgcttatcgttttggatgaataactgattttttgtatatataatgagtacaccatgttcttttggaatgataagtt

SEQ ID NO: 8500 - DNA, 346 bp, Glycine max
catattcagtggacatgtggttgcattattgcatatttgctataagcacatatggggagccaaaggctgttcgtaggctttttgaacgaggattagcttatgttggaacagattatctttcttttcccctctgggataaatacattgaatatgagtacatgcagcaggactgggcctgccttgctgtgatctacaccagaatattagagaatccaaatcaacaattagatcggtatttcagcagcttcaaagagttagctggaaatcgtcctttatcagagttacgaactgctgatgaagctgctgcagtggcaggagttgcttcaaaggctactggccaagctac

SEQ ID NO: 8501 - DNA, 290 bp, Glycine max
aaaaaaaaaaaaaaaaaaaaaaaaaaaaaaaaaaaaaaaaaaaaaaaaaaaggaaaaaaggaaaaaaaaaaaaaaaaaaaaaaaaaaaacaaaaaaaaaaaaaaaaaaaaaaaaaaaaaaaaaaaaacaaaaaaaaaaaaaggaagcgaaaaaaaaaaaccacataccacaagccagatacagcaccaattaacacatgaaaaaggacatagcatgaaaagaacggagataatccctaaaaaaaacgaacccagaaaaaaccaagcaaccccaaacaactagcagtagag

SEQ ID NO: 8502 - DNA, 426 bp, Glycine max
cacagctagcagatattacatacacgtgaatcactaattaagccatggagaagaaatgggtagctgggttgagcttcctcttccttgttctctgtgttgctcaagaagttgaggtgcaaactgaggcatagacttgcaagaacctggctgatacatacaggggtacatgcttcaccattggcagctgcgatgatcactgcaagaacaaagagcacttgctcagaggcagatgcagggacgattttcgctgctggtgcaccaaaaactgttaaatggatccattcactccaacgtgaagaagatgcatgcagcgctattttataaaaaataaaactactatatactatatataataagactggcgctgcatcaatgacctatgtattatagtatatagtattaccgatgtcagaactatagatgcat

SEQ ID NO: 8503 - DNA, 428 bp, Glycine max
gtaggaatgagcacatgttatcctcgaccaggttctgtaaagataattgatggtgagactttaactctagaatctaactatagcagcagccgtgagcacactggagtgatggggcttttctatctattggtggcagaacagcttccagaccaacacttcagacatacctctcgttcttcattctttatgaatataaatagtatatttcattgatagataactagtgaaatgctaatatatttggagtgtcatcgatggtatcaaagtatgtatgacggtcaaaagaaatataatgacagaacttagaagtataattggaaaaatatacttctcttgtcggcggcaatagacaacaaaggtaaaagccggcgaagagcatatttccaagtttgaggattggtgaaatggggtcataagtcaattggctt

SEQ ID NO: 8504 - DNA, 357 bp, Glycine max
  modified_base (326)..(326): a, c, g, t, unknown, or other
  modified_base (341)..(341): a, c, g, t, unknown, or other
gttcacagacagggggcagcagtctggggaggtgctgcaagctttaatagacttatgcgatatgcacatcctcaggtaaaacttattgatttttcgcctggtgagaagtatttggtaacatatagcagccatgaaccaagcaatccccgagatgccaatagagttgtgataaatatatttgatgtgaggactggtaaagtgatgagggacttcaaagggagtgctgatgattttgcagttggaggtgctgggggtgtcactggagtttcatggcctgttttcaaatggagtggtggaagagatgatcaatactgtgcaaggatggngaaaaatatactctncgtttatgaggcatag

SEQ ID NO: 8505 - DNA, 233 bp, Glycine max
  modified_base (108)..(108): a, c, g, t, unknown, or other
ctgggatgcgttttcctagggttgtgtcaaaccagataattaagatagaagcttagttgtgcatatatagaaatcattgtttgagatagccccttaaaaaaaaaaaanaataaaaaaaaaaaaaataaataaaaaataaaatataaaaaattaaaaattataataaaaaataaaaaataataataaaataaataaatattttataaaaaaaaaaagggaagaatttttaaaag

SEQ ID NO: 8506 - DNA, 385 bp, Glycine max
cccacgcgtccgaaaaaaaaaaaaataaaaaaaaaaaaaaaaaaaaaaaaaaaaaaaaagggaaaaaaggataaaatgtaaattgaaataaaaaaaaaaatgaataaaaactaaaaaataaaaaatataaatatgtaatatatatttgaccataataattatatatacctatctatagcaaaaacataactggcagtcatctacatggaccgaactgaaaagtcctttgttgaaggcaacttggattgtaactggtcataggaatcaatctttaagctttttgctgacttgaacattgcacaatttgaacctcatgttgatgttgcctttgcacctccctttctgtatgtcgatcaagtgtgaatactaatcagtgaacggattg

SEQ ID NO: 8507 - DNA, 388 bp, Glycine max
aaaaaaaaaaaaaaaaaaaaaaaaaaaaaaaaaaaaaaaaaaaaaaaaaaaaaaaaaaaaaaaaaaaaggaaaaaaaaaaaaaaaaaaaaaaaaaaaaaaaaaaaaaaaaaaaaaaaaaaaaaaaaaaaaaaaaaagggccgccctttttaaaggtccaaagtttacttccccttctttccaatttaaaactttttttaaagggccccctaattaaatttaattgccctatttttaaaaacgtggtacttggaaaaaccttggctttaccaatttaaatccttttaaacaatatccccttttccccatttgccttattaccaaaaagccccgaacaattcgcctttcaaaaaatttcccaaccctaaatggcaaatggaacccccctt

SEQ ID NO: 8508 - DNA, 216 bp, Glycine max
aaaaaaaaaaaaaaaaaaaaaaaaaaaaaaaaaaaaaaaaaaaaaaaaaaaaaaaaaaaaaaaaaaagaaaaaaaaaaaaaaaaaaaaaaaaaaaaaataaaaaaaaaaaaaaaaaaaaataaaaaaaattaaaaaaaacaacaaataaaaaaaaaaatagaataaaaaaaaattaaaaattaaaaaacttaataaactttaaacaaaattctaat

SEQ ID NO: 8509 - DNA, 224 bp, Glycine max
taaaaaaaaaaaaaaaaaattaaaaaataaaaaaaaaaaaaaaaaaaaaataaaaaaaaggaaaaaggagaaaataaaaaaaaaaaaaaaaaaaaaataaaaatgtaaaacatttttatggatccaagctttccttccctttcatacaatttctttctttttttcttgtgccacctaaattaaatttattttccatcgttttaaaatcttaataccttgaaaac

SEQ ID NO: 8510 - DNA, 450 bp, Glycine max
tgtttatgctagccgcgaatcgggttccgtttggaccttggcatcttggactattaggatttgtgcagttgattagccccaacccaacaatgaaatataagctcacatcaacatttgtgaagacattgatcttggaaaggcctctgatcccagctgtgtatgctgttgctgtggctgtgtcgttgaaagccggcaacactggcagaattggtctcgggagctgtccattttttttgctgcaggtggcggatttgtattctaggattgcagtggtggtggtgttgtcaaatgcagcattcatcgcggtttgatatgcgcgcgctgccatgtagtatcgcccgggggtttgatcagcagtgaccaggacattgattgtctgaccaggacctatcatgaggacattggtggtgaaaggcttggtgtaagcagcatcagtagcaacaacagtca

SEQ ID NO: 8511 - DNA, 204 bp, Glycine max
acgggtaccttgagcttggcgttggctgattatgtgttgagagagagccatttcaaacatggatggggtcttctcagtgaagagaacatacaccaattaaccaacacctgatatgctgataccgtgcaaactcctttacttttttgaccaccataattgctgctaaaactaattctagctcgacaacagcaaacgtggtgactc

SEQ ID NO: 8512 - DNA, 364 bp, Glycine max
gtccagtgggcctccctcattcaggctctcgcctccaacaaaacgggcccaccgggcgcacaccttcgtataaccgcattgtcccgcaccggctccggacgccgctccatcgccaccgtccaagaaaccgggcgccgcttagccgccttcgccgcctcccttggccaaccgttctccttccaccattgcaggttggagcccgacgaaacgtttaaaccttcgtcgcttaagctggttcgcggagaggctttggtttttaactgtatgctaaacttaccgcaccttagttaccgcgcgcccgaatcggttgcgtcgtttttgagcggagccaaagcgttgaagccgaggctggtgactttagtgg

SEQ ID NO: 8513 - DNA, 387 bp, Glycine max
  modified_base (293)..(293): a, c, g, t, unknown, or other
taccttccaacactggggtcctggttttggtccttcaatggcggaaccctaaccgggcttggctcttaaactttccatgggcctggcccgcccttgcctaaagcctcaattctttcaatcctcaatcttctctcttcttgaccctaaacttcgcctattcctcttttcaaccaaacccttacgcgccgtcatcgacatggcccgcaccgggaagttctttgctggtggcaactggaaatgtaacggaacaaaagactcaatcagcaaacttgatgctgacttgaacaatgcanaatttgaacctgaaggttgatgttgtcgttgcacctccctttctttaacattgatcaagtgaaaaacttaattaattgaccgaatggaatattt

SEQ ID NO: 8514 - DNA, 286 bp, Glycine max
ctagagaaccactttttgccttcttcaaatccctctatgaaagcctttctgcttcaaagtagattgtttaagaatgattgtgtgaactacttgtcgctcattgaattattgttgtttgaatttcatgtcaatttgatactatatgtaatttagtaacctgggatattaggatatccccaaggaacaaagaatcctaggattttgtttccattttggccatttcagttaataattaaagaaactctattttttcttgttaaaaaaaaataaaaataacaaatataat

SEQ ID NO: 8515 - DNA, 267 bp, Glycine max
aaaaaaaaaaaaaaaaaaaaaaaaaaaaaaaaaaaaaaaaaaaaaaaaaaaaaaaaaaaggaaaaaaaaaaaaaaaaaaaaaaaaaaaaaaaaaaaaaaaaaaaaaaaaaaaaaaaaaaaaaaaaaaaaaaaaaaaaaaaaaaaaaaaaaaaaaaaaaaaaaaaaaaaaaaaaaaaaaaaaaaaaaaaaaaaaaaaaaaaaaaaaaaaaaaaaaaaaaaaaagaataaaaaataagtaaaaatagcaaaagaaccaaaaaacaaaaa

SEQ ID NO: 8516 - DNA, 408 bp, Glycine max
  modified_base (385)..(385): a, c, g, t, unknown, or other
ataaatttatattacttttataacagagaaagacagaagtaagataagaagaaagagaaagtgtgagataagatgagtgtgatgaaaaagataaaaataaataaataaattgttgtatgaatttgttttatgaataggatatccttttgtttaaatataggatatgagatcatcaaattttaacaatatctcttcgattttgacaatttttccggattcaagaaacgttgacataacaactaccttttttatttattaataaaattataaagcaataggggtcttagtacctaggattctgaacagtgccatatgttccatccatccatttaggataatgtttgctaaaaggatctatcacctagtagatgtgtatattaattanttaatattaatgatgcgtgtgag

SEQ ID NO: 8517 - DNA, 297 bp, Glycine max
cccacgcgtccgaaaaaaaaaaaaaaaaaaaaaaaaaaaaaaaaaaaaaaaaaaaaaaagaaaaaagaaaaaaaaaaaaaaaaaaaaaaaaaaaaaaaaaaaataaaaaaaaaaaaaaaaaaaaataaaaaaaaataaaaaaaaaaaaaaaaaataaaaaaaaaaaaaaaaaaaaaataaaaaaaaaataaaaaaaaaaaaaaaaaaataaaaaaaacaacacatactaaatatgaaaaaatgatgtaaatgataaaaaatgacaacaatactaccaataacaaaaataaagaataa

SEQ ID NO: 8518 - DNA, 388 bp, Glycine max
ctttcttctatatccaatctgcaacacccagaaaccagtttctttttttccttgtcatttcaggttattcaccagtttgagttgttgaatctcctccactgcttcttctcctgatcctgttcagaatccaaggagcttgggaacaaactcctgctccttcttcaccctggtcataagttcatgtctttgtttcttcatttcattttaattaccagaggcaccacttctggtttattgataggcaatgggaggtgcactgggaaagattgaatcacccaaaaagggatcagtgccagaaactaagctcgaggctaaaatggttgaagcaatgctgcgtagggaatctcaaggaagttccgtgaaatcattcaacactataatcttgaaa

SEQ ID NO: 8519 - DNA, 403 bp, Glycine max
aatagctaaaacattcatgtttaatgttatggcagccattaatcacaatgacaacacaggtttaacacgggacaaaagaagaaacatcagccataacagttaagcaaattctcgtgggcatccaagacttacttgaccagccaaatcctgctgaccctgcccagacagaaggctatcatctattcatccaggatgcagcagagtacaagagaagggtccgccagcaggcaaagcaatatccacctcttctctaaggttgcatcagctaaatttatgaactatttttactatggcagatgtttcttcttttgtcccgggttaaaactgtggtgtcattgtgattaatggctgccataacattaaacatgaatgttttagctattcatgcgcgctggtagatctg

SEQ ID NO: 8520 - DNA, 371 bp, Glycine max
aaaaaaaaaaaaaaaaaaaaaaaaaaaaaaaaaaaaaaaaaaaaaaaaaaaaaaaaaaaggaaaaaaaaaaaaaaaaaaaaaaaaaaaaaaaaaaaaaaaaaaaaataaaaaaaaaaaaaaaaaaaaaaaaaaaaaaaacaataacaaaaaaacaaaaaaaaaaaaaaaaaatgaaaaaatgaataaaaacaaaaaacataaaaaaaagacaagaacaaaaaaaaatgatactgacaaaaaaaaagctaatttacatgtaggtggacaagtacaaagatgcaaattattaagcggatttaacaacagatgttcctgaagtataaaaacatagacatcatctggaaacacataaacatatgtgctccatgta

SEQ ID NO: 8521 - DNA, 300 bp, Glycine max
aaaaaaaaaaaaaaaaaaaaaaaaaaaaagaaaaaaataaaagataaaaaaaagaaaaaggacgacatcctacatcgtggttcctatattataaaatcaaatatgctaaatacgggcggccgttatacaacatcgtaaatactttcactgtcctgcgattaacaacgttaagcttgttgcacctcatccttttgtcaactgatgtcgtattacacgaggatgtcttgaaacatcctggttaacaacagttggaggccgaatgccgattgatattgactacgtgttgcgcagcatgaatgg

SEQ ID NO: 8522 - DNA, 257 bp, Glycine max
aaaaaaaaaaaaaaaaaaaaaaaaaaaaaaaaaaaaaaaaaaaaaaaaaaaaaaaaaaagggaaaaaaaaaaaaaaaaaaaaaaaaaaaaaaaaaaaaaaaaaaaaaaaaaaaaaaaaaaaaaaaaaaaaaaaaaaaaataaaataaaaaaaaaaaaaaaaaaaaaagaaaaaaaaaaaaaaaaaaaaaaaataaaaaaaaaataaaataaaataaaaaaaaaaattatatttggaaaaaaataattaatagagaaa

SEQ ID NO: 8523 - DNA, 449 bp, Glycine max
ggcgaaggagagcaattagtgagggacatgttaacgacacacatgcagtgttgaatatggctgcaatgtggctcttccctcaactttgcttgggtggcatagctgaagcattcaatgcaataggccaaaatgagttctattacaccgagtttcctaagactatgtcgagcattgcttcttccctttttggactaggaatggctgtaggatacgtgttatcttctttggtattcagtgttgtggaaaaggttacttcaagagggggaaaagatggatgggtttcagataacattaacaagggtcgtttcgacaagtactactggctttttgccacactcagtgctgttaatgtactgtattatctagtatgcagttggatttatggaccaactgctgatcaagaatcaaaagtaactgaagaaaatggttccaatgaggaagaattgcca

SEQ ID NO: 8524 - DNA, 351 bp, Glycine max
cggcgttaagctaaacgtaacggagggacgacggtttttggtgcaagcaaacgctcgtgaactcgccggcgtgctctccgccgggaataccaagcgcccctggctgacctggagccaccaccctgtcacccacccgcggctccggtcgggttgcccgttgatgagtgattacgggtgcaatgttccggcgccggatgctcacccggcgagtcagtttatgtcggagtggtttgatatccggggcgggtttccgggtccggatatgaggctatgttctcattcgggttgcgggcgacccgagacatggaagcacgagtttcgaaggtgttcggtttgcgggttggtgaatta

SEQ ID NO: 8525 - DNA, 287 bp, Glycine max
  modified_base (256)..(256): a, c, g, t, unknown, or other
tgcctcactcttcctctctctccccaccattttccccttcgttcaacccaagaatatcccatcaaccacccttcaaccaaccaagctcaaagtcccaacccaagcctcatccctcacacacctttctctcttcaccaccactcctgctgcttccaaaacctgcttcaaatccaccgtcttcgccaacccccttcacgcccctctctgcctcgctccccaccgtccccgcgacccttccaacgccgtcgtccttcgncgcgccgtcgtcgtctggttccgcaacgacc

SEQ ID NO: 8526 - DNA, 326 bp, Glycine max
cgtaaactttctgattgtgattcaagactgcgacgacgatgcaagtgatagacactcggctgggcagaacatgtaactgaatacaatcgaactatggacccatacgtgactgaatcctatggagtcgctatcaaatactgagacgggattctaatggccgctgacatgggaggtacggatggatatacccttcggtacaagaatgatgagcgtattaagcctattggaaagcattatcttcttggtactagcggtgagataagtgactttcaggagattctgcgatacctagatgagcttatcatatatgacaacatgtgagatga

SEQ ID NO: 8527 - DNA, 415 bp, Glycine max
tcgtccacgcgttcgtccacgcgttcgtccacgcgtacgattttagggcatattaatgggcggaaagtcacttctgggtggggagcaaggctttcctatggccatgagtggaattagctcaggtgatctttctaatgcttatagagtctaatatttttatatattgtaattataaatatgttaaattattaattaaatttttaatgtagttattatgaaaatcaacaaatatttattatatttataattaaacgaaaatgtaaatacgagtactgcatatactatttatttgtaattataaataaaacatgcatttctaatatatatgatcttctatatatgaatatgacatttgcttgtgcctatgttatatatagctttgtgcatttaccaatcaatttcagaggcttcaatg

SEQ ID NO: 8528 - DNA, 285 bp, Glycine max
aaaaataaaaaaaaaatgtgacctacaatataaaaaaaaaactatagaacaagaggcaggataatgatatgagaaacttgaaaagaatgaagagctgaaagtataaacagcaacaattgtattgaacgtttgacaaggtctactcacacatataaggctaatctcttgactttcaaggctaagcatggttacttgatttaccatagttcaagtaccaaaaggtggtcgtattaaaccatttccaaagggtattgtatatagtcagcctaccaaccaatgtgttac

SEQ ID NO: 8529 - DNA, 333 bp, Glycine max
ataaaacactcatactcacacaaacacttaaacatcatcaatatcgtatattcttgttgtgttgtttaagttgtaaaagaatgtctggggtttgggttttcaagaacggtgtggtgaggctggtggagaaccctgggggtgaggcagtggaaggaagccgtggaggaagaaggaaggtgcttgttcatagagcaagctacgaggttatcacctcttatgcggtgttagagcgaaaactgtattcacttgtgtgggagcgttactatgacgaccctgatcttcttcaatttcactaacgctacaccgtgcaccttatttccctaccaagagact

SEQ ID NO: 8530 - DNA, 391 bp, Glycine max
ctttcaactaaataatatctgtgtcataagaaagcatgaagtttcgcacattcgagtggcgttgtataactcgtatatgattgactggagtgcgggtgctcaagaactgcgtggctaggcttatggagatccatcgtggtgactcatcgaaggcgaagctcgtgactaatatcgaaggtgcttgatcataccatgtgctgctcaggaataacctattatgcactgtttgagcgtaaactgtattcacttgagtgggaacgtctctatgactactgtgatcttctgcagttgcacaaactctcatccgcgcaccttattttcctatcaagagactattgcaagttcaagcccatgctcatgtatgacatagtggtgaaaaacatgtacgctt

SEQ ID NO: 8531 - DNA, 230 bp, Glycine max
aaaaaaaaaaaaaaaaaaaaaaaaaaaattaaaaaaaaaaaaaaaaaaaaaaaaaaaaaaaaaaaatttaaaaaaaaaaaaaaaaaaaaaaaaaaaaaaaaataaaaaacaaccattttaaaaaatccaaattttcatccccctccttcctacctcatacctctttttatattttcacctaaattcatttaattgcccttcattttacaccctttttacttgaaaaaccc

SEQ ID NO: 8532 - DNA, 383 bp, Glycine max
tcgctgaattttatgtatagtaataccttgagcattacttcaccacctgctttattggatgggttgatggctgctgacaaattcgaagttgcttcctgtatgagatactgtagccgattattgcggaatatacctatgacacctgagtctgcattgctttaccttgagcttccttctagtgtcttaatggctgatgcagttcaaccattgactgacgcagcaaagcagtatcttgccagtcgatacaaagatataacaaatttcacatatgaccaggttccaggaagaggttatgggcttgcctctagctggaatagaagcaatattgtctagtgatgaactccaggttgcatcagaggatgctgtatatgactttgtgttga

SEQ ID NO: 8533 - DNA, 328 bp, Glycine max
cccactcgtacgttcactcgttcgaacataaataatgggtgcccttagatcacattggggaatggtgaaggctaaggccagctaatggctacaccaaatccaacactggaactttacactgccttcatattgacagagatccaaccactgtagctcgataaattgcttgtacctatcctggtctcaatgcttttcatgttaatacatcgggggactctaccaatgattctctttcaagtggatcacacctcaatcatcttcaccctgagcatgctgcccctgacgattcgaatctgcatgctgatgatcctcacaatattcatatggg

SEQ ID NO: 8534 - DNA, 242 bp, Glycine max
aaaaaaaaaaaaaaaaaaaaaaaaaaaaaaaaaaaaaaaaaaaaaaaaaaaaaaaaaggaaaaaaaaaaaaaaaaaaaaaaaaaaaaaaaaaaaaaaaaaaaaaaaaaaaaaaaaaaaaaaaaaaaaaaaaaaaaataaaaaaaatataaaaatataaaaaaaaatagaaaaaaataataataataaaatgaattcataaaaattaaaagaaaataaatattaacataataattatatgaaa

SEQ ID NO: 8535 - DNA, 376 bp, Glycine max
gcaacacgaacgagttaactgccgatggtactagcactgcaataatttagcctggtgggatgattaagtctggactactaacattcgctattactgctaatcctatttctttgaagaaggggatggattgaactgcaaaggatctgttaaagtactcgaatgatagaaatgtacctgactaaagaactgagcatattcgagctctatgctcaatttctgctggaaacgacgattatgtaccgtaactctgattgcatgaagcatattgacgactagtgtgtcagatgggcagatatctaatgagtcttaaccatcattggaatcctgtgatgtaattgctgtagggatgaatgtatacataacgctttgaggacag

SEQ ID NO: 8536 - DNA, 414 bp, Glycine max
cagattattgagaagaatatcctgcgcacccagacactcttgtgtgatctggtgatgcgagatgcacccctgggaattgtgtcagagagccccaatataatggatcttgtgaaatgtgatggagctgccctcatatataagaacaaggtatggagattaggagtaacaccaagtgaatcccagataagagagatagctttttggttgtctgagtaccatatggattccacaggcttcagtacagatagcttgtctgatgcagggttcccatcggctctttctctgggtgatgttgtttgtggaatggcagcagttagagtaactgcaaaagacgtagtattttggtttcggtcacacactgctgcagaaatccgatggggtggtgcaaagcatgaagctggagaaaaagatgat

SEQ ID NO: 8537 - DNA, 397 bp, Glycine max
cggacgcgtggggcaaccaccatgccttcccgaagaagaactctcttgaaggtcatcattctcggtgacagtggggtggggaagacatctttgatgaaccaatatgtgaataagaagtttagtaatcagtacaaggcaaccattggagcggattttttaaccaaagaagtgcaattcgaagataggcttttcaccttacagatttgggatacagctggccaagaaagattccaaagccttggagttgctttctatcgtggtgctgattgttgtgttcttgtatatgatgttaattcgatgaaatcatttgacaaccttaataactggagggaggaaattctgattcaagaaacaaaatagatattgatggtggggacagcagagtggtgtcagaaaa

SEQ ID NO: 8538 - DNA, 308 bp, Glycine max
cggacgcgtgggaaaaaaaaataatttaaaaaaaaaaaaaaaaaaaaaaaaaaaaaaaaaaaaaaaaaaaaaaaaaaaaaaaaaaaaaaaaaaaaaaaaaaaaaaaaaaaaaaaaaaaaaaaaaaaaaataataaaaaaataataattaaaaaaataaattttaaaaaaaaataataaaattaaaaataaaaaataaaaaaaataaaaaaaaaaaaattaaaaaaaaattagaaatttagtaaaaatgatttggtttttaatatatttggttttttaaaatttttggttttttatagggggatttaat

SEQ ID NO: 8539 - DNA, 420 bp, Glycine max
  modified_base (97)..(99): a, c, g, t, unknown, or other
ggtttttggcatgtcattgagtcttttccctagcttgtagctcatgcttggggttctgtctggtccttcgctcttggagttttggcattggaccaannnttttttctttgccccgaagtcttccttcgcttggcttggtcaaccaaaaggaaagggatgcttcgaaggctaaaaaaggtgcttccaaaagattgggcgggacgggaggatgtgtcgggccgagatggcgttgctggttgaagggtcttcgggattgggggtgatacatctatagaagagtacataattggccctgctgacaaggtggctgatggtcatgaacatgcaacagagaaagataaaattcgattatatggatcccaagcaggcctctcttggttagcaaaacctgtcactggacagagttctattggccttgca

SEQ ID NO: 8540 - DNA, 397 bp, Glycine max
tttctctatataagtttgttctttcattttcaaaattttatcacatgctaacattattgttttcaatgtttcagaattgttttacaaaaatattggaggagtgtcttataaggctgatgtctatagctttggaatgcttttgatggaaatggcgagtaggagaaggaactcaaatcctcatgcagaacattcaagccaacattacttccccttttggatttatgatcaatttaaagaagagaaaaatattaacatgaacgatgcttctgaagaggacaacattctatctaaaaagatgttcatggttgcactttggtgtattcagttaaatccaagtgatcgtccttcaatgagtagggtagtggagatgcttgaagggaagattgaaagccttgaa

SEQ ID NO: 8541 - DNA, 407 bp, Glycine max
ctcagtctagtattttcatacatgaaagattttctgcttctaggaaagtggttgaaagagagtacaaacttttgaatctgctggatttcactagcaaaagaaagcgtatgtcagtgattgtgcgtgatgaggagggcagtctttttcttttttgcaaaggggctgacagtatcatatttgatcgattgtcaaagaatggaaaacattatttggaggctactaccagacatctaaatgaatatggagaagctggtttgagaacactagccctggcttatagaaagcttgatgagcaagaatacactgcttggaacaatgaatttcagaaagccaaagctgctgttggggctgacagagattcaatgcttgagcgggtatcagatatgatggagaaagggttgattctt

SEQ ID NO: 8542 - DNA, 293 bp, Glycine max
ggtgtaccagagtccaacattatatttctcaatctcgtatcagcacctcaaggtgtgcatgtggtctgtaaaagatttccaagaataaaaatcctgacatctgagattgagattggtttgaatgaagatttccgtgtcatacctggcatgggtgagtttggggaccggtactttggaacagataatgatgaccagcaggtggtacccccttcacagtagttatacttgggaggaaattcacaatattttatggttcgtcatcattaatgagacctttactgccgaagggggaa

SEQ ID NO: 8543 - DNA, 373 bp, Glycine max
cttgcttccacgaaacaaccgaagacaatgtcataagacttgtaacgggggttgggatacaagttctgtgcagctatgtgacattgccatatgctctagtcacacagatgggttcaaccatgaggcccaccatcttcaatcagagagtagcatcagctctgaagaactggcacaacactgccaagaagcatgtaaaaaacagtaagcacaccacaccattctcaagcaggccatcaacccctcaatatggtatgtctccaactcatctgctacacaaacaccttgctggaagaagtgagagtgcacaaacttctccaagaacatccaactatgaaaatgaacagtggggtgttgaaggatcaccttccccgag

SEQ ID NO: 8544 - DNA, 410 bp, Glycine max
aaagaattgaagcttgtgagatatttggaggtcttaccggaaaactaaaaattctaagtataatagttaaaaaaattgaaaaatcactaaccaacccaatatatgaattggcagattttatgtggataacatccctattagggtatacaagaataaaagcgatattggagtcggatacccaacaaagccaatgcaaatacaagcatctttatgggatggagatagttgggcaacaaatggtggcaaaaccaaaactgattggagcttatgcaccattcagagcaagtttccaaggctttgaagttagtggttgtcaagttccaacctcaaatattagccaaaattgttcttctgataagtactggtggaatacgcagaatttttggcggttggattctgtacgacaaaga

SEQ ID NO: 8545 - DNA, 314 bp, Glycine max
caagttcttaaaagggttcaatgccgtttccaagaaattggattaaggaaccaggcgaggggccaatgaatcctgtgggaggtttaaaacaggtggttctttctgggcttaaaagaaagggattggattattcccaggaaaatgttgaaggcccatttagaccggccaaaagccagggattattagtggaattaggtttggagtattaatccttgggctggattcaagttatgccaccaagttttaatcttgaacctgaatggtccagggttggaaaggcacctttaccggaggttttccggtcctttttggtt

SEQ ID NO: 8546 - DNA, 400 bp, Glycine max
  modified_base (1)..(1): a, c, g, t, unknown, or other
  modified_base (372)..(372): a, c, g, t, unknown, or other
nccacgcgtccgcccacgcgtccgtacgatcctttgcaacaaccaaccaccaatcatttcaatgggggcaacaagttacctggtgaccattgtggtgattctggttttgaccaaagggtcctaactgctcccataaaatctgctgttgacaagttccagcttattcctgagttcctcaaggttaggggattggtgaagcaacatttggattcctttaactattttgtgaggacagatttaaagaaaatcgttcgtgctaacaatcttatcatggcgagtaggtacccacacatatatctaaggtttttaaatgtcggaattggtaaaccatccatgatgattgatgaggttactgagggccttactccacanacgtgccgcttaagtgacctgacgtatg

SEQ ID NO: 8547 - DNA, 277 bp, Glycine max
cccacgcgtccgaaaaaaaaaaaaaaataaataaaaaaaaaaaaaaaaaaaaaaggccggctggtataaaaaaaggcaaggctgatctagaggatcaagccatacatacgctatcatgtaacgtcatatcaattcaatggactgacctaaattaaatatcgtggcgagtgataaacaccttacggaacggaaaaaccttgccttgcaccacattaatctcttgtcagctgataccatattggccaggtcccataatatcgaacaggccaacaccaat

SEQ ID NO: 8548 - DNA, 332 bp, Glycine max
gccacgcgtccgctggtccctacaacttcacttaacttctccctctatatgtgtctgttaatacacaccaaaacattcattcattggtattattcatacaacaaatcaaaaaatgttacccaacaatacttgcactattgttcccgacgcgggggcccggcaccacacccacgtggtgtccccgcagcaatgctgatccgccgtggtccaagagatcgccagcccggtcttcaacggatggtccgaagtgcggggctttgacaacccgcaaggctacaagcactttgctaaaaagctgtcacgtgattctcggcgactgcgacatcaggacc

SEQ ID NO: 8549 - DNA, 281 bp, Glycine max
cccacgcgtccgaaaaaaaaaaaaattaaaaaaaaaaaaaaaaaaaaaaaaaaaaaaggaaaaaaaaaaaaaaaaaaaaaaaaaaaaaaaaaaaaaaaaaaaaaaaaaaaaaaaaaaaaaaaaaaaaaaaaaaaaaaaaaaaaaaaaaaaaaaaaaaaaaagggggagctttttaaaaaattcaattttaactaactttttattgattgataattgttttaataatggagcatctaaatcattttaattggacgttttttaaaatttttgaaattggaaaa

SEQ ID NO: 8550 - DNA, 369 bp, Glycine max
atttgcatcccagacaaagaagatgaatcggggccaatcatacttcattaggattcttggggtcttaactctagttaatcagttcttgattatattaaaagctatttgattgaagaaaataactacatggatcgagaagacattgcttcagatgtttcaattgctgataaaatatggaaacgccttcctagttgaatccaatctcacaatattcaagatcaccaacataagagttactatgactgaggtcgttctgtattgtacttcattgaacgattaatggaagaagcaatccagagactgagaatgaaagagttatatattgtcggaaagcgatggttcaaacccttagaagtgcacaatttgaga

SEQ ID NO: 8551 - DNA, 376 bp, Glycine max
  modified_base (248)..(248): a, c, g, t, unknown, or other
attattttcagggtttgtgggtgaactttgcaaaggatcagttattttgtcttctaggacccaatggagctggaaaaactacagctattaattgcttgacaggggtaactccagtaactgatggagatgcgttgatttatgggcattcaatcagaagttctactggcatgtcaaacattcgaaagcttataggagtctgtccacagtttgatatcctatgggatgcactgtctggtcaggaacacctncaactctttgctactattaaaggcctgtccccagcttccataaaatcaattacccagacttcattagcagaggtaagactcacggatgcagccaaagtgagagctggaagttacagcggaggaatgaa

SEQ ID NO: 8552 - DNA, 381 bp, Glycine max
  modified_base (198)..(198): a, c, g, t, unknown, or other
ctttttagagagtcatctataagagctttggtttgtgggtattatattccaacaaagggctggatatttggcaaatgttgggctattggtagggaccccaatcactgggagaaccttcttgagtttaggccagagagggtttgttgaaaaatgggaagagtcaattggatgttaggggacaacattatcatctacttncgttcggtagtggaagaagagcatgtcctggtacttctttggcattgcaagttgtgcatgtgaatttggcagttctaattcagtgtttccaatggaaggttgactgtgacaatggcaaggtgaacatggaagaaaaggctggcatcactcttccgagggctcaccccataatttgggtcccta

SEQ ID NO: 8553 - DNA, 278 bp, Glycine max
ggggaacaaccgcttccttatccaaatgcatttcacaccaaggcctcaaccaacgggccctggttaaagtccatgcggacgctctactaaccgggagtctctgacccgaagagcgaaccataatggaagagtaaattaccggaaaccgaataaccgtttttacgtgaaagcctccgccaaagagagtgcctgtgacctgcattcccgctctgcgatgcaggccggcattgacaagcgcggctactctgattggcatactcatgagcccagagggagtg

SEQ ID NO: 8554 - DNA, 290 bp, Glycine max
attatgcgtgcgcccatgcgtccgtgctttgaatactcacacagtgagacacttgaacgtgagacctctgctgtgtaccgtccacggatgcttcagatcctgcactgatcgtcctttggctggtgtgctgtgcatgattgtggagttagaactgacgatattcactagtctcacagatgcattcttagagattcacaaggctcttgattacatgctgaaaggtgtgtctatcatatgcatcattcgcatggctgtgataatctctatgagaccagtgctgacatgacatg

SEQ ID NO: 8555 - DNA, 352 bp, Glycine max
  modified_base (230)..(230): a, c, g, t, unknown, or other
cacaaactcagcgtgctaaaagaatctcgttctcgcggtctcaaggaaccctagatcggatcatgtctggagcgtacggtcaagacggcggcggttccgcgccaccgtcttatggagccagcggcggatacggttccaccggcggtggtgccggtggaggtggtagttatggtggcggaggctatggaggaggaggaggtggtggcggatatggtggtagtgatggcggnggaggtggaagttacggagccaaaggcagcggaaacggctgcggatatggtggtaacgatggtggaggttatggcggaagaagcggctacagtggaaaccgtggcggaggctatggaggaag

SEQ ID NO: 8556 - DNA, 258 bp, Glycine max
cacccgtgggcccacgccttcggatctttcttttttcatctgttgtgcaattctagccatattcgaccgggttaacccctttctatattgcaccataggatttgtcaagaagagaatatgatgggaaagtcctggatgtttgttcttgttgggtgaccttatatgtaaagtcctttggagcatattcttttgaagacccagaagatccacgatacttcataactacacttcatctaattcttaatggacacatattca

SEQ ID NO: 8557 - DNA, 391 bp, Glycine max
acgaccacattataattaatattacatacattatgctgcttggctgagcaaggtactacttgtacatgttgatgggtatgtggcaaccattgtaacaatggtaatcataatggtgcctaaaaacgtgtgtgctcaaaccatcggatcttacatctgaacacaagactatttaaacagcataatctggcaggctgactatggttgtgcatgtaagaaattctactcacgagatgcttgacttaatgcatagaataactacaatgagttagattggctaggtaatcaagatgacttcaagcgtgatgaagcagctgatttcgaccattttagccatgaaacaagacatgtctgctacatagcagagattcacggtgcatcaggcgactactgt

SEQ ID NO: 8558 - DNA, 390 bp, Glycine max
cggacgcgtgggcgcgcacttcctcgagcacatgatcttcaagggcaccgcgaagcgcaccgtcagggagctcgaggaggagatcgagaacatgggaggccacctcaacgcgtacacgtcgagggagcagacaacgtattacgctaaggtcacggagaaggatgttcctaaagcgcttgatattttggctgatatattgcagaattcgaagtttgatgaaaaaaggattagccgcgagcgtgacgtgattcttaaagaaatggaagaggttgaggggcaaatggaggaagtaatttttgaccatttacatgcaactgctttccagtacactccacttggtagaacaattcttggtcctgctcagaatattatgaccatcacttaagatca

SEQ ID NO: 8559 - DNA, 346 bp, Glycine max
acggttagcagtcactgctctgattaaccgattctggacgtatagatcacaaccaagtattggactctatcattggcacacatggcagctcaaatgagcaagatcagaaagtttgtcgcggtcagattgttcactgccgagctgtactaggatctgacacatgaattgtcagcagacgtacactgcggcgtctatattagggttaccacgatgcgcaccaaaatcatgataagagccaacatatcacaaaccggtctaggtgagaagggaaggtgaattagggaacttaccttactggttcataagaggttcataatccacctaaacaacatactgctatatgctc

SEQ ID NO: 8560 - DNA, 283 bp, Glycine max
acgtatacttgtaccttttgaaggctaaaagtgcttcaatacaaacactggctaactgctcaggatgatgtgaatctcttgagtattgcagtaagcccctatgtatgcaatgtccaaatggcccatatgttgaagggacgtgaatccagatatgtggaagaaaatgtgagcaagcagagtgatttgcttctcaaatacaacgctgttcacaagactgtttcagagtttgaacacaatgagcatgacataacatagtctgttgtaattgctgaatacatatatg

SEQ ID NO: 8561 - DNA, 417 bp, Glycine max
tatacgcgactccactggcagcacaagctgcatactacgctcaaacatcaacacctcggggatatctcatcactgaaggcaccgtgatatatccaacttcttccaggtttcatcatgttcctagaatatactcagatgaacacgtataggcatggagaaatgtagcggacaccgtgcatgccaactgcagatctatcttctgtcaactatggcatcattgccgggcatcacatacaatgtatcagcctggtctagctctaccctcttattccatcatcaaacacatatgatacaagtggtaaaacctcatgctccatagctaacatcgcatgtatccagcacctccagcacttaccacttttgagatatctgaaatagtgcatcattatcgccaagcaactattaatgcaattctag

SEQ ID NO: 8562 - DNA, 377 bp, Glycine max
acgggccagtaaaggcgtaaacatataggctgagatcagagagtacagatatggttgcaaaggtggagctctcacagaaggcgtgaagcacagctctgtgaatccgtgtgactatgtggacatctttgatgcagatttacaacctgaccctaacttactttggcgcaccataccataccttgcttacaacccataagtgagcactagtccaagctcgatggaaattgactaatgctgatacaatgcttaatgaccagaatgcaagagatgtcattggattatcatttccttgtggagcatgacgtttgttcctcaagctatgccttctttagtttcaatggcacatctggtgagtggagaatatgagcattatatga

SEQ ID NO: 8563 - DNA, 423 bp, Glycine max
  modified_base (339)..(339): a, c, g, t, unknown, or other
cccacgcgtccgacgtcgcaacgcaaagcaaattgttgtccatttttgaaacagagaaacaaaagggaaaaaaaaaactcttccaaagtagaggcagagaatctgaaagctagggtttgggatgccgaagaacaagggaaagggaggaaagaaccggaagcgcggtaagaacgaggcggacgacgagaagcgggagctggtattcaaggaggacggacaggaatacgcgcaggttctccgaatgctcggaaacggtcgctgcgaagcgatgtgcatcgacggcaccaagcgcctctgccacatccgcggcaagatgcacaagaaggtctggatcgccgncggcgacatcatcctcgtcggccttcgcgactaccaggacgacaagggctgacgtcatcctcaagtacatgcccgatgaggccc

SEQ ID NO: 8564 - DNA, 409 bp, Glycine max
  modified_base (374)..(374): a, c, g, t, unknown, or other
cccacgcgtccgatttaaacaaaaaaactttttactcaattgaatcagaggtctctaaagaagaaaaaaagtgaaaagaaaatacaatcatatgatcaccgcccacgcgtccgcttggtttgggcaacatcaaagcatgatgtatatcttgtttcgagttactcaattatacactggtcgtctttaaattccaagagatctgaaatcctaaatgtatcagggcatgtagctccgtgtgagaaacatcctggaagccttttggaaggatttactcagacacagattagtacactggctgtgcgggataagttggtgattgccgggggttttcaaggagaacttatttgccagtatgtagatcgacctgtgttagnctttgttctagaactacttatgatgacaatgcaat

SEQ ID NO: 8565 - DNA, 441 bp, Glycine max
cccacgcgtccgcccacgcgtccgacgcgaatgagaaggttcacgtggttcacgccgtagcggcgccatttgctttcgttcctgaccttagaatcgctcgtggataaaggagaatcaacattcagcaaagtctcgtcgtctcgccaatcgtttttgctcgctcgagctttggtcaattgtggtttcgtcacgaaaacgcaggagtctctgattccgagagtaccgttaagatatcgttattttcatgccacagcattttcttcgtcagctgaccgagactactatcgaactcttggtgttcctgaaaatgccagtcaggacgagataaagaaggcatttcactcgcttgctaaaaagtaccatccagatgcaaataagaataatccatctgctaagaggaaatttcaagatttaagagaagcttacgagacattgagagac

SEQ ID NO: 8566 - DNA, 381 bp, Glycine max
ggcaccgcgtacacaacgcacgcggaagaggatgaggcttatcgaggaagatagcgatggtgacgagaatgaagaagagaaacaacaagaggtgccggaactgcctcagcctgcggaggacgctaagcctcttggcgaacccgttagggtttcgggaaaaggaagaggaaggaagaggcactatgattccttcgagttcgatggcatccaatatattctcgaggatcctgttcttcttgtacccgaggagaaaggccagaagccatatggtgcaattattaaggacattacgcagtctatcagtggcaacgtgaaagtgacggggcagtggttttatcgtcccgaagaaaccgagaaaaaaggtggtggaaactggccatc

SEQ ID NO: 8567 - DNA, 261 bp, Glycine max
  modified_base (34)..(36): a, c, g, t, unknown, or other
  modified_base (46)..(46): a, c, g, t, unknown, or other
  modified_base (49)..(49): a, c, g, t, unknown, or other
  modified_base (63)..(63): a, c, g, t, unknown, or other
  modified_base (177)..(177): a, c, g, t, unknown, or other
  modified_base (181)..(181): a, c, g, t, unknown, or other
ggagaagcgacggaaagagcaagaggagaggggnnncaaacaggangangagaacaaggagancaagaggaagaacgagaacgagccggaccaaacccaagacgcacacagaggaagagaagacagaggagaaacagagggggaccaaaagcgggaagaggaacaggagaggggagnacgngacaaagagaggaagaagagactgcgcgagaaaaacaaaggaagccccaaacgagaaggaacggaaggaaaaaacggcga

SEQ ID NO: 8568 - DNA, 251 bp, Glycine max
aaaaaaaaaaaaaacaaacaaaaaaaaaaaatgaaccacaacaaaaaacatcaaaagaaaataaacaaaaacaaaaacaaaaaaaacccaaaaaaataaaaaaaaataaaaaaaaaaataaaacaaacacaaaaataacataaaaaaaaaaaaaaaaaaaaccaacaaaaacaaaaaaaaaaacaaaaacaaaaaaaaaaaaaaagaataaacaaaaaaaaaaaaaacaaaaaaaaacaaaaaaacaaaaa

SEQ ID NO: 8569 - DNA, 276 bp, Glycine max
taagccatacccaaaaacacactcaatgtaaatttcaaaattagagaataacctcaatcacattgcctcatatcgtggtcaacataaaattctgccactaaaacacacatcaattcatctacgacaacctctacttatgctacgcaatcaatcctgtcaaacaccatgatccgaaattacagcgtgtctacgctaaaccaattctgcagaactgcatagcacatgaaaatgaatgccttccccagagtcagtaccatgactaaagaagaacaacca

SEQ ID NO: 8570 - DNA, 237 bp, Glycine max
  modified_base (60)..(60): a, c, g, t, unknown, or other
acgaaaaaaagaaaagaaaaggaaaacagcacacaggaaaagaggcaagccaaagaaggnacgaggcaaggccaaaaaagcagggagaaaaacacccgcaacaggaaaggaaacgaacccaacaaagacaaagcagcacaaaaaccacaaaagacagagaaggaaaaaaaacaaaaaagaaaaacaagcagaaaccacaacacaaagaaagcaacagacccaacagaaaaaaaaaga

SEQ ID NO: 8571 - DNA, 220 bp, Glycine max
cgcacgcgaccgcttcaacagcagcggtgaccacccaaccaactagctgcatagaagtcggcttcaagaaagcaacggcaaccacaaccaggcggccagctacctgtagcctacccccagcaatatctaccatacaaccaactggcagcattgaacgctcctgcataaatacagcggcaagcaactactaccattcagccagctagctggcgcgagccct

SEQ ID NO: 8572 - DNA, 408 bp, Glycine max
ttgatattgatgatattgatgctgctggattaacaagaaaacaatgggagggccacacagataagacattgcatcagctacttgttgaaatggatgggtttgagcagaatgagggaataatattaatggctgcaacaaacttgcctgatattcttgacccatctttaacgaggcctggcatatttgatcggcatattgttgtaccaaatccagatgtgcgatgtcggcaagaaatattggaactctatcgtcaagataaacctatagctgatgatgtagatgtcaaaacatttgctcgtggtaccccaggggctaatggagcgtgaactgcgaatttcgtgaatgttgcatgccttaaagctggcactgaaggtgcagagaatgttacagctgcacaattggagtttg

SEQ ID NO: 8573 - DNA, 126 bp, Glycine max
tacaagcggcggctgtggctgccagacaccacctgttcatctaccgcctccgatctatatgccgactccgatctatctgccgcctcagcaacaaaccacagccatggcaataccccactcaaccac

SEQ ID NO: 8574 - DNA, 294 bp, Glycine max
aaaaacaaaaacaaaacaacaaaaacaaaaaaaaaaccacaaaaccaaacaaaaaaaaacaaaaaaacaaacaaaaaaaaaacacaaaaacaccaaacacaaaaaaacaaaaaaaaaaaaaaaaaaaaaaaaaacaaacaaaaacaaaaaaaaaaaaaaaaaaacaaacaaacaaaaacaaaaaaaaccaaaaaacaaaaacaaaaacaaaaaaaaacacaaacaaaaaaaaaacaaaaaaacaaaaaccacgaaaaaaacaaacacaccaaacaaacaaaaacaaaaaaaaaa

SEQ ID NO: 8575 - DNA, 176 bp, Glycine max
  modified_base (65)..(65): a, c, g, t, unknown, or other
tgatgtgctcatcttcgcctgaccctgagaattcgatcatccaaggcacattagcgtggcgttcnaatcctgagtgaaccggcgtttgaaagcaaacttatcctcaggaggatagatggggcgattcatgtgagatccagtgtacatcctactttgctcttcactcgggggatccg

SEQ ID NO: 8576 - DNA, 390 bp, Glycine max
  modified_base (68)..(68): a, c, g, t, unknown, or other
  modified_base (91)..(92): a, c, g, t, unknown, or other
cgacccactcgtccgtggaggttcacgacttcacctctcactttaattaccccaccagcgaccaaatngacaggacgggtttcaaagaagnncaaacagccgattccaaaaccgccacaaccagctgcaaatcgcccccaggaccaaggacactaccgctcataggaaacatgcaccagttagttggctcactgccggttcatcactgcttaaaaaatttggcagataattatgggccgctaatgcatctaaaactaggagaggtatctatcatcataggcacgtcacacgaaatggcacaggagattctgaagacgcgcgatctcaacctctctgataagccaaaccttggatcatcttaaatatgttacttacaacggcagctcacat

SEQ ID NO: 8577 - DNA, 242 bp, Glycine max
ggaacaaccacaccacaataaccgcaggagctagagggccacagcagcaggaggaacatcaaccagtggagaagcatgcaaatatagatagggaacgtatcccagaacgcgtagaccatgccaagggcgccagagcaaagggaatacaagaggtcacccatgacatatcacacctgacaagtgcagaaaaacaacgagccccagaagagcagacaccagaaaaagaacaaaccccaacagac

SEQ ID NO: 8578 - DNA, 291 bp, Glycine max
cccacgcgtccgcccacgcgtccgaaaaaaaaaaaaaaaaaaaaaaaaaaaaaaaaagaaaaaaaaaaaaaaaaaaaaaaaaaaaaaaaaaaaaaaaaaaaaaaaaaaaaaaaaaaaaaaaaaaaaaaaaaaaaaaaaaaaaaaaaaaaaaaaaaaaaaaaaaaaaaaaataaaaaaaaaaaaaaaaaaaaaaaaaaaaaaaaaacgaaagagaaaaaaaactaaaacaaatgtaaaaattatttaaaacccaaaataaatgtaaataaaaagattttaaaaaaattaaaa

SEQ ID NO: 8579 - DNA, 168 bp, Glycine max
aaaaaaaaaaaaaaaaaaaaaaaaaaataaaaaaaaaaaaaaaaaaaaaaaaaaaaagagaggataaaaaaaaaaaaaaaaaaaaaaaaaaaaaaaaaaaaaaaaaaaaaaaaaaaaaaaaaaaaaaaaaaaaagtaattacttaattatattattcataaaaaataa

SEQ ID NO: 8580 - DNA, 298 bp, Glycine max
cctgaattgcagaatcatctacaacatcaactgcttaaggtaagtgtcaatcttgcttgaatccctgcgcaggcagtggagcaggttataaaaagcaagattgacacttaccttaagctcctgaattgcagaatcatctacaacaacaactgctaagcccacattcatcctatccatttctgagatggttcttaatgatccattccctggcaaacttctctgagctttatagctttgtaatgcatgcttggctctaatgggtttcatcttaaataaaaacagactctgtagcgatgtc

SEQ ID NO: 8581 - DNA, 134 bp, Glycine max
aaaaaaaaaaaaaaaaaaaaataattaaaataaaataaaaaaaaataaaaaaaagattttttaaaaaaaaaataacaaaaaaaaaaataaaataaaaaaaactaaaaataaaaaaaaaatacaaactatataat

SEQ ID NO: 8582 - DNA, 409 bp, Glycine max
acaatttcattttcattacaactctctctctctctctcagcagcagaaacacaatacgcttgtgcaattgtgccaaagggcaatgaactatattcagaccaaatgcgtggtcaagcgcaaaggcaaagaaaccggtgaaagtgaaaccttgtgttttacaaagtccaaggataacaacaataacaacatgtgcgaccgccactgcggaaaacgctaccctctgttgtcgttttgggagctgccggaattcatgaaggacaacgaatacattcttcgttattacagagccaattggcctttcaagcaagctctctttagcctctttcgttggcataacgaaaccttaaatgtttggacgcatttaattgggtttttactctttctcggattgaccctcgcgaatttgatg

SEQ ID NO: 8583 - DNA, 371 bp, Glycine max
tgatattcctgccaagcgcctgtactgcttcttctcttctctttactctgtgctggttcgtggaggccgagctgtcctgcagttgtaccctgagaattcagagcagttggagctgatcaccacccaggccaccagggccggcttcactggtggtgtggtggtggactaccccaacagtgccaaagccaagaagttctacctgtgtttgttttctggaccttcaacctctctaccagagggcctgagcgaagataccgaggaggagaagcctgccgagtccacgttcacggctgataggatcccgtacaggatagcaagacggggtgtggtgaggaagagccgagaatgggtcctggagaagaaggcacgcc

SEQ ID NO: 8584 - DNA, 373 bp, Glycine max
ggcgggcctctcgcggctggacacctccgtcatctttgaagccttggccacaggctgcaccagcaccacggcctacatgagcatccacaacatgtgtgtctggattatcgaccgcttcgggagcgaggagcagcggcaccggctgtgcccgcccctctgcaccatggagaagttcgcctcctactgcctcacagagccagggagtgggagcgacgctgcctccctcatgacctctgccgtgcgacaacacgatcattacatcctcaatggctccaaggccttcatcagtggtggcggcgaagctgacatctatgtagtcatgtgccgcacaggagggccaggccccagaggcatctcctgcgtagtggtggag

SEQ ID NO: 8585 - DNA, 314 bp, Glycine max
ggcggatgaccgcagccctcgctgctgcccgtgccgctgcgaccatggcctctggcagcagcggcctcgccgccgcccgcctcctgtcccgcgccttcctcttgcaacagaatggaattcggcattgctcttatacaacttccaggaagcatctctatgttgatagaaatacgaagattatttgccagggtttcactggtaagcagggcacctttcatagccagcaagcactggaatatggcaccaaactagttggaagaaccactccagggaaaggaggaaagacgcacctgggcttaccagtctttaacact

SEQ ID NO: 8586 - DNA, 379 bp, Glycine max
gtgtctactctggcctgggtttagcagtcgtgcgaggaggttgtggcgtctgctgcttccaggcgatttgaggtgagggagccaggtggaggaatccggagtcggggaaagggaacccctgaagtctcgattcagttgcctcccagtcctcgctttgtgttgctccagccaggatgatcgaggttgtttgcaacgaccgtctgggaaagaaggtgcgcgttaagtgcaatacggatgacaccatcggggaccttaagaagctgatcgcagcccaaactggcacccgttggaacaagatcgtattgaagaagtggtacacgatttttaaggaccatgtgtctctgggggactatgaaatccacgatgggatgaacctgga

SEQ ID NO: 8587 - DNA, 425 bp, Glycine max
tcccactcgtccgaaaaaaaaaaaaattaaaaaaaaaaaaaaaaaaaaaaaaaaaaaagaaaaattaaaaaaattaaaaaataaaaaaaaaaaaaaaaaataaattcaaaattttatattttttaaaaatttaaattaatttaattatacttacactaatttttaaaaatttttatattgttaaatccttcttttttatccattttaattattatttcatcttataccctttttcttaatcttttttatttacttttattcatactactttttctctttttaacattttttcaatttttatttattattttactttctttataattttcacatttatttattatttttttttaattaccttttttttccctataattttttaatttctattttttatttttttttttttttttttttaatttttt

SEQ ID NO: 8588 - DNA, 331 bp, Glycine max
cccacgcgtccgaggaggagcgggacttcctgcggtgccagctggacaagttcatgtcctctgcccgcctggacgcagacgaccactgccgggggaagcccgggcctcggcgggccgagggggacggccgaggggggaccgtgggcgaggcctcagaccccgagtcagctgcctcctacctcagcggagcatctgaagaaggcagcaccgtggagaggaagaggcagaagcagaaaggaggcccaggccggcagcgcttcgggaagcccaaggcccgttagaggcagcggttgaaggacgcatatggggtcctctgccgatacaagaagat

SEQ ID NO: 8589 - DNA, 390 bp, Glycine max
cggacgcgtggggagatggtggaggacagagagcctagcttgctgcggtccatggggttacaaagagtgggacacaagttagaaactgaacaacaagaagtagatataacttatcttcgaacataacaccaactggtaaaaaaaaatacttgaataaagcaactagtaagatcccctggagaagggcatggcagcccgctccactattcttgcctggagaatcccacggacagaggagcctggcgggctacagtccactgtgtcacagggagtcagacactactgacatgacttagcatgcacacatgtacaaactaggaatagtcaatctagagtcatttgtataatgttctatctagttgtacatgtcaactcatacagaagcttttt

SEQ ID NO: 8590 - DNA, 389 bp, Glycine max
tgcaaccttacaatgactcaaatctgtggtctgttggaaagggatgagtaaagatgtttgagcttttgttcagaaatgcagtgtatgtcaaaagtgtaaatatgagaccaaggcttctcctggattgctgcaaccattgcctattccggatctgatttggcagcatattaccatggattttatagaaggcatgcctagttcctttggtaagtaggtgatttttgtagtagttgataggttgagcaaggcagcccactttatggctctttctcatccttattctgctgctgatgttgctcaatccttccttgatcatgtattcaagttgcatggattttcagattctatcaccagtgacagagattcaatatttctcaatcagttttggc

SEQ ID NO: 8591 - DNA, 375 bp, Glycine max
tgccgaagtgctggaatcaaggtcatcatggtcaccggagaccatcccatcactgccaaagccattgccaaaggtgtggggatcatctcagaaggtaatgagactgtagaagacattgctgcccgcctcaacatcccagtgagccaggtgaaccccagggatgcccgggcctgcgtggtacatggaagtgatctgaaggacatgactcccgagcagctggatgacatcttgaagtaccacacagagattgtgttcgccaggacctctccgcagcagaagctcatcattgtggaaggctgccagagacagggtgccatcgtggctgtaactggagacggtgtcaatgactccccggctttgaagaaggcagacatt

SEQ ID NO: 8592 - DNA, 415 bp, Glycine max
gtggaaatctgtattgcaacacctggaagactgatagactttttagaatgtgggagaaccaatctaagaagaaccacctaccttgtccttgatgaagcagatagaatgcttgatatggggtttgaaccccaaataaggaagattgtggaccagatcagacctgacaggcaaaccctaatgtggagtgctacttggccaaaagaagtaagacagcttgctgaagatttcctgaaagactatattcatataaacattggtgcactagaactgagtgcaaatcacaacattcttcagattgtggatgtgtgtcatgacgtagaaaaggatgaaaagcttattcgtctaatggaagagatcatgagtgaaaaggagaacaaaaccatttgtttttgtgaaaccaaaagaagatgtgatg

SEQ ID NO: 8593 - DNA, 320 bp, Glycine max
gccagtgtcattctctttggaaccaacaatagcagctccatttctggggtctgggtctttcgaggccaggagcttgcttttccgctgagtccagattggcaggtggactacgagtcatacacatggcggaaactggatcccggcagcgaggagacccagacgttggttcgagaatacttctgctgggaaggggccttccagcatgtgggcaaagccttcaatcagggcaagatcttcaagtgaatacctcttgccatcgcccagctgcctgcacctgcccttcggggagaatgggggtcattaaaggaaactgaacattg

SEQ ID NO: 8594 - DNA, 211 bp, Glycine max
aaaaaaaaaaaaaaaaaaaaaaaaaaattaaaaaaaaaaaaaaaaaaaaaaaaaaaaaggaggattaattaaaaatataccaaaacaaaaaaaaacaaacatacaaaaaaaaaagcccccccatttataaacttcaatcttaataacccccttcatcctaacaaatacttttcttaaaatcccccaaatttaaataacatacccgtctttt

SEQ ID NO: 8595 - DNA, 402 bp, Glycine max
  modified_base (387)..(388): a, c, g, t, unknown, or other
cggacgcgtgggctcgtgcacggaaaatccagcgtttcttgtctcagccattccaggtggctgaggtctttactggtcatttggggaagctggtacccctcaaggagaccatcaaaggattccagcagattttggcaggtgaatatgaccatctcccagaacaggccttctatatggtgggacccattgaagaagctgtggcaaaagctgataagttggctgaagagcactcatgagggggtccttttggcaaattaagcactcatcctccatggtgtccctctcctcgcccctaatccggaaatcgcagttttctctgtaggccacgtgagggccttgattgaagacattgtgttctgtctgaagaatatttaaggtttccaatannatgtatatccctca

SEQ ID NO: 8596 - DNA, 404 bp, Glycine max
gccgggttgagaggagcgtggccttctcctctccccgccatggcgtgtgctcgtccactgatatcagtgtactccgaaaagggggagtcctctggcaaaaatgtcactttgcctgctgtgttcaaggctcccattcgacccgatattgttaactttgttcacaccaacttgcgcaaaaacaacagacagccctatgctgtcagtgaattagcaggtcatcaaaccagtgctgagtcttggggtaccggcagagctgtggctcgaattcccagggttcgaggtggcgggactcaccgttccggtcagggcgcttttggaaacatgtgtcgtgggggccgcatgtttgcgccaactaagacctggcgacgttggcaccgcagagtgaatacgacgcagaagcgata

SEQ ID NO: 8597 - DNA, 388 bp, Glycine max
gtcgcgcagggactggagcaggggaagccggtgctgcccgtgcggagacagcgagagctcgtatcgcggaggcggtgtgcgcccgactgttaccatgagcgatcaggctctgatcttgctgaaagacttcttgtccggcggcatggccgctgctcatctccaagactgctgtcgcgcccatcgagagggtcaaactgctgctgcaggtccagcatgccatcaaacaaatcattgctgataagcaatacacagggatcattgattgcgtggtgagaatccccaaggagcaagtctctgtctccttctggacgcgtaacctgaccaacgtgatccgttacttacgcacgcaagctctcaaattcgccttcaatgacaagtacaagcagat

SEQ ID NO: 8598 - DNA, 401 bp, Glycine max
gctggagaaggagaaaagtgccccggatcctttcaggactcttggtctttggggagcgacccaaatcgactgagggaagagggaggaaaattccctggatccctgcagggttaatttattcaaaaaggaaatcgaaaaatactcaacatgcaaaaatcttgtggagaaaatgaaagaaaaccacagaacatgccaaaggctgaggaagaccgccctttggaagctgtaccacaggaggcagaaggaaatcctcaaccttctgaagaaggtgtaagccaggaagcagaaggaaaccttagaggagggctgactcagcctggtcagggatataaagaggactctcctgttaggcatttggaccctgaagaaatgataagaggagcagatgagttggaaaggct

SEQ ID NO: 8599 - DNA, 428 bp, Glycine max
  modified_base (409)..(409): a, c, g, t, unknown, or other
ataaatttcaacatttggttatacggatcaatatttacatgaaatttaaccttgaatggggatgcttatagttgatatatagtagtatgtgttgagatatcattagagatgtaggaagaatgcataatgatataacatgaactggttctgattttgtcattgatcatgaattgatgaaattattaatattcacttgtttggtgcctagtaatatctcatttgccctttaaagtagatggaacttttaaatttatgctaaacaatatatttgatctctgtatgtaataactgttttagaatgagtttcattcaatgtagtaaattgacacatttattgtgattattgcaaacctatgttgcaaatgtatctccatttgatatatatacatttcattggtttttttaaaanaaattgtatgtcactatgt

SEQ ID NO: 8600 - DNA, 251 bp, Glycine max
aaaaaaaaaacataaaaaaaaacaaaaaaatatctacataaaaaaaaaaaaccaaaaagaggaagggctaacatacaactatataactctgatttaagatctcctaaattctattaacttgaacgcataatgactatcacattaactggtaaaaccttcgtgttacaacactaaatcacctagcaactcatactcatttcgccagttcctattatatctaaaattcccctaccaatcagctttatcaacaa

SEQ ID NO: 8601 - DNA, 430 bp, Glycine max
caaaaatgtaaaaaaaaattcattattttttaccccatttttaaagaactaaaaaaactaaacaattttaatttttcactttttggggctctttgacggtagaaaaagaaaaaaaggaaactaaaaaaaaataaaagaatatagaatataataatgaatagaaatcaaatagaaaaaagagataagataaaaaaataagatattactattatatttatattttaaattttctattttatcatttttattttattcgtttgttttctcgattgtagttttttttttcattgtatttattccattacagtggtgatcataaatgaatgttttacctctttgtgattcacctacaggtcttgccattcggttctgttccactaaaaacctatcttcctgatggagatgttgacttgacaactctcattcatga

SEQ ID NO: 8602 - DNA, 281 bp, Glycine max
cctatacatccgaaaaaaaaaaaataaaaaaaaaaaaaaaaaaaaaaaaaaaaaagaaaagaaaaaaaaaaaaaaaaaaaaaaaaaaaaaaaaaaaaaaaaaaaaaaaaaaaaaaaaaaaaaaaaaaaaaaaaaataaaaaaaaaaaaaaaaaataaaaaaaacaaggccattaatttaggggcaagtcttaaagcttctgcctaatttacaccttaaaatttcccgagactccttttatgactgcatgtatacagtgacatgaattgacttttaaaacca

SEQ ID NO: 8603 - DNA, 195 bp, Glycine max
tctaaaaaaaaaaaaaaaattaaaaataagattttacataaaatttattaaaaaaaaggtccatgtaatattataaatttaagtttaattatcaaaaatttacaagaattaaaaattaatattaaatatatataaaattatttaaaaaaattttaattttaaaaaaacttcaattaaaaaaaaccaaattttaaa

SEQ ID NO: 8604 - DNA, 373 bp, Glycine max
gtccttggtgtttgagtgtgttaggactgtgctcactagcttgagtgattatgagtctgctggtaagggcgccgttgagaaggttagggaattgttggtcgatcaggatcccaatcttagatatcttggcctgcaggcgctttcggttgccacacccgagcacttgtgggcggtgattgagaataaggaagcggtggttaagtcgttgagtgatgatgattcgaatatcaagatcgagtcactgcgattggtgatggccatggtgtctgagagccatgtggcggatatctccagggtgttgctcaattatgcgtttgaagtctgaacccggatttttctaatcagaatttggggttcattttggacaacgtgt

SEQ ID NO: 8605 - DNA, 238 bp, Glycine max
actcccactcgtcctaaaaaaaaaaaaaaaaagaattaaaaaaaaaaaaaaaaaataaaaaaaaaaaaaaaaattaaaaaaaaaaaaaaaaaaaaaaaaaaaaaaaaaaaacaaacatataaaaaaaatccatacttaaattcacatacatacaacaaaaaaaaatattctattatattacctaatttaaattaattacccctctttttacaactttactactttaaaaacctttttt

SEQ ID NO: 8606 - DNA, 397 bp, Glycine max
gcacacacatacgttcaagatcacaactggtccttcaccttttgcttcctaatcttaattgcatcatccatcatacagccattattcatcatggcgtctcctaataaaatcactctgaatagctcaaactcacatgctttctacttctatcattcaatagcactctaatcccagacaatctagcacattatccagcactactacaccaacagcaacatccctctgcccaacactacgagcaataccctttccaacgttatcacttactacaagaatcacatttagaccaataatccccattactaaccctactaggaccatctcatatcctctgactcttaattcatcataatctaccataccacactctctcatctcatccatactcctaactact

SEQ ID NO: 8607 - DNA, 430 bp, Glycine max
cacacacaaacgttcaggatcacaccttttcctgcaactatgggttgcaaatcttaattggatcatgcatcctacatccattattcatcatgtacgctcttcaataataaaactgctgaatagctcagacggacaggcttgctactggtatgaggcagtggagctctaacacaagacaatctagcacattatccaggactactgcaccaacagcaacatgcttctgtcgtacactacgagcaatacactgtggaaggttattacttactgcacgaatcacatttaggccgatgctcccgatgacagaccctacgcggacgatctctatgcctgggactctgaattcatcaaggtcgaccatgctcacgctcttggatctcatcctggctgctaactacttgaacactaagatcctagctgaccttacatg

SEQ ID NO: 8608 - DNA, 428 bp, Glycine max
tcccactcttcctataaaaaaaaaaaaaaattaaaaaaaaaaaagaaaaataaaaataaaggaaaaatataaaaaaaaaaaaaaaaaaataaaaaaaaataaaaaaaaatatataattattttaatttattttaattaattttatttttattaatattttaattttttaaaatttatttaactttctttcttattcttatttttgtttatttcaatatttcttttttttatttctttttttttttcccaaattcttttctttttttctattttttctttatcttgattttaattatcaattttctctctaatttttttccttttcttacatttttctattttattttcttttttatctctacttttttcttttccttttttttttttactttttttttcttccttaactttattttttcatttttctt

SEQ ID NO: 8609 - DNA, 230 bp, Glycine max
gcccactcttcctatttagcatctatacttcttcctttttaatgttataatgtctacgttacaaacaatggtagctacttattaatattttaaactttttatcatcttattaaccccatttttattcactgtccacatatcccttaattttaatataatttaatacaaatttttataataaaattttgtcaacaatattcatttacttctcaaatacaacctctttcaca

SEQ ID NO: 8610 - DNA, 436 bp, Glycine max
ctgcaaatgagctgaaaatgatgtatgtcaacagaacacctaggtcaaacaaagcaattgatattgtttctagtgcttacaaggctactttaacttggaataatatgcgcactctccaggaatgtcgtgaagcctgtggaggacaaggagttaaatctgaaaatcgtgttggcaatttcatgggtgaatttgatgtgcattcgacatttgagggggacaacaatgttctaatgcagcagattagcaaggcactctttgcagaatatgtagcaagtcagaagaaaaagaaaccattcagcggtttgggattagaacacatgaacaaacctttgcctgttatcccatctcagctaacaagttcctacattaggaacagtgaatttcagattgatctgttccacctaagagagcgagacctattgagacgttttgctga

SEQ ID NO: 8611 - DNA, 306 bp, Glycine max
atttccttaacaaaaaaacaaaaagtctagtatttattaaaaaactacaacaataacaaataagagctacatacaaaattctgggcaccaaaactcaacttcaacaactactaccgctacaccaccaaagcgcccaccgtttaggctcacaagatcgtctacctcttcatcaagaatcctgcccagaatcccaagccctctgctgtgtcgtcctcttctccagacatcaaccaccaactctccaaatactacggtcctgacaaaaggatctacctgccagataatctcttttaccgctctgaggta

SEQ ID NO: 8612 - DNA, 313 bp, Glycine max
ttggaacacgcgtgcggccttgcgtccgcaaacacctgttggagtcattcactgttccgagaatccaaactcatgtgttcataatgcccttgtactaagaattgcatctcacaacaaacttttggatcagcttagtcatgatgctctatatctaccaatttatcaattcacaccattgtgccgcattctttacaaggcaccttcttgtgtccaatggggagaacatgcactgccactatctccatttcatctgttcttgaatgtaacttgaaccccaatactgacgaactgagtgatatcaaatatgtgaacc

SEQ ID NO: 8613 - DNA, 403 bp, Glycine max
  modified_base (17)..(17): a, c, g, t, unknown, or other
cgggtcgaggcacgcgntgcgcccaacctagttgggagaagactgttgactgctacagtcctaggcaagggttgatgccagcaagcttgagggttagaactgtgcctcttgacggtagcaatgaagcatttgaggaagttttggatcctgattttggtgaatcagctattggtcgtgttgcgcctgttgattcaggattgtggtggattatattgttgagagtttatgggaaattaactggtgactatgctttgcaagagagagtggatgtccaaacaggcataagactgatccttaagttgtgtctgactgatggatttgacatgtttccttctctattagtcactgatggttcctgcatgattgatagaaggatgggcattcacggtcaccctcttgagat

SEQ ID NO: 8614 - DNA, 307 bp, Glycine max
ttactcttgcttggtatttcgacgtctagatcttcaggatatagcgtctcttatggaggaccggtcaaactccaaggaagctctatcaattgcgtcgcgctctcgccttacccttgactgggtgccctaattgacagcatacgatatcgtaccttttctcgaccttgttctcactccaggctatgaaacacacgccacattggctgcgtatcttgccaacgaggatgaacatgagatggaagtagacactctaacatctgctattcaaaccccagtcaaacactttatgcctgagcaagaaatatac

SEQ ID NO: 8615 - DNA, 353 bp, Glycine max
gcagcttctaatgatatttcactaagtggaatgattcttccagctggtgtgtatttgtggcaaataccacattttatggccctagcctatttgtgtcgtgatgactatgctgctggagggtttaagatgtactctcttgctgatgcatctgggcatagaacagcattggtggctttaaggaactctatatatctaatccctttggggttcttggcttatgattggggtttgacttctggatggttttgtcttgagtccgctgcacttacacttgcaataagcgctgcagcattttcattctatagaaaccgtaccaaagaaaaggcaaggagaatgttccatgccagtcttct

SEQ ID NO: 8616 - DNA, 385 bp, Glycine max
cacacacacagctagcagatattacatacacgtgaatcactaattaagccatggaggagaaatcaatagctgggttgcgcttcctcttccttgttctctttgttgctcgtaagctactacttttaataagaagttgtggtgcaaactgaggcaaagacttgcgagaacctggctgatacatacaggggtccatgcttcaccactggcagctgcgatgatcactgcaagaacaaagagcacttgctcagaggcagatgcaaggacgattttcgctgttggtgcaccaaaaactgttaaatggatccattcactccaacgtgaagaagatgcatgcagcgctattttataaaaaataaaactactatatactatatataataagact

SEQ ID NO: 8617 - DNA, 243 bp, Glycine max
tctttctcccactctttctaaaaaaaaaaaaaaataaaaaaaaaaaaaaaaaaaaaaaaaaaaaatgtaaaaaataaaaaaattaaataaacatacatacaccttcatataatcttatatactataatacttataacatttaactaaccattatttttcttctttttatactctaaaatcctttgatttacccaacttattcaactttttatcccatccaaatttttccattttcctttttat

SEQ ID NO: 8618 - DNA, 408 bp, Glycine max
accaaacgtccaaggcgtaaatagggacaaagttggcagacgatatcacgatatatggggcacatgatacaggtaccagcggatgtacacatgtctagagctgcactaaaaggatgggcgagcccatgctcaaatggaaaacaagcgctgaaacttactaaaagctgttggtacacacgtatgtatagccattaatggcaaaagaagtggtagctccattagcaagatgctctgcataatgctcaacgttatgacagaatgccacaggaagctgaacctcaggctattgaagtgtctaaacgctacgcacaagtaacagaaatgccacccagtgcacagaatactatgagattataagcacctggagctaagctacaagatctgtatagccacatgaccatactgggg

SEQ ID NO: 8619 - DNA, 371 bp, Glycine max
aaaaaaaaaaaaaaaaaaaaataaaaaaaaaaaaaaaaaaaaaaaaaaaaaagggaaaggaaaaaaaaaaaaaaaaaaaaaataaaaaaaaaaaaaaaaaaaaaaaaaaaaaaaaaaaaagggcgtatctttttaaagtacccaattttacttccccttgaatccaaagctttaccttttttataagccctcctaatttcaatttattggccatttttttaaaaattctttactggaaaaaccctttttttaccaaatttaatagctttgaaaaacatcaccttttgcccagcttgattatttaataaaaggcccgaaacatcggccctttcaaacatttgcacaccctgaatgccaaatggaactcacct

SEQ ID NO: 8620 - DNA, 397 bp, Glycine max
attctagcgatgttgtaaccgctggaaaacatggaaaacgtactctagttaaaattgtggctgcgtcttctgctgccctggctcttctgctagttgttgtgacagttgttttctttacaaggaagaatgtggtgacaaggagaagagaaagaagacagtttggcgctcttctagccacagtgaataagtccaagctaaatatgccttacgaggttcttgaaaaagcaacaaattacttcaatgaggccaacagccttgaccaaggggaaccaggttctgtttataagggagttatcccatatggaaacactgtggccataaaagggcttatctatcacacaacacagtgcacagaatatttttactgtggggtcaattagctcaggggtttatatca

SEQ ID NO: 8621 - DNA, 434 bp, Glycine max
cacggctgagggatggtgaaacccctaatgctgtaccatcacatgcaaaattacatggactgcttcttgaggagcgtattgagaatggttatagtaatcctgcacgcctagtgaagttgaagaaaagacaattgaatggaccagcagttgaaacaagagctgggaagagttacatggagaaatttctggaaactccttcacctgatcataaaatggtttgtgaaacttcaatctttccattgcctgtgaaacagacatcagatgatgctagcgaggctgggattaaaattcttgaaatcagcagcattagtcctgtgaaaaagtcattgggaaataaaaacacctattcatcccctgatgagaaggaattagaactaaaaccattttcacaaatggatggtgggacaaatggagatcttgtgaaggtgaaagaa

SEQ ID NO: 8622 - DNA, 347 bp, Glycine max
aaaaaaaaacataaacaaaaaaggataaaaaaaaaaaaacaaataaaagcatatgggggatatgaatacaatggatataaaaaatggacaacttaatgttgctcgatgcacttggtgactgacacatgagaacgaatgaaaagcagagacggtggaccactgactgcagatccagaacttatgactacaaaactgactgccgatgacgaatttctcatcattgattgcgatgggatttggtatgtatttcggagccaaaatgcactggattttgctcggctcatgcttcacgagcataacgatccatccatgtgtagccaggatctggttgacgaggctttaaagag

SEQ ID NO: 8623 - DNA, 420 bp, Glycine max
cggacgcgtgggtattattcgtgatccaatctctgcatttaatgtctcagctgatggggagtttcttgcgtgacctcaagggtgcattttgacaagaacttatttcttctgttttggtgggttgacatgcagtggaacaccttcaggagacattgtagttgtaaattcaacaaatatgcagattcacacaatgataaaaaaggctcaccttggcatagtaactgctttagcattctcccctgattcaagggcggtggcttctgtatccatggattcaagtgcgagggtaacaataattgaagagaagaagactaatgggcttagcttgtggattgcattatttatcatcctacttgcagtagccgcttacttcctgaggcaagaaattgaaaagtgaaggttccaagattttgcttattg

SEQ ID NO: 8624 - DNA, 366 bp, Glycine max
gtcaagagatcataaaccaggttgcaacaaagaaaagaagcgtatcgaggcatctggggggtatgtctacgatggatatctcaatggacaacttaatgttgctcgtgcacttggtgactggcacatggaaggaatgaagagcaaagacggtggaccactgactgcagaaccagaacttatgactacaaaactgactgccgaggacgaatttctcatcattggttgtgatgggatttgggatgtatttcggagccaaaatgcagtggattttgctcggcgcatgcttcaggagcataacgatccagccatgtgtagtaaggatctggttgacgaagctttaaagagaaaaagtggagacaatttggc

SEQ ID NO: 8625 - DNA, 456 bp, Glycine max
  modified_base (66)..(66): a, c, g, t, unknown, or other
gattcccggtcgacccgggcgttccacacgcgtgcgccacgcgtccgagatactatactaataaantattgttgacagatcaagagtggttttgtatctcgaggcttgttattttcattggcaatacttgtggttactttgaagattttgggaagacagaaagtaatatgaaagtgaaatcaactgtttttctgtcccccaagtttgaacttggaccaggatcagctaccataaggcattattatgacattgagtttccaagaggtcacgttgcactcaaaaatttcagtggtgaagtagttgatgaagcaaggaaccctgtgcctcttcatgaaacttatctccaccactggattggtgtgagatatactatcaacaacgtaaagatgtgacacacacaatgtatgatgattgcctttgacacttaaccactctgattatattttggttaggaac

SEQ ID NO: 8626 - DNA, 191 bp, Glycine max
  modified_base (91)..(91): a, c, g, t, unknown, or other
caatccacagcattattcataatttttatatccacattccatgatgaaaccaagtcccttttaacagctggtagcctttacaaaactctanttacatattcctacaactacatcccaaatgctatcaaaaccttcaagagtgttgaaaacctctatatgaacaagacccctcgaaccatcaagaacatcac

SEQ ID NO: 8627 - DNA, 253 bp, Glycine max
aagttatatataatcgttcttcatctctttcacggattaaaaaaaaaaaaaaaaaaaagaaaaaaaaaaaaaaaaaaaaaaaaaaaaaaaaaaaaaaaaaaaaaaaaaaaaaaaaaaaaaaaaaaaaaaaatacaaaaaaaaaaaaaaaaaaaaaaaaacaaaaaacaaaaaaaataacaaaaacaaaaaatctaaactcaaaaaccataactaaaattaaacagaactccaaaaaaactacatttaacaaaa

SEQ ID NO: 8628 - DNA, 365 bp, Glycine max
tttcagcttatctttacttcaaaaggcaattgatttttcttcatgatgccgagtgttaagcctgatgcatttgacaaagactcagaaccatttgttgaagttgatccatcaagaagatatggaagatacagtgaactattacgatatggcgctgtgaaaaaggtgtgtagggcatttgatcaagaagagggaatagaggtggcatggaaccaaatgaaactgaggaacttgagttatgacccttccatggaggataggctctactatgaagtgaaggttgtaagaagcttgaccaacgaaaacatcatttccctttacagcgcttggagggaggagaaacacgacaccttgaacttcattactga

SEQ ID NO: 8629 - DNA, 306 bp, Glycine max
aaaaaaaaaaaaaaaaaaaaaaaaaaaaaaaaaaaaaaaaaaaaaaaaaaaaaagggaaaagggtataaataaaaaaaagataaaaaaaacataaatacaaaaaaaataaaataaaatatggtctcaccttttataaattcaatgttcagttcctttacaatgccatgacttagattacctttagggtacccaaatttaaatcaattgtaccacattttaacaatatccagattggaaaaaccctaacattccctaacttattgacttttcaaaaaattcccctttctcaatgtggaatattaccc

SEQ ID NO: 8630 - DNA, 298 bp, Glycine max
cagaggcgaatctcgtggtgaaccgatgatacggatgcacgaggaaggtcggactcagagtacttcatggccgatgcggacagatcttattaggggagctccattactccgaccgacactactgaagatactactacgcacgcggcaggagagaagtgatggtgagggagaatccggagactagagccgaaactaacgctaacggctgtcataatacttggcataaggaagatacctgaacggatcagaatctcgaaacgacgtggtgaacggtcgagctttcgagggatcggtgtca

SEQ ID NO: 8631 - DNA, 447 bp, Glycine max
gcgctacctactaatattccaggaagcaacactaaaacagttatcgaaaatgagttaaaggcagtcagttctgttgccacacagaatactgaattaccttcagcgagagcttggaaacctgctcctggtttcaaggcaaaatctctcttagaaattcaactggaagaacaaaaaaagtcactgacagaaaagcttgtatctgaggttgctactcctgtcaattccatgagctcaacaactccctgggttggagttgtcgccaatccagactctatgaaggtgtcaaatgatggccacagagaagcagaaaatactgaatatctggctaaagctgaaaaatctcaaaatagtaaaagcaagaaaagcccattacatgatctattggcagaagatcttgtaccaaaatctagtgaaagagatggcaaggttcctgacagtatgctcccc

SEQ ID NO: 8632 - DNA, 407 bp, Glycine max
gcgtgacattacctccacgatgtgtgcagttaaagccggcaaagatgtccgcgcttatgctgatcactcttgaggctttgctgatgccaccacctctagttatgaaccaaaacctgtcaaacacatcagggtggccataatgcatttgaactttgagagggtttgccaaaaccctctgccccaatgtgacaaaactcgtttcttgacctgacatgaaccatacaagagaggaaacagaaccggtaaaaatgtgttccctcactccaagcccaattgtctccacggaaaccaacctgctatgatccacagatgcagtatattatcacataccatgaccaattattctaaaaatatattagaacatacaaaatataattaaaattaagaacatattttttgggcattac

SEQ ID NO: 8633 - DNA, 366 bp, Glycine max
ctcacgcgtacgatgaatttcaccactcttataaattctgagaatgaattggtatgagcgaagcattagcctttttctgtgtcgacactggtttcgatcccacacccactaactcatacgcttgatcctttgaatgctcttgcgtacttctttcactacctaattactaactcacactcacacaacgggtgatatcaatgtcgactactgctatgaagaggctcatgagagatttcaagaagctgcatcaagacccgactgcaggaatcagcggtgcacctcaagatatcaacataatgctgaggaacgctgccatatatggtccttatgatactcgatgggatggaagcacgtttaagttgactg

SEQ ID NO: 8634 - DNA, 418 bp, Glycine max
tcgcccacgcgtccgctggctcctcatcggaataggactcgctggcgcggtcgttgttgtgggcgagacccggcggcggcgacaccggaaccttcccaaagaggacttcggtgcattcgttgagcgtatcgaacttctccccattcctcagcccaaccaaacgcaaacgctctctgctcttaccttcgccatcaaagacatattcgatgtgaaagggtatgtgacggggttcggaaaccctcagtggaagaagacgcacggcgaggccgggaagactgcgattgtcatcaccgctctcctcagcgacggtgccacttgtgttggcaagactgttatggatgaattctcttttgggatttctggtgagaacaagttttatggaacaccaaccaatcctcaaatgccatcttctatccct

SEQ ID NO: 8635 - DNA, 429 bp, Glycine max
ttcacgcgttcgagtacattaagtgtagtcatgctacattatagaaatagatctgttagggtatgagtgactgtgagctatattatctgttgtagcacaaaacatttagtatcatgagtaacccatattacaatttaatatttgtgcgggattcgctacttttgcagttcatccagaaagttggaatcccatgtggtctggatcaagcatattaacagggcttgtatcattcatgatggacaacaattcaaccactggcagtgtaaacaccaccactgctgagaagcatcgtttagcaaaatcttccctttctttcaactgtaagaatgctacattcaggaagatgttacctgagtatgttgagaagtacaacctgcaacagctttctgagcaggctggttcagagagggtctcatcggatacgtcttc

SEQ ID NO: 8636 - DNA, 434 bp, Glycine max
cataaaacaaatcattttagttctggtaaaattaatttattttgtatttcatccttaaaaatactatcattttttcattatttaaaatattttttttacaatttaaaacactatctaaagttctttaaatatgaaaaataaaacaaatacatttcactagtactaaaatgaaaaatataaatttgtaaaacaaaaatttaaaaacactaaattgtatgaaaaaaaatatatttaaacatgttatttaaattaaatttcctctactttccagatacaaggaaaaagaaaagacattttgatcatgaacggtggagggacaaatttgattccatcacattttacaaacggatgcccataaaatatcttatccttctttttggttacacaaaatatcttatccttctgccaaaagttattatccccaaaaaagaaat

SEQ ID NO: 8637 - DNA, 243 bp, Glycine max
tcgaaaaaaaaaaaaaaaaaaaaaaaaaaagaaataaaaaaaaaaaaaaaaaaaaaaagataaaggggacaccttcctataatacggttacctaccttaccaactcttgcatgctaacactactctcttgtatatcctcacctaaattaattcaactgcccgtctctatacaacttctggacagtcaattcccttaccttacccaacttattcccctttcatgacatcctccttttcccagct

SEQ ID NO: 8638 - DNA, 439 bp, Glycine max
ctctccgacgtacatttccatctttttagggtttcatttcatggactccgattcctggatgtccacgcgcctctcttcctcttcacgccgccaccattatcgatctgatctgtacgcggaggagagtgaagggaacgatgatttcagggcggagtttctatgccctttctgcgccgaggattacgacgtcgtttccctctgttgccacattgacgaccaccaccctatccaagccaaaaacggggtgtgtcccatttgtgggaagaaggtgggagtggatctcgttggacattttactacacaacatgggaacttcttgaggatatcctttttgcaagttgaacttacgtgcagcgcaaaaggagggtcaggaaaggaggctctgcttcaacaatttctatattgagaaaagagttacaagaaggagccttgcagtccc

SEQ ID NO: 8639 - DNA, 349 bp, Glycine max
gcagcgatggcgccaccgtcgccaccgtcactttccacggccgcttcgatatcctctcgatgtccgcgaccttcctccaccacgcctccccggcggcgatcccgaacgccttcgccgtgtccctttccggaccgcaggggcagatcgtcggcggattcgtcgccggcaggctcctcgcggccggcacggtgttcgtgattgccgcgtcgttcaacaatccgtcgtatcaccggctttcgtcggaggaggaggcgcagaacaactctggcggcggcgcaggagacgcgcagtctccgccggtttccggtggcggcgtggagagcggacacgttccggctgagtcgtttat

SEQ ID NO: 8640 - DNA, 392 bp, Glycine max
acccacgcgtggacgcacgcgtccgaccgaatactttacttcacaaaaattagatccatgaaaacgtgttctgtgatgctatgcctgtaaacgtatcgaagtcttactggggccacagcataacaatgtggcacacactcttgtggagcgtaatgcccaaatatatcatgttccagcaaatttgggctgtgatatgacacacatatctactgactagaaagttgccatatccaatagctgatcgcaacaccctaaacatctacttcaacaacacctaaatctggtggagatattagcatactcattatcttttttctctacagatcaaatgctttaataccgatacgattgcccgtagtctagtcatggattctacagatatgatgcttaca

SEQ ID NO: 8641 - DNA, 397 bp, Glycine max
agcagagggatgatggttcagtgcaacaacactaataacaacgtgtgcagctgcaagcgctctccctcggccaccttagaccttctaatcctcctcctggtcctcttctccggcgccttcctactctactcctacctctgctacatcttcaactccctctccctcctcctcccctgcctccccctctcctacctcctccccttcctcctattcttctccctctccctcgccgccttcttctgcggctcccgatcccgccgctgccagcgccagggatgcacgggcctcaagaaggccatggagttcgatttgcagattcaacgcttcggcttcttctacgacgaaatcgattaacttccctggaaaggccgcactgaggccaaccccgattacgact

SEQ ID NO: 8642 - DNA, 290 bp, Glycine max
ctcacgcgttcgcagaattacccaaattgtgctctttggtgtcttttttaactgacatgcgaaactgaatggttcttaactctcattaacctgctattggaaccaaaatcctcaaaacggaattgcctgcataatctcctcctaaatcatttgggcattaaccattccgaacctgccttgaattggccaatcctaccctggtttaattgggaaactttaaacttggaattcacattgttgaatgacttgaccttaaggcattacctgatccaggtttctttcacctgttg

SEQ ID NO: 8643 - DNA, 435 bp, Glycine max
cgttcattttatctttgagtccattgattttttcccaagttgggttgtataatcggatgagtttgctgtgtgtgatgatcatgggatgcttgtgcttacctcactttcttcttccggtgtttgtatttgctaatagctccaatgggtactattgttgaagcacatgacacatataccaagatcctaggaagatggccagccttttactatggcatggggcacatgctcaatgacatatctgctgcttgtcggttcacctatttattattgttcttgacagatattggactttcacctaggaatgcagctgctgtgatgctatcaggtcaagtggctgatggatatgccaccatacttgttggcgaactgatcgacaagttcggacacttcaagatatagcacggtgctggatctttattggtcgcaatatcattt

SEQ ID NO: 8644 - DNA, 292 bp, Glycine max
gatagattaaaattgctgcgaaagagaaatacatttcacagtcattttgtcatataaatgggtatacaagctcaattctaaagacctggtgacacattaagcaccaatggcaggagtttaacctgatgagcactacaaacaagatcaagatcacgtttctgaagaaattgagagatcttatcatcaccacatgtgcatgaaactcctctgtcattcattccgcatccttgaatatctttgctcggcttaaaccacataacaacacacagcagatacgcttctgaaacatctg

SEQ ID NO: 8645 - DNA, 323 bp, Glycine max
cccacgcgtccgaaaaaaaaaaaaaggataaaaaaaaaaaaaaaaaaaaaaaaaaaaaaaggaaaaaaggaaaaaaaaaagggcggacgttctataggttccataagctttccttctcatgcatgcaactgttatttcttttttttattgtcaccttaattgaattcacttgccctactttttcaactgtaataactgtaaaaacccttgcgtttcccaacttatttgccttgtctcatattcccctttctccagtttgcgtaatatccaaaagtccctgaccttattgccctttccaacagtttgtcaatcttaatggcgaa

SEQ ID NO: 8646 - DNA, 423 bp, Glycine max
ggaaaattcacaaaaaaatatggggacttaaccagggtagatgctcgtctagatatatgggcagcttcagggtttgcaaagaagattctgaatggttccagtagttcaactgctgatgttagcaaacaaccatcagcctcaccccggctaaatttaatctttcaacagcaggttgcagggccagttgattttcgagctgattcccggattgcccttgagtctttcgccaggaaaaacggtgtgtcagtagaggattttatttgcagcctgagttactccttgaaggatcttcagtctggaaagatcgttgcttggtattctccataaagaaaagagggaatggttgaatttcgcatgtatgagttatagcagaatgcaacaaccctcacatttttgtaacttacgcttagagatcttacaatg

SEQ ID NO: 8647 - DNA, 274 bp, Glycine max
ttgtaactataccaattttacatatttttacctttctcttgaatcctgtaataatatgcactttttcaccaactggactcacaactgaaatcaaatctgtggaaatccaccatgaatcttttacccagccacatcctgatgacaattttgaatacaatgttaaaaatgtttctgtcaaagatttaaaccctggtaatttttcctaaaactcaaaggataaccctccaaaagaggctcttaactttacaccccaagtaatcatcataaaccaccc

SEQ ID NO: 8648 - DNA, 279 bp, Glycine max
gccacgcgtccgaccactcgtccgcccactcgtccgaaaaaaaaaaaaaaaaaaaaaaagaggaaaaaaaagagaaaaaaaaaaaaaaaaaaataaaaaaataaaaaaaaaaaaaaaaaaaacaaaaaaaaaaaaagtcaatgaggttcaaactactcatattccctaacccatcattaacaattcatttagcgctgatcagtctcacagcttatagattgaataaaggcataatgattaacctaaaaaaaagggaaactcactataattagacaactt

SEQ ID NO: 8649 - DNA, 220 bp, Glycine max
cgcctgctgtcacgcttcgggggacgcgtccgtaaacacgatgatagtaacgtatatactattgccatatgactcttgactctttgaggttgatcctttatacgtttatcagacagctttaacttgacaatcacttcttgtaacaaaaaattcctttaatgaagggttaacgggatcaacggtcaacaacgtatatatagaagcagcagtgatagctact

SEQ ID NO: 8650 - DNA, 345 bp, Glycine max
cccacgcgtccgaaaaaaaaaaaaaagagatataaaaaaataaaaaaaaagaaaaaaaaagagaaataataaaaaagaaactagaaaaaaaaaaactaaaaaaacaataaataataaacaagtgttccatcgttttaatggtcccaagtttccttatacttccttattactttttaattttttttttgtgtcacctttttaaaattcattgcctttccttttaaaacatcattcctgtaaatacctttgattctccaaacttattcacctttcaaaccatccccttttttcaaatttccttattacctaaattgccctgcccaatagactttcccaacattttcc

SEQ ID NO: 8651 - DNA, 424 bp, Glycine max
gtggctgtttgtggtatggttggttcagggaaatcaagttttcttttgtgcatccttggagagattcctaaaatttctggtgaagttagagtgtgtggctcttctgcatatgtctcccaatcagcatggatacaatcaggaactatagaagaaaatatcctctttggaagcccaatggacaaagcaaagtacaagaatgttcttcatgcttgttcactgaaaaaggacctagaacttttctcacatggtgatcttacaattattggggatagaggtataaacctgagtggtggccagaagcagcgggttcagctggctcgggcactctaccaagatgctgatatttatcttcttgatgatcccttcagtgcagttgatgctcacactggatcagacttgtttagggagtatatattgacagcac

SEQ ID NO: 8652 - DNA, 340 bp, Glycine max
cccacgcgtccgcccacgcgtccgcccactcgtccgaaaaaaaaaaaaggaaaaaaaaagagaaaaaaaaaaaggaaaaaaaaaaaaaaaaaaaaaaaaaaaaaaaaaaaaaaaaaaaaaaaaaaaaaaaaaaaaaaaaaaaaaaaaaaaaaagaaaaaaaaaaaaaaaaaaaaaaaaaaaaaaaggggaccctttataggagacaaaaccttactaccaaggaattaaaaataataaacatttacaataagagtaacaaaaattaaataaagtggcagaagttaaaaaaccgataagcctgaaaaaaccgggggatacccagattaattaatttgaaac

SEQ ID NO: 8653 - DNA, 426 bp, Glycine max
ccattattaattccgttagcaaaacttcaaaccccatcttcttctctagagaaagattgatctctggcataggcgcaaataaccagatataatggcggtatcggtgaaagtcagcaacatctcttcaactgcaaccgagcaagatttgagggaatttcttgcgtttccgggaaaaatcgaatatattgaaatgcaaagtgataagggaaattcccaagttgcgtatgttaccttcagtaatccagagggggcagaaactgcagttcttctctcgggggcggtggtgtgtggacagtctctaaccatagctttggctccggatcatgctctgcctgcctctgctgcatctgcaacacagactagtaatgctgagagtggcgaatctggtttgagaaaggcagaggatgttgtaaccggcttgctagc

SEQ ID NO: 8654 - DNA, 435 bp, Glycine max
agaggaggaaaaggatgacaaaattgatgtatagaaggtcaaggtgaaagaagatgatggggaagatgaagggaggaaggagaagaagaaaaaggaaaagaaggacaaagatgaagaaacagacacattaaagggaaaggaaaaaaatggtgatggtgaagagaagaaggaaaagaaagagaatgagaagaaaaaggaaaagaaggacaaagatgaagaaacagacacattaaaggaaaagggaaaaaatgacgaaggcgaggatgctgaagagaagaaagaaaagaagaaaaaggaaaagaatgacaaggatgacaaaactgatgtatagaaggtcaaggggaaagaagacaaagagaaaaaacaaaagataaagaaggaaaaagatgacaaaattgatgtagagaaggtcaaggggaaagaagatgatgggga

SEQ ID NO: 8655 - DNA, 436 bp, Glycine max
cccacgcgtccgctttaattttttttttatttcattcgataatattaattatattcctgttgagtgaatactgtcttattccttggtttttgttctccatttgaaaattgctacctaaaccagcctatcgaaatctgaatattttcctaaactgaatttctctgtccttttttgttaacctatgaattaggccgtatttttgttaaaaaagaaaaccaattccccggggtttattataattttgtgccaagtttgtttcgaagagggtgtgttcttgttggagaatgcatattgagggtggtgggggagaacaatggcgaatctggtaccgggggtgcttctgaagcttctgcagcacatgaacacggatgtgaaggttggtggtgagcacaggtcttcgcttttgcaagttgtgagcattgttccggcacttgca

SEQ ID NO: 8656 - DNA, 438 bp, Glycine max
cccacgcgtccgcagaaacatgcgattgattggggtatagagtgcatgttgcgctactccaaccgctccatattgagcctcatggaaactcaacctatggtggaactcgtgtacacgttggatgtaaagggttcagtggaacaattcaacgaggcgctgcagagcttgatgaggaatctaacacgcacagctgcatcaggtgactctcgtctcaagtatgctacggctagcacacctgctccgagttttcaaaccatatttggttatacgcagtgcacccctgatttgtcatcggaagattgcaccaagtgcttggaagaagctatttcaaaaattccagagtgttgtagtggcaaggctggtggcaatgttttaaaacccagttgtagaattagatttgacccctacgtcttctatggaccaacattaaaattagac

SEQ ID NO: 8657 - DNA, 399 bp, Glycine max
aaaaaaaaaaaaaaaaaaaaaaaaaaaaaaaataaaaaaaaaaaaaaaaaaaaataaaaaaaagaaaaaataaaaaaaaatgaaatcaaaaaacaaaaatattatattatattacaataaacttaattaactgtccttatcttcaaattttacttactgtaattcccctacccttacctaatttaatcccctttaaaaacatctaacttttaccaaatcacgttttatccaattggtccactcctatcgaatttcccttcacttaaatatactgaatttcaaattggaccctccctttaacgattcattaaacttgttgtgtattgttttttaactcaacttaaccttttcacttgccatagccctaacgtccacttcttttatttcacttatttcctt

SEQ ID NO: 8658 - DNA, 278 bp, Glycine max
acgcccacgcgtccgcccacgcgtccgaaaaaaaaaaaaaaaaaaaaaaaaaaaaaaaaaaaaaagaaaaaaaaaaaaaaaaaaaaaaaaaaaaaaaaaaaaaaaaaaaaaaaaaaaaaaaaaaaaaaaaaaaaaaaaaaaaaaaaaaaaaaaaaaaaaggggcttaagtttaatagaatctaaatttaaatacacttgatttaaatgtaaaaacctttttataaatcacctaaattgaattaaatggcacgtcttttaaaacgttttaattgaaaaa

SEQ ID NO: 8659 - DNA, 453 bp, Glycine max
  modified_base (262)..(262): a, c, g, t, unknown, or other
  modified_base (268)..(268): a, c, g, t, unknown, or other
  modified_base (312)..(312): a, c, g, t, unknown, or other
gaatgaacttggtgttgtttctgcagaaagcattgctggtgcaactatggttccagtaagttggacagagatgcagtgcccgttaactggtcaaattgagcaaagaaaggttgcaaaggctgcaagctgactagaatacttcatcgagctggaatctgttctgttttgtagaaatagactaacatgcgttgttgttagggtgagaaattatagccagtttgtattttacattgcaagttggcctacttataaagtatcacanacctgngatttcaattcactcgtgctatgagcaggattttatttactttntattgtattttttcaatttaaagctattgattactggcattttaagacatggttcaattttcaactttgaaaaaaaaaaaattaaataacaaaaaaaactaaatataaaaaacataaaacaaataataactaaaaaattaa

SEQ ID NO: 8660 - DNA, 252 bp, Glycine max
aaaaaaaaaaaaaaaaaaaaaaaaaaaaaaaaaaaaaaaaaaaaaaaaaaaaaaaaaaaaaaaagaaaaaaaaaaaaaaaaaaaaaaaaaaaaaaaaaaaaaaaaaaaaaaaaaaaaaaaaaaaaaaaaaaaaataaaaaaaatagacactcttatataaacttattaacttaactataactaaaaatgctatcaattaaattggaagagaccatactaaataaactaattgtagttaataccgatatatca

SEQ ID NO: 8661 - DNA, 450 bp, Glycine max
cccacgcgtccgcccacgcgtccgggtgaacctagttttcctatgcgacaaagcctttctggtggtgctcttgatacgatggccagaaaacctgcagatccagaagaggagctcagatggatgtctcaagaagtgcgtggttatgttgaagctgttcttaacagcctcgctgcaaatgttccaaaagcagttgttctttgccaagtagagaaagccaaagaagacatgctcaaccagctatacagttccatcaggggatcaacacaaagacactttgggcatacaagtaggcaaaacttgggaaggtgcataatgtatttgggtggagcaatgggcttgcatatttaatgatggtccttgcattttcaacttggtcttggataggattatatttttggtggctctgatggtttggctattgctacttcaagggagttgccatttctgata

SEQ ID NO: 8662 - DNA, 311 bp, Glycine max
atgtctgattcatacattatatatattctgaaatactctacccgttaggggaaagagattgcgtgtaagtgagtgagtgttgctggtaaaggcgacggtcctgctatcctaatcgatttgggaacaacgaaatcttgactaggtgtgtgaccacactatcgatgctaaattataccctaggatcaggctagcagaactaagccatactacctgcgtatcatggactcaaaacaactgatcgatgatctgccgagaaatcacgaccatatcaaccgttgactcccagatgatgatgctaagcacttgatgga

SEQ ID NO: 8663 - DNA, 377 bp, Glycine max
  modified_base (232)..(232): a, c, g, t, unknown, or other
ggtggcttcaaggtccaggttatggctgatgcgagtaaatcagacttggatgaggctgaatggtccgaattccattctaatgtgaagcgtggggacatagttggtatcactgggtttccaggcaaaagtaagaagggtgaacttagtattttccccaagacttttgtgttgctgtctcattgtttgcatatgatgccaaggcaaaagtctgctgctgctgcggataatgcanatttgaagaaaaatccatgggtaccaggaagtaccaggaatcctgaaccatatattttgaaggatcaggaaactaggtttcggttacgccattgggatttgatgctaaatccaaaggttcaggaattttttagaacccggcttaa

SEQ ID NO: 8664 - DNA, 386 bp, Glycine max
gcgtacgctttcgaaagaaacgggtggtggctgcttcgaaagcttaataatatgtttatatccagatcgtgatggtttcctcagcagcaaactaacaaattactcatatcatataataagatcgaccgttctctctcataagccaaacgtctagatgaacttgtttctcaatctatctccctaatttccgatcatcgactaggttactcaacgacatccgatgtatctgtaatacttgcattggctaatacaatgctaaagaatccaatcctatgaagtgtataagataagccatatacaacaaatggttaaaaagcctacataacttatttggacctaaacctcttgacaaggtactatttgcccatttaccacaccccaaaaat

SEQ ID NO: 8665 - DNA, 344 bp, Glycine max
aacagatcttagcattccattctgagacacgcttctctacagagctcttactgctatatctggggcgtgttcccttcattatcggaatgttaatcgttgccatctaattcgatatgctggagtgatcgccattgcaaggtggtaccctaaactatgatatttgactctgagtctcttgcacaacttctgtgatatagctcatggctgaattggcagaacactgctcattgttgacagaaatagtactttcacactgtcgaccaactacacatgctgtactaacacatcttgtaaaacgctgctgcacagaacttgagtcatgccacatggtatattgctctgga

SEQ ID NO: 8666 - DNA, 289 bp, Glycine max
tcccacgcgtcctcccactcgtccgtccactcgttctaaaaaaaaaaaaaaataaaaaaagaaagaataaataaaaaaaaaagaaaaaaataaaaaaaaaaaataaaaaaaattaaaatataaaaaaaaaaaaataataatctaaataataatatttatacatttacacatcttacagtttatttatatacttatatattcaacatatctctctttatctaatataaactgcattttaccaattcttcattataaatcctctgatgtactaatctattctctacttata

SEQ ID NO: 8667 - DNA, 404 bp, Glycine max
cccacgcgtccggtcttaaaagccacgcgaatgagcttaagcttaacctccatatttagctgggtgcgtgaataaaaccatgaggcataacctaatatggcttactattttttcctctttcgtcctcgttcctctcgtgatcttgaattcattcaacacctttcccaaattaagctatagccaataaaacaaaatagtataataattttcattaatgatgagcagcggtagtggtagtggcagcagtagtggtagcccttgtggtgcttgcaagttcttgaggaggaagtgtattccgggttgtatatttgctccgtactttgattcagagcaaggtacaagccattttgcggcggtgcacaaagtttttggggccagcaatgtgtccaagcttctccttagca

SEQ ID NO: 8668 - DNA, 428 bp, Glycine max
aatgataatactctcttttttaaagatcacgttgttgataatcaaatgattattgaagatagggtaacattttagagaaaatattactttatgcgttttatttgcatgcatatagtctttgattttgttttaattttcaatatctcttatatatcattcaattattgcattaatgtgtagaagaagttgtggtgcaaactgaggcaaagacttgcgagaacctggctgatacatacaggggtccatgcttcaccactggcagctgcgatgatcactgcaagaacaaagagcacttgctcagaggcagatgcatggacgattttcgctgttggtgcaccaaaaactgttaaatggatccattcactccaacgtgaagaagatgcatgcagcgctatattataaataatgaaactactatatactatata

SEQ ID NO: 8669 - DNA, 302 bp, Glycine max
acgcttaatattcttgcatatacattaaaaactatattgacttaactgataagttcacattcaagggcgacttctccaactctgtaactgctgctacatctttacagatgcttagcttcatataccaacatcattatcccactggctataacttgctttacaattgttataaacgtaatgggaaatgttggacctagaacaatcaagaatataacatgaagagaggactcataaactaagtttgtactacacagtatataaccatcagcttaagcaaactagaattttatctacagcataca

SEQ ID NO: 8670 - DNA, 444 bp, Glycine max
acaataatgaattgtgaaacaaaaaaatgcaaataaatcattaaaaatagtataaaataggaggtataaagtaagattatatgcctaattgactgttttgaaatgttaaagtagtaggtgataaagcaaagaaatcataaaaaataaaataaaataaaaaatattgaataagattatatatatgattaactattatgtaatgctaaaagtagtaggtgataaagcaaagaaatcataaaaaataaaataaaataaaagatatagaataagatgatatatatgattaactattatgtaatgctaaaagtagtaggtgattcttagtcttgaatttctatctcttgtcaaattcattgaatgtaatgcatcgttataagaactttctcctcttatttgcacataaaagtttcaataattgtaagttaacataatggtacagtattt

SEQ ID NO: 8671 - DNA, 379 bp, Glycine max
cccacgcgtccgcgctctgataacatcaggactagtatttccgctcagatgaccaaacagtaggctgggtgattctaccaagagaggcagacatacttataatgatcatgccaatgacattgctcagaataccaaagactactccagtgacacatcttcatagaaccaacgaaaaacttcaatacattacatctgaagctgatcaatacagtacagataaagctcgagaaataaaggatgcaccatcacataatgcaagtcacatacctaatgctatacatcaaaaatcacattacttgataaagacattattaaaacatcaccttaattccgatctttgaaaatctatatgtttgaatcacttactaccttttaatta

SEQ ID NO: 8672 - DNA, 432 bp, Glycine max
tctaaaaaaaaaaaaaaaaaaaaaaaaaaaaaaaaaataacaataaaaaaaaaaactaacttaaacacgaaagcgtaaaaaataaaaaaattttctataaataaatactatataaaaataactatcaaacataaatacaacttcataacaaactaaaacccttcctttacccaaatttatagcctttcactacattcacctatcttcagcttaagatacctcatattgccccgcacttatacccctttcctacatttaaacctactaaatatacttttgaacacctcatttctcatcccattatacccgaatgcatttattcactaactcacttttaacaatccaattaccagcgtctatatcctccgatctcattcctttcttccctttctttttcaacacgttactcgtcttttcccgtaaatccctaat

SEQ ID NO: 8673 - DNA, 342 bp, Glycine max
cccacgcgtcctaaaaaaaaaacaaaaataatataataaaactaaaaaacaaaaaacaataaagataagaaataaaaaaaaaggttgtaaatataataaaacaaatacatttaaaataaaaaatcaaagattgcacttactaaaaaaagatatcgaatataaatacacataacattacttgatgaacaagattcctcttctgttacaaatgaaccctgttcacaagaagattccccttctcatccacaatttcaaacccatttccaaatccctcattgctgatcactacattgtaccacgtttggaatgacagaaatcccttgctgccttcaaacccttacc

SEQ ID NO: 8674 - DNA, 422 bp, Glycine max
tgacatgcatgctgactactctggccaaggatttgatcagcttttagatgttattaacaagagaaagcataatcccaatgatcgaaggatcattctctcagcgtggaatccatctgatcttaaattgatggcacttccaccctgccacatgtttgcacaggtccgcagctatatttgggtttctctttggaagagctctctctttttctctcatgaagttttgtcaacttccttttattgttttttccctgtagttctatgtagctaatggggagctatcatgtcaaatgtatcagcgatctgccgacatgggcctgggtgtcccatttaatattgcatcttatgcactcctgacatgcatgatcgctcatgtttgtgaccttgttcaggtgattttatccatgtaatgggggatcacatgt

SEQ ID NO: 8675 - DNA, 366 bp, Glycine max
gtacaaccactggggtgtcagctcacgatagggcaacaacagtcttggcccttgcgtctagagattctactccaggcgatttcaaccggccaggccatattttcccactaaaatacagggaaggtggtgtcttgaagagagctggacatacagaagcttctgctgatcttgctgtacttgctggcttggatccagtggcagttctgtgtgagattgtagatgatgatggttccatggctagactgccaaagcttcgccagtttgcagagcgtgaaaatttaaaaattgtatctattgctgacttaataaggtatgcagttacaattcatggaccatgtaataaaattcattgcatgcatatttatg

SEQ ID NO: 8676 - DNA, 408 bp, Glycine max
cccacgcgtccgtttgtgttcttttattagtgccaacaaatattggttatcattaatcctatggtgcgttcctctttaattgttggtatcagcttatttttcccttctccatgctccaagcactcaatcttgtaatcttgacggcatgcatttccattattgaaagcatatagttgtgccttttcattaattgctattgcgggatatactctggctgtgatgcaagccctttcctatcctacaaaactcttcactactgagcgatcaatcaaagagtaacccaatatatgattaatgataaccaatatttgcgttcttttattaatgccaacaaactttattattactgtactactatcaccatagtgcttgtcattcacgttaaaagcaataattctatcagaaaat

SEQ ID NO: 8677 - DNA, 367 bp, Glycine max
acgcacatatgcgaatgccgggctggtggatgaagcaatctctctgtataagagtattcctcggtttaggtgtgtgaattggacagaatccttcaacaccatgttgcagataatggtcaaggagaaccggcttgaaattgcacaccggctttttgtggagagctcttgtggttaggaagtgaggtctctggttcgagcattgaactggcttatgtatgctctttgtcaaaagagtcgctctgatctggcattgcaattattccaagagatggattatcaaagttgctaccctaatagggatagatatgcaattttgatgaagggactgtgccaagacaggatgttgcatgaggccacccatttgttg

SEQ ID NO: 8678 - DNA, 414 bp, Glycine max
cacagatatgaaaccggggaccatgttggtgtttactgtgagaatttgtctgaagctgtggaagaggcgataaggttaataggtttgtcaccagatacctatttctcaatccatactgatgatgaggatggaaaaccacttggtggaagctccttgccacctacattcccaccctgtactctaagaaaagcacttgcacaatatgcggatgttttgagttcacccaaaaagtctgccttgcttgccttagctgctgatgcatctgatccatctgaagctgatcgactaagacatcttgcctcacctgctggaaaggtttaatattttattattttatatcaagggaattttaagtaactttttctacttatttttctcattcgtatgctactcttgtgtgcctttgtaggatga

SEQ ID NO: 8679 - DNA, 413 bp, Glycine max
  modified_base (297)..(297): a, c, g, t, unknown, or other
attacgtcagattgtggagcagtctctatcattcacgatgagcaaggttatgcaaaaactgcagaggacgctatagccgatgtctttagggcagggatggatgtggagtgtggtgattacataaccaagcatggaaaatcagcagtgtcccagaaaaaactgcccatatctcaaatcgatcgtgcccttcaaaacctcttctccattagaataagactaggcctattagatggaaaccccaccaagcttccatttggcacaattggtcccgatcaagtgtgctccaaacaaagcctncaactagccctcgaggcaacaggggatggcataatccttctaaagaacacaaactcacttcctccaacttccaaaaacaaaccccactattgccttaataggccccaatgccaatg

SEQ ID NO: 8680 - DNA, 311 bp, Glycine max
tacgactcctgaatataaattgcgtttgttgatgatttatgcatctgtctgtcctgaaaggtttgattgtgataaagcttcaaaactaatgcatttgtcaaaactatcacctgatgacatgaaagttatcagtaatatgcaacacctgccggtatcattaatctgaaatcatctgctacttgttggtactcactcaagttcagtaatccatagaccaaacaagcaactcgcaaatatcttactgaataagaataaacatggcaattatctcgattttatcccatgttaaaagatctcattgaaaatttaat

SEQ ID NO: 8681 - DNA, 469 bp, Glycine max
aaatacagaattttcttgaccaagctgttggtgctagttgtgagggattaagtattaaagcattaaatgaggatgctacatatgaaccttccaagcgatcactcaactggctaaaactgaagaaagattatatggacagtataggggactcactagatttggtacctattgctgctttccacggtcgtgggaaacgtacaggagtttatggtgccttcctccttgcttgctatgacaatgataatgaagaatttcaaagtatttgcaagataggaacgggattctctgaagctgtgcttgaagaacgttcttctagtcttcgttctaaagtgattcccaaaccaaaggcatactatagatttggagaaacaataaatcctgatgtctggtttgaagccagtgaggtgtgggaggtgaaagctgccgacctgaccattaaccctgttcaccgtgctgcagtgggcatagt

SEQ ID NO: 8682 - DNA, 320 bp, Glycine max
aatgtctataaaaaaaataacttctcggttcttctaaaactcaatactaatgttaaaatagcgatcctcatgaaaaacaactgatgataacaaatctctttctaactgtaagcccttcttcttcacctgcaacaactgatcataccaaccaacctaatattcatgtctatcctaattgctctgccatgcactattatctaccaagaattatcattataccatactgcaactcaactgaaactacatgtcattctccacacccatacatgttattaccaccacatcctattatactaccttattggccaccttatgcaaca

SEQ ID NO: 8683 - DNA, 337 bp, Glycine max
  modified_base (164)..(164): a, c, g, t, unknown, or other
cccacgcgtccgcgcactcgtgcacagcatccttcgctttaaactgtttgtgtgtctatgggctatctgcgaaccgaacatgtcatcgacaaagggttctacaagctcaacgagaactccagcatacattcactaagcttgtcaacctgctattctcgtattangctatgcgaataatcactggtggtcttcatcatggtgggataccacctatattatcgagctcaaactatagagatcgatacgacattgcctaccattgaataatctgttagactgggaatacaataacataagattactgattgacattaagctggtcaatactgaacatgct

SEQ ID NO: 8684 - DNA, 278 bp, Glycine max
ttcagtacaccaagatcctgtcgttgcaacatcaccaacccggcatgcaatttcagcacacgaagtgatgtatgagctgctcggatgttccctcgaggaggcaacatttggttcggtgcttgcttcacgagcaattagagcagctcattgtctgacttcaattcatttctcacctacatctgagcacatactacttgcgtatggtcagcgccatggttctcttcttaaaagtattgacattgatggagaaacaacttttcctttatgtacaatggtaa

SEQ ID NO: 8685 - DNA, 290 bp, Glycine max
ctctctgtgtatttccctacctctcccttcaagatgcatatcttcatcaataccctgaccggcaataccatcagccttgatgtggaaagctatgacaccatctacaacgtctaagccaagatccatgacaaggaaggaatcctccctgaccagcaacgtctcattttctcctgaaagcaacttgatgactgacatacccttgctgactacaacattcagaacgagagtactcttcacctcgtcctacgtctacgtcgtggcatgcagatctctcctaaaacactcaccgt

SEQ ID NO: 8686 - DNA, 384 bp, Glycine max
  modified_base (300)..(300): a, c, g, t, unknown, or other
cccacgcgtccggagagggaagacggttgtggggattcgatgggggccaccgttcactcgccgctagtcacttatgcttccgtcatatctctgcttacactctgtcctccgtttgtcatacttctgtaagtaataatctcatttactctctctctgatctgaaatctgaatgattgaattgcgttgcagatggtacaccatgactcttgctgacggatctgtttccgagacattccattatttaaggcagaatgggttgcaaggtttgctacatatatggcccacccccactcccaccgnctgcaaaatcattgcagtctatgctgcatttgaagcaacacttcagcttcttcttcccgggaaaaccgtttacggccctatttc

SEQ ID NO: 8687 - DNA, 421 bp, Glycine max
acgggcaaaggctagattcttgtatggagagtccatgggaggagcagtgagccttctttggataggaaggacccttcattctgggacggtgcagttctcgccgcacccatgtgtaaggtatgaactactaataataataaaatttttcaacaatattgttagtctaagaaaatgaatcatactaatggaatacaaataattcgagtaactctataaattgcattaattgaataggcactttttcctacgtaaaaattaaacatggcttattcaaatgttgaaacactaagccagatatcatagaaggtgaagccacacccggaggtggtcaacatattacctaaggtcgaggatttaatcccaaaggggaacatagtcccaacaaaggatgtcatcaattaagccttaaaagaccctgcta

SEQ ID NO: 8688 - DNA, 425 bp, Glycine max
acttaacctcaatttccaggtaggcgtacgcatgcaaattaataatatcgaccaaaatgatgatttctttactaacatatggattaagaatgtcgagtttctcaaaacttcgtactgtcaatcctttttatactatgctgagacctgtaatatattttcattctaaggtatccattgcaacttctttactgcgagcaatagctaccaaatgcattcccaaagccatgttttaacatatcactgacaaagcaatcaatacaattatactcacccaacatgaagcaagacgtcttgctcacaattctattggaacaaaccataatctatattgtattatctgccaatgaactcctattgctgctaaagtacttaagtcaatgcggatcaaccttcaagattcaccaatcgaactataaaaaataatt

SEQ ID NO: 8689 - DNA, 363 bp, Glycine max
agaatatattgagtatcttattgacacttaaagatgtgagggatgatcatggaaacgagcggactgataccgagattgaaggactacttctgaacatgtttacagcaggaactgacacatcatcaagcaccacataatgggccattgcagaactaataaaaaacccacaaattttggccaaactccaacaagagttggacaccgatatgggtcgagataacagtttcaaagaagaggacttggcccacctgccatacttacaagctgttatcaacgaaacctttaaactctacccatcaacctctatttctgtgccacgtgctgattccgatagtagtgagatatttagctaccacatcccaa

SEQ ID NO: 8690 - DNA, 244 bp, Glycine max
atcacatcttatgcaatctattacattaatatttatatatatactattaaaattgggagaggttacaaatactggtggaggtgtttaaacaatattataattaatatttatattaacaaatatttacaaatgtattaaatactaatgacgaattattaattctactatataatattatatttaatatataatattttaaaaaataatatgcttcaatataatatttataaaacattaaattaat

SEQ ID NO: 8691 - DNA, 384 bp, Glycine max
acgtttagtttcaacatcccatttatcgttgattctagtcaatcagactagaattacgatcaggtatgcaaatcacattctagtgtaacagagtgtggacatcataggtatcactgctttattcaggcacaagtacacaacggtgaacttagtattttccccaagactttcgtgtatctttctcattgtttgcatatgatgccaaagtacaagtctgactgcgctacagttaatgcacatctgaagaaaaattcatggttaccaagaagtaccattaatcctaacacatatattttgaaagatcatgcaactaggtatcggttacgccatctagattagatgcttaatccacatgatcaaaaaatatttaagacccggtctaaa

SEQ ID NO: 8692 - DNA, 413 bp, Glycine max
agcagcttgaggatggacgtacacttgcttattacaacattcaaaaggagtccactctgcacttgttactccgtctgcgtgcgtcgaatacaaatctttgttaagaccttgaacctacagacaatcaccctttatgtccagagctctctacaccatcgacaatattcatgctaaaattcaccacatacatggtatcccaccacaccaacaactgcttatatttgcatcaaaacacctagatcatatccttacattacatgattacaatatacacatcgaatctaccctccacttggagctccgtcttaatcatgagctgcaaatatctatcaacaccttgcctcatcagacatttactcttgacatcgccatttctaaccccacttacattgagacatctaatattcaacaca

SEQ ID NO: 8693 - DNA, 404 bp, Glycine max
gtttttcttcacagaagcaccttctagcatgaggtctttggccacatcactctcttgggccgctttggctgtagggtattaccttagttcagcaattgtgtcaattgtaaatagtgtcactggcaacacctcacatagaccatggctctctgggacaaaccttaaccactaccacctagagaggttttactggctcatgtgtgtgctgagtgcgttgaatttcttgcattacttgttttgggctatcagatacaagtatagagggacaggaactacaaacaactgaaaatgaagaaaaattacccaaagggaagttttcaaaatgggatatagataaagccttatgtttaattaccaagggcattaatcaaaatatatattttcgagccataatattatgcttc

SEQ ID NO: 8694 - DNA, 401 bp, Glycine max
cggatattgcctatgtttcatttcttgaaaggttccaaattgtcttctctgaaatttttgagcacgacatcacagcaggaagacccaaactagccacatggattcaggaggggaataagatcgatggttataagcagacaaaagttgacagggaggaatatctggaagctttcaagaaaaagtttttggcttgggcctgatgagtggcagtgggctggcttgttgctgtgggctggcttgctgttgtgggctacttttctgatagaatgctttttcagtttaaaaatgatgtgttctatttgcttgttactttgacttctcattaatgcttttgtatgggaacatccaaatgtatagtcccgcaatctataataaataagttgaagacaagtttgacttgg

SEQ ID NO: 8695 - DNA, 310 bp, Glycine max
cccgggcgtgcgactacgcgtccgattttttgactttcttgggcagatcacagactcgggcaggagatactctaaactgcgaaaaaaccactgcgatcaatggcaacgatcaagggcgacaaagctcggcagatcttcgacagccgaggaaatccaaccgtggacgttgacggtactctcatcgatggaagtcttacacagagacagcagtgcgctagcggagcgttaacaggtgtgatatgaggcttcggaattaatggatcgacgctcatactacgctcggaaaggtgctctcaatgctgaggagaat

SEQ ID NO: 8696 - DNA, 465 bp, Glycine max
aagaaattcaactctctccaaacatgcctctgatagacacagaaaactttccatggcggggctttaataagatcttctttgaccatcttgtgcaagagatgaaaactttggagttaggagagtggtggctttgcaacactacttatgatcttgagcctggagcattttccgtatcaccaaagttcctacccattggcccattgatggaaagtgacaacagcaaaagtgcattttgggaagaagatacaacttgcttagagtggttagatcaacaaccacctcaatctgtcatatatgtttcctttggcagtttggcagtaatggatccaaaccaatttaaagaattagctcttgcacttgatctccttgacaagcctttcatttgggttgtacgtccatgtaatgacaacaaggaaaatgttaatgcatacgcacatgatttccatggaaagcaaggtaaaatag

SEQ ID NO: 8697 - DNA, 321 bp, Glycine max
actcttgcgtatgtacctcacattgtgttcatatctttacgtcgactcctaaccacccagaacaggatccattcgttctgcaccatattcaaaaagttattaagccaaatcgatatataccgttacgagactatccaactgcagaccttcctcatgaaaggttctataacaactaacaaacgatcagtcataacttttatcacagaagttatggaactcttgcttactatacatcaactgagacctcgacatatatattcaaacaacttacttactatgttcacacacatcatgtatactgcaaacaagttgataaccctt

SEQ ID NO: 8698 - DNA, 146 bp, Glycine max
acgcggactcgtgggctgacgcttgggcttacgctttggcggacacgtgggaaaaaaaagaaaaagtaaaaaaaaaaggaaaaaaaaaaaaaaaaatataaaaaaaataaaaaaaaaaaaataaaaaaaaaaaataaaaaaaataa

SEQ ID NO: 8699 - DNA, 445 bp, Glycine max
cccacgcgtccgcccacgcgtccgcccacgcgtccgaagaaagaaatgactgggttggggattggtgtggcaagcatgaaagctggggagcgtgcgttggtgcgtgtgggctgggaattaggatatggagaggaaggaagcttctcttttccaaatgttccacccaaggcagatttagtttatgaagttgagctcattggctttgatgaaacaaaagaagtaagttgccattaaattatggatggctgtggacttggttagatgcttatagcacctgatttcacaggggaaagctcgcagtgatatgactgtggaggaaagaattggtgcagcagaccggagaaagatggatggaaatgctttgtatcaggaagaaaaactagaggaggctatgcaacagccattgcatatatgggagatgacttcatgttccagttgtttggga

SEQ ID NO: 8700 - DNA, 214 bp, Glycine max
acggatttgtcgtacaggatggtcttaatgtcgtatctttattccttgtctataaaattggatatgtattcaaaaaaaaaaaaaaaaaaaaaaaaaaaaaaaaaaaaaaaaaaaaaaaaaaaaaaaaaaaaaaaaaaaaaaaaaaaaaaaaaaaaaaaaaaaaaaaaaaaaaatatatagacaaataacaaaaaagacaaaaataaattaaaaa

SEQ ID NO: 8701 - DNA, 211 bp, Glycine max
attcacgcgttcgattcttgcataattgatatggagacatgataatggatgactcaaatgcgagtgtggcacattgtccacaggtaattgtgtaaaaaatcgttaatatattgatgaatgccaagagaatatggcttgtcagtgcccttaatgttgcttcaataatacctttagcttctacgactgcacatctaatctacatcttcacctt

SEQ ID NO: 8702 - DNA, 377 bp, Glycine max
gaaattctgggactttgaaactgcaagcaggctagatagctggatagtgcattccggcaacggctgctaacatagccacttgtgcacctgctaaaagggggaacgccaaaggcactgctcaagtgatcgctcaatgactgacggactgtgatccggtcctcacatagtacacaactctgaagaacgaggcggatatgcaccacacacagcttgacttgcagacaacacatctgcataacacactggaaaatcatgctgcgacgccttggtacataggacatcccttttatacccatcagacatatgctatgcccagtcatctaaccttacaaggcacggaccatgtcaccgaaggagacattggctcacatactatt

SEQ ID NO: 8703 - DNA, 340 bp, Glycine max
ttctgatctggacgtaacctttctctttccttgggcaatatctctcaacaagactgatctgtgtggattttggcctatgatggcctcattatcgattgtgacgatcggattcatctatgaacggaacaggcatgctttgtattgagagtaatcactaccgatcggcgcccaactgtgacgaaggaccctgaaagagcgatgcctacattgcatcaatggattcgccatggatgaccacatacacagctcacagaccgtactctagctctgcatcaatgtcctcagaagcatggagtactcctgcatcttataacgagcacaccgtataagcctaattcat

SEQ ID NO: 8704 - DNA, 466 bp, Glycine max
gtgcatcaccccaaaagggatgtgggacattatagtgaagcataagagtacgagttgggtcaactaaatgaagatttttcctttcagcaacacgattttgttgtggtgtttgggcacataaggtctcatgaagaattccttgcgaggttagaaaagaacgaaattgggaggacaaatattcatgggcattattagtgcgcaaagtcttaatggaaacaacaaattgattttgaaattcatgtgcaaaatcttgaaaaatgaaaaacacaccagaacgtcttttcattaagaaaacccaatacatttgaaaaaatcatcaataaaggtaacaaaatagaaataacccaaggttgaatagacacgactaggaccccaaatataggagtgaactaaagcaaaaggtgacacaacacatttattgacatgatgactatcagtatgacggacatgtttgcctaattgacac

SEQ ID NO: 8705 - DNA, 383 bp, Glycine max
ctgaaacttcagaagcggctcgccgctagctttctcaagtgcggtagaggcaaacttcggcgtgaccgtaacgaggccaatgaaacctccatggataattctccactaaacatagagcaattggctaaagatggcttcattatcaggaagccaactaagattcattccccttcccaaactcgcaaaatgaaggaagccaacaggaagggacgtcactctggttatggtaagcgtaacggtacaagatatgctacgctccccaccaaaatcctttggatgaggatgatgcgtgtcctcatacaattgctacacaagtacagggaatcatagaagattgacaaacatatgtaccatgatatgtacatcaaggtaaagggtaatgt

SEQ ID NO: 8706 - DNA, 448 bp, Glycine max
gccacacctccgggtaggcgcacgatacgccttggtttgcgtgcgtggcacagaataattaggagcgtctataacaagcatggcacacacactatacgaccttatgtctgcctataggttggagaaacttgatgagtacattatctcacgcatgtacatcaacgggtaccaagctgcaaaggatgatcttactgcatatgcaaccttgccaactgctacatcagatgaatatggaaatgtgtgcacgtggtacaagcacatcgatgctctgctgagacatctctagtgatcatggctagggatctggtggtatagttgagggatccctgggtgcagaacctgacacaactccgacagctgctgacactaaggctggtatagctgaagatgacgatgatgacgatgtcgatttgattagtgaatagacttatgaagacatgaacgcaac

SEQ ID NO: 8707 - DNA, 326 bp, Glycine max
ctagcaccatttccaaacaatacccatcaatgtctttatccctcatcgatcatatattcattgatctgtatacaaaatcctcagaaactactactctctgccatgaccatggaatacataaccttataactcatcatcatatacgcaaaggacatcaacaatggtaatcttttatccaaaatggacgtatactccgacgttttgctctgcatgaaccctcttcacactcatgactccaccactcacatccacaaagactccagctgcaaccctacgtagcactaccccgtgaaactatccttcaacgaatcgctatctatggaaaa

SEQ ID NO: 8708 - DNA, 325 bp, Glycine max
cccactcttccgtccacgcgttcggcaagatctctattgactctaaggatgtcgatgtgacggaatggaaaggggacattctggcagtgggcgttacggagaaagatttgtctagagatactaactcgaacttcgagaatgcgattctgagaaagatcgactcactgttggatggtttattaactgaatcctcttatgaagaggatttctctggcaaagttggtcagtcaactgatcttagaattacatgacttggatcaaagaaggttgtattgattggtcttggtcaatcaccttgcactccttcaccctttaagggtcttgt

SEQ ID NO: 8709 - DNA, 351 bp, Glycine max
cccacgcgtccgcccacgcgtccgatgcaagcaaggttggtgctactgtgaccaagttggggggctcaaatgtcacccatgtaattgcagcaactgatgcacatggagcatgctccaagacgttgaaagttctgatggcaattctaaatggacgatgggttctaaaaatggattggataaaaacatgcatgccagagataaatcctgtagaagaagaaccctatgaaattaatcttgacaatcaaaggtgtcaaagtggcccaaaagcttgcagacttaaggcattggccaatgagcccaaactattcagtggcttaaaggtttatttttctggagaatacgtgtcaactt

SEQ ID NO: 8710 - DNA, 470 bp, Glycine max
cccacgcgtccgcccacgcgtccggtggaaaattaatgaaggtcaagcacaagtacaggatggcaacaaatttaacaatatctgagaaaagaagatgctcttccttggtactcctggaagggaggcccaaagattctccaaaagcagagaagactggtgtccacatcctttcaaaatccgaaattgatgcagagctatcaaaaatgaagggtgtgacacctcaagaggcggcagcggcagctgcgaaagcagttgcagaggcagaagctgccattgccgaggctgaggcagcagctagggaggcagatgctgcagaagctgaggcagaggctgcacgagtgtttgcgaaagcagcaatgaaggcactaaaatgcaagacacttcgtgtttgatggtgttagcttctgcattgcttacatgaggagtatatttggcttgagatcataattctgctgctagactttctgcat

SEQ ID NO: 8711 - DNA, 310 bp, Glycine max
ggatcatgctagttaatatatgaaactgctttgaaagtatacagagcgaagcttttgggctggactaccctacatgtgttcaggtgcgtctgatatgctagagactatgctcatctgttatccatacaggcgacttacacattgtgacgcgttgagccaatcatacatggcacctgtccatgacaccaatgtgtaacctgtctgcaccagacctttgattaattactttcagcatccataattcactgattaagacattacggtactcatctcgagagaatatgaccagcccaatcctgtaccaccagtc

SEQ ID NO: 8712 - DNA, 308 bp, Glycine max
ttgactcttcctctgttccgcttctctttcaatccagccctcattcctaatccttcaatccaaccacctcatccttacactcacatatacacatatcttaacccctatcgtccctcctattgcttcaaaactcatcctcaaagaactcaaagactttcataaagacccaccaacttttttcaacgcttgtccattttctgaagacattttccattttccatcaacaattaattatccttcttatattccttattcttgaagtttattcctaatcactatttactttccttccgattatccttttaaac

SEQ ID NO: 8713 - DNA, 399 bp, Glycine max
cacttacgtcctctcaaacgtcctctacttcttacattacaaactcctgatcttaataaaacagccacgtttaaaatcctggtatagcaaatcaccttcccaaagtcatcaaataattcaaacccaatataactcttaaaccatctaccccaaatcctgttcaatcaaaataaaatcaacctgtcaatatgaattatattaaaaataattcacttaacaatacttctactccttcaacacattatacttcttaatttactaaataaatgtcttttaaaattccttaaatttctactttaaacatacttttaaatttcttcttccatatataatacaataactcttttattaatataatttattttttttttcctttatcaatatttatttcttcatttt

SEQ ID NO: 8714 - DNA, 189 bp, Glycine max
gggggggggggggggggggggggggggggggggggggggggggggggggggggggggggggggggggggggggggggggaggggggggggggggggggggggggggggggggggggggggggggggggggggggggggggggggggggggggggggggggggggggggggggggggggggagggggggg

SEQ ID NO: 8715 - DNA, 355 bp, Glycine max
tctctttcaatccatgcctgattcctaatcctccaatccaaccacctcatcctcacactcacatatacacatatcttaactcatatcatccctcctatggcttcaaatctcatcctcaatgatctcaatgactttcacaaatacccaccaacttctttcatctcttgtccagtatcttattacatgttccattttcaatcaacaataattattcctgcttataatccttattctttatctgtattcctaatcactattcacttcccttcccattatcctttcaaaccttctaatgttacctttattactaatgtgtttcaccctaacatcaatatcaattgtaacatttttcttt

SEQ ID NO: 8716 - DNA, 417 bp, Glycine max
  modified_base (296)..(296): a, c, g, t, unknown, or other
  modified_base (333)..(333): a, c, g, t, unknown, or other
  modified_base (363)..(363): a, c, g, t, unknown, or other
tggtaaatcatttacaagcaaagtattgaaactaagaaaataggaaaactattaagatcatgggatattaggaaatattgaaactaagaaaataggaaatattaataactattaagatcataagattccatcattcactagcttaattatttatactaataactattaagatcataagatattaggaaatattgaaactaagaaaataggaaaactagttctacgagataatctctaacattccctaaaatattctatgacaaaatctaaacattattggatactgtaaataattntaagatactactataatataaaaatgtataaaatgcnaagcgatgtccacataggcagattcacatnattgcattaactttcaagaaattcgaatggatatggggtggtgtttaatctaca

SEQ ID NO: 8717 - DNA, 150 bp, Glycine max
gccttggtcagcgttgagccaagctctacgaatctggcgcacgtattgccaaatggcgtgcagggctgaagaatgggcccaacgagccatttgaactgtctatccatgaaaacggctattgcttgggttgatacgctgtcatatgccatg

SEQ ID NO: 8718 - DNA, 427 bp, Glycine max
cccacgcgtccgcccacgcgtccgcagtttctgcagcctggatcaacaaatcggtacacacatgcaatgatgtggaaaggagggaaggattggatcttggaatttccggataggagtcagtgggctcttttcaaggagatgcatgaggaatgctacaaccgtaacatccgttctgcttcagttagaaacatacctattcctggtgttcatttgatagaagaaaatgatgataatggatctgaggaaacttttattcggagctgtatgtactttcaacaagttgaagcagatgctgagatggctttggatccatgccgtgttctgtatgacatggatagtgaggatgagcagtggatttcaaatgctcaaaattctcgtaaagacaacagtgaattttcttggatctctgaggagatgtttgagaaga

SEQ ID NO: 8719 - DNA, 307 bp, Glycine max
ataaatatgtttaattgaaattcaattttatatactgcactgcaatgtcttccacatcgctaggagttgcaatgacatcggccatgacatctgcactatccataccaatatactatgcattactcgatcataatctaccatcaatgcactaacttgtggactacaatctaacaaattccatatcttcaatgcgtatatactatccagattaacaaacactttacgcccttatagattcactcttccattatattctcaacgtttctaacgaaacccattcatcaatgacagacccctttgctgctac

SEQ ID NO: 8720 - DNA, 363 bp, Glycine max
acgcttaaacaataatcataatgggactgagtaagtatttgaatatcttcttctaaacaaaggtattctaaaaaaatatattagaaaattaattatttataataaatccatatttataaatatatcattataaatgaaagaaatcaacatattagattatactataaatcatgaaataaatatctgtataaatctcaccatggaataaatatcttgaaatatgtagtataattgataaactattatttttcctcttacggagcaagttgatccgtgagaggaacaataagcctgggcacttttgccatgtctgtagaaagctgggtgcacctagcgacagtctccaaacaaagcaatgatgac

SEQ ID NO: 8721 - DNA, 216 bp, Glycine max
gttttattgtgccaatttctagagatgatataattatattatgatcgcgcgtgctggtaatgcgtgggttaaaaaaaaaaaaaaaaaaaaaaaaaaaaaaaaaaaaaaaaaaaaaaaaaaaaaaaaaaaaaaaaaaaaaaaaaaaaaaaaaaaaaaaaaaaaaaaaaaaaaaaaaaaaaaaaaaacaaaaaaaaaaaaaaaataaacggacaaaaa

SEQ ID NO: 8722 - DNA, 356 bp, Glycine max
cggactcgtacgcccacgcgtactgttacgcttccgaaaaaaaaaaaaaaaaaaaaatggaaaggttaaaaaaactaatatgaaaatgaatatattaaaaaatcaaattatttttaaattaattaattttatacattataattgaatatcataataatctaaaattttatacatgtcaatattgatcaacaaatattaaacgtattgacacactgtattaattacaactactatttattccactatatcatattgttaaaatgtattaattattgacatttagctatattaaaaaccaaacttatcatagaacaaatggtttaatgtttttttcaatgttttaacactattgacac

SEQ ID NO: 8723 - DNA, 243 bp, Glycine max
gattgagctagtgtccagggttagtttcaaacattaattatttcgatgttgactaggctagtgggcatattgtaatcaagagtgttgatgctgaattagctgatgaggccgggaaatcagtgccacttcatgaatattatcttgacaattgggctatagtaagaaaccatcaatcccaaaatgtgtcacagattaatgaaacagatcatattgttatagtgagaagcagtggcttttgccaag

SEQ ID NO: 8724 - DNA, 333 bp, Glycine max
aaaaaaaaaaaaaaaaaaaaagaaaaaaaaaaatttaaaaaaaaacagagaaaacaaaaaaaaatgaagatacaggaaaaattaaataaggacaaaaaaaaaaaaaataaaaataaaaggggttgccgcaacaaaggtccaaattttacgtacccgattatgcaactctttatctattcataagggtccctaaatttcaataaactggcctacttttaacaacgtcacaactggaaaacccctgtatgctcccaactaaatatccttgcagaacatcacctttttccaaactgtcttaaaatccaataggcccgtaccgatcgccattcctaa

SEQ ID NO: 8725 - DNA, 391 bp, Glycine max
cgaagactaatagggtttgtaaggcttatacggttagtagggattgttatttgtttagctggggttttacttctgatgatgatggtgagggtgaggaagatggtggtgagggtttggaaccttcctcgccggggacgccagagagggatgtggaagagaattttgagcttagtgagaatgatggtgtgaagaaaatgaagaaaattagtgagaatgatggtgtgaagaaaagaaagaaaattgatattgaggatggtgatgagggttacttgagtagagggaagtgggagttattgaggaaggatgggtttatgcagggatgggcgaaggtgacggcgtgtgattatcatagagggctggatatggtggttgttgaattttctaatggtgt

SEQ ID NO: 8726 - DNA, 280 bp, Glycine max
cccacgcgtccgaaaaaaaaaaaaaaaaaaaataaaaaaaaaaaaaaaaaaaaaaaaaaaaaaaaggaaaaaaaaaaaaaaaaaaaaaaaaaaaaaaaaaaaaaaaaaaaaaaaaaaaaaaaaaaaaaaaaaaaaattaaactaaaataaaaaaaaataataaaaaaaaaaaaaaaaataaaaaatgtaagggtggatgataaaatgaattaactaatatttttataaaaagaatcttataaacattaaacttttgatgtacgaagaatcataatatact

SEQ ID NO: 8727 - DNA, 162 bp, Glycine max
acgaaaaaaaaaaaaaaaaaaaaaaaaataaaaaattaaaaaaaaaaaaaaaaaaaaaaaagaaaaaagaaaaaaaaaaaaaagggaaaaagaaaaaaaaaaaaaaaaaaaaaaaaaaaaaaaaaataaaaaaaatataaaatttataaaaaatattatgat

SEQ ID NO: 8728 - DNA, 382 bp, Glycine max
  modified_base (276)..(276): a, c, g, t, unknown, or other
ccttctcttattctgctgctcatgctcttcctttcttctttgctggaaccacctactcaaccgggaccaatcttaatccacctgtcttttgccaacttcaatccaggccaaaaaaaccgctgccaaaaaggtgttccccctttctagaaaggtcattactctctggtaatggtggtgtggcctcaaaccagtggaaagctgttcctgatatttggagatcttctgctgagaagtatggtgattaaatagcattagtagatccgtatcatgatcctncttcaactatgacatataaacagttggaggatgcaatattggactttgctgaaggattgagagttattggagtaagacccaatgagaagcttgcgctttttgctga

SEQ ID NO: 8729 - DNA, 170 bp, Glycine max
tcccgttctacccactcgtcctaaaaaaaaaaaaaaaaaaaaaaaaaaaaaaatttaaaaaataaaaaaaaaaaaaaaaaaaaaaagaaaaaattaaaaaaaaaaaaaataaaaaaaatataaaaataaaaaaaaataatttaaaataaaaaaaattaaatttttaatat

SEQ ID NO: 8730 - DNA, 261 bp, Glycine max
acgcttaattgatcaagaagtcgtggatttaactgatgctaatacttacgtgaaccttggtgatacgtgcaggtgtacatgcggtaacactagtagaagctatgatcactgcttgaacatagagcattcgctaataggcagatgcaggtactatcatcgatgttattgcacatatatacattgattcaatacattcagtataattagaatcaaatacatgcagagatgtttgataaaaaatgtgtctactgtatactatat

SEQ ID NO: 8731 - DNA, 391 bp, Glycine max
attgtatactgttatttccatcatcaatcacatctgcttgcccaattctgtgtagttcgttgagggaatctcacctttggtacttgccgtgcatcatataccctcaagtactgaactgctgataagttacatatagactgctcaaagcactattactcgtcagatggctctcaaagatcattacctatacacttgtacatgtcctacctgttctaaagtgggtcactataatgatatccaacaaagtgcaattctaaatggatacaaatgcaaaactgaaaaatgctttggtttcttgcttagtaaaactgatgggaaaggattccaatgcacaggttgtggactaattacgcacacggaggatataactacaattacacctgaacttaaa

SEQ ID NO: 8732 - DNA, 280 bp, Glycine max
aaaaaaaaaaaaaaaaaaaaaaaaaaaaaaaaaaaaaaaaaaaaaaaaaaaaaaaaaaaaaaaagaaaaaaaaaaaaaaaaaaaaaaaaaaaaaaaaaaaaaaaaaaaaaaaaaaaaaaaaaaaaaaaaaaaaaaaaaaaaaaaaaaaaaaaaaaaaaaaaaaaaaaaaaaaaaaaacaaattaaagaaccaaaaaaaatctaaaatgaaaaacataacaaaaataaaaaaaagagataataacataataaaccaagaaaaaaacacacttaccaaaaat

SEQ ID NO: 8733 - DNA, 332 bp, Glycine max
tcttcctcttactcttaggaaaaaaaaaaataaaaactattactatataaaaaaataactataatatatacgtataagtcataaattaaactacagaaacataacataataaaaaaaatcaataatatcataaataatgcctcatacaaaacacaatcaaaccttccatataaaatatcaatatattaaacatattcaatccatacttaatattaatcatattctcttcatatactatgacaaacctattcaagaattgtaacataaatcatcatatcaatataaacacactcagattatacccattctaaataattcatcttaccttcccc

SEQ ID NO: 8734 - DNA, 291 bp, Glycine max
aaaaaaaaaaaaaaaaaaaaaaaaaaaaaaaaaaaaaaaaaaaaaaaaaaaaaaaaaaaaggaaagaaaaaaaaaaaaaaaaaaaaaaaaaaaaaaaaaaaaaaaaaaaaaaaaaaaaaaaaaaaaaaaaaagaataaaaataaaaaaaaaataagcactaattacataaaattgaaaatcataaattattacaaaataaacatataattaaaattaattacagtaaattaaaaaactttaataaaaaaaaaaccctgaagtacaaaaataaattactttgagacaaatta

SEQ ID NO: 8735 - DNA, 348 bp, Glycine max
ggaaaaactgttttctgaaggtgaagttagaaattggtgttttcaagttttccaaggccttgggtacatgcaccagcgtggatacttccatcgcgacctgaagcctgaaaacttgctggttaccaaggattttatcaaaatcgctgattttggcctagcccgagagatcagttcacaaccaccctacactgagtatcgtgctcctgaggtgctgcttcagtcttatctgtatacctctaaagtgacatgtgggcaatgggtgctataatggctgagcttttctctcttcgtgcttttttcccaggtgccaatgaaagctgatgagatttacaaaatatgtggtgtgat

SEQ ID NO: 8736 - DNA, 456 bp, Glycine max
  modified_base (347)..(347): a, c, g, t, unknown, or other
agttcaacgagtttgcaaccacacacaaaaaccatacccttcccgatgtcattgccgtcgccggtgtccacggtggtctccgcagccgcgccgtacgaccgcgccaaagcggtgaaagagttcgacgaaaccaaggtcggagtcaaaggtttgatcgattcgggaatcagaaccatcccccctttcttcgtccacccgcccgaaaccctagcggacctcaagcggggtgccgaacccggatctgtgcaggagatccccacggtggcgtggtggagaaggtccggctggcggcgagcaccgtggggttcttccaggtggtcaaccacggcatcccggaggaactcctncggcggacactggcggcggtgaaggcattccacgagcagcccgcggaggagagggctcgggtgtaccgtaaggatatagggaagggcgtgtcgtatatttctaacgtgg

SEQ ID NO: 8737 - DNA, 324 bp, Glycine max
ctaaagtctcattttttatcgacaattacttatgcaggaaataagatatctgtatcacgagtagtcttgattgttgtccctgttgatgtatcgataattctcttgttatgtgtctgctatttcatattgaaaagatcaaggaagaaatacaacactcttctaagggaaaattacggggaagaaagtgccactttagagtcgttacaatttggtatggtcacaattgaagctgccacaaacatgttttcctatgaaaagagaataggtgaaggaggattcggagtggtctataaaggtgttctccctgatggacgagaaatagct

SEQ ID NO: 8738 - DNA, 285 bp, Glycine max
tctccgcccactcgtacggtttttacttaaatcttctatatccttctactattctacgtgacgggtatattcactatggaagatgacgtggctctgctagatttctggcctaatacatttgggatgaacgtcaggaatgctcttgctgaaaatggtatcaaatataagtccaaataagacgacttgcataacaagatccctttgctcctcaaaatataaccctgttcacaagataatccctgttctcatacacaatggcaaacccattagtgaatctctcgttgc

SEQ ID NO: 8739 - DNA, 221 bp, Glycine max
attccctgctctacccactcttcctaaaaaaaaaaataaaaaaaaaaaaaaattaaaatttaaaaaaaaaaaaaaaaaaaaacaagcaaaatgttaaataaaaaaaaacaaaaaacaaaacaaaaacaaaacaaaaacaactaatacaaaaacaaaaatcccttcatatccccacacttcaacacctcctaaacccataattcaaccttttcttcatccac

SEQ ID NO: 8740 - DNA, 441 bp, Glycine max
  modified_base (411)..(411): a, c, g, t, unknown, or other
tattacccccctcttcatagagtgaatgggtgatttgtagagtctttgagaagagtcggtgtgggaagaaaatgcatgttccaaagtgtgggaggttcaacaacccctttggagaggaaccatcatcaggtgcttctctattgcctcctttgatggattcttctccatacaacagtgaaacaagaaccaccactgctggggagttgtctcaggtgacatgcttctctgatccaaatcaaactgaggatcagaacaacacacatgatgacattgttgatagcatggaaactcctattttgaacttctcacccttttcaaggcctgatgatgcatccactttggccaaagcaacccttttctcagccctaaaccaatcagcacagattgcacaccaaattggggaatcacagntcccagattattggtatgcgcctcaagaac

SEQ ID NO: 8741 - DNA, 434 bp, Glycine max
cccacgcgtccggccctcgctccgattcctaggaacagggttttcagttttcactgtggcattaagtttccgagctcaattcagcttccgattcgccgcgcgcaaaacgacttcgtttttggattttggcgtcgcgtcctattcagaagctatatactataagatgagacgaatgaagaaagatattgaagatgaggtgcttcccaatgatatgagtggggcacagttgaatgatgagagttatgaaggaagtgctggcattgttctgaagaaggggccatggacatcaactgaagatgatattttggtggattatgtcaagaagcatggggaggggaactggaatgctgttcagaagcacaccgggcttgttcggtgcggaaaaaggtgtcggctgcggtgggccaatcacctaaagccaaatttaaagaaag

SEQ ID NO: 8742 - DNA, 327 bp, Glycine max
gctggggatgtttattggttaatatttgggtatgatatacttttgtcattttgtaagttcataactttagaagccttcaactgaaatcctatatgaagtttacttgcttgatttgaaatatagtggaaactcctactttttgtgttcatgtatccagtttgatgctgcaaagataaggaagcttagaccaagctttaaagaagttgggggttctgtgactgctggcaatgcttctagcataagtgatggtgctgctgcattagtgctagtgagtgaagagaaggcacgtgagcttggattgcatgtaattgcaaagattaaaggata

SEQ ID NO: 8743 - DNA, 371 bp, Glycine max
gccactcatccgctccttcatacttttcctcccttaagattctactctatcactcgcatcacacacactcgtacactctcatactctctctctctctctctctactacctatcaacaccaagccatcctaccctaatctctcaatgctaaaactcgcaacctcctccatcctcaccatcacctccctccaccttctctcctccaacatgccacactacccattccatgacattcctccttctctaacacacttgactaaactcatctccaacatctaccccccgaatactccacttacacacattaatcctatatcacccactccctcaactctccctttcattctcacaacccactacattcacccctac

SEQ ID NO: 8744 - DNA, 317 bp, Glycine max
caagattcaacaaggacgtagagaaagctcatacctatatactactaaacaaccggaaggaagcaaactagtctactgggaactggaagaaaaacctccagcaagcaacttgcaaccaacactacacttaactatacaccatcaactgtgtgtgagaacaaccctcatcggtatcaccatggaactgatgctactacgaaaattaggaaataccagatcagcactcatctactaatcaagaatcttacttcacagacgtcaattctaaaaatatcccaacataccatgactgctctgcgagcacatatacttactaa

SEQ ID NO: 8745 - DNA, 359 bp, Glycine max
tgattcccagcgaaggaagaagcgttaccaccgtcacacagctaaccagattcagaggcgggaatcgatgttcaaggagtgtccgcacccagatgagaagcagagattgcagttgagtacggagttaggcttggcgcctagacagatcaaattttggttccagaacaggaggacccagatgaaggctcagcatgagagagctgataattgtgcactccgggcagagaatgataagatacgtcgtgagaacatagccataatggaagccttgaaaaatgttatctgcccctcttgtggtggtcctcctatgaatgatgattgctattatgatgaacagaagttgagattggagaatgccc

SEQ ID NO: 8746 - DNA, 366 bp, Glycine max
tatgcgctcaatcaactaatgggtcgtctcggtggccatcacacattctacttcgtttgatgtatatgtgtcgggggaaggccctcatcatcatttggaacattgaccatgtctactcttatacacccactaccactggttacacccttttacaatctctttggcatacccttaccttttaactataaataagctatccatgttcataaatgttacatgctgcatgtgcagtatccctggttccaagtctaactctacgatgaactttactgattaaccaccatctatattgaacgcttctatatgacatcttctcccattcatgattcagcaaatgcagcatgcctacattgaattttaatttac

SEQ ID NO: 8747 - DNA, 463 bp, Glycine max
  modified_base (102)..(102): a, c, g, t, unknown, or other
  modified_base (180)..(180): a, c, g, t, unknown, or other
  modified_base (258)..(258): a, c, g, t, unknown, or other
  modified_base (277)..(277): a, c, g, t, unknown, or other
tcgattttaattactcttttaattcttactatataaaaatattagtctacaaattagttatgaaggtatcaattacttcttttattacgaaattattttatngataaacttagtgtatgaattattctgttaatatatttcatagtctaattataatctgataatactgactcatatttntgatgccaaaagagcttaaattaacattacaaatataaagggatagaaacttaaaaatatcaatgttcaatactatanggagattaaaaaaaaatanaaatacattagactaaagaaaactgacttttacaaattataagaagattaaaaaacaattgaaaatataacattatgcgaaattaacaaaaggtaaaaatgggagaaacctattgtggaagtaatttatactttagacaagttaaattcttattttattacatgtaacggatatttgatgcttgtg

SEQ ID NO: 8748 - DNA, 276 bp, Glycine max
acggaagcagaaaccaatcacatactgaatcactaaaatgtcaaatttgccccaatcactggtcagggggcacagactgtcgggccgtgtagcagctccaacgccttcttacactggcttcccacgagcaaactgctctatagcgtcacctaatctcaattaactggccgtcgatcaacaacgtgctcgacctgaaaaaccctgaacttacccaaatcaatctccttgaactatataccaatatggacatatttcaaaatatcgataaggccctat

SEQ ID NO: 8749 - DNA, 441 bp, Glycine max
cccacgcgtccgcccacgcgtccggacgccaatgcatccattcgggaaagtgaagggtgcagggtttgagtacatgacaccgcggaggtcaaacttggcgaacatggggcatgtggtgataacggagtctgagctggggccgtcgccatcggatgtggcggcggcgatcgcgaggaagccggtgatcgacgagggggagaattcaacggtgggagggtggagcttggacgcggagagcgtggaggggctgcagtcgaagctggagaggtggcggacggacttgccgccggtggtcgatcgctgctaggtctctagctacccaacgacgagcaccaccaagacgagccggcactcgcggaggcacaccgacggcgggagtactgggagtggcttgttctcatgctgtagtaacatatgtggtgttgaatgctacgttggttg

SEQ ID NO: 8750 - DNA, 478 bp, Glycine max
cccacgcgttcgcccacgcgttcgcccacgcgtccgtataaatccaggttctgcaaccggtgcgctacagcagcatcacttatgatgtgaacccaagttttgtccttatggacatcgatggtctgcgagttgtggtttatgtatacgaacttattgatggagaggttaaggttgacaagattgattttaagaaatcatccacaagccactctgctcattaaacactgggattttggtctactctcttttctctttctcttatttggctgtttagttttctttttactccttcaaacttttcaagggtactgtttttagttgtattttgctttgtatgtacacttgtatttggccatatcataggattcttaggatttggttaatatgtgatctgcgccaaacgtaacgactgattgatcagcaatggctgtgtattactactccttttacaagttgcccagagatgatatgcaaccat

SEQ ID NO: 8751 - DNA, 469 bp, Glycine max
cgccatctccggcggaagccgcaaccgcaatcggcatctcggcgagaaccgcttctacagtgggccgccggtgaggaaacacagagagaagcaggaacagcagcggtcgtcactgtcgagagcttcctcggagaataggcccggttcctcttccgattgttcaatttcttcgcgcgccacatcggacatgtccaatttggatcggttgttggagcacatcacgccccttgttcccgcccaatattttcccaagacgaactcgaggaggtggaaatcgagggaagcggaattgcatccttactttgagcttggggacttgtgggagtcttttaaggaatggagtgcttatggggcaagtgttcctatagtgttgcatgggaatgaatcctggactcaatattataacgtcttcttgtctgccattcagctatatatcgatccgtacaagcccttcacacgacttaggaaa

SEQ ID NO: 8752 - DNA, 430 bp, Glycine max
  modified_base (405)..(405): a, c, g, t, unknown, or other
cgaaggctccctcgccggaagacgtctccgtcgagaaactccgggatgttctcgccgaactggatagggagcggcaagcgcgcatcgccgcggagaatacgaagtcggaattgcaggtttcgttcaacagattgaaggcgctagcacacgaggcaataaagaagcgcgatgagttcggtcgccagcgagacgacgccgttcgggagaaggaggagacggcgaagcaattagaagaaaccgcgaaggaacgcgacgcgctgcgatcggagattgggaattcgagccacatgctggtcacgggtatggagaaaatctcggcgaatgtcagcagcttcgccggcaacgcgctgccgctgccgcggtcacagaaatacatatagacttgtatataaaaaaaaaaaaatnttttattaaaaaaaaaaaggggggc

SEQ ID NO: 8753 - DNA, 343 bp, Glycine max
tagaaaaaaaaaaaaaaaaaaaaaaaaaaaaaatataaaaaaaaaaaaaaaaaaaaaaaaaaaaaggaaaaataaaaaaattataaaaaataaaaaatttaaataaaaataattacataatttttatttttttttatattatattaaatttaattaacttttattatttttttttaactttatttattttttaaattttttttttttcctttttaatcgcctttatttttattctcttttctttacctttcttatattcttttattcccatacccttttcccttattaactttttctcatatttaatttttatttttaccttccctttatcttttcattaatt

SEQ ID NO: 8754 - DNA, 374 bp, Glycine max
acgcgtgcgctaaagttacacttgcggttaaacagttgaaagcccaacaccgcttgatggtgagtggggcacctatacagaatagcagtgtggatttgtgggccctttttgattttctgatgcctggatgtcttggaactgagagacagttgcaaggcgcatatggaaaaccacttttagctgcaagagatccaaaatgttctgctagggatgctgaagcatgagcacttgctatggatgcattgcatatgcaggtaatgcctttactccttcgtatgacaaaggatgaagtcttgtctgaactgggcgggaaaataattgaagacagatacttgtgatttgagccctgtacaatttaaactttatgaacaaat

SEQ ID NO: 8755 - DNA, 126 bp, Glycine max
cccacgcgtccggtatggtcatatatgactgctataattctctaccataaccgggcgtgccgagagcattgaaagcacctgatgcaggtcacccaaatggaacaactggccacatgcaccacaact

SEQ ID NO: 8756 - DNA, 450 bp, Glycine max
gttcatgccaaaggtggtatattcttctgtcagattgttcatactggaagggcgttcgatcgagatcttaagcccgatggacaaaccttaatatcatcaaccaacaagccatttacacataatgccaccgaaccaacggcactaaggacggctgaaattcctgatatcgtcaatgaattcagacttgcagcaaggaatgctattgaagcagggtttgatggagttgagatccatggggcacatggttttctaattgatcaatttttgaaagaccaagttaacgacagaacagacaaatacggtggatcattggagaatcgttgtcgttttgcattagaagttgttgaagctgttgttgaggagataggggcagatagagttggaatgagactttcacccttttcagacttcaatgaatgtagtgactcaaatcctcaagcattaggtctc

SEQ ID NO: 8757 - DNA, 435 bp, Glycine max
accagacgttcgagcacgcaccataatcagcattgcatatagactaccatcaggggtggacggacatacaatgatggaagcaaatgcactgcggctcatgctactcgatacaccgccctacttgctgaagcggccatctttatccgaaacgctattgcatgagtctgcagtccggaacacgggcctataaaagagggccatgcatccatctatatcatcaattcacacgatgacagagaacccaacttaggcctagccatattagaaagcattgatcatgcaagcgccacatgcaacgacaacggcattgtacttgctagaggggcagacaccatccagaatatcagatgctagtacaagtgaagagcgagcacacatggagaatcggctgtctaactacactgtggcttacgaagctctaggatacgctcaacc

SEQ ID NO: 8758 - DNA, 430 bp, Glycine max
aacttaactaataaggattggccaaatggcctgggtaattatggagtccctgggaaaaggatgaaacctttttctacctaactcaaccgaggcactaggagtggaaattttgaaatcccgtggattcttcactcagtcatactggtactggataggtgttggggctttgattggatatacattacttttcaactttggctacatccttgctctcacatacttaaatccacttgggaaacatcaagctgttatatcagaggaacctcaaatcaatgaccagagtggtgatagtaaaaagggaactaatgtgttgaagaacatacaacgtagcttctctcagcactcaaatagagtgagaaatggcaaaagtttaagtgggagcacctctcccgagacaaaccataacaggacaagaggaatgattcttcct

SEQ ID NO: 8759 - DNA, 289 bp, Glycine max
aaaaaaaaaaaaaaaaaaaaaaaaaaaaaaaaataaaaaaaaaaaaaaaaaaaaaaaaaaaaaggaaaaaaataaaaagaaatcctatataaaaaaatacaaagcttaattacacttacatacctcaacataaactcattctataatataacctaatttaaattatctaatcctcatttaaaaacattttaactatcaaaacatagacataacagagctaaatgccatcgcaataaattatcgttatgtcagttatcctaatactcaacaggcccatacgcaatattct

SEQ ID NO: 8760 - DNA, 389 bp, Glycine max
gtttagtgtgattgagttaaagttgctgaagacaatgagttggacaataatgcaattggaacaatctggaaatccttctatagatattcactgctatgttgatgatgccaataaaattccttaatttacaacaaaaaaaaaaaaaaaaaaaaaaaaaaaaaaaaaaaaaaaaaaaaaaaaaaaaaaaaaaaaaaaaaaaaagggggaacaatttaaaggaagccaaaatttaaaaaacaaagaatacaaaaaaataaaacttaaaataaaagagggcgggccctttttgagggcccccgttttttaaccattcctggcggggaaaaacctttttttacccgccccaaaaacccatttcacggagccgcctttaacaagctggggtttgg

SEQ ID NO: 8761 - DNA, 441 bp, Glycine max
tcgagcagggacaattacaacatctgaaccattgcaaccagtgcaactagtttacgaaacggataccgttgactacttgaactacttgtgttacattggacttaactcaaccacgataaaggtcatctctggaactgctcctgacaatttccattgccccaaggattcgagctctgatctcatatccagcatcaattacacttccatagcagtaaacttcactggcaaagcaaacgtggtcgtgagtagaaccatcacaaacgttggcgaagaagatgaaaccgtgtacttccctgttgttgaagctcctagtgaagtaattgtcacacgatttccatacaatcttgagtttacgagaagtattataaaataagctaccaaggtactttcacaccaaaggcctccttaaagaaacatacgtttggatctatcacttggaat

SEQ ID NO: 8762 - DNA, 450 bp, Glycine max
cccacgcgtccgcccacgcgtccgcttgacaaatccacatcattgtgtctatttttcgaggttgtgaggaaggaaactcctgatgcaacaatgcagtccacaagcaatcaattttacttccaatttttgacgtattatcagaataacagtgggcaaatgagattacgggttacgaccctttcacgtagatgggttgctggaccagaaagtatacaggacttgattgctggatttgaccaagaagcagctgctatagtcatggcacgccaagtctcttttaaaatggaaacagaggctgaattcgatcctatcagatggttggacaaggcattgataaatttgtgttctcggtttggggaatttcaaaaagacactccatcttctttcagtttgtctcccaggttgtcaatattccctcaatttatgtttcatttacgacgctctcaaatt

SEQ ID NO: 8763 - DNA, 308 bp, Glycine max
cccactcgtccgaaaaaaaaaaaataaaaaaaaaaaaaaaaaaaaaaaaaaaaaagagaaaagaaaaaaaaaaaaaaaaagaaaaaaaaaaaaaaaaaaaaaaaaataaaaaaaaaaaaatataaaaaaaaaaaaaaaaaaaaaaaaaaaaaaaaaaaaaggaatcttttaatatgaatcaaattttactataacctttaataaaaatttaaattttttaaaaattttaactaaaataaaataaattgatctttttttaaaaaatttaatatttgaaaaaactttaacttaacaaaataaaatttttt

SEQ ID NO: 8764 - DNA, 416 bp, Glycine max
cccacgcgtacgttcttcttcttcttcttcttgttcttcttctctctggaattttccgtgactggtgtctgcatcgatggcggcgatcagtctccggaaggggaacacgctgctgccgtcggaggtgaaccgcgtgctgtacgttctgaaccttcccttcaacatcacgagcgaggagatgtacgacatcttccgcaagtactgcgccattcggcagatccgcatcggcaccaacaaggacactcgcggaacggccttcatcgtctacgaggacatctacgacgccaaaaccgacgtcgaccacctatacggcttcaacgtcgtcaaccgctacctcatcgatctctactaccagcatgcgaggatgagcatgaagttccatcagaagaagaacgtggacgagatcgcgcgcatgc

SEQ ID NO: 8765 - DNA, 371 bp, Glycine max
taaaaaggcttcatttacttcttactgtcaaggagtcggctatggatgttccatccaggttcgatgctatgaggcgtatctctttcttctctaattcattgcttatggatatgccacctgctcccaaagttctgaatatgatgtccttctctgtcttgacaccttactttaacgaacctgttcttttctccctaagtcatctgcgagagccaaatgaatatggagtctctatactcttttacttgcacaagatatttccaagataatggaaaaactttgttcaacggtttgataatataagtgaagagaaactcatagtatacaatgaagaagaacttcctttatgggcatcatacagaggccagacattt

SEQ ID NO: 8766 - DNA, 414 bp, Glycine max
cccacgcgtccggtggatacatggctggtatattgtgtgccactgtctctcatcccgctgataagctcgtctctttcctgaacaattccaaaggggcaacggttggtgatgctgtaaagaagcttggattatggggtctgtttacccgtggtcttcctcttcgtattcttatggttggaactctcactggagcacaatggggaatatatgattcattcaaagtttttgtggggctgccaaccactggtggtgttgctcctgctgctgttcttgctcccgcttctgctgcttagcttgcaaaagtgtaaaatctccaatggattagcatgataacacttcgataattgtgtttcataaacacataaaaccaacgaatgtatggaccataaatattcagagaacttctgaagttga

SEQ ID NO: 8767 - DNA, 454 bp, Glycine max
ggaatgtggaagaggacatttgaaaatttggtgacataaatacttctaacatgctagggtgtaggatttaaattaagtttcttgaattctgtgtgcaggttttggctcattgggtctcatgacttctgtgctgttatcttctgatggcaagacattagaagctgaggcagctcatggaactgtaactcgacattttcggtttcatcagaagggacaagaaactagtacaaacagtattgcttccatatttgcatggacaagaggactggaacatagagcgaagctggataataatgaaaaattacgggattttactcaaaatttggaggctgcatgtgttgagacagtggaatcaggaaagatgactaaagatcttgcaattctgattcatggacctaaggtatcaagggaattttacttgaacacggaggaatttattgatgctgtggcacat

SEQ ID NO: 8768 - DNA, 451 bp, Glycine max
atggttatggcggtcccttgtatgcaggaactggttgctttcacaagagagaggctctgggtgggatgaaattcagtgatcaatattgcaatgactggaatagtgaagatgatcagtttaaagaagcaaacctgcaagaactagaacaacaatcaaaggttcttgcaagctgcaactatgaggaaaacacactatggggaaaagagatgggtttaaaatatgggtgtccagtggaggatgtgataacaggattgtctatacagtgccaagggtggaaatcagtgtactacaacccaccaaggaaggctttcttaggtttagctccaactaccttgcctcaaacacttgttcagcacaagagatggtctgaaggagacttgcaaattttgctttctaaatacagccctgcatggtatggttttggaaggatcaattttgggctccaaatggg

SEQ ID NO: 8769 - DNA, 379 bp, Glycine max
gtcaaaattacatttaccattattttcaaatattaattttctaattaatcattattcttaattcatacaattcttccaatcccttacattaaaaaaacatataaattcaaatccaatattatatatctttcttctttccttttaaacctataattctaatacattcttaatttactttcctaccctttactttttaactttttataaaataatacattttattctttatattaattaactcatactctctaacaataactaactaacttattaatatttatatttatttttaatattttcaacttaacattattttatatcactttttactaaacctctaatttcatatatatttattttttataatactttattctaa

SEQ ID NO: 8770 - DNA, 402 bp, Glycine max
aattttaaaaaattacttttgaagaataacattaattattacaagtgttaccaacaacggtttaaaaacaatgtatgtatttgggggaaaaatatatcttttgaaataattaatatttttaatgaaatatgaatttcttttgtctctattttttgtaatatctttatttttaaaaataaatctagatatttaatattataatacttgatagaacttaaaatctttcaagattaatataatatttttttaatccatctccttccaaagttttcaattattcaatcaatacaattttaaaactatagtcctactaataaaaataataatatataatatcatataataattcaaattaataacaaataatagtatatttttaaaaagtgtgaaatttatttgggg

SEQ ID NO: 8771 - DNA, 363 bp, Glycine max
cccacgcgtccgcccacgcgtccgaaaaaaaaaaaaaaaaaaaaaaaaaaaaaaaaaaaaaaggaaaaaaaaaaaaaaaaaaaaaaaaaaaaaaaaaaaaaaaaaaaaaaaaaaaaaaaaaaaaaaaaaaaaaaaaaaaaaaaaaaaaaaaataaataaaaaggaaagaatataaaaaacaaaaaagagggaaaaaaaaagaaatataacaaatgaaaataaaatgaaaaacaaaagtcgtataacgaaaaaggagataatagaaaaaacccgggcaaagatcactttatacaatttgggcacactaaatatggaaaaggagacgcacagtgtaagggggcttaaagcgaagggattgcagaa

SEQ ID NO: 8772 - DNA, 468 bp, Glycine max
  modified_base (404)..(404): a, c, g, t, unknown, or other
gaatttaatgggttggtgttgatttctttctgcaggagtcaagcaagagcatacagattgaagcatttcatgttttcaagctatttgctgccaaccaacataagccagctgatatcgtcagtatatttgttgcgaacaaaagtaagatgctgagactattggaagagcatgatcagagggaaaagaaaaagagtggccattgccgtgggaggcgaaaaactcatcaaagagcaaagtcacccgtgaacgtggtttctcacaccccagtaattccagattttcttttgtagcattaaaggaagctggttagagggaagcatcgagttaagttctccattctttttcggaaaatctgaagttttggctttcactcccccctcgtatgtcgggtgaatccatgactngctattatattatgttcaatcccgggatggagatgattcagatggtcgattgtagatgcttctt

SEQ ID NO: 8773 - DNA, 331 bp, Glycine max
aaattagccatcattagaccttttctaaaaaaaaaaaaaaaaaaaaaaaaaaaaaaaaaaaaggaaaaaaaaaaaaaaaaaaaaaaaaaaaaaaaaaaaaaaaaaaaaaaaaaaaaaaaaaaaaaaaaaaaaaaaaaaaaaaaaacaaaaaaaaaaaagaaaaaaaaaaaaaaaaaaaataggggaagtggatatagaagaataaggtgtacgtcgcggaggtgaaaaccatagagtttattaaaggattacgcaatgtatataaagggggccgaggttaaaaaagtagctaactagtaaaacctatgggatccccatagtaaaatactga

SEQ ID NO: 8774 - DNA, 377 bp, Glycine max
aaaaaaaaaaaaaaaaaaaaaaaaaaaaaaaaaaaaaaaaaaaaaaaaaaaaaaaaaaaaaaagaaaaaaaaaaaaaaaaaaaaaaaaaaaaaaaaaaaaaaaaaaaaaaaaaaaaaaaaaaaaaaaaaaaaaaaaaaaaaaaaaaaacaaaaaaaaaaaaaaaaaaaaaaaaaaaaaaaaaaaaaaaaaaaaaaaaaccccaaaaattaaattaaatgaaccaaacttaaaaaacaaaacccctggaaaaacccattttttccccaaccaaaaaacctataaaaaaacacccttttaaaaaactaacataataccaaaaaagcccgatccaaaagcctttccaaaaatattcccaaactaaatggccaatgaaacc

SEQ ID NO: 8775 - DNA, 274 bp, Glycine max
tcgcacgtgcattagcccacgctatcggttggatcatacagcaatggccaacaggtttaattctaaggcccttgttaacaagtatcatccggtagacattcttcactcgtgatgccgctctcggttatcatgactacctcaacaccgacgacgtgcactacaatgacagccgatcctacgaccacagctccgtcattgatcgccacttctaacgctgtatacctataactgcactccgggacgatctattctcatatcgcgtggatccacatgc

SEQ ID NO: 8776 - DNA, 472 bp, Glycine max
tgtagcagtactaagctcaggtggaaggagaagcatgttgaaactggcgcatcgcatgacggacaatatgtgttacagtgtgtgtgcctgcacagtgcacaagtggaacaagctgaacgccaggcacgtcgcagaagacgtgagggtgatcaccaggaagagtgcggacgacactgtcgagcacgccggcatcgtgctaagcactgtcacctgagcgtggattcccgtctcgttgcacatgctgtttgacttgctccgcgactagctgctccaaaaccagtgggatatcctgtgcaacagtggacccatgcatgagatggctcacattgcagatggacatgaccatgctcactgcgactccctccgtagagccagtgctataaacgcgaaccagaacaccatgctgatcttgcaggagacgttcaccgacacgtgcagctagcctgtggtgtacgctccggtggacattccg

SEQ ID NO: 8777 - DNA, 471 bp, Glycine max
ggttgcctgaacagcctcaagcatatatgatttggaaatccattcaacaatggactgagaaatctgcttcaagagctggggttatattgcctgatcttacttctggggctgaaaatgtacctgtttgtcttgtgaatgatgttgataacgagaagggccctgcatatttcacttacatcccaactctcaagaatttgaggccaactgctcctgtggaatcttctactggatgcccttgtgttggtggatgtcaatctaaaaattttaactgcccttgcattcaaaagaatggaggctatcttccatattcttcagctttgctacttgcggacctaaaatctgtgatatatgagtgtggcccttcttgtcaatgtccttctaattgccgaaatcgggtttctcaaagtggcttgaaatttcgtttggaggttttcagaaccaagaataaaggttggggtcttagatcatggg

SEQ ID NO: 8778 - DNA, 141 bp, Glycine max
aggctacctaggcacctttagactaggaaggtcgtcataggcgacaaattgcttcggggagtggaaattgggcgttaatccgggaattcccgttttaggtcaactctttaaactgctgctaaatccactaacaggctgaaa

SEQ ID NO: 8779 - DNA, 471 bp, Glycine max
gtttgagtcaaacagcacagaggataggtatctctcaccaaagcttgggaaaataacaacaggaagctttccagcattttctggtctttttgctatcttaatggcagctgcagctgcagctccagatgatattccaacaaataggccttcttgaagtgcaagaagctttgcagtttctattgcttcatcacttgatatttgaactacttcatctacaaggctaacttccaatactccagggacaaaaccagcaccaatcccttgaatcttgtgtggaccaggttttcctccagagagtactggactttcaactggttccacaccatagagctttatattaggattcttctctttaagaaatttccctgcacctgttatggtaccaccagtgcctataccactaacaagtgcatcaactttccctcttgtgccttaccatatctctggaccagtggtttcataatgtacctt

SEQ ID NO: 8780 - DNA, 415 bp, Glycine max
caacaatattcaatctcatacacagaaaaatgggtgctttggatcacatctctgagctctttgactgctcccacgccagctccaagctcaagaagaaacgcaaacaattccagacggtggaggtggaagtgaagatggactgcgaagggtgtgaaagaaaggtgaagaaatcggtggaaggggtgacagaagtggaggtggatcgacagggtagcaaggtgagtgtttcggggtacgtggaaccctcaaaggtggtttcacgcatcgctcaccggaccggccttacgtgaaatcgttatgtgaatctgatgtgaacaccacaccacaccacaccttatcctgtcttattggttagtttctctttccctttggtgttctttttcttggatcatatcgtagtaaccaaaaagaaaaa

SEQ ID NO: 8781 - DNA, 288 bp, Glycine max
gcgcccacgcgtccgcccacgcgtccgggaaatgcttccacccattcctgtatctagtgcggcttgcactcggggctttgaagccatgtctgccacaagagagtcatttgcatcacttcaaaaactgagagttggccattttgattcccctctacctagaacaccagcctgagatccttcccaaaaagtaccaagagtttctgattgtctaacaccacctgcatggaaaactgaaacaaacttttatgacttacgcatcaaaaaccaatgaaagcaacatttagatca

SEQ ID NO: 8782 - DNA, 237 bp, Glycine max
attttatataaaaaaaaaaaattaaaatataaaaaaaaacatataaaaaaaagagaaaggatatattaaacgataaaaaataaaatcaactaaaacaatttatccttcttctattttacaaatccctagttacatataccgactacttcatcccaaaagctcttgattccttcaatattgtttaaatcatttaagcaaatggtctcccatgaaccatcattaagatcactttccttc

SEQ ID NO: 8783 - DNA, 426 bp, Glycine max
tgatctggtaccttactattaggtctggtttaagtcgattatagtgctccatatatgcggtaatttattgtctttgactttgttatcttttattcacattcttgtatttccttttatgcaggaaaatgcagatatcaggggccactgatctagcttctaagggacagggtgcatcagatagcagtagtgtaaaggttaaaagtgaatttgatgatgcctttcaaccagatgtgaagattcgctgtctatgtggaagtagattggaaacagagaatttggtcaagtgtgatgatgcaagatgccatgtgtggcaacacatcagttgcgttattattccagagaaacctacttgaaagcatccactagtttctgataaaatttattgggaactctgtcggcttactcgtgcagattcattttgggttc

SEQ ID NO: 8784 - DNA, 187 bp, Glycine max
acgaaaaaaaaaaaaaaaaaaaaaaaaaaaaaaaaaaaaaaaaaaaaaaaaaaaagggaaaaagaaaaaaaaaaaaaaaaagaaagaaaaaaaaaaaaaaaaaaaaaaaagaaaaaaaaaaaaaaaaaaaaaaaaagaaaaaaaaaaaaaaggggagtgggataaaacatggcaaaaccaaaaacaa

SEQ ID NO: 8785 - DNA, 430 bp, Glycine max
tcgcccacgcgtccgctaaacctctctgctttcaagaatttagaatggcttgagggctcaagctgtggactacaagggactatcccatctgatattggtgcctatgggagcgtttatagggcacaattaccaagcggcaaaattgttgccgtgaaaaaactccaccgatttgaagcagaggtgccagcttttgatgagagtttcagaaatgaggtcaaagtattatcagaaataaagcatcgacatgttgtgaagctccatggattctgcttgcacagaagaatcatgtttttgatatatgagtacatggagagaggcagcttgttttcagtgttgtttgatgatgtggaagccatggaattggattggaaaaagagggttaacattgtgaaaggcactgcacatgctctggcctatctttatcatgact

SEQ ID NO: 8786 - DNA, 320 bp, Glycine max
cggacgcgtggggtgctgctggagctgctgctggtgtagtggttcttctaatagttttggggtttgtgatgctgaggcgcagaaggaggcatgttgggaccggaacatcagtggagggctcattgatggcatttagctacagggatttgcaaaatgccacaaagaatttctcggataaacttggaggagggggctttggttctgtcttcaaaggaacattggctgattctagtatcatagcagtgaagaagcttgaaagcattagccaaggtgagaagcagtttagaacagaagtgagtacaattgggacagtttaacat

SEQ ID NO: 8787 - DNA, 255 bp, Glycine max
aaaatttaaaaacttataataaattttactggtggcttaaatccatcaatattcataagtaaaaaaaaaaaaaaaaaaaaaaaaaaaaaaaaaaaaaaaaaaaaaaaaaaaaaaaaaaaaaaaaaaaaaaaaaaaaaaaaaaaaaaaaaaaaaaaaaaaaaacaaataaaaaaatccaatcattaaatcaaaatgcaacaaaaaaaaaaacaaataaaaaaactaagggaaatgaaactaacaggccaacgttta

SEQ ID NO: 8788 - DNA, 333 bp, Glycine max
cccacgcgtccgttgacgcgtgggcaagcttcagtttgtcccctgcgtcttattacttggcggttgtgtggtgatatggttcaagctgggagttctgccatggatgtccgtgacagattaagaggattgtctgaacatgagagtatttgcggttctaggactgccccctgtgattcttgtgggcgttctgagatgtttaaggacatggacattcaccaggttgctggtcatcaaaaaggctaattctgatattttcatcttaacagcaacttgtgaaagattgcatctaggtaataaatcgaaaattaacagaaactggaggaaattgaaaga

SEQ ID NO: 8789 - DNA, 417 bp, Glycine max
gccgacgcttttattcctcttcaaaatttcgacatctatccaagcgatagacactctggtctatggaactagtagcggagtgcgaacgaactctgtacccatacattactggatcctctgtacttcctatcaaatacaaagatggtattctaatgaccgctgacatgagatgttcctatggatctaccctgcggtataagactgtctagcgtatcaagcctattataaagcattctcttctaggtgctacctgtgaaataagttactatcatgaaatattccgctaccttgacgagcttatcctttatgacaacatgtacaacgatcgtaattcattagggccgaatgacgtgcataattatgtaacccgtgtcatgtataatacacataacaagttcaatccattgtccaattcac

SEQ ID NO: 8790 - DNA, 270 bp, Glycine max
tcccacgcgtcctacaaaaacaaaaaataatatttaaaaaataatattaaatataggaaaaaatggtaaaattataaaataaaaataaaaaaaataaaaaataaattaataaaaaaaataataataaataaagggctcccttttttttgtatccatttttttattctctttctttctatttatcttttctttttttttatatcctaacttcaattctttttctatttttctaaaatttctcaatctgtaaatccttttctttcccctttt

SEQ ID NO: 8791 - DNA, 353 bp, Glycine max
cacgtgctcacgattagacatgtgttgaaactgatggatatggacaactgaaagaacatcgggcctccggaccaaaacttccaggacgaagaatacgacggatactgcttccaatgactgtcaaacgaatctacaagactcaccccaacacgctctgacaccaacaatgggcccgatctgggcacacgcacccaaaatgtgctggaggatacatatactgctgatgtgatacagcgtctcatgaaagtcgcttttacgcagatcaatatgcctattcaacaaacagatgctgctgtaagagctgatggtcaagacgctgctggccggagtgcaatgcttgctgctgcacataa

SEQ ID NO: 8792 - DNA, 456 bp, Glycine max
  modified_base (419)..(419): a, c, g, t, unknown, or other
gagaacggggaaaccaacctcgatgatgttgaagctgtctttaaagattctgaagagcaccgtgtgagggagaagaaagaagagcagcctacagccatgaatgcatttgagttaatttccatgtccaaaggactgaaccttgaaaacttgtttgatacagagcagggatttaaaagggaaacaagattcacctcaaaatcccctgcggatgagataatcaacaagattgaggaagctgcaaaacctcttggctttgatgtgcagaagaaaaattacaagatgaggcttgcaaatgtgaaagctggaaggaagggaaaccttaatggtgccacagagatattccaagtggcaccttctcttcacatggctgaggtacggaaggcaaaaagagatacattggagttccataagttctacangaaactttcaacaagccttgatgatgttgtctggaaa

SEQ ID NO: 8793 - DNA, 395 bp, Glycine max
gaatcgacggaccggtccactcgtccgcatggtatactgtactcatgctctcatccaatttaaatctaatctcattggcaccagaaatgatcatgtatacacggggcgtatactcttactgccaatatcaggagctcgtcaagcacaactattgaaatggcgacattaataccgctatagaattactctgaagtggcagctgccatatcgaaaattgacaacagtaaacatatacctgaaatcccagagcatctttcgaacgatgcacaaaatttgatgacgctatgctgacaaagagacccataagctcgaccgacagcccataagctactagaccacctattgattcgacatcaatcggcatcaaaagctgcaaatgtgagcataaccagaga

SEQ ID NO: 8794 - DNA, 302 bp, Glycine max
gaccaaatgctttgtataccattgattggagttgtgcattccataccattcgagggatatacggtctatgccagatgctgtacagtcctaattttttgagccaccattatgactaggaatgagttgacgagattatggaccgttaggtcgctggccaccatttctctcttccaatcattgccgaaattgacttgtacaagttcgacccatgggttcttccaagtggagcgattttctgtgaaaacgagtgttactttttcagcctcagagacaggaaataccctaacgggtctcgaaccatc

SEQ ID NO: 8795 - DNA, 409 bp, Glycine max
gttcatgttccagtgattttgtgactaggaatatattccatttaccaagtgacccttttatgttgatggctaagtttgccactttgctttggtactccttttggttcaaacattatgattctttcttttttaaacttttactatttgataacgtacagggtcccttgccgaaagagagagggcatcagattcaccatcaacggtcactcatacttcaacctagtcctaatttccaacgttggaggtgcaggtgatgttcacgcagtttccatcaaaggatcaagaacaaattggcaaccaatgaccagaaactggggtcagaactggcaaagcaacgcctatctcaacggacaaagcctctccttcatggtcaccactagcgacggacacaccgtggtctctaataatg

SEQ ID NO: 8796 - DNA, 394 bp, Glycine max
gcggttggtcctaaatcagttggagtgtgtcttttaacttcagcttttgtgggcatggccttcacgattcaatgggtaagagagttcaccaggttgggattgaatagatcggtaggtggggttttagctctggctttctcaagggagctaagtcctgtggctacagccattgtggttgcagggcgcattggaagtgcttttgcagctgacttaggaactatgcacgtttctgagcaaactgatacattaagagttcttggttcagaccctgttgattatctggtgacaccaagagtgttagccacttgtattgcgttaccccttttgaccctgttgtgttctacattacggatggcatctaatgcccttcttgctgatgggtgttattgggtga

SEQ ID NO: 8797 - DNA, 477 bp, Glycine max
cccacgcgtccggaagaatgttggtgcttcttactcatatggtgaaacatctatgcaggaataggcagcagaataacattcagtacaaaacagttggacaacgcagttggactgcaatatttcgatggaggaatattcgtaggacgaaatgttataccaatttttctggctgccagatatctgattggagttgtacttctatttgtgttattgatctacaaatggcgacggagacatttgtcaatatatgaaaatatcgaaaatttcttgctggatagcaatctaaatcccattagatacggatacaaagaaatcaagaaaatgactggaggtttcaaagtgaaattgggtcaagggggctttggctctgtatacaaaggaaaactccgaagtgggttagatgtagctgtcaagatattgaccaaatccaatgataatggacatgattttatcaatgaagtagctaccattggaaca

SEQ ID NO: 8798 - DNA, 338 bp, Glycine max
gtctgcttatgaagtctctcgaagcatctttctttctctttctgcagaagctattcgtgttacttgtggcgaagtattcaacatgcaaagtgcatggttgatttggaaatccacgtccgcatcgcattcgacccgtttgccgatggcaagagaatcagatgcccactgagcaaaggagtatgtgcacatactaattcagcaaaggaatgtaaagaagagtcttataacagtgcaagggatgaagaaggagcatagcgtcatgaagatcctcgaggacctgatgaaggacttctactgcaactggactgtggtgcacgacaaggagcttgtcaagatta

SEQ ID NO: 8799 - DNA, 288 bp, Glycine max
gttctgtagctctggtccctccaacttcacttaacttctccctctctatctttctctcaatacggaccaaaagattcattcattggtattattcatacaacaaatcaaaaaatgttacccaacaatccttccactattgatcccgacgcggtggcccggcaccacacccacgtggtgtccccgcagcagtgctgctccgccgtggtccacgagatcgccgccccggtctccaccgtctggtccgtcgtgcggcgcttcgacaacccgcaagcctacaagcacttcgtc

SEQ ID NO: 8800 - DNA, 361 bp, Glycine max
gcgtgcgtataaaaggaaaataaagaaattagcgtcaaaatgccgggtgtgctcagcagctccatagtgtcgccgggggacgagctcgtggccgccggcagccgtacttcgtctgcgaatatgaccgcagctgaactgccgaagcaggtcgaggagaagaacccctacgacgagtcactggaagttcgagagcatgtccagctcgcttatacccagcacaacgagtctgcgattcagcccacatcctttgctgtcaacgatgactgcgcctgctcgtttgaggtagcccttgacagtttgggaacactgatacaacaatatggactgcacaagtcagtcaatgaagtattggtcgtcattg

SEQ ID NO: 8801 - DNA, 425 bp, Glycine max
acggacattactaacggaggtctttatagatttaataaattaataaccagataactatatatagtgtggcacaaggcttttacttatatatctttagtttgaatgttataattctactccgctactaatgctttcctccagaaattttttggcggaaaaaaaaatttgcccaatttaagaagtgacgttgaataattaatatgttcattgatgccaccaagtacctttttacggattaaaccacctcctggaatatatgattccataattacctaaaaatttaatcatttttaattatatataaatattactctaaaatccaggcatggtattatgggtgaaaaatataaatatttttatagagataaataatatttaagcgagagttatatatatttgtaaataaaagagcacgagattttttc

SEQ ID NO: 8802 - DNA, 366 bp, Glycine max
cggacgcgtccgcccacgcgtccggttcactgtaaaatattcttccttccctggtccagtcggaggttggcaaatgggtgttccccatggcatgggtatctcaatgcaatacaataatgtggtgcctgtgccaagttttccacagccatcaaagtcaaatataaaaaattaaaaaaaaaaaaacaaaaataaaaaaaaaaaaaaaaaaaaaaaaaaaaaatacaggacaaacgatctactggattagatgtatacatgacctgactgcaaatttaaagattgactattatataatcaaatctaactagactgtccgcatagtacaacggaaggactgtgaaaaccctggcgaatcgcaacttaatc

SEQ ID NO: 8803 - DNA, 350 bp, Glycine max
acggtgtgacgatggtagatcttcaagccaccgaactttcaggcatgcatgccttatcgggaacaggtagctggcactgccccgtacacatttaaccatcggctctgcatatgcttactgtggtgaacttggcgagaggatcgtgactgctggtcgatacaacgaagatcacgcaagatattgcttgcagcagctaatatctggagtcagctactgacattcaatggtaattggtcataaagatcgaaaagcggcaaacactgtgctggatggaaattcgattcctagcttaaaatttgtgactttggttatcacaagtctgcgctactgcactctgaacctaaatcaac

SEQ ID NO: 8804 - DNA, 453 bp, Glycine max
  modified_base (381)..(381): a, c, g, t, unknown, or other
  modified_base (416)..(416): a, c, g, t, unknown, or other
agcaaatcaggatctgctgcttcagtgcttcttcaccttttgtcttctagcctgtggaatttggcatggagacagagaacggtgacaccaggtccaaaaagatggaagagtatgaagtcatagagcaaattggaagaggagcttttggctctgccttcctcgttcttcacaagtccgagaaaaagaggtatgtgctgaaaaagattaggttggccaaacagacagagaagttcaaacgtacagcacaccaagagatgaacctgattgcaaaactgaataacccatatattgtggactacaaagatgcttgggtggagaaggaggaccacatatgcattataaccggctattgtgaaggaggtgacatggcagagaacatanagaaagcccgagggtcattttttcctgaggagaangtctgcaaatggctgactcagttgttgatagctgtgg

SEQ ID NO: 8805 - DNA, 295 bp, Glycine max
cccacgcgttcgaccacgcgtccgcttgcggttcgggttttagcgcatcttcttgtagattggaggtagatgggtaaggaaaaggctcacatcagtattgtagttattgtccatgttgactctgggaagtccactaccactggccacctgatctacaagcttggacgcattgacaagcgtgttatagagagatttgagaaggaagctgctgagatgaacatgaagtcttacatgtatgactgtgtgcttgataagcttaaggcttatcgtgaatgaggaatcacatttgatattg

SEQ ID NO: 8806 - DNA, 246 bp, Glycine max
cccacgcgtcctcccacgcatccgtaaaaaaattaaaaatacataaaataatatagaaaaaagtgtaaaaaaataaaaaagataataccaaaataaaatataactaactactaccctttacaaatcaactaattacaaataccataccacatcatccctaatgttgtctaagccttcacgagtgttgaaaaccttgaaagtaactgtacccctacaaccatcactaacatcactttcctttaacat

SEQ ID NO: 8807 - DNA, 399 bp, Glycine max
gaaggcatcgcctctctctttggagcaattcatctccattaccgctcctcttcttgacttgggaaaggaagctgagatttcaagctcgatcgccactggtgcgtccaggaatttggatactgctcaaaagaggggttctacaatcctcaacttgaagtgcgtcgatgtccagacagggcttatggggaagtctctgatcgagttccagtcaacaaaaggagatgttcttactgcacacaagtctggtactcatgatgttgttgttttaaaactcaacaaggctgatttaggttctcctgctcttggacaaggtgttgtttacaggttaaaggactcatcaataaccattgctcttgatgatataccggaagacggtttaaacaagtccctaagactgga

SEQ ID NO: 8808 - DNA, 295 bp, Glycine max
atcaggatatattacattaagaaagctccccatatagacgcatatggcttgcgatcgcaaagtgaacagctgacgccctgtgccggattcagtgcactgcctgtgactaaacacatgtctctctggcagacaacaatcataagaccatattgataagaccatatcccaagtggatattgcctaccttcaagtcatttagctcatgactatcccttcaatccaccaaaagttgcttctcggactctagtgttccacccaaacattcaccgtgattgcactctatgtcttgacattc

SEQ ID NO: 8809 - DNA, 446 bp, Glycine max
gcgaattgctaaatcttactgagtacaatgttcatatggccaaacttattgatggaggaaggaacagtatgtccaaagaagatatcttttatggttttacctttttctatattattataattatagttataattataatgaagcaacttctctggatgaatgtgcagaggctgcaatggaattttccatttcccttcttcaaactctggttgttgaggaacctaaagttatttcagaacttcacaatcttgttgatgctttggcaaagcttgctacaaagcctggatgccctgagtcattaccacagcttcttgaaatgatcaagaatcctggtgctatatcctctagtaatgctggaaaggaagataaggcaagacaatcaagagacattaaggtgcctggtctgttacctgcaaatagggaagagttcaacagcattgattcta

SEQ ID NO: 8810 - DNA, 204 bp, Glycine max
cccacgcgttcgctaacggcttctgcaattgtctgcgtctatctctgaatatactctctcgaatggctgcccatactatcgcgcatgctacccttaaaggtccgaatgtcgttaatgagatcacacttggcataacacttggctcatctgctgatagtcagtccaagatgcaccactggaatgaccagacgaaaaccaggacct

SEQ ID NO: 8811 - DNA, 354 bp, Glycine max
aaaaaataataaaaaaaagcaaaaaaaaattttaaattaaaaaataaaaaaaatataaatggggatagttaaaaacaacaatattatattccgtgaacaatctgaaatatcataacatctcttgtcaacatcactttccaagtgtcacctaggtcaaagtcattgtctcgcaatcatataacggaaattgaaagtattactcctagccttatctataataatttaagttcacttttttagctttttctccagtggacatcttacatatgtcgtataataggtttatcaattcataatttttcccgttcttactttatttttttgctttaccaactttatcactttttaatgcac

SEQ ID NO: 8812 - DNA, 439 bp, Glycine max
cggacgcgtccgtccacgcgtccgcccactcgtccgaacctgccagttctgaagaatggagctacgctacatgttaaaaaatctcaggcgtctaaggagagagggttacaagggagcacaataagcagtcctagtgaaatggcacagggaatcagagcagggaaaatagctgaaggaaatgatgcacattctctttctcttcaagctgttgaaactagacagcaaacacaagtcatcaaagttgtaccacataaccggaaatcagcgacggaatcagcagctagaatttttcaatccattcaagaagagagaaaacaacatgatttagtctagtgctgtttatggaggtggagttatttgagttgattttgtacagtgcgtcaagtcctgtactttgttgttgtttggtaatatgtatcttgcttgtttattctactct

SEQ ID NO: 8813 - DNA, 394 bp, Glycine max
gccacgcatccgttcatactgggtgtatgcacattcggggatcaaatcaactgccgagaggcatgggctactatatacaaggacctagttacagatgccgacagcgtgataccaaaggctcttgattccttcaagagtgtcgaaaacgtcaagggaaatggacgaccaagagccatcaagaagatcactttccttgaagatggataaaccaagtgtgtgctgcgcaagatttacagcatatatgaggctaactggggatacagctactacgcacttggtgatactgcattgccagacacagtggaaacaatcacattatactactaaacgcttgctggacccaatggatagtctgctgagaagctcactgtcacatacgaaacaagaaggagat

SEQ ID NO: 8814 - DNA, 455 bp, Glycine max
  modified_base (269)..(269): a, c, g, t, unknown, or other
  modified_base (397)..(397): a, c, g, t, unknown, or other
cccacgcgtccggttctttcttgtgcttttcctagtggccagaaccatagctgcttctcgaagataaagaacatctgatgctattgaattgatctcccaaatcctaatttgcaggccacataatacagaaaatagttcacatcaagatgaacatcctacgctctttttggaacagtcccactggcctcaaaacaactcatttttggggtcctgccttcaactggagcccttgctttgccgcagcaatggacacaaagaaaccaccgganacaatatctgtcaatatgaccggagtgatgtgtgtttattcggcactgtgcatgatgtttgcttggatggtacgtccaagaaacccacatcttcttgtatgccatgtcttcaatgagacagtgcaatngtatcaactctcaggatggttcagagctcaaaggggccttgagcatgacaaaaaggat

SEQ ID NO: 8815 - DNA, 225 bp, Glycine max
cccacgcgtccgctagattcagccacagattcggaggataagaacatagtcctaggagagggcccgtactaagcagactgatcctaagtccacatgaggaaaggctcctatgaagcatctcgctgccaatgctgcacgtaagtctgcactcaactactgactgtgttaagtagccacattgttcccgtcctgttaccgatgctctacttgagattagtaaatacc

SEQ ID NO: 8816 - DNA, 410 bp, Glycine max
cccacgcgtccgatttttcttgacgatggcctcagcatgcacttcttcatctgttgcgttacatctgattaaacatcgtaataatgttatgagaaacagttactgacaaagatggctcaatacgcactcccaacacctgttgcataacatcatgcatttatttcatcagtaacaattgtatgaagccatgaaataatgctatgacaggcagacgaggacaaggatggccgtcttactttgactgagatgattgagaacccatatgtattttatagtgctattttcaacgatgatgaagatgatgacgacgattaccatgatgagttccggtaaattcatgttaggatacccagaaaaagttggcacaattctagtgacacggaatcagtatttgaggataatgacacgac

SEQ ID NO: 8817 - DNA, 433 bp, Glycine max
cccacgcgtccgcccacgcgtccgatttagtgtggctcaagattgtggaaaaccaacaagaagaaaaagatataatcataattatatttcttgatcggtgctccgagtctggccgaggacaacagggaggcctgcatgagctcccccgacctctcctccctgtggctgtcaacgccgcaatccgccactccgggacccgacacgagcagagctccgccgcctccgccgccgcaatctcagtctcctctacaaaggcggttgcagacgctactagaaggagctagagaaagctggacctatgcaattttctgggagtcttctcacgacaacttctccggcgctacccttctccgttggggcgacggctattaccagggcgaagaagaggacaaagccaaaggcaaagctcccaaaacgacgacgtctgcagaac

SEQ ID NO: 8818 - DNA, 445 bp, Glycine max
  modified_base (431)..(431): a, c, g, t, unknown, or other
ctacaacattcactccctctctcttgtcttttcctctacgttcctgcattgctcgtctcgaacgctaaccatggccggcggaggtttcaccagcggcggcggcgccggagatttcgaggccaaaatcactcccatcgtcatcatttcatgtatcatggctgccaccggaggtctcatgttcggctacgacgtcggcgtttcagaaagacagtggaagagaaaggactggacagtaattactgcaaatacgacaaccaaggattacagcttttcacgtcgtctctgtatctggctggtttgacttcgacgttctttgcttcatacacgactcgtaggttgggaagaaggctgaccatgttgattgctggggtattcttcatctgtggagttgtccttaatgctgctgctcaagaccttgccatgctcatcgntggcagaatcttac

SEQ ID NO: 8819 - DNA, 310 bp, Glycine max
cccacgcgtccgctgtaaagcgtgccaagaaggatttactaaacaagaacttagctgagttcaagaatgaaataaacaccttgtcgaaaattgagcacattaaccttgtaaggtggtatggatatttggagcatggacatgaaaagattattgttgttgaatatattagtaatggaactcttcgggaacatttagatggtattcggggagatggactagaaattggtgagcgtctagacatagcaattgacatagctcatgcaattacttaccttcatatgtacacagatcattcaattattcatagaga

SEQ ID NO: 8820 - DNA, 443 bp, Glycine max
attgttactaccaccatcaccattactaccattgctgcaactctccgttagcagacttcaaggaatgggcaaagaggaaaatgatgaaaatgaaaagaaagatggagaagatggagacgaggatgaaaatgcacaagaggaggatgaagaagatattagtgatgatgattataatcagaatatagattttgatgacgatgaagatgattataatgatgtagatgacggggatgatgaacctacctattagatatcagtatggagaatgttcttctgctcatcccgtgacagctatacaagcatggactgttgctcctttaattttacagtttggaagttaaaattgttcgttagccttatttggcttttactttgtcactattttaacttgttcaattactaacggatgttttccttgtaaatgtttagattaaagaagtata

SEQ ID NO: 8821 - DNA, 208 bp, Glycine max
ctgcgcgtgggaaaaaaaaaaaataaaaataaaaaaaaaaaaaaaaaaaataaaaagaacaataataaataaaacaaacatacaacttaaaaaaatcttttatacataaaaataacttcttttcaatttccgtcaatttacaacttctttaatcaaaactccatctcattacccaaatctttatgattgcattacatacctttttttt

SEQ ID NO: 8822 - DNA, 442 bp, Glycine max
aaaatatatagcaagtatcctgctatgcagtagtcatcattttataattattttgtaaaaggtaattttcctcctttgcagtcattgctttgtgatcccaacccaaattctcctgcaaactctgaagcagctcgaatgtttagtgagaacaagcgtgagtacaatcgaagagtgagggaaattgtggagcagagttggacagcagattaagttcatccttatatgcatgggaagctttgaaggcatgaatttggttgcagtgatggcaactataagaatgattgtgcaaactcatcacatttatattctctgctgatatgaatgatagcatcatcttatctttaatttattatagcttctgcattgcatatgtcagctaatgtaaaatagaattatgcgtgtcaatttactttcgattgttgtcagacattcaacatgaaaa

SEQ ID NO: 8823 - DNA, 439 bp, Glycine max
cccacgcgtccgatcatttcaactattgtgttcttcttggccaaataaagccaacccctggtgctgttttggtttgtctgagagagaaatgatggcattggagtgtagtagtttccacttcctaaatggggtttacatggtgctgtttttttgccttggcattgtccttgtaaattcggttaatgaagagggtttgagtcttttgaggttcaaagcttcccttcttgacccaaacaacaatctctataactgggattcttctgatttgactccttgcaattggactggtgtgtattgcacaggttcagtggtaacttctgtgaaactttaccaactcaatctgtctggtactttggctcctgccatctgtaatcttccaaagcttcttgagttgaatttgtcaaaaaatttcatctctggccccattcctgatggtttt

SEQ ID NO: 8824 - DNA, 444 bp, Glycine max
catgtcttgaaatatatgtttgctatatgctattaccttttctattctcccaagtgtaacttcagaagtatctatatggaatgtgtggaacaggttttggagatgaacaacaacccacactatttgtatcggatgactattcttcgtgctatctctctgcttgctcctgtgatgggccctgaaatcacttgttcaaacttgttaccagttgttgttgctgcatcaaaagacaggtactttgtattaccttttgaaagccgggtacatgccatcatttccatacagtttctttaagttcctaattgctgccatttactcccttttagagtgcccaacataaagttcaatgtggcaaaggtattagagtccatcttccccatcgttgatcagtctgtaagtatcattcttatgtttccatcttctgttcatctttctttgtcttaa

SEQ ID NO: 8825 - DNA, 254 bp, Glycine max
cccacgcgttcgtagaagtattattatacttccattaccatttaaaagaaaatggcatagacgggtattgacacattcgaggacgatatcacctctgctgcggctcatgctactctttacaaagatgtcgttacagatgccgacaacattattccaaacgctcttaattcctttaacagtgaaggaaaccgtgagggaaaaagcagccccgggaccaactaggaaaaaaatttcggaaacaaatgatgaaccca

SEQ ID NO: 8826 - DNA, 438 bp, Glycine max
gagaactaaaggtttcacctgttaatgaaagatgctgtactgacaagcaagtgttgctttaaaagcttttgtgacagatgtattagggactatattatctccaagtctatctgtgtatgtggtgcaacaaatattcttgcagatgatctcttaccgaataagacattacgagataccattaatcgtatattggagtcgggcaatagcagtgctgaaaatgctgggagcactttccaagctcaagatatggagtctgctcgctgtccgcagcctaagattccatccccaacctcatctgctgcatccaagggagaactaaaggtttcacctgttaatgaaaaaacaacaaatatacaggaaacaactgatgatagaaaggctgtttctgctccacagcagacatccgagcaagtaaggaaccccagagctgctgatata

SEQ ID NO: 8827 - DNA, 435 bp, Glycine max
cccacgcgtccgcccacgcgtccgcccacgcgtccgcgcggagatcaatatttgatctaggtccatcgtcgatagaagatacgagaaaccaaaggcaatgtttttgtgggattggttttatgggattctagcgtcgctcgggctgtggcagaaggaggccaagatcttattcttgggcctcgataacgctggcaaaactaccttgcttcacatgctcaaagatgaggttttgttttccttttttttttttgtttccccaatcgtttacctttttttttattattattataagagttggttttgcagagattagtccagcatcagcctacccagtatcctacatcggaggagttgagtattgggaagatcaagtttaaagcttttgatctagggggtcatcagattgctcgaagagtttggaaagattactatgcc

SEQ ID NO: 8828 - DNA, 325 bp, Glycine max
acggtttgcttttcccctcctgagttctctcgctcccaccaacggcagggtcaggccacggggcgggccccacccctgcgcatacattgccatctgtttctcctgtttttgtttgtttgtttgttttccgatttccctttttacttttttttcccctttcttcctacacttagtttcttgggctgggtgggatttgcacagctgcagtcctggccccaggcagtcccccacactctccttctggcatcagtccctgccctctttttcacatagagcctggcttgggagaggggcttaactcttggtgtgcctggctgtctggtgt

SEQ ID NO: 8829 - DNA, 255 bp, Glycine max
tcctccgacgcgtacgcccacgcgttcgtacaaaaggatttcgcatgagagcagagctgagagacaaggggtaaatagtactccaatgtcgatcgctatacattcacaaacgagctgaggcagctgctaaagctgatgacaaagaactgggacaagtgacagagcacctagagaccgacaattccgtgctactgctgatcatcaactatcatcgttctcaggaagatcaacatgaccgtcgagttacaacgtcca

SEQ ID NO: 8830 - DNA, 364 bp, Glycine max
gatgaaattgaacttcttgttgtctttgaacttgtgctatgctctttgctaaaatattgaacttgggcataataaaaaaaaaagaaaaaaaaaaaaaaaaaaaaaaaaaaaaaaaaaaaaaaaaaaaaaaaaaaaaaaaaaaaaaaaaaaaaaaaaaaaaaaaaaaaaaaaaaataaaaaaaaaaaaaaaaaaaaaaaggggcacctaatttaaattaactaactctactttttacaacatttcaaaatgtaaaaaccttgatggtacccaaaaaaaacaattttgtggcacatttttaaaaaaccagtaaacgtaaaaaccaataagttcccaaaaaaaaaccttttaaaaaaaaacccaatt

SEQ ID NO: 8831 - DNA, 363 bp, Glycine max
cgcctggctcgacccactcgtacagtcgtagattcaaagcgcagataccagtgcaggtgctaacccttataaggagccactcgtcctggtgcaattgaacaatcatggagtgacgcagttactcaaactattcgcactgcaaccatagtcaactatatggcacatgcataagcacctgttgctggtgcaaatagagattggcgtgaagctaatccaccaccactaccatccctgatattgctattgaattgactctgtccaaacaactggctgggaataaactcacgattttcgatgctatgatcttgcactgtgcttaaactgaattgtcctgcctagaagtaaactatggctcagagtttt

SEQ ID NO: 8832 - DNA, 392 bp, Glycine max
agccgcccgcttgcccgtcggtcgctagctcgctcggtgcgcgtcgtcccgctccatggggctcttcgtgcggctgctggctctcgccctggctctggccctgggccccgccgcgaccctggcgggtcccgccaagtcgccctaccagctggtgctgcagcacagcaggctccggggccgccagcacggccccaacgtgtgtgctgtgcagaaggttattggcactaataggaagtacttcaccaactgcaagcagtggtaccaaaggaaaatctgtggcaaatcaacagtcatcagctacgagtgctgccctggatatgaaaaggtccctggagagaagggctgtccagcagccttaccactctcaaaccttcacgagaccctgggagtct

SEQ ID NO: 8833 - DNA, 278 bp, Glycine max
cgcattttgtaatttaatttagctaaatctaattaattattaggcgaagagttgtttttaaagatgaagctccttggttgttgaatccttatggtaattttgatttattattttatgtacttttattctattgtctcaatgatattaaggaaaagtcataaaataaaaataaaaaaaaaaaaaaaaaaaaaaaaaaaaaaaaaaaaaaacaacaataaaaaaatagtcataaaaatatatcacgtcaaaaaaccaaagataaagtctaaatgaaatca

SEQ ID NO: 8834 - DNA, 219 bp, Glycine max
tcctgtactcaacgaaacggttctttaatatattggggatgccaaccctcacaacgatcatcccacaactctccatggtcaacccgaacacaatccacacctcatttaccctgacaatattgttccccttcatgctacatatccaccttatcctcatatccccattgatcctcctttcaaacatctaaaccattcttaaactgatccttcttgtccttt

SEQ ID NO: 8835 - DNA, 306 bp, Glycine max
attcccggactcgacccactcatacactacttctagatctccaactaccacccttttttttttttcttcactttctattattaaatgaacttttctatatactggggctactctttacaattccctatttacatattcccacaacattattccaaacgctcttaaattcttcaacaatattttatacattcaattaaaatcatacccaacaaccatcaacaacatcactattctttaagatttacaaaccacaatttttctttacaaaatataaaacattcattataccaactttatatacaacta

SEQ ID NO: 8836 - DNA, 414 bp, Glycine max
acggctggcaccaggagccgtgggcaagggaagaggccacaccctgccctgctctgctgcagcgagaatgggtgtgaaggcgtctcaaacaggctttgtggtcctggtgctgctccagtgctgctctgcatacaaactggtctgctactacaccagctggtcccagtaccgggaaggcgatgggagctgcttcccagatgcccttgaccgcttcctctgtacccacatcatctacagctttgccaatataagcaacgatcacatcgacacctgggagtggaatgatgtgacgctctacggcatgctcaacacactcaagaacaggaaaccccaacctgaagactctcttgtctgtcggaagatggaactttgggtctcaaagattttccaagatagccttcaacacccagagtc

SEQ ID NO: 8837 - DNA, 467 bp, Glycine max
cacaactccactctctctctctctctctgattcagcttcagcgaaatcgagttctaaccgtaggtcgtgcttttgcgtctgagaagccacttctctacttgcggttcttcttcttcaatttgatttgattcgcttgctggaaaattctttgagtgagggagaagatgtctggtggcacgcagaagagtctgagaaaagcacttggagcccttaaggatactacaacagtctcgttggctaaggtcaacagtgattacaaggaattggacattgctatagttagggccacaaatcatgttgaacgtccagctaaggaaaaacatataagagctatattttcagctatctcagctacaagacccagggctgatgttgcctattgcatccacgcacttgccaagcggttatcaaagacacataactgggcagttgcattgaaaactttaattgtcattcaccgtgctcta

SEQ ID NO: 8838 - DNA, 442 bp, Glycine max
tgcaatttggaatcggcatgtaaatttcaagttcttcccaaagcgctttgagatcagaatagagaatagttacagatcgagtaccttgagtgagagcgtaaatctcttgttgaatttctgaaacacgaaccaaatcaccttgtgagaaacgctctttcagatcgagccacacatcggaagcgttatccatgaaaacgatggatcgggaaattgaaggttcaacggagttgagaatccagctatgaatcaacatattgcagcgattccaagctcggaacgacggatcgaaggcatcaaccggcatcggaattgttccgtcaagaaattcgaacttgagtttggctccgagagcgcgtcgcagagacctcgcccaagaatggtagttggaaccatcaaagagtggtgtgaccttgacggacgagggaccgtcgctaggatgaac

SEQ ID NO: 8839 - DNA, 389 bp, Glycine max
acgacaaatggttaaatcttcataaatatgtgtacttctattgcttaaagcaaaaagcatcatcttcggtccagttgccatatgttagaggaggcgcagcattcaaaaggatctgtttgttttaatggaacccaactacaataccatttcgacaacttattaaaataaggaattaaaaactccattgttcacattaatgaatgacgatggtgcaacaatgtatatagtcacctttaccataaggataatacgcttaggctcatctaacctaatgaacgatcttcacttttctacgctttttagcacccaccatgaatctaatccatatttctacaatttgaatagattccacgctaagtactctgatcacttatcatttacttatgatc

SEQ ID NO: 8840 - DNA, 463 bp, Glycine max
cggacgcgtgggcaaaaatcagtagttatgtatctatctttactgaatgtagaccactttctatgagcatgggaaatgcaattaggtttgtaaagagtcgtattgtcaatctgactttaaatcattcggagtttgaggcaaaaacaaccctgtgttctgatattgaccggttcataaatgaaaaaataattcttgctgataaggtgattgtccgacatgcttttacaaaggttaaggatggggatgttcttctcacatatggattgtcatgtgttgttgagatgattcttttatatgcctatgagcaaggtaaaaagttccgtgtggtggtggtagattcacgacctaagcttgaaggtcaggccttacttcgtaggctagtggctaagggcctgagttgcacatatactcatataaatgctgattcttatatcatgcatgaggtcacacgggttcttctggg

SEQ ID NO: 8841 - DNA, 365 bp, Glycine max
caatagtgtcgttcccatatgaatgttccggtatgtatccttcttgcatttcggtgcctagggggaactgatttagagatatatgggtactcaatattacccaacactcgatgggtattcagaaaaaagccgcgtttcctgtttaacagaaggttgtaaacatcgaatagaagacaagtgtcatgttaaaccggagttggcgattgcgaatacaatgatgggtggatggctaatttagtcttgctctgcattggaaactcaattgtctttgtggctaatctttagcgaaataacgagacatagtcaacgagagtgcagtttgcaagtctggcttaaagctagaatgtcaggccttacttcgtaaa

SEQ ID NO: 8842 - DNA, 394 bp, Glycine max
gatggttgagatttctggggtcatactgtatagtattgaaagattgcttgcctgatgtgacaatcagtttgtaaatgttgctaaatgataatgtttagcattgccaaaaaaaaaaaaaaaaaaaaaaaaaaaaaaaaaaaaaaaataaaaacatatatacaaaaagagagaaacactataataaaagaaacaaactacaagaaaatcatgaagcatgagatctgaaccaaacatgtacatttgcagatatacaaactcatgagcatgctaagtgctttcattcgggttgtgcagaaagagtataaatacttcttacgagctactcatcactagcggaacctattcataaatgacatcttaagcaaaaaactttttggccttgatcttatttgga

SEQ ID NO: 8843 - DNA, 315 bp, Glycine max
acgctggagtttcagcttggacactgagccaatcagacaagcaaagcaagccaggacagaccgtcctgccccaagcccagcttgtctcctgccttccaacgccatggggagcaatctcagcccccaactctgcctgatgccctttatcttgggcctcttgtctggaggtgtgaccaccactccatggtctttggcccggccccagggatcctgctctctggagggggtagagatcaaaggcggctccttccgacttctccaagagggccatgcactggagtacgtgtgtccttctggcttctaccccgtccctgt

SEQ ID NO: 8844 - DNA, 343 bp, Glycine max
  modified_base (83)..(83): a, c, g, t, unknown, or other
tcgttccacgcgtccggcgtcgccttcttcgctgcaactatctaccttacctctttttgcgaatctgaatcgaaatggggtcngatactgagagcggcgcttttcaggccgttatcaatcatgtcctcagtctaataatcaacaccttctacatgcaacaagtgagatctaacttcatgagctcatcagcaatgcactctgacactttggacatgaaccgatctgagagtcttacagacaacagctagcttgatgctcagtcaatagatgacattcaaattattcttgaacagaccaacatcacattgattatcatccacagaagtatcggcatctctaaagc

SEQ ID NO: 8845 - DNA, 418 bp, Glycine max
atgatattctcatacttaatagttgccggatagcgtcactgaattgagctgttagagtacgctagagtttatttcagctggcaaagttacgagagaatacgaatctttgaggcatgactggttgatctggctgtgtctgggaccccaccatcattgatatttttcattctacatatgtatttaatgccagtaacgactaatgttgtctggcaagcactgcccaaattgacttgaactataaacaaccatgtgggttcccaattgaagcaatttcaagtgaaaaagagtggtactttttcagccccagagacaggaaatacccgaacgggtctcgacccaacagagtagctgggtcgggttattggaaagccaccggaaccgacaagatcatcaccaccgaaagtagaaaagttggcat

SEQ ID NO: 8846 - DNA, 431 bp, Glycine max
cccacgcgtccgctcgctcagagatcattgaagcatgttcctgttccttcccacaacttgattttggagtacactttcctcagtcagcgggggtactaccctgattcacctgataaagaaaaccaagatagtttctgcatcactacacaactccaaggtaaccccaatgtccatttctttggtgtctatgatgggcatggccaatttggtagccagtgttcgaattttgttaagcataggctggttgagaagttgtcaaatgaccctgcattgttggaggaccctgttcaggcttacaattctgcattcttggcaacaaatcaagaattgcgtagtactagtgagattgatgattctatgagtgggcaccaccccgcgattacggtgcttgttattggtgacactctttatgttgctaatgttggtgattc

SEQ ID NO: 8847 - DNA, 429 bp, Glycine max
ggataggaattatttacttgttgtctggattcggcgggagtgtactatcttccttattcattagaaacaacatttctgttggtgcttctggtgctctttttggacttcttggagcaatgctttcagaacttatcacaaattggagtatttatactaataaggcagctgctttgttcacacttctgtttattattgtcatcaatcttgccattggaatgttaccacatgttgataactttgctcatattgggggattcctcacaggatttctccttgggtttattttgctgctccgccctcagtttgggtggttagaacaacgacgtccccctgctggtgttcgcctcaagtcaaaatacaaggctttaaaccaatatgttctatggattgtctcggccattttactaattgttgggttatctattgctc

SEQ ID NO: 8848 - DNA, 347 bp, Glycine max
gaactacatcgcttccgcttcctcttaactgtcgtacactcatatccttttatctccagtgcaacaataagctcacatcataaaaattcacctatgcaatcctaatctcatttctacacttgatcccattaaatctatatcaaatcaagcagggcatgacccgtctcgcctaatactacattcctctctacgacttctagaagcacaaggtccaataccatgttcatccgctcgattataacacataccctaaatacacaaattacgtctagtctcgtacccacaagataatttacaagcgaaaatctgatgtatttctctaactctttgatgatatcactgctaat

SEQ ID NO: 8849 - DNA, 428 bp, Glycine max
aaaagcatataagagatggggttagaagggaaggaaacgccgtcgtttatgagggattgtgtcgataagtgtggtggctgcgccgttattgacggtggttttgccactgaacttgaaaggcatggggcggacctcaatgacgaactctggagtgccaaatgccttattagctccccacatcttgtccgaaggatctgcagtttcacacgagtgatcaaaggaatgggaaaaaaatgttcacctagattacctcgatgcaggagcaaacataatattaacagcatcttatcaggccactattcaaggttttgaggccaaagggttctctagagaagaaggtgaaactatgcttagaagaagtgtggagggattgcacgtgaggcacgagaaatttattatgataggtgcaccaaagattcttctgactt

SEQ ID NO: 8850 - DNA, 334 bp, Glycine max
aattactgctattactagacgactcacatttagttttgattgttcgactgctatggctaggaacaggcttatcgatggtgaagctgaattggctcaaggtgttggagaagaagtgtctaattttcacttcgactcagagattattgctgctggaagtggcggcattcgcgccgctagattctcatccaatcttgtgagctaatgtgctgatttacgagctctcatttcatacaattaattctgactcaattcgacgagtcggctgtacgtgtgtcattcgtggatgtgctcccaaacagattctggtctatggagcatcttttggaggtgatct

SEQ ID NO: 8851 - DNA, 430 bp, Glycine max
cctatctctttcaacattattatcaagttgttatttagtattgtgaccaatggtcatcatgttaacaggagacagctgtcccgcaacacttccattgcccttggctgccttcacaagccttaccataacctacaaagttgataaggcatcagagcgttttcttaatttggctggccaaacattggagagcctcgctgcaggttgtccatggccttgcatgccaattgtagcttccttgtggaccctaaaggcaaaacgttggagtgacttccttatcttctcagcatctagaactgtcttcctccacaacagtgatgcagcagttcaacttctaaagagctgcttcacagctacccttggcatgaattagggctctcctatctcaagcagtggtggtgttggagccctacttggacatggatttaagtac

SEQ ID NO: 8852 - DNA, 428 bp, Glycine max
cccacgcgtccgcccacgcgtccgtggtgttgcaaggtctcagattccctgacaccccatttgttagtatccaagcgagggatctcattagagggttgttggttaaagagcctgaaaaccgtttgggttcagagaaaggggctgctgagataaaacagcaccccttcttcgaaggccttaattgggcgttaatacgttgcgctatcccaccagaactgccagacttgtgtgaatttggagtttcagagatgaccccacagtcccagggaaagggtgttaagtatgtagagtgcaatgcagcaggagagctagttgaatttgagttgttttgaagagactgctctttggcaagagtagcattcttggtttatggattcccttgtttttggctctatgcttcacgtgtcgagctgcaacagttatgtaag

SEQ ID NO: 8853 - DNA, 353 bp, Glycine max
cggacgcgtggtctgacgcgtgggttctgcagcaattggtgttgatcctgccatgatgggtgttggccctgctgctgcaattcctgttgctgttaatagctgcatgtctagagcttgatgatattgatctttctgaaataaatgacgcatttgcctcccagttcgtgtattgccgtaacaagctagggctagatccataaaagatcagtgttaatggaagcgcaatggcaattgcacatactctggcttcaacaggtgctcgatgtgctgcaactctgatgcatgaaatgcagaaacgtggcaaggactgtctatttctatttatatctatgtgcataggtactggaatggtg

SEQ ID NO: 8854 - DNA, 429 bp, Glycine max
cccacgcgtccgcccacgcgtccgaaaatgttttgatattaaaagaaaaatcattatgtgcaaagctttctgatatgggaattagtaaacgccttcttgaggatatgtcttctttgggtcacactgttactggctgtggaagttcagggtggcaagcaccggagcaacttgttcaaggacgtcaaacacgagctgtggatttatttagtttaggttgcattctctttttctgcatgactggaggaagacatccatttggagaacgtcttgagcgggatttcaatattgtgaaaaatcaaaaggatcttttcttagtggagtttattcctgaagccgacgatcttatttcttgtttgttaaacccttaaaaccctgatctcagactaacagcgattgaagtattgcatcatcctcttttttggagctctg

SEQ ID NO: 8855 - DNA, 435 bp, Glycine max
cccacgcgtactttcactcgaccaactccgaacagacactatatgattacttcgtacaccggatcaatggattatagagcgggcagtactcctcggcatgtgcaacgcctctcctcgacatctttgcactcgtacacgacgctttcttgcaaaaatacgggctcaagttgaacgatgcgaatcgtcctgaggataaacacaaacctatgtatgaagaatgggctaacaattctaatgtgaagtacattgctggacgtgctactcacaattgaatcaggcttgatcactggatgcttcaagcaccaggtgccacaagctacataggttgcataggaaaggacaactatggagaggagatgaagaagaaatgtacaaccttgatggtgtaaaggctaactattgtgaaatcgcacaatacaactactggaacttgtg

SEQ ID NO: 8856 - DNA, 459 bp, Glycine max
atctgaactgagtaatgacactcttaaccctttatcttcttggaaccataattcatccccgggcaactggactggtgtcctctgtgacaagcatggccaaagagtgacaggccttgatctttcaggcttgggactctcaggtcacttaagcccttatattggtaacctctcctctcttcagtccctccaattgcagaataaccaactcacaggagtgattcctgaccaaattggcaacctattcaatctgagacttctaaatatgagcactaacatgttagaaagaaagcttccttcaaacaccacccacctgaaacagctccagattcttgatttatcctcaaacaagattgccagcaagattcctgaggacatcagcagcttgcaaaagcttcaggctttgaaactgggaaggaatagcctctatggtgcaataccagcatccatagggaacatttc

SEQ ID NO: 8857 - DNA, 432 bp, Glycine max
gagaagaagagggagaagaaagagaagaatatggaaaagaaagagaagaaaaaggagaaggaggaaaagaaagagagaaggaaaagaaagagaagagggagaagaagagggagaagaaagagaagaaaatggaaaagaaagagaagaaaaaggagaagaaggaaaagaaagagagaaggaaagaggagaaaaaaaataaattataaagaaacgaaacacgggcaagaaaggggagtagagaccactcaataaatgaaatagctactaaaggctttgttctctttttagttatttgataattatccaatttgagttatggagttataaatatgaggagttttttttcaaaaagaaaaaagcataaataaaacaataataaaaataaaaaaaaaaaaaataataataatataataataaaaaaaagggtggccg

SEQ ID NO: 8858 - DNA, 298 bp, Glycine max
aatagggagaagaaagagaagaatttggaaaagaaagagaaaaagggggataatgatgaatttaaaaagagagaggagaataaagagaaaagggagaagaagagggagaagaaagagaagaaaatggaaaagaaagagaagaaaaatgagaagaatgaaaagaaatagagaatgaaagaggagaaaaaaaataaattataaagaaacaaatcacgatcaataaaggggagtagataccactcaataaatgaaaatatctactaaaggctatgttctcattttattaattagataaata

SEQ ID NO: 8859 - DNA, 347 bp, Glycine max
tgcacctcataccatgatcgtcttttctttttcaattgcctctttccttctacctaccctgcatgttcaccgaaagttcactaccattcaagtggcctaatgctaaatccaaatttatataattgtggaaaagtctgccttagtctctttagcacttatcatcttagtaatagttaaaattgtataccacaaaaatcaaccatgctacaaatgttggtttcgatacaagctctaattctaaatgaaaagcctttttttaatgagcctgagtatacttcaacatattctggatcttattgtctaactatatcctatgaattcaaccagagttcatttattttattctt

SEQ ID NO: 8860 - DNA, 413 bp, Glycine max
gttcttttgttctgtttaggtgcctgtttatatagctgagattgcacctcaaaacttgagaggtggccttgggtcggtgaaccaggttgaagccttattgttgcttcttgatgcaagtctgtttttttttttttttatttgaagtttattattcattaattttgtagtttttctggctcagctctctgttacaattggcattatgctggcttatctgttgggtctttttgtcaactggagagtccttgcaattctaggtaaattgctaattatttacttggcttagctcttgcggatagacaaatgaaaatattaaaaaccttggtcacaaattagtttcattaagttcttacagaaaggaacagaaagaatatgtgtgtacaggggaggagccatatttataaaattaaaaa

SEQ ID NO: 8861 - DNA, 379 bp, Glycine max
cccacgcgtccgcccacgcgtccggagaaaagaaggaaccgattctagagagagaaaaagcggtggatttctagggagagagcggagggcgcgagcgcgatggttcagatcgcgaggaggaagaagggacggtcgtcgaaggcggatctggcgcgccgctccggcgagtcttcagccgccgcgtcgcagtccgatccccggcggagccttcggcgtcggagcgtgaggtacaacatcatcgactacgacggcgattacctcgacgacgactaggaggactagaggaggcgcatgaagaagaagctcaagctcatggcgaagctgaaccaggacggtgaagaagaagaagaagaagagcgagaagaagaagaagaaatcg

SEQ ID NO: 8862 - DNA, 279 bp, Glycine max
ccattcacacttgcacatgcattttatctcaatccataaaatcacgtaacatcgtgcacttgtaaactcttgcatccatcatcctaagcaaactacatctcagttctctctgaagataactccaatatggaactgggtcactacagaagacctctctataagtactatgctcctacttgtaaacactaccaaaagcttgctccataatataaaaaccctggaagcaacttccataaagccaattctatattcatctccattgctgactgtcatcagcac

SEQ ID NO: 8863 - DNA, 446 bp, Glycine max
  modified_base (425)..(425): a, c, g, t, unknown, or other
gtccaaggcacatgatcccacaatggaagaaacaacatcaaccatcatcagggctgcacgctccaccctcacaccttcccaattctcagatctcactcgctccattatctccgccaccaaccaccaccatcgccgcctctcctccctcctctcctccccaacgctcttctctttaacccttcaccatctccacactctcacactcccccagaagaccctcctcatcgcccgccacctcctctcctccctccacctcctcaccgccacgtcgccgcctctgtccaccaccacacggcagcgcgacctcgacgccgcgctgctcctccttctcctctgcgaaacgcacaaccacaacccacatgccctcgaggcaccgttctccgaatggagaaaaaacttgagcaaagtgttctctgattcgttgntaactgtttctctggcacccc

SEQ ID NO: 8864 - DNA, 426 bp, Glycine max
atactctgctgcatatcacacaccacctttgcatataagagagaacagagaggatactctgtcttacatgctgcatcgcaggttatcatgcaggactccatctcaatgaagatctaccatccggatctgatgtccgctatcttcaagggcaagctcgacatctccaacgtctcctcctctaccaacgccggcgcctccgacttactcatagagaaccgttacttgctgatgctgctgaccatctgcgttgtcatactgatccgctgcgtcatcgactgcatacagcgcagatcatcatactgcaatggcaagccttttgagccatctaaactgcgttgcaacaagcttcccgaaatcaaaatctacgactgcaccaaaaatgtcaccatgctcttccgcactcaaactcggaccgtcgaatgcttc

SEQ ID NO: 8865 - DNA, 227 bp, Glycine max
tcgaccacgcgttcgaaatatattatcttggtaaaaaaaaaaaaaaaaaaaaaaagaaaaaaaaaaaaaaaaaaaaaaaaaaaaaaaaaaaaaaaaaataataaaaaaaaaaaaaaaaaaaaaataaaaaaataaaaaaaaaaggacaaaattatagaaggtgactagtatttataaatagaacaaacaaaggataaattaccttaaaaggaccattaaagtaaaaa

SEQ ID NO: 8866 - DNA, 383 bp, Glycine max
gggacaaatttagtgtttgaagatgaaatcactgcattacaacctgaagtagataagttgaaaactctaaatgtgaacaaaattattgcactgggacattcgggttttgaaatggataaactcatcgctcagaaagtgaggggtgtggacgtcgtggtgggaggacactccaacacatttctttacacaggcaatccaccttccaaagaaggtgcctgctgggaagtacccattcatagtcacttctgatgatgggcggaaggttcctgtagtccaggcctatgcttttggcaaatacctatgctatctgaagatcgagtttgatgaaagaggaaaacgtcatctcttcccaatggaaatcccattcttctaaacagcaccat

SEQ ID NO: 8867 - DNA, 402 bp, Glycine max
cccacgcgtccgcccacgcgtccgccaaagctctccacctcctccagcatctcctcttcggttttcataaacaaattatgcggctcgcggatgaacgcaagctcctcatggtccacatgccagccacgagacagccagttgtgtggcggcacaaggcgaaaaaggaaaaaagcaaaatcacttcgcaatcgattacggttttaacgccatcgttgccgccgcgaacgggtcgaagctcacgattctgaagtccccgacgggccgcgagatcgaggcccactatgagttgggccgcgaactggaccacagcgagttcgggataacctacctctgtacgaacaaggagttggggatttcatatggttgccgctgaaagattgaagcttttttggtgtagaggaa

SEQ ID NO: 8868 - DNA, 456 bp, Glycine max
acgggactggtgcactgatcacaatattgagttcattgaggcatgtgcttccaatgctgattgggacaaatgtgtgtcgattgatggtgatttacaatgagttgagcgtctctacggtgcactttctgctcatatgtggcctggaatggtattgaaatctggcaataggataaatcaactgtcatttccagagaaagaagagttatcttcagaagaatctgattatgaacaagagtatgaagtcttatcagctggctcagccgattgggatgaaagtgaacaacgatggatttctgcatcgtccttagattcatggggatcagctcctcaaaacaatgctggcacagttggtcaacatgaggatggaattaaatctgataaagagtcacatgctacaacctcaagcactgcaattcacgatgagagtgaaaaggatattgtgcacaattccatgga

SEQ ID NO: 8869 - DNA, 336 bp, Glycine max
caatcaccgtgctctttatatagctgcttcgtactacaaacactgactagggtgatggagaccattttaagtatcactggttaacacacatcttcacagtaactcatatgataccactgaaactctgaaggatcgaacatgaatttgaaactgcgactcatgattcaagatatataacctatcaactttctatggtactatagactgcctaccatgctgttatacggttcgaagacaaattactgattctaatgatgagagacatcctgactaacacctaccacatacaatgcacgcaccaagtgctcagattacacaatactgacacgaggatgc

SEQ ID NO: 8870 - DNA, 262 bp, Glycine max
aaaaaaaaaaaaaaaaaaaaaaaaaaaaatataaaaatataaaaaaaaaaaaaaaaaaaaaggaaaagggaaaaaaaaaaaaaaaaaggagaataaaaaaaaaaaaataataaaaaaaaaataaaaaaaaaataaaaaaaaagggggctttttattaaggtccaaatttatatttctctattatattactaaaatatttttattttgtggccccaaaattaatttatttggccttatttataaaactttataaatgtaaaaa

SEQ ID NO: 8871 - DNA, 454 bp, Glycine max
tgcagttatggttaaaaatgaaagtgagaagaacatgggttgacattataaatagaatgaagttgtgaaagatgaatctttgtatgatggtggatagggagttctggtggaaacagaaagaagttggactcaaaatctttttttgtaacatattatattataaaaatacctataaatctatgttgctttggatgtgtgtgtttattttctttaaaagtgttgcatgtttatgtgtgtgagtgtgggtgcacatactttttacagtaactgttttggaactccacgtatacggtatatcgtgattcaggtgaatgagaagttattcccatgccaactatcaaataaaaatgttgacatggctgataaggctgtgcaattggctgttgaaacatggggcaagagatccttaactgaacttgaagcatatgaacgcctatcctatacctgtgaaaag

SEQ ID NO: 8872 - DNA, 257 bp, Glycine max
cggacgcgtgagcggacgcgtgggcggacgcgtgggaggacgcgtgggcggacgcgtgggctgacgcgtgggaaaaaaaaaaaaaaaaaaaaatggaaaaaaaaaaaaaaaaaaaaaaaaaaataaaaaaaaaaaaaaaaaaaaaaatatataaaaaggtggtgctatgtataaaattttgggtatttatcgcctgattaaaagctgtattatcatgtattgggattaataactaggataaattgtattacatttta

SEQ ID NO: 8873 - DNA, 354 bp, Glycine max
gaagtacttagttagaatacggaattatcaaaccattccatcaccacctgtctatgttggtccactagacgttacgtcccaagtacactaacaagctgggagcagaatttcaggagtatcgaacgatatatgcgtgaaaataaattgttaggacagctgtatattaggcataaccagagtaatgcagatactgatcgtatcctgtctagagccaacaagagttgcttgtctttaccagacaccaattgcttttatgccaatgctcagaagccatcacgacattgtgcttatggctcaaggaccgctagatctatgctggctagaatggagaagctgtcgcatagatcttggccc

SEQ ID NO: 8874 - DNA, 431 bp, Glycine max
cggacgcgtgggcggacgcgtggggccgatggaaatcgccgcctgcctggcttacgcgctctccgtgtggcttgccgcgcgcaacaatgtgcatacgtggtggacgggcattatcggctgcgtgctctacggctgggtcttctactccgttcagctttacgcggatgtcaccctgcaactcttctttatcgtcagcagcattgccgggtggatcaactggctgaagggcaatcacggtcagcaactggcggtgcgcaaaacgccgctgcaacatatagctttcctgctggtgggcgcgctgattgtcgcgggcggatatgcctggctactgcaccgttttaccaacgcctggtcgccgtggctggactcggcgattatggtcttcagcattctcgcgcagtttatgctgatggggcggcggctagagagct

SEQ ID NO: 8875 - DNA, 417 bp, Glycine max
gtttcaaatttggagcatcttcagaatttggtggtcattgactgcaaagggttggaatctttgagtgttgactccacctctgagcttcacatgttaaccatcttggattgcttagagttgaagactctccatctcaaaacttctaggctcaagtcttttcggtatcgtgggcctcttcctttgcttaggccagaatatcatttcaacctgcgtgatgccatgcttgatttcagattaggactaagctgcagtggtttaaagaccaaggattttgatgcaacccttttaacaataaagaactgtgaagttcttactctgtgtaaatggacttttgaggaattaatatggccatcgatttctcctctatctgggagcttcatattctataaattaagagagttatggtggattgacaac

SEQ ID NO: 8876 - DNA, 414 bp, Glycine max
attaccactctcaccccacatcccagttagtacacacttccacacaacacacggaattgttatgttttttaaataaaaaccaccccacttcttttatcaacaacacacgcacgctataatcctaactttccaaagaacttactatttttttttcaggtggtggggcagtgaagcagcttaaccgggaagagaaacaaaatgggtcaacggtggtgccggtgaacagagtggtggtggaggagaagaggttcggcgggccggggtcgtcgacgccgtcgtgcagatccaagtgcggatggtgcagtccttgttttacggttcacgttccggtccaaccgggtttgattattcgcctcgagtactacccagaagcgtggcgttgcaagtgcgggaacaaagcttttatgccatgac

SEQ ID NO: 8877 - DNA, 304 bp, Glycine max
aaaaaaagatcatacatagttactgtcggtgggtcgcaaagatgcttgggggccttcgagggaggggtcataagataaaggggacactctgtgttgatgctcaagaatgagtacgacgtgaatagcgtatccagcgaccctggaaggatcgctcaaggtgcttacttaatcaggacaacactccatactattactgcctactagggccgatccacgtttgttcagcttattactgctacccaagctgatggcgactgcaacaggaatcttagaaaggctacactttgtcgaatgtatcattact

SEQ ID NO: 8878 - DNA, 404 bp, Glycine max
ggtgcttgtgctgctagttgtgagactcgaatgtttgtcaccaatattccttacttgcaagaagtaatagttatggcatccacatgtgattcctgtggttaccgcaactctgagttgaaacctggtggccgaattcctgaaaaaggaaaaagaattactcttaatgtgaagaatgttaatgacctgagccgtgatgtaataaagttaaaagttgtaatgatacatatgcaggtctttctaataaggataaactgtgaaaaatgtcatgatgatacccatataggcctgatcatttaaattttttctgcaatctgagacataaaaatgtatttcatatctattgactgagtagtttggtttgattaagctgatactgcaagtgtaaaagttcctgaacttgactt

SEQ ID NO: 8879 - DNA, 433 bp, Glycine max
  modified_base (125)..(125): a, c, g, t, unknown, or other
gaaaaaccgggccgaccgcacgcgtacggctgtgaaacccaacctgctctacgactttttgtgcaagccgaatgatatccacgcgctgtatactactccgtgggaggagcgcgtgaaaaaccacnataaccacacggtgcacgccacgcaccatatcgcttaatcttgtattcacgcgtcgcggaagtgtttttttttttacttttctcatataaaatttaataccattatatctatctcatctttttattaatatctttattatttaatcttatcattcattataaaattatattaaattattttttattgttttcttataattttctttatttactttaactatattttatttattttttttttaatattattttactttcactattatttcatttatattttattctatttaattattttctttttattt

SEQ ID NO: 8880 - DNA, 462 bp, Glycine max
  modified_base (431)..(431): a, c, g, t, unknown, or other
agttactagtgcatattatcgcggtgctgttggagcaatgttagtttatgacatgactaagcgcgaatcatttgatgacatggcaaaatggttagaggaactgagaggccatgctgacaaaaacattgttgtgatgctaattggcaacaagtgtgatcttggaactcttagagcggtgccaactgaagacgcggaggagtttgcgcaaagagagaacctattctttatggagacatcagcacttgagtccactaatgtagaaactgcctttctgaccattctaactgagatatacagacttataagcaagaaaacacttactgccaatgatgatgcagatccaagtggtatttcagggcttctgaagggaaccaagataattgttcctagtcaagaaatcaatgctggtgaaaagaaaggtaaaggtggcnttgtgtgaatgtcctaactttttcttggttt

SEQ ID NO: 8881 - DNA, 378 bp, Glycine max
gatcaactagcttcactctctctcaatgacaatcttgtgtcttagattcctttagtggtgggactgtaatctgcgtgtgcagttattcctattccgtatgcttccccccagtttatttgcaggtgtcttagatgttttgttttagtcagagtactaaggaagtttatgttcttggtacttttggtttcactttttttcctatctgaattgctgtccgatggattagcataacttgttggatctattatagcaatgctggtctcaccggcctcaagatcatcatcaacacctatggaagattgggtgcacatagaggtattgccttctctagtgaagatcctaccaacgttgataagaattgtgcctacattgtgaatg

SEQ ID NO: 8882 - DNA, 240 bp, Glycine max
catatcaatccccccactaatttcaaacacaaattcacaaacaatcttcaaacctcgctcaaacaaatcactttttctccttctacactatacactaattatacctaccaccttcatgtttattttcctataaattacccaattgaatcttctctatttatattctttcattcccctactcttcattcccatatttacaataaccatcacatttgtttaaatatattttattatttatta

SEQ ID NO: 8883 - DNA, 273 bp, Glycine max
cccacgcgtccgaaaaaaaaaaaaaaaaattatataaaaaaaaaaaaaaaaaaaaaaaaaaaaggaatatttaaaaaagagtggaaaaataaaaaataaaaaaaacataaatacaaaataataaattaatatataataaaaaataaaataatttacctcgttctaaattttaaaatttttttatacttaaaaaaccaaaaacgtttcccatcttaatttcttttcaaaatatattcttttccccagtttttataaatatctaatattgttaaa

SEQ ID NO: 8884 - DNA, 430 bp, Glycine max
  modified_base (339)..(339): a, c, g, t, unknown, or other
ggaaatccattgacatcgatggaaagaagtggcccaatgtttctggtttagcttaattagcgtggcgctgggtccttggttcttctcaccactgcaccaacccatcccctctcgcgtcgagtcacgagtcacgagtcacgagtcactcactacaactacttctttctctttctggtaggtttctctctcgcacacttgtcactgtctcctcctcgctcccaattttgaccgagttgttgactccacgatgccttccaattccgatttggtccgcgccgttgagtcgctcctcggcgtctcgctcgccgattccgtctccgattcgctgctcctcatcgncaccaccttcgccgcgctcataatcggcctcctcgtgtttctctggaagaaatcttcggatcggagcaaggagctaaagccggtgatcgtg

SEQ ID NO: 8885 - DNA, 429 bp, Glycine max
gttgatttagtggagcaatgtcgaacatacaagcagagagtggtaaaccttgttaattcagcttcggacgagtcactgctatgccaaggcctaactctgaatgatgatctgcagcgtgtcctggccaaacatgaatccattgcttcaggaacttctgctcaaaatcctgctgagaaaccgaaacctgcacctactggagcacttgtagatgttgatgatcctttggttgatattggagatactagtaaacaaacagatgtgagatcgtcttctagtgctggagctgggtctcaaacattgaatcagttaatgcttcctgcacccccaacatcaaatggatcagtcccccctgcaatggttgatccccaagtggacctactcagtggtgaagactataactcaccaaaagcagaaacttcacttgctctt

SEQ ID NO: 8886 - DNA, 382 bp, Glycine max
caaaactttccgattttggcttggccaaagatggtcctgaaggagatgacacacacgttggaactagagtcatgggcacacaaggctatgcggccccagaatacatcatgacaggtaaataatttcacatcaagaagtaaaaaacaatgacaggttgacttggagtttaatttttaactcattgctagctcaaatctcacacgtgtacatttttttcttcttccgtataggacacttgacagcaatgagtgatgtgtacagttttggagtcgtgctcttggagcttctaacaggacgaaggtcagtggacaaagggcgcccacaaagagaacagaacctcgtggaatgggccaggtctgctttgaatgattcccggaaactt

SEQ ID NO: 8887 - DNA, 474 bp, Glycine max
cccacgcgtccgcggacgcgtgggttcagaaaacgtgccaaacttgagcgacgtcactaagaagaccaaaggtcggcaaaagatagagatgaagacgatagccaacaagtgtagccttcaagtgacattttcaaagcatcgaactggagttttcaagaaagcgagtgagcttgccaccctttgtggtgtggaccttgctgtgattatgttctctcccaataaccatgtttactccttcggtagccctaatgtggattctgtaatccaacgttatacgacagagggcccacctcccctcttcacccaagacctcaatgaggccccttgcaccatggatgagggtgagctccaagcacacctcaactgtttgtccaaccaaattgacgcggagaagcaacgtgtagaggatctaaaccatttgttgatggctgcgaaggatcacatctggtgggatgtgccaattgaaagcatgag

SEQ ID NO: 8888 - DNA, 278 bp, Glycine max
gaaatggataagaataacattgcacctaatgtcaccactctgaataactcgctctgtggcttttaccgcgagaagaagtttgatgatgtacggaaggtgtttaaattaatggagaagtatagtgtttttccttctattagtacttacaatgttaggattcagagtttgtgtaagctgaagaggtcttccgaggctaaagcgttgctcgaggggatggtttgtaacgggaggaagccgaattcagttagctacgcgtgtttgatccatgggttttgtaa

SEQ ID NO: 8889 - DNA, 474 bp, Glycine max
cggccggaatcccggtcgacgacgcgtccgcggacgcgtgggtgcgtcccttgttggaattcctaaagagaaggtgctatctgaagtaaagcgagatgagaaaaagaagtgataaatgaactacagaaagataacaacattgtagcaatggttggtgatggaattaacgatgcagctgccctggcttcttcacatgttggtattgcattaggtggaggtgtcggggctgctagtgaggtgtcttctattgtattaatgcgcaaccagctctcacagatagttgatgccttggagcttagcagactgaccatgaatactataaaacaaaatctttggtgggctttcatatacaacattgtaggaattccaattgcagctggagtgttatttcccataaatgggactgtgctaactccatcaattgcaggggcactcatggggttgagctccattggcgtaatgactaactcgtta

SEQ ID NO: 8890 - DNA, 387 bp, Glycine max
  modified_base (52)..(52): a, c, g, t, unknown, or other
  modified_base (84)..(84): a, c, g, t, unknown, or other
  modified_base (86)..(86): a, c, g, t, unknown, or other
  modified_base (89)..(89): a, c, g, t, unknown, or other
cccacgcgtccggttaaatagaaaagaggagtttgagaatggcaacgatcancccggtgtgggtttaattcctggagtggccancnatngttacttcaccagcctccggcaagacctatttcctccgcagcacaggggagaaaggattgacgattgaggggaagttcataaagttcacaggcatacgagtatacttggaggataaggcggtgccatcactctccgctaagtggaaaggtaaaacttcaaaggagttaattcacacccttcacttctacaaggatatcatttcacggccgtttgaaaagctaattagaaggtccaagattctgccattggctggcgctgaatactcaaaaaatgtgattgaaaacttcctggcacaca

SEQ ID NO: 8891 - DNA, 444 bp, Glycine max
tgcctgctgttagctggtcaaatgaaaagtattacttggagcagattctgccactttttggcgagcataaggtggtacatttcaacaaaacagatgcacgtctagcaaacaatggtctcccacttgatctacagaaacttaggtgtcgtgtaaatttccaggcattgaaatttactcctcaacttgagaatttgggccaaaaattgattcggatacttcgtgaaaatggaccctttctggcattgcatctgagatatgagatggatatgctggctttctcaggttgtacgcatggttgctctattgaagaagctgaggagctcaagcagatgaggtatgcattcccttcctggagagagaaggagatagtttctgaagaaaggagatcacagggtctctgtcctttgactccagaggagtctgccttaattctgcaagccttgg

SEQ ID NO: 8892 - DNA, 413 bp, Glycine max
cccacgcgtccgcccacgcgtccgattctcgttctctctcttcttaccgacatacatgctggtcgccacacttctgtgggggaactcgattccattattctaataatcatatctgatagagacagtgtttgagattgagggaagatgctgaccaagttcgtgaccatacgtaatagagtgaatggactgagtctccacacgtagagaccctgtatcctctcgagtcttcacagagacgtgagacacctatgggattaccgcatgggtactgttagtgacagagtcgatgagcatgatggtgctgtcagaggtgttcatgctcataatgaccagcccctgtaggtctttggaggggatgattaccagattaatgcttggaactatgtgacgcctaggtgcttggtcactattct

SEQ ID NO: 8893 - DNA, 428 bp, Glycine max
ccaaatccgctaaaagaaggccatgatctattcaaaaaaggacttttaagtgaaacagttgtgggattggaagctgtagtcctaaaaaaccctgtgaatgctgaagggaggagactgattggaatagctcatgcagagaatgatgatgatcaacaggctattgcagcaatgatgcgtgcacaggatgctaacccaacaaacctggaagtgcttctagctcttggtgttagtcatacacatgaactggagcaaacagctgatctgaaatatctatatggatggttgcgccatcacccaaaatatggtacacttgccccgcctgaaatggctgattctgtgtactatgctgatgttgctaggatatttaatgaagcatctgaactgtcacctgatgacacatatgtccacataggtttaggggtcatgta

SEQ ID NO: 8894 - DNA, 405 bp, Glycine max
aaaagaggagtttgagaatggcaacgatcttcgcggttcaggtggagttcctggagtttgcggcgttggttacttcaccagccttcggcatgacctatttcctcggctgcgcaggggagagaggattgactattgaggggaagttcataaagttcacaggcattggagtatacttggaggataaggctgtgccatcactcgccgctaagtcgaatggtaaaacttcagatgagttagttcacaccctccacttatacagggatatcatttcaaggccgcatgataagctaattacagggtcaaatattctgccattggctgacgctcaatactcttagaaggtgatggataactgtgttgtacacattaagtctcgtgggacttacggtgattcttaagccgcat

SEQ ID NO: 8895 - DNA, 258 bp, Glycine max
aaaaaacaaaaaaaaaaaaaaaaaaaatttttaacaaaaaaaaacaaaaaacaaactaaggggcacattcatacaaacgtgcacattcttctataatatcaccatatactatattcactgccccttcattttacaacttccatgacttgttaataaccctttcactacctaactaaatcgctcttacaatacatatcctctttctccagatgcccttatatcaaccagtcccattcatatcacacttcaaaaccttta

SEQ ID NO: 8896 - DNA, 446 bp, Glycine max
cgacacacgcgtgcgcacactttagctaactcttgaacaagtgtttaacgtacatgaaacacatgttggatgagggtgcgtctgtctaacacctagtgctagcattgcattctgataacatatttgcacaacattatcaccaagattcttcttcttagggtgaaaacttttaaggatgctgtacaacctgttcatgtacgataatgactgaccaatcataatccataggatatatatgtatcattgtacaagtatcatgatgacctgactgcacttgctaggcgtgtcaagctacatatcgtcatatgtcgagatgaataaattccgcgctgtatccagatattatacacgagagcaacaaacactgcttctattacagatggacctgatgtgatgaaaactgcattagctgaaagattatctcaacgtatagtgcctgcagatgt

SEQ ID NO: 8897 - DNA, 430 bp, Glycine max
cgcattttagctccctcttggacaattctcgaaagtacaagaaagaaatgggggatgagtatgtgtctgtggaacaccttttgctagcatttcattctgataagagatttggacaacagttgtttaagaatcttcagcttagtgagaaagctttgaaggatgctgtacaagctgttcggggaagtcaaagagtgaccgatcaaaatccagaggggaaatatgaagcattggacaagtatggaaatgatctgactgaacttgctaggcgtggcaagcttgatcccgtcataggtcgagatgatgaaattcggcgctgtatccagatattatcaaggagaacagaaaacaatcctgttattattggtgaacctggtgtggggaaaactgcaattgctgaaggattagctcaacgtatagtgcgtggtgatgt

SEQ ID NO: 8898 - DNA, 434 bp, Glycine max
  modified_base (1)..(2): a, c, g, t, unknown, or other
  modified_base (13)..(13): a, c, g, t, unknown, or other
nncgccacgcgtncggccacgcgtccgaatctcggtctctctcttcttacctacatacatgctgaggggcacacttctgtcggggaactcgatttcattattctaataatcagatctgagagagacagtgtttgggattgaaggaagaagctgaccaagttcgagacccaaagtaatagagtgaaaggactgagtttccacaagcagagaccctggatcctcgcgagtctttacagtggcgtgatccaactatgggattaccgaatgggtactctcattgacagattcgatgagcatgatggtcctgtcagaggtgtccatttccataattcccagcccctgtttgtctctggaggggatgattacaagattaaggtttggaactataagatgcataggtgcttggtcactcttctaggacaccttgattatat

SEQ ID NO: 8899 - DNA, 411 bp, Glycine max
tctacacgttcgactatatgttataccatataaaccactattctaatggacgaacgcggtggtagcaacacgttgtaacggccgaatcggtttcagactcggaattggtgtacaagagcgcgacgatgacacgggttcgaggcaggatcctaagtacggtccacaaggaacatgataaatgggtcccactgaccatactgagctggatagcgaaggacggaagaattcttagccttgatcagatctacctacactagctcccgatcaaggagcaccatgatcatcgacacgctagtatgttccaccatgcaagactatgtgatgaagatcacgccagtccctaaacatacctggaccatactaatgaccccgatcaggtactatctagaagttggatacgagttcggccac

SEQ ID NO: 8900 - DNA, 432 bp, Glycine max
cacacattaactcacctcttcaacaactctttaactctctacatacctacatacatactgagtagtctctctaatgtcgggtgagactttacatcattatcttaatatacacatctacaacagacactctttattattgagctaagatacttaccaatttctggacctcaactaatatatcgaagaaactcaattttcacagctctaaaccctgaatcctcactagaattctcagacacgtgttccaactatctgacttccctatctatactctcattgacacattccatgatcattatagatctttcaaatgtgtgcattttcctcatttcctcaccctgtacatctctctatgccatgattactcgactaacgtttgtaactatatcatccatagctgctcgttcactcttttatgacacccttatttta

SEQ ID NO: 8901 - DNA, 317 bp, Glycine max
gcattcgttgcttacaatgaaggctactttgaagggacagtacgatgtcgacaaaagcggcgctgtctttgccaacatcgacgcccagaaacccggttccttcatcgtcgactacaacgttcccaaaaaggactttccgattcagtctatgaacacggttagggttgcagagagtccggagaatttgacctacgcgcacagcatgggcgacatctgcaccatcttggatggaacctctgagtatgaatctgccaacacggtatctgccaattactcgctctactcatggaactgcacgcttaagtacacctatgttc

SEQ ID NO: 8902 - DNA, 425 bp, Glycine max
cccacgcgtccgctgacgcgtgggcaagatacgacgccggggccggaaatcttgttgtagcagaagtttgcaaagcgggggtggtggagcttacaatggggcggggggccgaattggaggaggttggaagagaggttgagggattggaggttgcaggcgactggctctctggactgtttgtaacttaaatgccgtcatcctcatacgcgttttcatgagcaatgtcaacaagcccttgttatccctctctagattgattcgttacaccaatggaaaggaggataagatagctgtggtagtctgtgccgtgaccgattacattagggtgtatgaagtccctgttctgaagtaactgtcctgaagtttactgatactgctataattagaattgataaggctgttgttgaattctttacctttgatca

SEQ ID NO: 8903 - DNA, 422 bp, Glycine max
cgaccgccacgcgtccgataaaacgatgaggaaataaaaaaaaaaaaaaaaaaaaaaaaaaaaaagaaaaaaaaaaaaaaaaaaaaggaaaaaaaaaaaaaaaaagaaaaaaaaaaaaaaaaaaaaaaaaaaaaacaaaaaaaaaaaaaaaaaaaaaaaaaaaataaaaataaaaaaaaaaagaaaacaaaaacaaaaaaaaaagacaaacaaaaaaaagaaaaacaaaaagaagaaaaaaataaaaaacaaataaaagaaaataaaaaaaagtaaaaaaaagaaaaaaaaaaaaaaacataaagaaagaacatacataaaaacaaaaaaaaaaaatgggcaaaaaaaaaaaaacataaaagaaaaaaaaataaaaaaaaaaaaaaaaaaaaaataaacaaaaaagctaacaaagatataag

SEQ ID NO: 8904 - DNA, 310 bp, Glycine max
ataaaaaaaaaaaaaaaaaaaaaaaaaaaattaaaaatatataaaataagaataaaattaaaaaaaaaaaaaaaaataaaaaaaaaataatataagataaaataaataaaaaataataaaaaaaaaaaaaataaaaaaaaaaaaaaaaaaaaaaaaaaaaaaaaaaaaaaaaaaaaaaaaaaaaaaaaaaaaagaaaaaaaaaaaaaaaaaaataaataaaaaaaaaaaaaaaaaaaaaatataatatataataataaaaaataaaaaaataataatataaaaatagaaatataaaaataaaaataaaaa

SEQ ID NO: 8905 - DNA, 212 bp, Glycine max
acgcacgcgtccgcccatacgaccgctggtaccgcgatgactttggcgcccactcaggcctacaacgcgttcgtcgacactaccaagaggaagactacgaacctgcgtgccgcggaaggggtagcgctcttcgacacgtgctacgaccagacggctctgcaaagcgtgcgggagccaacagagacatttcacagcaactgcgacaggacgtg

SEQ ID NO: 8906 - DNA, 218 bp, Glycine max
aaaaaccaagaaaaaaaaaaaaagggaaaggaaaaaaaaaaaaagaagaaaggaaaaaaaaaaaaaaaaaaaaaaaaaaaaaaaaaaacaaacaaaaaaaaaaaaataaaaaaaaaagaatgaaacaaaaaagaaaaaaataaaaaaaaacaaaaaaataaaaaaataaattaaagaaaacaaagaacaaaaacaacaaaaaaaaaataaaaacaaaa

SEQ ID NO: 8907 - DNA, 510 bp, Glycine max
gcgtccgaaaaaaaaaaaaaaaaataaaaaaaaaaatttaaaaaaaaaaaaaaaaaaaaaaaaaaaaggaaaagggtaaaaaaaaaaaaaaaaaaaaaaaaaaaaaaaaaaaaaaaaaaaaaaaaaaaaaaaaaaaaaaaaataaaaaaaatataaaaaaaaaaaaaaaaaataaaaaaaaaaaaaaaaaaaatatatataataataaaaaaaaaataaaaaaaaagataaaaattaagaaaaatataatataataaaaaaaaaaataaataaaaaataaaaaaaaaaaaaaaaagaaaaaaaaaataaaaaaaaaaaaaataaatatataaaaaaaaataataataataaaaaaaataaaaataaaaataataaaaataaaaaaaataataaaaaaaaaatataataaataaataatataaaaaataataaaataaaaaatataaataatatataaaattaaaaataaattaaaatatagataataaaaaaataataaagagaaataaa

SEQ ID NO: 8908 - DNA, 441 bp, Glycine max
cgcgtccgcccacgcgtccgcccattcgtccgtacacttacagctagcagatattacatacacgtgaagcactaattaagccatggagaagaaatcaatagctgggttgtgcttcctcttccttgatctctttgttgctcaagaagttgtggtgcaaactgaggcaaagacttgcgagaacctggctgatacatacaggggtccatgcttcaccactggcagctgctatgatcactgcaagaacaaagagcacttgctcataggcctgatgcagggacgattttcgctgtaggtgcaccaaaaactgttaaatggatccattcactccaacgagaataagatccttcctcgctatattataaaaaataaaactactaatatctattatatataaagactgtcacttgcattaatgacctatgtataataatatatattatt

SEQ ID NO: 8909 - DNA, 407 bp, Glycine max
aaaattaaaacataaataaaaaaccaaaaaaaaaaaaaaagaaaaaagttaaaataaaaaaaaaaaaaggaaaaaaaaaaaaaaaaaaaaaaaaaaaaaaagaaaaaaaaaaaaaaaaaaaaaaaaaaaaaaaaataaaaagaaaaaaaaaaaaaaaataaaaaaaaaaaataataataaaaaaaataaaaggaaaaaaaaaaaaagaaaaaaaaattaataaagaaaaaaattaaataaaatataaaaaaaaaaataagaataaaaaataaataaaaaaaaaataaaataataaaaaaaaaaaaataagataagaaaaaataaataaaaaataaaaaaaaatataaaaaataatataaaatgaaaaataaaaaaaaataaaaaaaaaaataaataaaaaaaataaa

SEQ ID NO: 8910 - DNA, 299 bp, Glycine max
ggaaatttatagtgtatgttataactatttgaaaatagatggttcacctgtgaaaggtgtattactgacctggaagtcgaagtccatctttctgatttgtagtttctcaagaattattattgttatccctgttcctagttcctacacctagttgattatcttgaataatatcttaaatatattacttatatttataatgtttattttaatatattaactatttttttctatcatttgacattcttaaatttttttttagatactataccttatgtttttatttataaatatatatattt

SEQ ID NO: 8911 - DNA, 397 bp, Glycine max
ccacgcgggcgaaataaaaaaaaaaaaataaaaacaaaggtttaaaaaacaaaaaaaaaaaaaaaaggaaaaaaaaaaaaaaaaaaaaaaaaaaaaaaaaaaaaaaaaaaaaaaaaaaaaaaaaaaaggggcggccccgaaaaaggacccaaccaaacacacccgcgcagccaacgcaaaaacccaacaaaagggcaaccaaaagaaaaacaacgggccgacgaaaaaaaaacgcagaacgggaaaaacccgggcgaacccaaacaaaaaccccaggcaaaaaaacccccaggcgccagcgggcgaaaaagcaaaaagccccgaaccaaacgcccacccaaaaaaaggccaaacccaaagggcaaaggggaccccccaagaaacggcccaaaaaccc

SEQ ID NO: 8912 - DNA, 298 bp, Glycine max
acgcgtccggctttaacagtccccttttactggtaaaagttgcaaatgaggtgacttatcgcaggatgaaaagacccttggatcagttgagtaaagagtgcacaagggttctgcctctgatctgattcctgtcttgtttggggaaaggccaccaacagtgttcaagaaggatgtatctttcactccctttaataaaaatcttgatcactcccagaaagaagcagtttcaaaagctctatcatcgaaaaatgtgttcttgttgcatggaccacctggaacgggaaaaacttcaacagtt

SEQ ID NO: 8913 - DNA, 231 bp, Glycine max
cttttaagcaggggtttaaaatccgagctctctcgtggtgatgtcgaaagggttacattttacacaacaatcatacaaagcaagtgactcattcccattcaaatggataaacaagaagtggagagaaagttttcatgttacttcaatggctactgcatgaaatcatatatatgttgatatgttacgaaatgcttaatttattgatcaagtttttgaacttgattatctcta

SEQ ID NO: 8914 - DNA, 274 bp, Glycine max
accacaaggcctgacatggttctttttcttcttttggactcattctttcttgcataatatcaactgatgcttctggtctgtctaatggctattgttctgttcaatatgacaatgaatatgctgcacacaatgctatatacaagctaaatggcatgcttatcaatgattatcaagtctatgtatgccattctctgctaaagtaatacatttagaattcttttatcatgactaaaatttaataatgtttattttaaaaacttattatattcaacca

SEQ ID NO: 8915 - DNA, 364 bp, Glycine max
acgcgtcctaactttgatcaaataggccttgctcaaaagatttacaagcatgagcttcttgagatgagacagcgtgctgcttacatttacgagaaggcaagtatgccgaagcagtctattgctttgtcaaagaaggataacctctacaaagatgccatggagacaacctgccaatcctgggagcgtgaactcgctgaagaactgcttgtgtactttattgatcacggtaagaaggaatgcttttcctcatgtctatttggatgctattatctcatactggcagacattgttcttgaactaacttggatgcaccacatgattgactttttccccccatatctattgcagcttattcctgagttca

SEQ ID NO: 8916 - DNA, 234 bp, Glycine max
ctctctacaaggtctatacattatgcacaggttattaatgatctactcatcaaattagacaagttcccgtcaaatctttcaccaatgttcatgattaaacccattcaatttgagaaagattatttcacatactaccatatggatgtgattgttcggctttccaacatgagggcccgcaatttcagcattacctaagtttacaagcttaaaaccaattttattgcttgactgatc

SEQ ID NO: 8917 - DNA, 378 bp, Glycine max
cactcgtcctgcttcctcagcatacacttaactactaagtcttttgattcagtctaccaaaatcccttaaaagcgtcctaatactctacattgtccattgttattaccttcactgtgttcttgctcttgcattgtctacttaaaacttacaagcaaaaatcgagtcacaagtttccccctataccatggaagctacccatcactggtaacctccatcacctttcattatcatattcacttccctgatcaaactctacaaaaactcgttctcaaatatttacctctcattcacatccaactatgtgaaattttaacactctttgtgtccttcccccaagaatattataccacatatgaaaacccattaagttcattttt

SEQ ID NO: 8918 - DNA, 452 bp, Glycine max
tcccacgcgtccgtacctttcttattttaaatttcttttctttcataatacttctgcatttgttctatattttcggtggtcatcaacattccactatagcaaactttcatacctacatgctttaacattattatttgtgactttccattcttatattcttctgttttttcttttcttcctttttgaaatctctatttcttttagtctagctacattgcaaatctatacattttatatttaaataccctcttccttactacctactgtcttctgtaattatgacaattattcataaacacaatagaatcctaaataaaatctggtgattatttctgaagattcttacattggctctctgtatctcaatgaatcatttaaattcctaatgacatctctcaactatggttttcctctttctatatctgttatgacctctaatctataatgttcat

SEQ ID NO: 8919 - DNA, 277 bp, Glycine max
tttacatctgcatcttcaatattgcttctggtttattagcttcgcgaactagaacaaataaccctatacagatccattccatagccatgtcacgtgttgtccctctatctcacgattgagaacccgtcgttcttcttaagaaggctcccaccgtcgacgccaagaatgacgagaaagccgtcaactcctgccggcgctccgacgcgcaaattgaaaccctaaaaaagtataatgctggtacaaataaagcatcatctagcatcacttcattgaacac

SEQ ID NO: 8920 - DNA, 435 bp, Glycine max
  modified_base (280)..(280): a, c, g, t, unknown, or other
gcttaggaaaaaggcctatgttcaacaactagagtcgagtaggattaggctgagtcagctggaacatgagctacagcgcgctataactcagggcatgttcttgggtggaggtgcactatagggtggagagcaaggacttcctgtcactatgaataccattagcacggaagctgcaatgtttgacgtataatatgctacatggcaagatgagaaccaccgcataatgtgtgagctaatagctgcagtgcaagagcacctttctgagaacgagcttagactntttgttgacaattgtttggcacattatgaccaagtgatgaacctgaacagcttagtggccaaaacagatgtgttccatcttgtcactggcatgtggtataccccagctgaacgttgctctatgtggatagatggattcaggccatctgaactcat

SEQ ID NO: 8921 - DNA, 241 bp, Glycine max
ctaaaaaaaaaacataagaaaaaaaaacaaaaaaaaaaaaaaaaaaaaaaggataaaataaaaaagggaacaaagaaaaaaaaaaaaacacaaaaaaaaaaaaaaaaaaaaaaaaaaaaaaaaagaaaaaaaaaaaaacaaaaaacaacaaaggattcaaataacaaaaacaacgaaacaaaataaactaccaagcaattagaagatagaaaaacacatgatcattacaacatacaaaagg

SEQ ID NO: 8922 - DNA, 448 bp, Glycine max
  modified_base (63)..(63): a, c, g, t, unknown, or other
gtccgccattttcgtggtagatttgaaatttcgctttatcaaccggaaaagtttttgcaggantagtagcatttgcaacgggggcatagtacccttcttaatatgccttctcttgttgggggaaaccataagcagttttctgcccagcagcaaaatccccttttgcagcaagtgcttcttgtgtatcaaatttgtcttcactttgcttattggttctttattggaagattcattatgtccaacaaaattgagttgtctagcctaaacatgcatttcatgcatgttcttctaatattaagctttgaccctcttgataatattccaagctaaatttgaattcaattttttgttttctatgtttctctaccttaaatgatggagaaagtttaagggggaaaaggaagaaaattcatatttttccttttctgctggttttaatttactgcct

SEQ ID NO: 8923 - DNA, 442 bp, Glycine max
atttttgtatgcatttatccaacttaattcatacggtatgcattagtgatattttgctgggcttaggcgagttgtgttgtcttgaaaaccctctcccgccaacacacttcttcttcttcttttttgtgttttgtgaatactgagatgagtgctgtgaacatcaccaacgtcaccgtcctggacaaccctgcttcctttctgaccccctttcagttcgagatttcctacgagtgtctcaccgctctcaaagatgatttggaatggaagctcatttatgttggatctgctgaggatgagacctatgatcaattattagagagtgtccttgttggtcctgtcaacgttggaaactatcgttttgttttacaggcagatccaccagatccatccaagattcgtgaagaagatataattggtgtcactgtgcttctgttgacctgct

SEQ ID NO: 8924 - DNA, 316 bp, Glycine max
ttgtctttgtctacgtcgacgacaacttcaacaccgtcacgctttattcgcaagtcggggtgttgaacatcaactggtttcagaaacagcccaactgcaatgaccaggtcagcatgacacttaatatatctgcagatttgcttttcctttttacattgaacacacaataactttttgactttctaactgctgactttgaaactcccaacaattccttgcatcatatatccctgcggtatggaatcactcccttttaagagcattccaaattttcgattcatacatctaattaataccacttcatttaccaaaccag

SEQ ID NO: 8925 - DNA, 225 bp, Glycine max
ttttatttttcttttttcttttttttttttttttttttttttttttttttttttttttgttttttttttttcttttttttttttttttttttttgcttttttttttttttttttcgttgctttttcttttttcttttttttcttttttttttttttttttttcttttttttttttttttttgttttttttttttttttttttcttttctttttttttcttttttt

SEQ ID NO: 8926 - DNA, 432 bp, Glycine max
accacgcgtccggtaagggctgctgatgtgcatgctgattctgatgacctcgaaaaaagtggtcatgagcggagcaaaactactggaaatgctgctggcacagtagctcgtggtatcattgatctgcaaggataaactaatcacatgaggatggaaccgtgctttataattgtggaataaagcatcacccatttaaacccgtttggttaggtccggtctgtgtacggctgaattctgtgttttgcttgtatcgcatatgacggttatatgtcgacacttgatgcttaatcaaattgttactttgcctgaagtatgtgttagtggttatccttaataaaacaagcagttcaaggtcttctacttgaagatgaagggcgattaccaccgctatctcgccgagtttaatgttggggacgatagaaaaaccgctac

SEQ ID NO: 8927 - DNA, 225 bp, Glycine max
cccacgcgtccgcccacgcgtccgcccacgcgtccgaaaaaaaaaaaaaaaaaaaaaaaagaagaaaaaaaaaaaaaaaaaaaaaaaaaaaaaaaaaaaaaaaaaaaaaaaaaaaaaaaaaaaaaaaaaaaaaaaaaaaaaaaaaataaataaaaaaaaaaaaaatataaaaaaaaaaaaaaaaaataaaaaaaacatatacgatataaaacaatatatactatt

SEQ ID NO: 8928 - DNA, 347 bp, Glycine max
gaaaaaacaggaaggagacaacgggaaggaagagttgaaagaactggaaggagagaaaggaaaggaagagttgaaagaactggaaggagaaaaaggtgaggaagagttgacagatactgtgaccgagataggaacagggagtgggagcgagatcgagaccgtgaaagatacagagatcgtgacttggacagagatcaggatagggacagaatcaggagggataaggagcgtgaaagagagatagagaggagttttgattatgacaagaggtctaagtacacagagagagaaagcagccgggattatgacaatggtagtaagcactatcgtaagagcaggagtcggag

SEQ ID NO: 8929 - DNA, 200 bp, Glycine max
aaaaaaaaaaaaaaaaaaaaaaaaaaaaaaaaaaaaaaaaaaaaaaaaaaaaaaaaaaagggaaaagaaaaaaaaaaaaaaaaaagaaaaaaaaaaaaaaagaaaaagaaaaaaaaaaaaaaaaaaaaaaaaaaaaaaaaaaaaaaaaaaaaaaaaaaaaaaaaaaagaaagggaaaaaaaaaaagaaaaagagagggac

SEQ ID NO: 8930 - DNA, 419 bp, Glycine max
gatacgcgctcctataggcttccttagattcttttcacaagcgaacgtaagccttaagcgagacttacatcctttaatgacaaggcttgtacgctacctgaatgatcctgacataactgtgcacgatgcaatgatacatatatggaagtcacttatgaatgattcacagaaaaccatccatcaaaatttacatcatatcattgaatgatttactaatgcattaggtatccaacctattgagctcactttgaggtaccatgtcttgctcttacatacatattccaatgacgaacttttcatgacgttagaaatcatttaattatattatggactagaacattaagtctcatggatcacataaaggaaactgttagaataactgttcaaatattctaccgaactataacttcctttacttc

SEQ ID NO: 8931 - DNA, 175 bp, Glycine max
aaaaaaaaaaaaaaaaaaaaaaaaaaaataaaaaaaaaaaaaaaaaaaaaaaaaaaaaaagaaaaagaaaaaaaaataaaaaaaaaaaaaaaaaaaacaaaaaaaaaaaaaaaaaaaaaaaaaaaaataacaaaaaaataaaaaaaataacaaaaaaaaaatgaaataaaaaaat

SEQ ID NO: 8932 - DNA, 431 bp, Glycine max
gaattgcagttcgcaaccaatcatttaggccattttctcttgacaaaccttttattaggaactatgaaaaaaacagtaggggtatgcaaccaggaaggaagaatagttattctatcatcagaggcacacagatttgcttatcgtgaagggattcaatttgataagatcaatgatgaatcagggtaatggtctggttggaatgataaatcaatgataaaccttttccctatttggctattttctactaagctcttgctataaaaattcataataaatgtatattattcatgtccaatgttttgagtccccaaaattgcataatttccttctctatctgagttttatacaggtatagcaggtaatttgcttatggacaatcaaagcttgctaatatcttacatgcaaatgaacttgcaaggcgcttgaaggaa

SEQ ID NO: 8933 - DNA, 346 bp, Glycine max
tggactcctgtgcgggcacgtgcctacctcttgatgcaggatgcgacaccggggatagaccctcaccgcattgaccgtatccctagagggggtacgatctgacaccatcgacaacgtctaggcctacagccaaggcatggaatgaattgcgaaggaccaccaacgtgtaagaaagcacgctaagcaactgggagactgaccgacactagctgactgcagcatcaataaagagacgcctcctcaactaggactacgtcaacatgatggcatgcaaatctacaataagacactcaccggcaagaccataaccctagaagctgcatgctccggcaccatcaatgactgg

SEQ ID NO: 8934 - DNA, 443 bp, Glycine max
ggtgaactgaggagagagagagagaggatgagaggggtgaagagagcaatgtttgtaggcatagccctgagaagcaattccaacagcggcgtgtctgcccatggccatggctgcttgaccccatcaaatccaaatccaaatccaaatccttgtgtttctgttactgggttcagatacctttctgcttatgctgctgccacgtctcttgtccaagacgctctgaccaatgccgttaaacccaaagaacttgcctctttcaatactaggcctagccattctgcaacaagcgtttctggactattatgatattccattcaaagcggttgaggtaaatcccatctacaagaaggagatcaagtggtccgactacaagaaggtgcctatcctcaccgttgatggtcaacaaaaggtcgactcttcagacataattgataaattgatca

SEQ ID NO: 8935 - DNA, 309 bp, Glycine max
gcattttatacccggtctcgttagcataaggatgactgcactgctaacaggtggataggtgctgcaaaagccatgcataccaatcaagagggctacagacttgttagggcacacacgcttagagccgtacgatatacaattgctggatgctgccatacagagactctaatcgactatagaggaagagtagctatccaattgaaaggatgcatgttcacgactgcctcagtgtatgatattgccattccttatgatcactggactaatcacgatctccggatgagagcttctgctaattattccttgacc

SEQ ID NO: 8936 - DNA, 356 bp, Glycine max
tcgcggacgcgtgggtttcttcattatttcagcttttgcattggtgtcatagctccttgctgcggggggatacaaaggcatgaaggcagatgattgttgggtccaacttaaattataccatcatggaaaaattggttccaaggctttaacatttgctacatgaattaaagctctggctcattatgttcatgggaaaggtttgaagactttgatatattcacatgcatgaaattcaactctgatgaaacgcatgcctggatcacttggacacgaagaacaagatgccaaaacatttgctttttggggagtttactacttggagtaatgataattgtgaaaatattggtttatttgcc

SEQ ID NO: 8937 - DNA, 446 bp, Glycine max
tcttactaaaaaaaaaaaaaaaaaaaaaaataaaaaattaaattaaaaaaaaaaaaaaaaaataataagtgaaaagtataattaaaaaacaagtatataaaaaataaatattttatataacctcttcttatattttctattctttcctctttttttttcatacttttatttttataatacttttttttcacttcatttttttttcttattatttataatttttttatatattattatccttttaattactccttcttttattatcttttcttttaaaaactttttttaatttcttattttatatttttacattctttttttatctttcttttttccctacttttttttcttttttaaactcaattttaacctcttcttttttaccttccttttatcctcttttttttgttttttcttcttttttttactctttattttctcttttt

SEQ ID NO: 8938 - DNA, 407 bp, Glycine max
tatgctaggcgtaaccattaatccgtgcatgtatagagatgaactagttcagactgaccatctgtggatggctcattatatcagacattgagagagcgatagtgtatactactggggttaccgagaatattctagaacttataccatcaacaaacgcgaactcttctaaggtatgcacacattatattaaatgtcaacacatgctttgtctgctgtttcgatcattcatgatcactcatgcgatcacactgactacgttccatgaactcattactacaatacttgctgtatgaactttcgactgtctgatagtagactaccatactatacacaattgacctgaaactgagacctgatagctgatcatgatccatagaactctctatcacattgctcgtatgctacat

SEQ ID NO: 8939 - DNA, 433 bp, Glycine max
cgcaggcgttgggactccagctgcagctgcagctgcagcaacagacgctaaggcaggcaagtatggagctgctgcaggcttagtgcctgttgggccatgctttgtcccggtagtagttggtgtcccaggagctggcgttccaggtgttggtgtaccaggagctgtgattccagttgtcccaggtgctgggatcccaagtgctgcggttccaggggttgtgtcaccagaagcagctgctaaggcagctgcaaaggcagccaaatacggggccaggcccggagtctgagttggaggcattcctacttacggggttggagctgggggctttcccggctttggtgtcggagtcggaagtatccctggagtcgcaggtgtccctggtgtcggaggtgttcccggagtcggaggtgtcccgggagttggcatttccccc

SEQ ID NO: 8940 - DNA, 365 bp, Glycine max
ctctctctctctctctctctctgcttcactttctgacttttgcattgtcttgtcaggcagggaatcctcagaaccaggatcggtgcccttctggctctgatctctcaaagctgcaaattctgcttgattggcttgcttgccagtttggagtatgatatcacctccgactgtagttacgcgagatgatgggctcaacaacctgtcgtctaccgggtcgtgcgactctaagcagtccttgaaccatttctctcagaatggcgctgcattgacagaacgaaattacttagggttatctgatcgatcatcagttgatagcactggcctctactgccccatagcttgtgtgatgacaaaaaggagaacat

SEQ ID NO: 8941 - DNA, 163 bp, Glycine max
ttcataatgggtgttttcacattcaaggattaaatcaactcccctgtgactcctgttacgctttactttgatctagtgacagatcctgacaacttcataccaaacgctcttaattccttcaaaaatatttaaaaccataacttaaatggtaccctaagaacca

SEQ ID NO: 8942 - DNA, 249 bp, Glycine max
tctgactcttgggcttactcttggtaaaaaaaatataaaaataaataaataaaaaaatgaaggaaaaaaaaaaaaaaataataaataataatataaataataaataacataaaaaattataacttatattattattttaatataccatctattcatacttcttttttaaattttatttctttcatttacctttatttattttaatattatcttttctaatattacaacttttctacctaattaactctc

SEQ ID NO: 8943 - DNA, 423 bp, Glycine max
ctgttttgccggtcctggttcccggttgccggtgatgttaagggcattctgatcatcatgcacgggctcaatgaacacggtggaagatatgcggactttgcaaggctattaacatcatgcaactttggtgtctatgcaatggactggataggtcatggaggcagtgatggattgcatggttatgttccatctcttgatcatgtggttgcagatacgggggctttcctggaaaagattagatcagagaatcctgggataccatgctttctctttggtcactccactgggggagctgtggtcttgaaagcggcttcccatcctcatattgaagtaatggtggaaggaattatattaacctcaccagctttacgtgtgaagccagctcatcctattgttggtgctgtggctccaattttttctctg

SEQ ID NO: 8944 - DNA, 444 bp, Glycine max
cccacgcgtccgtccacacgtacgaccacgcgtccgaaaacaaagacaaaaagattgaggagaaaaaaactaagtttatgaaaagaaaaaaggaaaggaaagaaaaaacattatacagaagaaaaaatagatcaaactgagaaaaaagaagaagaaagaaatgagaaatagaagagaaagaaaaaataaagaatatgttgaggaaactgagtagcatctcatggatggctgaaactggtacagctggagtagaatgtgttaaagatgcatcaacttcactcctggaggagacagcttgtggttcttttggaagaacattctgtaagtgttgggcatgcaatcctagtcatagagccctattgatgactgtagtgaggtctgtggtgcctatgttgtgtcatttggccaatgtgccaatgggtatgcagctgttgcttccctact

SEQ ID NO: 8945 - DNA, 346 bp, Glycine max
cggacgcgtgggaaaaaaaaaaaaaaaaatttaaaaaaaaaaaaaaaaaaaaaaaaaaaagaggaaaaattaaaaatcgaaaccgtccttctatagaatccatacttacatacacatcctataaaaattaatacctttcatttaaatatcccctaaattaatttaattgcccttctttttacacctttgtttctgtcaaacccctttcttttcccattttaatccccttctttaacatccccttttccccaattgccttattatctataagtcccctccctttcccccttcccaccattttctcatcctgattgttaaataaaacccccctttttactgcccttta

SEQ ID NO: 8946 - DNA, 432 bp, Glycine max
  modified_base (419)..(419): a, c, g, t, unknown, or other
gtcttggaacgcggctgggacgttgcttgcaacttgtagtagagataagtctgtttggatatgggaagtgctgcctgggaatgagtttgagtgtgtgtcagtgctgcaaggacactcgcaggatgtgaaaatggtgaagtggcatcccacagaggatatcttgttttcatgtagctacgataatagtgttaaggtttgggcggatgaaggtgatagtgatgattggcagtgtgttcaaacgcttggggaacccaataacggtcatacttccactgtttgggccctctccttcaatgtgagtggtgacaaaatggttacgtgtagtgatgatcttacactgaaggtatgggaaacagaaagtgtaaggacgcaatctggtggtggatttgcaccttggacacatctttgcactctttcanggtatcatgatcg

SEQ ID NO: 8947 - DNA, 455 bp, Glycine max
cccacgcgtccgcccacgcgtccgctcagatctttctctcactctccaacaatcgggaggcaaaaccctaccaacaccacactcaatcgaaattcttcattctcttctcatcgatggggcagaagtctctgatctacacgttcgtgtcgcggggaacagtgattctcgcggagtacaccgaattcagcggaaacttcaactccaacgccttccagtgccttcagaagctccctgccaccaacaacaagttcacctacaattgcgcacacaccttcaattacctcgtcgacaatggctacagttgggagtgtgataaagagtccagaaatatctggtcttgtccctactctacttaaggaactttgtcatcctaatgagcatacaaaatattcctttaatattcttcatcaagcttttaataatgttttcagttgtggtatcacttgctaaacaat

SEQ ID NO: 8948 - DNA, 430 bp, Glycine max
gcttatcttgatttgtcccataattctcttcatagtgaaataccttcttcattggcagatttgacccaattagagttcctaatcatctctcacaacaacattcaaggctcaattcctgagttgttgtttctaaaaaatctcactgtcttagatttgtccaataattcacttgatggtgagatacctcgtccggcaaatcttatccaattacagagcctaatcctttctaacaacaaatttcaaggtcccattcctcgtgagttgtttctaaaaaatctcattgtcttagatttgtcctataattcacttgatggtgagatacctcgttcgacaaatcttaccccattacaaagcctaatcctttctaacaacaaatttcaaggccccattcctcttgagtttgttgtttctaaaaaatctcactgtctta

SEQ ID NO: 8949 - DNA, 456 bp, Glycine max
cacagtaacaatcaatcaaggttttctttttcaaggcatgaggaatccataatccatagtgttttattcacatgcatgttatggtgtcagcctttaactaccatatctaacagtcttcctcaattgtgcataaagagacttgtatattgatttgtatgtcatttcatatttattttataccattgtcttttaggatgcgttatataaatttagtgttctcaacatgttactttttctgaattttttcgttcattttatttgtttctttttttaactttcttgtttttttttttatgtttattttttttacctttatttattattcttattatagataatctcttttttctttttttttttatattacttatttttcttataattttttatattttatttattttatttttttcatttttacttatttttttttcactttttatctatttctttttt

SEQ ID NO: 8950 - DNA, 344 bp, Glycine max
taaaaaaaaaaaaaaaaaaaaatttaaattaaaaaaaaaaaaaaaaaaataaaaagaagggataaaaaaaaaaaaaaaaaaaaaaaaaaaaaaaaaaaaaacaaaaataaaaaaaaaaaaggggttgtcattttaaaggtccaaattttacttactattgcttgtcaataaataaattttttttaggttcatctaaatctaattaatggacctaattttaaaaacagtttaaattgttaaaaaccttggtcttaccaaatttaatagttttaaagaaaatcctttttttacaagttgggataaattcaaaaagcccattactaatcgccttttcaaaaattttt

SEQ ID NO: 8951 - DNA, 429 bp, Glycine max
cccacgcgtccgcccacgcgtccggtggaagtggaaatggcaactctactggaaccacggctgggggtggtatcatagttgttggatcattagaacatcctttgtcaagtttgtctattcaaggttatgtaaaagctaatggaggaaattttgaaccgcaaatcagaaacgaaaaatttgcaatatttgacaattttactggaggtcccgggggtggatctggtggcactatactaatgtttctacatatgctcaccattgggaaatcagctgttctttctagtatggggggatatagcagttctaatggaagtggtggtggaggtggtggaagaattcatattcattggttcgacatttccactggtgatgtttatctgccaattgctagtgtgaatggagacatttagatctggggaggaaagggta

SEQ ID NO: 8952 - DNA, 356 bp, Glycine max
aaaaaaaaaaacaaaaaaaataaaaatttaaaaaaaaaaataaaaaaaaaaaaaaacgggaaaggaaaataaaaaaaaataatgaaaaaacaaaaaataaaaaaaaaaaaaaaataaaaagggggacccttttaaagaacccaaactaccgcaccctcgcttacaacaaaaaacttttttattaggtacacttaaattaaattaattggcccaattttaaaaaccacaaaatgggaaaaacctcggagaaacccattttaatgcttctaggccaaatacccttttatccattgggcataatttcaaaaaggcccaacccttttacatttccaaacatttgcccagcctaaatgcaa

SEQ ID NO: 8953 - DNA, 439 bp, Glycine max
ctcacgcgtacggttaagacatggcctagtacattgattgggtcattaaaaacaacactgctgtgtctgccatatatgagcttgcaggtatgctatcgcacattacagcagcgcagtacataggaatgtgctatggaatgatgggtgataatctaccatcaaggcatggaagctgcatacttatataaaacacaaggcattgttggaatgcgtatatactacacagttgaggaatcactagaagtgcttagaggttaaagcattgtactgattatggacatgtataatgtaacacttcagtcatagacagacttgaatgcttgtacagactgcgtcattcaatatgggacaccttactcgcgagacgccaatttcaagttcatcgatgttggtaatgaaattcatacgagtaccactgtggcacaatatattctatgtg

SEQ ID NO: 8954 - DNA, 313 bp, Glycine max
ctcacgcgtccgtttaagacggggattcgtacaacgatacatgcaatgctaacagggcgggattatctgccacatatgatgctagaggtaagcccactgtcatgccatggccacaaatgaccttgactttgactgggaatgattacccatttgtcgacgataattatattcaacttgagtgctgagctgcttcaacactcccctgttcacaacaaggtttcatcgctatttcacaatgagcagaccatatcagagccttctgcgattgtttaatacttttattagacatggtagaacaaccagtcttattacc

SEQ ID NO: 8955 - DNA, 415 bp, Glycine max
atagaatcccattccactagaacactgctttggtgacccaaccagctagccacatcgacgcatccacacgcatttcctctaccaccgacaccgctccctgtcactgaaggaggaggatcgtcgcgactacctcgcctgcgcacactccactggatcttgatggcaaccacatcgtgcccctcaccatatgcatgatcgacaccggcggcttcataggctcccacctatctcagaagctaatggccgatacgcaccacacacgtctcgctgttgacgactactgctacaagatccgtcaccttgtcgaccccgagccgccgtacctttccaggcgcatctcattccaccgccttaacataaaaaacgactccaggctaaaggtgctcattaatattgccgatctgaccataaacct

SEQ ID NO: 8956 - DNA, 349 bp, Glycine max
gcaatgaataaattgaaaaggatggcattgcgtgttattgcggagaggctatctgagggagaaattggcggcctgaaagagttattcaagatgattgacacagacaacagtggaacgataacgtttgatgagttaaaagatggcttgaatcgagtaggatctgaacttatggagtgtgaaatcaaggatcttatggatgctgcggatattgataatacgtgggacaattgattatggtgaattcattgctgccactgtgtatttaaataatctatagatagaggataacctagtgtcagcctattacgtattttgacattaatggcaagggttacataacccttgatga

SEQ ID NO: 8957 - DNA, 430 bp, Glycine max
cccacgcgtccggttggcaccctccttggtcatggctttggttctcactactggggagggttcactccggttgctcctgggtttctctacttaagagtttacaggtctattagagatgtgatgttcttgacagatgaaattgtatctcttttaatgctttcagttagagatatagcaaatggtgggttgcccaagggtgaagtggagaagctaaagaagactaagtatggaatgagatatggacaggtttctctttctggatcgatgacacgtgttaagcatgccgctcttcttggggcttcgtttctttggatatctggtggttcaggtttggttcaatctttgattacagaaactctgccttcatggtttttatcagcccaagggttagagcatgaagggggagaatctggagttgtggttgctatgc

SEQ ID NO: 8958 - DNA, 439 bp, Glycine max
aaataatagcataaaatattataaaaaaacttatatattataaagataaatttctcatcaagaaaagacttttatcaattaggtaaaatacaaggaatatttcagctttaacataaggggtattcaaggttggtttaagttggatttaactaaatcttttattcaattcgttcaaaattatattggttgagttgaatttatgtgattttgttgttaaatttaaactgaatcaatctagtcacaaataaattgacttgggttgagtaagtcaggtctaagcttttatagttattttaagtgtcctaaagaataattttttttcttaccaatttttacatattctatagttaattattgtatatttaattaaaaataaatgcacattctaaagatattgaattttatcaacgttgcatacttgtactaaacaataaattaa

SEQ ID NO: 8959 - DNA, 464 bp, Glycine max
ggtccgaccgacgcgtgcgacctcacatcctatatatttcaacaaataattaatcttatatattacatcaaatcattaagataaggcacaataaaccggagtgtaatctaagaatatatatactgataacataatgatacattcagagtaaactaaatttggacctacttaaatttatctattaatactcatacataatattattaattgaattgaatttatgttaatatttgcacctacatataaacaaaatctacctattcacaaataacgttactctaattcaataattcattgctatgcttatacagataatcctactattcaaaataatatttattaatattactattacctacatattctatatattcacattgcccatttacttactaatatatgcacatactaaatatactccattatatctacataccatacttgtactaatcaataaatgaata

SEQ ID NO: 8960 - DNA, 348 bp, Glycine max
tctaatctataaattcacccacatattttaaaaattcattccaaggatttactagaggcactgtttatcataacaggtatactactaatctatactaaaactccatccaatgcacacaaatattctcacaaaacaacaccatagcatgctcaaaatttaacacttttatataacaacaccattacgatcacaactatatacttttgtataacatcaaggacaagatccattatgatatccatgacaagtgttacaaaaataacaacaaggacaagaataacatggatcatttacatcaccatcatcgtcatagcatcatcattgacattgattatatcttatatgtta

SEQ ID NO: 8961 - DNA, 443 bp, Glycine max
ctcacgctctctactcttacggcactttccataaacatggccataaggtctggctcactggatcgatggccatacgaggaacctacatccgtcatactgacgctcgacgaacggacttcaatgagatacggaaatgttatcagaaaacctcgccagcatcgtcgacacctacgaccggcacgcgtacctctgctacaagagtcacctgtcctgtccctctcgcatctaggcctgcgacgacgatcccttccgcaagcgcgtcgccgacaccttcaaagcccgcaagaacgacttgcccctcaagacgaaaatcaccgtgtgcgaggtgcgtgaggaggctggcttactcgacggtgacgtgttgattctccccgacatgatcaaatacaggggtttggaggaatcaaatgttgatagctgtatcgaagatgttgtggtgaatg

SEQ ID NO: 8962 - DNA, 412 bp, Glycine max
atttaaccctgttttaataataatcctcgccactctaccgtatagatgcacctgatcgacatttctcacacccctctacatcatcagaacctcaaacttgcaaacacaaacaccttactaacctgcaatcaacgagcgctactgcttttcaaatggagagcacacattttcgatatactccactgacaaacctcatatgcatagcactcatactaatcctcgaactgatattcacatctctggatacgattatacattccgtgtatgacactttcaaagctttttatacgtgcctactagcacaaacaaactctgcatccaacaagtgttccatacataaacttcttacacaatctcatatacatccatctcttgtgctactactaatcattacctatctcatactctttaa

SEQ ID NO: 8963 - DNA, 135 bp, Glycine max
gcgcccacgcgtccgaaaaaaaaaaaaaaaaaaaaaaaaaaaaaaaaaaaaaaaaaaaaaaaaaagaaaaaggaaaaaagaaaaaagaaaaaaaaaaaaaaaaaaaaaaaaaaaaaaaaaaaaaaaaaaaaatga

SEQ ID NO: 8964 - DNA, 451 bp, Glycine max
accgacgcgtgcgtgaaagccctaccctatatataacatccgtgctgattacacaaggtcaattcatttgggcgctgtcgctgttccaaaaccctaatccttcgtcttccagaaaatggctgattctccccttgcaaggaattcaaggtccccttccccgtggaaagctcagtcgagatctaggtctaggtcaagatctaggtcgaggtctaggcctagacaaaggccaagatcccgttctagaagtcatggcaggtcaagatcaccaattcatggaaggtcaaggtcacccattcatggaaggtccgagccttcaaatcctggtgacacactttatgtaaccggtctatcttcaaaggtcactgaaagagacctagaggagcatttctccaaggaaagaaaagtttcttcatgttttcttgtggtggagccccgtacacggatttctcgt

SEQ ID NO: 8965 - DNA, 435 bp, Glycine max
gttagttgtttaatgaacgcaattcggtcccgttggttgacgagaatggcagaagacatggggaaaagcaacctcgaatcctcttctgcttcaacaacttcccgaggcttctggccttctgtcttacgttggatcccctcttccaccgatcacatcatcaatgctgaaaaacgccttctctctcttgtcaagactccgtatgctcaagaacagtaaggatgattctcctacgctggtgatggttcatggatatgcagcatcgcagggtttcttctttcgcaattttgatgcccttgcctcccgtttcagagtgattgctattgatcaacttggttggggtggatctagcaggcctgactttacatgcagaagcactgaagaaactgaggcatggttcattgattcttttgaggaatggagaaaggccaaaaacct

SEQ ID NO: 8966 - DNA, 439 bp, Glycine max
ccactcgtacgggggatgtgacggaagagtagaaggaagttgaagtgactgaagagaagagggaagctgaagtgatagtagaagagaagaaggaagttgaagtgacggaagagaagaaggaagtggaagtgaccgaaggaaagaaagaagtggaagtgatcgaagagaataaggaaacagaagtgacagaagaaaagaaagaagtggaagtagaagtgagggaagagaagaaggaaagtgaagtgaaagaagaagaaaaaggtcgggaggttgttccagaggagagtagcaagagtagtaaggtgactctgtctgggttgttgaattttatagatgggatttggtctgcttgtggaggtgaaaggatcattgttttcacgacgaattatgtggagaaacttgaccctgctttgattaagagagggaggatggataagca

SEQ ID NO: 8967 - DNA, 413 bp, Glycine max
cgaccgcgcgtgcggaccaatccatagccgaagagaaaaagagacaaggaccgtctagaattgatttcattgaggggggcaggaaccaattccatgtgcagtttctgattcgtcaaacggacaaaggaagtgaaagggtttaaggtgtgacctgagatcaacatgttgcggaggcttctctcttctcacctcaaaaccctagccgccaccgcttcttcttccactccccgatctgctttcgccgtcgccagattcgccgctctctctcgctcctcccgctacttctcaacccagtccgaggatgctactgccatcaaaaagaaggttgaagatgtaatgccaatcgctactggtcacgagcgcgaggagcttcaagctgagctcgagggaaagaatattcttgaaatagacca

SEQ ID NO: 8968 - DNA, 437 bp, Glycine max
  modified_base (417)..(417): a, c, g, t, unknown, or other
cccacgcgtccgaaaagatgagttccaattccagagagagtcaagttcacccagaaataggagaggtcgaggatgcttacctctctgctgtgttactttgctttagccgggtcctccctgcagtcctaaatgcagctattgatctcaatttgtttgatatcatagcaaaggcacagagttcatgtgactcaagtttctcagcctctgagattgcttctttgcttccaaatcaacacccacaattggctaataggcttgaacgcatattacctttgttggccagttattctcttctaaattgctccattcgcacaaatgaagatggtaagagagaaagagtttatgctctctcacccgttggtgcatactttgcatttgataaggatgaaggaagttctttggctcctctctcttctntaatccatcgcggatttcat

SEQ ID NO: 8969 - DNA, 413 bp, Glycine max
cccacgcgtccgaacagacgagctccaattccagacagagtcaagttcacccagagatagcggacgtctatgatagcttacctgtctgctgtgttacttagatatagccggatgctccctgcaatcctaaatgcagctattgatctcaatttgtctgatatcataacgtaggcacatagttcatgtgactcaggtttctgaaactttgagatagcttctttgctatcaaatcaacacccacaattggctaactgtgctgaacgcatatcacctttggcggccatttatactcttgtaacatgctccattcgcacaaatgacgatggttagagagaaagagtttatgctatgtcacacgtatgtgcatactctgcatgagattacgatgaaggaaagcctttggatcctgtatg

SEQ ID NO: 8970 - DNA, 326 bp, Glycine max
aaaacctaagcttacaatctgaaactaagactagaagaagggtaagaatagatcgctgtggatgcaggtaggagagaaagctgtagagtccattatggaaacagctacgaacattggtgcttctgtacaaggctggcatggagaagaccaaagccactgtacaagataaggcacaatgaatgacatcacgtgatccagtgcagaatgaattggcaacccaactgaaagaggcatagatgaaccacgctgatctggacaagcaggctgcacgtcagcataacacggcggtcaaacagtccgacaccacggatgggcacatgtgacat

SEQ ID NO: 8971 - DNA, 235 bp, Glycine max
cccacgcgtccgtggagttcctgctgatatggccaagaagaaaacaagtgtaatttcgagtaactggtttcctgtttgggatgaagagtttgattttccttctgactcttatcattctctcgaacttctgtgcgtatgcttaagatcactggttctgacctcgatcattcaaaaagaacctcacagctcggacgcgtactttatatgtctactcatctccagctatatatgatga

SEQ ID NO: 8972 - DNA, 432 bp, Glycine max
cacttctataaccatcatcaccacaataatttacattatatgtcatctatctaaatgaatgtctatctcaatggggaactcagcttaaacactatctcaaataatttcacaccattactacatatactaattcttacaatattcatcattacactcgactattattaactattatgaccttcttatcctacctactaacataaacacctatcttattcttaaataccttgataagaacaacaatctgattctgacaatattatacaatcaatatcttgcaaaacttgcacaatttgcccactaccaagctcactttcaaaaaaatttgatgtatttagcttcaattgcttatgaccaaccttaaacaccaaccatgcctccacatatggcactacacccttacatgcaaccaagattatatatgcaacattc

SEQ ID NO: 8973 - DNA, 235 bp, Glycine max
acgaaaaaaaaaaaaaaaaaaaaaaaaaaaagattagattaaaatgaaagtgttaataataatgcgaagtgtaaaaatagtatagagagtaaggccaattataaaaaaaaaggtccacatttatattattccataataaaaatattattaaaacaaaatcataataacaaaaataacttacacttaatttaacaaaattacttattgttatactcaacttgtttttaaataacaa

SEQ ID NO: 8974 - DNA, 237 bp, Glycine max
cccacgcgtccgcggacgcgtgggaaaaaaaaaaaaaaaaaaaaaaaaaaaaaaaaaaaaagaaagaaaaaaaaaaaaaaaaaaaaaaaaaaaaaaaaaaaaaaaaaaaaaaaaaaaaaaaaaaaaaaaaaaaataaaaaaatataaaaaaaaaaaaaaatttaaaaaaaaatattaaactaaaaataaataatataaaaaatttataaaagtataaaaatataataaaaaaaataa

SEQ ID NO: 8975 - DNA, 370 bp, Glycine max
aaaaaaaaaaaaaaaaaaaaaaaaaaaaaaaaaaaaaaaaaaaaaaaaaaaaaaaaaaaaaggaaagtgaaaaaaaaaaaggaaaaaaaaaaaaaataaaaaaaaaaaataaaaaaaaaaaaaaaaattaaaatttaaatggatccaaattttaaaaaccaaatttttgaaaattataaattttttaattaaacgttatttaaatttaaatccattaaatcttttttaaaaacagtctttttaaaaaaaaatcttttttaaaaaaatttttttaccttaaataaaaccacttttttaaaaaattcttttattacctaaaagtataaattaaaaggcctttaaaaatttctttcacaataaattgccaatt

SEQ ID NO: 8976 - DNA, 260 bp, Glycine max
gtcagaggcaaggtgtgagcgtcattctagtaacattcactcttatttttgctgctagtggccttctgttcgaaagtttcaggtcaatttgatttgcaggtccacaaagctgttgatgcttgcaagaatgttcttagaggattgcatagcaacaaaattacggagagggagttggacagggttagttattgaaatgctcaacttgtttttacattacaatttagtgagcagcacttttagacagtttttctcctatacgt

SEQ ID NO: 8977 - DNA, 345 bp, Glycine max
gcttaatttctactctctacttctagctaacagagttaagtaaactgtcgcttcagtactggatgtgtatataatggcggtggctgtgacgattctggtgacccttctctcggtactcactactgcatcgcgtgtttgagtggtagacacatatccctgaatattgaaccaacaaccatgtgcaagatcactttccttgcgcattgagctactatattcgtgctgcacagcttataacgcacagctgatgctaacttgcgattcaactgctgcgctgttgagggttctgtattgcatttcacagttttggattatcacattaagctccaaattgagacctgttcc

SEQ ID NO: 8978 - DNA, 432 bp, Glycine max
ttttgcatgtgtcattgttcatctggctgagtgcagttgtctcttcattcttctattttgagaaggtgagcgtgattgccactacagttaccagctctcttggaagaagaaaattgtttgcccagataaatagcttcattgctgattttattcttgttggacaactgtccttgacgtacagggacgcattcttactgttgctggggtgactacagctatatgctcagcacctttcgttggcctcttaaatttagtcgctctagctgtttggccaaaatgggtggtggttgccatttgtgagacgctgagaaaggttattatgacttgcaaatattggttcctttaatagatttcagtaattaacaacatatctagaaatctgtattgtgaaagtagatttagaatatgtataggttcattgtatgatataat

SEQ ID NO: 8979 - DNA, 439 bp, Glycine max
ggctttacaacgtaccatggggcatgtacaaatcattgatgtacataaaggaacgttatggaaagccaactgtgttcttatccgaaaatggtaacattatatatcaatttcttgctttttcctttttttggcttggtgattctgttgtttcaatgtcatgtgacatattttatgacatgtaggcatggatgatccgggtaacgtgactcttcccaagggtttgcatgacaccacaaggataaactattacaaaggctatttgactcaactaaagaaggcagttgatgatggagctaatgtggttggatactttgcatggtcattgctggataactttgaatggaggttgggttacacatcaaggtttggcattgtctatgttgatttcaaaaccctcaagagataccctaagatgtcagcatactggttcaagcaactc

SEQ ID NO: 8980 - DNA, 398 bp, Glycine max
atcttcgtcaaaaagcttctcattcatggcgacaacgctcatttcggcttactcattcatgggcacacctatcgggtaactccctcaccaccaactatcactgcggaccaggctcgacatcaccaaagtcctcgtacgacttcacgaatataccccaatccactccatatgtcccaacattgtcttccccggaatcgcgactagagccgtacgtcttctctacacgctcgccgatgctactgttgctgctgaccctgcggctgctgcagactctgcggctttcaccaccgatgctgaccgacagaaaagcggatgctgattctgcttcatctcacataccatggaattcgttctcaacgaggccaatgatggcctttctgtcgagcatgtaccttatg

SEQ ID NO: 8981 - DNA, 337 bp, Glycine max
aaaaaaaaaaaaaaaaaaaaaataaaaataataaaaataaaaaaattaaaaaaaaaaaagagttaaaatacaaaaagaaaaaaaatacacatacaaaaaaaaaggtacaccaatctattgggtccagctttacatccacatccttactcctgtttagatttcttctcatgtagcttaaatgcaatctgctgatcctatgctttaaagcttcttaactggcaaatccctttcattactcatctaatcctcctatttgaatatcccactttataaagcttgcttaactctcataatgcccttacaaatatcctttctaaacttttgcatatcttgactg

SEQ ID NO: 8982 - DNA, 420 bp, Glycine max
  modified_base (400)..(400): a, c, g, t, unknown, or other
cccacgcgtccgcccacgcgtccgattctttcccttcggattaggccctcgaatctgtgtggggcaaaatttggcattggttgaggcaaagattgctcttgctttgatcattcaaagttacagttttgtgctatctccaaactatatgcatgctcctatactatttgtgactttgcagcctcaatatggtgcacaaatcattttcagaaagatatcatattgctgattgttgttgccttttcccacttctccccctgtgtaactttaaactccgtaaatggggaagcattgtagctataaatattgtgctttttttacttgtgaaagcttatgtagcctatgttgataactggtgaaagtttttcaggttaaagcagcataacttaaattggatcatcanatatataaagatttggcatg

SEQ ID NO: 8983 - DNA, 206 bp, Glycine max
aggaaattaggcatgaccctctttgagtatgctctgcctatttgaaaatttccacacctgttttaattgtcgtaatgatgtgtgaagtgtgtgttattttaaaaaaaaaaaaaaaaaaaaaaaaaaaaaaaaaaaaaaaaaaaaaaaaaaaaaaaaaaaaaaaaaaaaaaaaaaaaataaaaaaaaaaaaaaaatttaaaaaataa

SEQ ID NO: 8984 - DNA, 335 bp, Glycine max
  modified_base (296)..(296): a, c, g, t, unknown, or other
ccttaccctctttgcaactacccttccgcaccacagatatctctcccgccgctccttccgtttgcgccgcttacgactactatctccgtcttcctcaactcagaaagctttggaactccactgattttcctaattggaacaacgaaccgattctaaaaccaattttgcaagctctcgaaatcacgttccgctttctttccattgttctctccgatcccagaaccttcctgaaagcagcagaggactgctacgccgtggagaggatctggaagcttctcgcggaggtggaggacctncacctgatgatggatccggacgatttcttgaggctaaag

SEQ ID NO: 8985 - DNA, 272 bp, Glycine max
tcccactcgtcctaaaaaaaaataaaaaaattttatatcataaaaataaaaaaataaaaaataagttaatcataaaaaaaaaagaaattacaacctaaaaatataccaatttaaattatcatattatcaaccccaaatctattttaattttaattaatataattttaataaactctatctaaaaaaaatctttttaatataataaccatctctattttccactcctaacataacttattttaatctaatctcccaatcttattaaattcttc

SEQ ID NO: 8986 - DNA, 306 bp, Glycine max
tccacacatactcctttcattatttaccttccacttaaatgaatagtattagcgtcagggctattactgtactttgttccctaactttataaaatcatccttgattctcctctaataatgttatctacacctatttcaattctattctcaacatagtcacatactattagtttccaattattagactaaatggcttctcaatataatttgaccaaaccaaaacacaaacataccctctcactgttgagcaatctacctttacagtctcaaacagtctaccactgataatattatccccatttaaaa

SEQ ID NO: 8987 - DNA, 381 bp, Glycine max
cgagcctcaccttcgagctctcctcgccccagactccctcgacggcggcgagaggcgcggagggcgacgtgatggggctgttgctgagagagaggattgtgttcctcgggagcagcatcgatgactttgtggccgatgctatcatgagccagttgctgctgttggatgcccaagaccccactaaggatatcaggctcttcattaattccactggtggctctctcagtgctacaatggctatctatgatgccgtacagcttgtgagggccgatgtttccacagttgcactcggcattgcagcatcaacagcttctgttatccttggtggaggcaccaaaggcaagccctttgctatgccaaatacacgaattatgattcatc

SEQ ID NO: 8988 - DNA, 364 bp, Glycine max
cacacgacttctgtgagatggctgctaactatcatacagaagagcctcatatgcttgagtacagtaaatatgctgatcttgaggagcgtcaaagatttgtgcaggcatatctgagtacctccggtgagcagcctagtgacagtgaagtggagcagctacttcaagaaattgagaagtatacacttgcaaatcatctattctggggcgtctggagaataatttctgcacaagtgaacactatcgactatgactactaggaggtatgctaacagagatttcaagagtactgggcaaaggaaaccttagctgctaataaactctgaagcgccttctgcttataatgtgcctgagggtacaggagagc

SEQ ID NO: 8989 - DNA, 458 bp, Glycine max
atttaataaagtttaaattcttttatattttattatattaattattattattatgattataaaatatataatttagttatttatattaatttatatttttatatcttaatttcttataattttagttatattaatttctcattttattttttattctatatgttagttaatgaattgttgcattttaattattaaaataaaaacctaaatatcatgatatatttgatttataattttatgtttactttaaatgttaagaacctaagaaatgatgtttttatgttagtttttaatattataaagttgtggtattatatttatttagtagtataattttatgtattaattattattatattctattaatactagtcaaccacgattcaaacatgattaagtcattaagttttgaactaatattttgatcgattcaatcatcaatccgattttaaaaacat

SEQ ID NO: 8990 - DNA, 337 bp, Glycine max
aaaatttccaaaaagtaatagggacttacagattctttagccattttttaatcatgtttgcttggttatgtaattttcaggttaaaatcatatgagattcttaagagctacaaacctagggcaagcatctttcccagtgttcttgattatacagtttgtccttacacatggcctttctgtcgtcagccactctatgcaggtgccatgcctgtcatcttcaatgccaccattttgaatggaatgggtgttgtcggatatgttgatagtccaccaacatggcatccttctgatgaagaaaggaaatcttctaagcatacattttacttattctgagatc

SEQ ID NO: 8991 - DNA, 443 bp, Glycine max
tcggccatagcatcgcgaaactgggaaaccattcaaattgaagacctcaaaattgatcgcaatgagctgcttgctgtgaactgtctggtaaggtttaagaatttgcttgacgagtcaattgaagtgaacagtcccagaaatgctgttctgaatttaatcaggaagatgaaaccagatatttttgttcacagcgtagtaaatggatcttataatgctcctttctttctcacacgcttcagggaggcactgttccattattcttcaatttacgatatgtttgatactctcatatcccgtgaaaatgaatggaggttgatgcttgagagagaatttttgggccgggagataatgaatgtggtagcatgtgaagctctagagagggttgagaggcctgagacatacaaacaatggcaggctaggaatactagagctggttttaagca

SEQ ID NO: 8992 - DNA, 300 bp, Glycine max
ctcacgcgtacgctgatgctgtgggaaagttggctgccatcatgaaaatatgccgctcatgagagcatatatttaaagaccatcttgatggcttgccgactgaacgtgataaaatgtataatgtctttgacaatcacatcgccgctgcttaaaaatggttccaatgacattagcacctttcaatggaatatataaagtaacttattactgaatctgatgggtatcaaccacatcttatagctccagaacaaggatatcgatcgctaatcgaatcttacctaataactattatgggccctg

SEQ ID NO: 8993 - DNA, 278 bp, Glycine max
tgatggcgttcctggccttcatcgtgggttcaacatctcatgtgttgcaattatagtcgcgtcgtggctctttactactggaatgcatgactccctgaaaccagatagttgctggcttgagcgagttgcatagatgactttctgacgctagaaaacctttcgggatggggaatcacaattggtgctcgtttgcctacatataccattgacactgtgcgtagaataatgatcatcacttgtggagaatctgtcaactacaagatctctttccttgcatt

SEQ ID NO: 8994 - DNA, 258 bp, Glycine max
ttgaaaataatgcacaggatgctactgattgttcgtctcactaaggagcacactttcctggtcggttcactgctattgcagagaatactaagttccaaacgatattaccgtccactgagcagatgacaggtctcaatcatctattacatggagccaagcagcatcacaatgtgacaaatgtatatgtatggcatgcactagctaggtattgatgtggagtgataaccagcatcatccagcatggaacattatgacact

SEQ ID NO: 8995 - DNA, 410 bp, Glycine max
ggatctgtgaaggaagttttaaatgttatgcagcttaaggggcataagagtgctgtgacgtggttatgctttatgccaaactctgagcaaataatcactgcatccaaggatggttcaatgagactatggaatatcaatgttcgttatcatcttgatgaggatccgaagacgctgaaggtgttcctaattcctcttcatgattcttccggtactacactgcactatgaccgcctgagtgtttcccctgatggaaaaattttggctgcgacccatggctccacactgcagtggttatgtgttgagactggaaaggttctggatacagctgaaaaagcccatgatagtgacatttcatgcatttcatgggctcctaaacccattccaatgggaaatgaacaagtttttggttt

SEQ ID NO: 8996 - DNA, 372 bp, Glycine max
cagatgatgatagccgaaaggcatggcgaagcgaaactgcttgcacctgattatgcgtgggtgaatggacacccagttttttatcatgaatcgttaactctcctgaatcgccccaaccctcccaagaaacttaatccactgacctattcgcatgaataagtatacgcgttttcatggacagacagacacaagcctttacacattataactcctcatctcgatgttgtacgccccatccaacaagatgccagcaatggaaacactcaagtgttcattaatgggacgaacataacccaactcgagctcataatgttccagatctcaggacttcactgctgcgccgacccacatttctcgatcaatgatgatggt

SEQ ID NO: 8997 - DNA, 426 bp, Glycine max
  modified_base (71)..(71): a, c, g, t, unknown, or other
cattaagctagctctgagttatgccctgtctgttctaaacttaacatcttttcgaagcctaggtgaaactntatgttgggccacctagagatttccagtccagcaaactttatgctcttgagacagcttgagtgtgagaatgatctacattggttgggtatatagtcaaagtaccccatataatgacttcagctatactcttcacttgagctcgctttgaaggttgagttaggctcattgtgttttcatttgtaaccatttcaaagttgggtaacctgataaaattctatactctctgaatccatcttacatgtgttgcatgactatgaagacacaatataccaggctgtttttcctggacttcatagtggtccacacaatcacactatatcaggcttatcagttgcactgaagcaggctatgaca

SEQ ID NO: 8998 - DNA, 420 bp, Glycine max
gaatatttgaaaaacagcgttgagggtttatctcggaggctattctatcttgctcttccacgcttcagtatatccatcaggtggcaagatgatcaagacttgttgcatgaataaatgtaagatgctataatatatggatatgattgcaaatgtttcaaaaggacaaatagctgtttgctgagggagggtgggagatatgaacagcgacacagtgaaccatagctcaacaattgttgagaatgatgctttgtcagacattagtctacacatcatgacagagtccactttaagctcttcattttaacttttatttaaatgttggatacttgtctactttatgcaagatctttttcctgataatactggtgctagacatatagctgctgcttacagctgatgggattctggcttcacaagata

SEQ ID NO: 8999 - DNA, 444 bp, Glycine max
cccacgcgtccgcccacgcgtccgcccactcgtccgggcgcacagatgttgagagacttgggtgtacgatctatgaagctgatgacaaacaatccagcaaaatatattgggctcaaaggttatggtttgacagtttcgggtaggatcccattgttaactcttatcacttcggagaacaagagatatttagagaccaaacgtgtgaaaatgggtcacatatacgccatggaatttaacggccaattgagcactcatgacagtggcaggcaggctctaccaaaaatgttcatcttgattcttgaaacatagtgccatgacaagggcattgctatttcagggttattttttctttggtgccttttagaggttcatcatttctggactctggaagtcattggccctagtttcttcattctttttggtacatttactcatgtatcacag

SEQ ID NO: 9000 - DNA, 461 bp, Glycine max
cccacgcgtccgatggtggcgacgaacgtgaaggcagaaaccatgtctctgatggacaagcgcagcgccttggaggctgagatgaactccatcatcgcccgcctctcccagcccggcgctcctggcctctccggaaatctcgtcgactctgagggttttccccgttccgatatcgacatccccgttgttcgagccgaacgacgtcgcctggcagagctgcgcagtgaccacaacgaagtaactgagaaaattaacctaaatattcagattctgcattcggcacgactcggaaataggtcattgcccttcaagaattcagatactcagatctcatcaaatatggacactgttgcatcaacaccatcacaaaatgtccttctgatacgatctcccaactcaatggatgtgaacgtgttgattagtagaccatctgcaatggtagatgagatagcagatgcatc

SEQ ID NO: 9001 - DNA, 307 bp, Glycine max
  modified_base (169)..(169): a, c, g, t, unknown, or other
tctttcttccactctttctaaaaaaaaaaaaaaaattttataaaaaaaaaaaaaaaaaaaaaaaaaaaaagaaaaaataaaaaaaaaaaaaagaaaaaaaaaaaaaaagaaaaaaatttttaaaagtttcaatttttatttcaattactttcaaaattataaggttttntatttttttaacctcaattgtttttcatttcccgtttttttaaaaattcttttcttttaaaaccctttaattaaccaactttttctcttttttacaaatttcctttttttaaaatctcgtttatcccaaaatttcccc

SEQ ID NO: 9002 - DNA, 375 bp, Glycine max
cccacgcgtccgaaaaaaaaaaataaaaataataaataataactcctttaaatatacatgagaaacgtttcatctgcctatcgatgtctagaaaaccgtcgttcactccccaactttcgagaatggcatgtcaatgttccagcctcagcttacgatgtccacagtcatttttaatcacgccattgattagaaaaagactggtgttaacccacagtctccactaaaaactgatactgatcctcatagctgacctacaatagatcctgccctaactcatactccttaatggctatgctgcatgcaaaacccttatggcgaatcataccataacaatggaatctactgcgaaaagcctttacataacaaccatgttta

SEQ ID NO: 9003 - DNA, 457 bp, Glycine max
tcgcccacgcgtccgtgaaactagcgtttgatggtttgaaaggtttggggtataaaacagcgagacactgctataagagatgttggtgggtttgatagtgttgagttatcagtacttctttgcaatgatgagtttatacaaaaacttaataaggaatggagaaatgaagatcatgccacggatgttctgtcaatgtcgcaacatgtacctgggctcaagattcctattcttatgttgggtgatattataatttcggttgagacagcggcaagacaagccgaggaaagaagacatactcttcttgatgagatccgaatcctcatggttcatggcttgttacatcttttgggatttgatcatgaaataagtgaagaggctgaagtagaaatggaaagagaggaggacatccttttaaagagtcttgattggaaaggaaaaggggctaataaagagtgca

SEQ ID NO: 9004 - DNA, 388 bp, Glycine max
cgtcttttgcgagctctttttgagattgtcttgaaacgtggctgggcgcagttggctgagaaggctttgaacttatgcaaaatggggaccaagaggatgtggagtgtccagacacctcttcgtcagttcaatggaattccaagtgatttattaacgaagttggagaagaaagatttggcttgggaaaggtattatgacctatcatcacaagagataggtgaactcattcgtgcaccgaagatgggaaagactcttcataagtttatccaccagtttcctaaattgaaccttgctgcacatgtgcagccaattactcgcacagttttgaaggtggagctgacgataacttcagactatgcatgggatgacagaattcatggatatgttg

SEQ ID NO: 9005 - DNA, 446 bp, Glycine max
atgaagggaaaagaatccggtgaagcaaaaggttatgcttttgtgaccttcatgacaaaggaattggcatctaaggctattgaggagctgaacaactctgaatttaagggaaaaagaataaagtgctccacatctcaagttaagcacaagttgttcattggtaatgttcctaaatattggactgaaggagatatgaaaaaagttgttgctgaaattggccctggagtaatttgtgtggaactgttgaaggacccacagaattctagccgtaaccggggatatgcttttatagagtattacaatcatgcttgtgcagagtattcaaggcagaagatgtcaaactcaaactttaaacttggcagcaatgctccaacggtgagctgggctgatccaaggaattctgaatcatctgcaatctctctggtaaatcagtgtatgtaaagacc

SEQ ID NO: 9006 - DNA, 439 bp, Glycine max
  modified_base (408)..(408): a, c, g, t, unknown, or other
caagagtggctttttggtgaattgattggtgatcccgagttggttgagttcactgcgcatagacatgttccttaatttccccaaatattaaaacaagattcaaagcacgtcacttacgttcccgctttctgtttaacaagtgaaaaacttgaaccttttgagacctcagttctctgccatggcaaattctcatttatcaacaccttctgagctattttcaagacaacataagccccctagggttccaaatcttattgggggcagttttctggactcaaaatcgttaactttcattgatgttatcaaccctgcaacacaagaggttgtttcacaagttccttgcaccacagatgaagagtttaaagctgcggtatctgcagcaaagaaggcatttccatcatggcgaanaactccaatcacaaaacgccaacgtgttatg

SEQ ID NO: 9007 - DNA, 402 bp, Glycine max
ggcaatattctgagtccagccgttacttttctctgaccctgacggaatggttcaaagaggtcttgcactgacccatcaggatgagatactgacacctgctgctcacaccatcgactcatccttcagaaatgatcatgtcgactcctatgctctgcctgattccaatctctatgccaatgcctacaagaacataatcatgacccgaggcactactaagctactgctcgacatggcacccatatcgaaatttgctgaaatgctatacctcaacgctagatctgctaattacaccatgggaaggaagatctttaccggtgctcactcatatcgacattgacactatcatgacgaagccgctatacttgatagctaccgctgcatgcatagtgcactaagcaatgc

SEQ ID NO: 9008 - DNA, 393 bp, Glycine max
ctcaaacatacgtattctttacctaatactttcaacattctttttaccctacctaatatattcatttatggtagtatttatcaacacggtctcctccccttacttaaataattcatcataactcctcctaacacacttccttttttccttccacacatcattcaaatttcttccctatcaactttccatcataatatatattcctaccatatttattacaaatcacctataattactcttccatttccaatattcaaccttaaaaacttttaccacatccaatcaaatcatcaaactctcaaattacccaatccttacacctatctactaattacaataaattacaataccatactcatataaacctattataaaaatcacaacaatttaaat

SEQ ID NO: 9009 - DNA, 452 bp, Glycine max
gatcaaagcaaaatcagaaaagggcacagagtcaagtagctcattaccagaagattggagagcagctttatatctttctcttgaaagtggcaaattttggttccctgctcaagtctataaccgtgagaatggtcatgctgggttcatgctctcatgttatgatgcccaactatgctatgattctcgatccgacacttttctggcaaggtactcgcctcatgggagatggacaactgaggaaaacatacaatgggaccggctaagagtgccaccaattgctacttctccacatgctcttcacatctctgactgtttggatgacttgagacctggagatcacattgagattcagtggagaagaaacaaagaatttccttatggttggtggtatggtgtcattggtcatttggaacaatgtcaaggacatgggaaccattgccattgtcactata

SEQ ID NO: 9010 - DNA, 456 bp, Glycine max
tcgcccacgcgtccgcgaattccctgcaattaacataagcataacccctttccaacctttctgctcttcagatcggatcagatcagatccaccgccatggatttcatgaaggtcttcgatcaaaccgttcgagaaataaagagagaggtgaatctgaaggtgctcaagattccggaaatcgaacagaaggtgctggatgctactgataatgaaccttggggtcctcatggtactgtgctggcagagatttcacaggctaccaaaaaatttactggatgtcaaatagtcatgaatgtcctttggacaagactgggtgaaactggaaaagattggcgctatgtatacaaggtaatgctttccaaagaaccatgttatttcttaagatgttaagatacatagagaagaatttttggtggcattttctatgttgatagatacacaacttacttttctttc

SEQ ID NO: 9011 - DNA, 444 bp, Glycine max
acgcattcgtccactcgtactctaattccttgcaaataacattatcataacccctttccaacctttctccgcttcacatttaatcggatcagatccaccgccatggatttcatgaaggtcttcgatcaaaccgctcgagaaataaagagacaggtgaatcttaaagtgctcaagatttccgaaatcgaacaaaaagtgctggatgctactgataatgaaccttggagtcctcatggtactgtgcttgcatacatttcacaggctaccaaaaaatttactgaatgtcaaataatcatgaatgtcctttggacaatactgggtgaaactggaaaagattggcgctatgtatacaaagtaatgctttccaaaaaaccatgttatttcttaagatttttagatacatagagaagaattttttgtggcattttctatgttgatagatac

SEQ ID NO: 9012 - DNA, 335 bp, Glycine max
tcgcccactcgtccgaaaaaacaaacaaaaagatctaataacctaagatatagaaaaatgtaagtgcgattaatcaagtcaagtcttgcaaaacgttagggtgcatgaataggaaatcgagatgttaaatgatgacgagatccatgcttgcgcatgcaacttgtgacatgcatccttcgtattagacaccttagccttcgaggattacgtgctgactattggttactgtgttgtctacctaccaaacattattcaagtggctagtaatgacacattccatccaggcctcttcttctctgacgctggaagatttcaaagtaccacacttaaaccac

SEQ ID NO: 9013 - DNA, 401 bp, Glycine max
ctgatgcatgaaactgcaatttaaaatcccatattcatcgaaattaattctggggatgttagaaatgaaggtggagagtttgcatcaaaccaaggagaatgtagcattgttgttctctccatataagcaccacttatgaggaaagagtcaagaactgtccactccttattcttgcactgctaacaagctcaaatccggcgctgttacaatagattctgatcttggacgtaatgagaaaaatgggttgtagaagaaactctgtatacacgacaggattgatttcggccggatgtttcacggtgctaggagttcccatgactggcaacttgctgaaaatttgatttttggtgctgatccgcacacactcaatgaagccttgtgtatcacactgcattccatct

SEQ ID NO: 9014 - DNA, 368 bp, Glycine max
aaggatgtatgcttgggttgttgctaattatgcacttgtcactcttggaggtgatcgtttggaaacaactgggattattgaacttggtggtgcttctgctcaggtgacctttgtatcaagagaagcagtgctgccttcattttcacgaactgttaaatttgggaataccacctacaacctttacagccacagctttcttcattttggcctgaatgctgctcaggactcgttgaaagaagcacttgtattgggagaatttaacttagcttctcaatctcttcaaaaagggttgcggatagatccttgtactcctacaagatactcttataatgttgaatcatggaagttcccttctagctcagagagtg

SEQ ID NO: 9015 - DNA, 355 bp, Glycine max
atcgaatcgaatcgaatcgaaagggaagtgcaaaatggatgacatgcccgtgcccggggtcttgtgaccaagccccaagaatcaccccgcatcacccgattcggcgccgaccatgatgttgtgaaaaaagggtgcgaggctctgcataaatgcgaggacatggtcaataatctaggtttgttctcttccaacgagaccaaagaagatatcagcaccacgaatctcaaatacattctggtgccattttatctcgcggagttgacagaaaaaatagcacaggatgacaggatacagattctaaagtcttcccaagcaaaaactaaggaagttatctcattctgtgaagcaatggagc

SEQ ID NO: 9016 - DNA, 329 bp, Glycine max
gttctttctctgtctttctctttggttttctgaaaaaaaaaaaaaacaaaaattggtgggatttgaaggtatttgaggtggggattgaattgggtacattgttggggttggaaaaatctatcaccatgaatattatgcgaaagttgaaaagcattgcttctgggaagacttccgtttcatcagatcctggaggggattgtaccacaaaaagagtaaagtttgatcaagaaaccgaaagaaaagtcaatgaagaaacatatcctaatgagagatgcggaaaagatcaggagcagtatgtagatgcattaaaagaaagtgttaattctaat

SEQ ID NO: 9017 - DNA, 381 bp, Glycine max
tcgcccactcgttctggacaattgaagggatattcgatagaggatatattgcgacagcaaatagaaaagggctgaagtgggggaaagcctgcaggaggactaggtaacggtggatgaatcatcgacacctgatgttgtcatataaatgaaaccactgaaagtgcaatactggattcttactgaaatgcctgatcttataaactgattttctgatttctcttgatgatcggtttctgtattttgtcaactggcttcatggggatataattgcagtataacatcgatgacttttaaaatcctaaactgactggtacaagtttggttggttgacttattcataaaggaagccctgtattatctattactgatgatggttaaaca

SEQ ID NO: 9018 - DNA, 459 bp, Glycine max
cccacgcgttcgcccacgcgtccgcaactactgtgtcttctgcttgtcatttggtgcccggattggagtcacatttgtggtgtgggttgaagacaacaaagggtgggaatggggctttggaatctctactataaccatatttgtatctatcccagtgttcttggcaggctcaactacttataggagcaagatcccttctagaagtccacttacaaccattttgaaggtactagttgctgcttcacttaacagctgcttcaacagtagaaattctagcagtgcagtggtgaacatgacttcaagcccttccaatctaaactcaagcagaaaacaagtagggaaagaagcttccaatattgcaaacaaggaaccagaagccccaataacaaacacactcaaattcctcaataaagcagttgagaacaaccctatctattcatcaataaaatgcacagtgga

SEQ ID NO: 9019 - DNA, 347 bp, Glycine max
accacgcgtacgcccacgcatccatctggataaccgtttactgtcctatatcttcagccagacacctatctgtctacagcgaacatggtctgcacacctattatgtcaccttgactacttatattgctctctgatgaatagacatattcaaccctacgattgtgtatcatcatttaggagaaatttatacagctctcatattaggcagatctctcttatgaatattctcgtacatcaaggatcatactacaccgccatctacaaattctcgctcatctggacatctaatcattaatttatactgcgagattgaactttatccacaccattgcaaaacattttgacat

SEQ ID NO: 9020 - DNA, 443 bp, Glycine max
cccacgcgttcgcatacccacaaaccacagctcttctagatgactctctaaaaagcaatggaccagctgggtgaagtcttaatgtttctctaacaatgccttgcaagtaaggaaggttggcaatatctgattcttctactattctactctttccaaccactgcatccatttcttgtcttgccttctccaacacacctggattgttgattaactctgccatagcccattccatcgttacagctgaggtgtcagtcccagcaattaatatgtcctaaatattgtcattagaaacaacacatgttgatgttagtcatgtttgcataactcttttcataaactagaaaaactcagctataaatttttggttagataatattctcaaaccatataataatttatgctcacaaacacctaaagaaacaaaaaagattaaacaaaagaat

SEQ ID NO: 9021 - DNA, 280 bp, Glycine max
aagagtcgattgtagatcatgactgaggagccatcataggatgttatcgatgcatgtaacgcactgtcttagtacaaggctatgtctgcctaatagcacctcatataccgcagagacccaaacatcttaacgttcgaacgcatgcgagctttggatcgaaaccactactatgtatgcagatttcagatacccatggaaatggaggctcaaatagctgaagtatgcactgaggatggtctcgaaaacatccctacaactcgtaatcctagcactacaattc

SEQ ID NO: 9022 - DNA, 367 bp, Glycine max
atttgcagctggtttagctgcggaagggctcaagccattttgtgccatttattcatcatgcttgcaacgcggatatgatcaggtatgtaggtagtccatgatgttgatcttcaaaagctacctgtccgatttgctttggatagggctggtttagttggagcagatggaccaacccattgtggagcatttgatatcaacttacatggcatgcctacccaacatggtggttatggctccttctgatgaagctgaactgatgcacatggttgcgaccgcagcagctatagatgatagaccaagctgctttagatttccaaggggaaacggaatcggagccactctgccactaaataacaaaagaacccca

SEQ ID NO: 9023 - DNA, 356 bp, Glycine max
tgtttacctgtcatgtttgtttctgttgaatgatgaacttgttaatcctcgttgatcccattacttggtaaacaggattgccattccccatacgctccattcatcaccctttctttcattctgttgcgaattggaactcacactttcagcgtgctagtccattatctcgccttctgttcccctcgcagctttatttgcggcgaaagccggaactaagagttcgcaatgctgtttattagctggcgcacacaaagcgaggtttcctaggctcgtcggtcaagttagccacgttcgctaacagcgccgtacgcgtcactgcggtgctctccacgcgacttgcatcggtgacaagatcc

SEQ ID NO: 9024 - DNA, 323 bp, Glycine max
gtttaacactaagttgcaaggcagcggacttcgttccagggcttgatatcggcctcactgttgcggcggtgttggatttatcaaggctcggtacacaccaccagccctagaacatgcgctgatgtgtcttacctgtcctacactatatatcactcgtaagcatatgctgatcaagaacttgacatggttgtgaacgttaggcatgacctaatgacgaaatctagagagattgcattccattgtgctcatgctgccactgtcatgtacgcttaattcatgcatagtgatcggaatctgtggtgaatatggtgacagtttgggca

SEQ ID NO: 9025 - DNA, 318 bp, Glycine max
cccacgcgtccgaaaaaaaaaaaaaattaaaaattaaaaaaaaaaaaaaaaaaaaaaagaaaaaagaaaggccggccgttttaaaggtcccagctttccttccccttccttccaacgtattactttttttttagggtaccctaatttaattcaattggccgcctttttaaaacgtctgaactggaaaaaccttggcgttcccaactttaatccctttgcagaaaatccccttttccccagttggcttattaccaaaaaggcccgacccaatggcctttccaaaaaatgtcccaccctaaatggcaaatggaacccccc

SEQ ID NO: 9026 - DNA, 297 bp, Glycine max
atttgtgatgacctgcttaagatatacaagaacaataataatcataatttatgtttgaaagaaaaaaaaaaaaaaaaaaaaaaaaaaaaaaaaaaaaaaaaaaaaaaaaaaaaaaaaaaaaaaaaaaaaaaaaaaaaaaaaaaaaaaaaaaaaaaaaaaaaaaaaaaaaaaaaaaaaaattgaagaactaaatttcaaaatgcaattgtatattaatcaaactgaacaacaaaaaattaatacatactcaaataaatcaacattttaatgaacaatctttttagctaaaatgtatat

SEQ ID NO: 9027 - DNA, 416 bp, Glycine max
ctcgctcatactctcaatctgagactagaccgctccaacacgcgagttgcaagtcgtcaggcgggtcgtaccgaggaatcggccgggaaatcgcgcttcacctcgactcactcagcgcgcgactagcagtgaactacaccttcaactcggcccaagccgactcactcgaggcgcatatcaacgccgcattcggcaccactacaccgatcgcacgacgggaccatgccgacgtgtgacgatccggctcatgagaagatgctcttctactcagtctaacgaccactggactgaccgatccacatactcgtcaactcagcaggcgttatcgacagaacgtatccctgcgtcagctacaccactcgtagagtcctttgaacgaactgtcgctgagaacgctcgtggcgccttcaactgcg

SEQ ID NO: 9028 - DNA, 443 bp, Glycine max
cccacgcgtccgcccacgcgtccgcccactcgtccgatggcccgttagttagggtaagtggatattttgtcctacacatgacggcatgagaatggaactacatctaacactatgttgtttcagtcctagttgactactctgtctgtatgaatgagatgatatagtagaaaaaaaaaaaaaaaaaaaaaaataataataaaaaaaaaaaaaaaaaaaaaaaaaaataattacaaaaaataaaaaaaaaaaaaaataccaacataaatactatataaaaaaaaaaatccttcagttttaaaaaggggaccaaagggtttcgttttctgtgtttaatgcctagggggttattttttgaacctttttgaggtgtcccccatctaaatccaaaatttttgaaaaaaaattggcaaaaatgccccaaatggggtattttatataaaaag

SEQ ID NO: 9029 - DNA, 353 bp, Glycine max
aaaaaaaaaaaaaaaaaaaaataaaaaaaaatataataaaaaaaaaaaaaaaaaaaaaaaaatgaaaggataaaaaaaaaaaaatacaaaaataaaaatactaaaactatataaaaatatactataccaatcctttaaccacacaaaaacctcttttttttgctaaaaccaattttcaaaataccacccatcatcctaaattatgcagcatgtcttataatctgaaatttcctgttcattataatttctcatgcaaatttcaaaattctgaattttgacctttctcattatcttagccctttaaattttcctaacaattttccccttaaaaatcctaattattcgcattttaa

SEQ ID NO: 9030 - DNA, 413 bp, Glycine max
tgagaggaaagggagggcctcagaactgcaaatccctactcccactaaagggagcaaatagttaagaacaaacacatagaggagttcagttcacgatagcaagtttcattgaataaaccatgacggaacctcagaatccttcaccattgacacattctccagcgttagaaatcacacctcaaccactgctacctcccaaaaggaaacgaagcctccctggaatgccagatccagatgctgaagtgattgctttgtcaccgaagacgctgttggcgacgaaccgtttcgtgtgcgagatctgcaacaaaggcttccagcgcgaccagaacctacagcttcaccggcgtggccacaacttgccgtggaagctgaggcagcgagggagtacagagccgcggaagaaagcttacgtg

SEQ ID NO: 9031 - DNA, 218 bp, Glycine max
ctgacgcgtgggaaaaaaaaaagatttaatttaaaaaaaataaaaaaaaaacaaagtggaaggataataaaataaaaaaaaaaaccaaaaaaattactaaataaatacacataaaactaaactaatccttacctttctataccttttacatttactccccctttattcatcacacttactcttctttatacctccctctttgtaattccatttccctt

SEQ ID NO: 9032 - DNA, 432 bp, Glycine max
  modified_base (411)..(411): a, c, g, t, unknown, or other
  modified_base (421)..(421): a, c, g, t, unknown, or other
tttttgttcaaggctgctgagttgtgcatggttggtttgagtgctggtgcagtacagggtgcgttgtcaaactctttggctagtaaaaaggaggggagattatctgtgacagtcccaagtgtgagcagtaatgctcttggttatggtgcttttcttggaatttatgctaacctgagatatcaactgttatgtgggtttgatagagcaatgatgacccattttgacgtcattggagttgccttgttcttcagcacagcattcagggtcttgaacgttcaattaggagagacctctaagcgtgcctggcttggagttgaggcagatccactggctcagtcggatgacctcttgaaaagttataacaggacttctgagaatgtagaaaagtcatcctcaaaatggttatatcanagaatgcggntgtttctgggc

SEQ ID NO: 9033 - DNA, 386 bp, Glycine max
cggacgcgtgggaaattcaagagattcccaaacttttttactttttattccctttttgtcactatacaatacaaatacacattcaacaattttcgattcaagttcaaagccatcgacgagtgttgaggaagaataacaatgggaatgatagtggattttgaaaatgaccaaaacgacgccgttctggttccgccccctaacttcgccatggttgaagactgcgttttccgatccagcttccccaccccttccaatttcccctttctccaaaccctaaaccttcgctccatcatatacctgtgccccgagccttatccggaagaaaatctcgagttcctccgctcgcagaatattcgcctctttcaatttggaattgaggggaaaac

SEQ ID NO: 9034 - DNA, 356 bp, Glycine max
tcgcctttacagcctagtcgataatcgtaccaggatcttatgcataatcatattcaatctgagtctctggagaggctacaccgccatgactgtcatattgctgcttcttggactattatcttacactggagtactctctaccgtggcactatctgccgatgcgtcttatggacgaaatggaaacaatgtaccagcatatcaggcattgactgatctttccaaatccgtcagaataggcgacattcgtcatactatgcagacgaatgagccctctatgccctcagaggatcaatcctatctgagagcctcggtgaacctaatgaccaactactatctatcaccaacgctggagctga

SEQ ID NO: 9035 - DNA, 365 bp, Glycine max
gcttgaagcccatgtggccagctcatatgatttggatcagcatattcaacttctgtcaccggaaccgcattccctgatggacgctctacacttgaattccccaaatgggaaacacctatgatcttggatgttgaacacttctccacccgaagatggggttctagactgggatctggatcattgactccagacagtgcatggcatggttcaagactaggttctggatccttgactcctgattgcgttgatcttgcttcgccattaggctcttgctgtgtgacacctgatcgaccgtagcaggaatccatgttaggttctagctgatttacacctgtacaagcttttctcaaccattcaaaacaaca

SEQ ID NO: 9036 - DNA, 219 bp, Glycine max
accattcaccaaactcactcatcaattgttatcactcttctcactaactattaagtgatcgtgctgatcacaactggccaagtcatcaaattccaacctgctgattcatcggaagcacctaagccactcgtgattgaagaaaccgatgctgctccaccacaagctgatgaaatgccctatactatcctttacaccttcatttgccacactgatgattac

SEQ ID NO: 9037 - DNA, 446 bp, Glycine max
caaaggttccggtttatataatttcttcagtggctgaagagttactagcgttgctgaacggcatacctgagtggctttgcaaacagcggcaagagaaactatttgatggggaaccattgtttgcacacctcaagctcctaaaagagagaaaaattcatgtggttcctgctattcattctcatgaactcttaattaattggcaggaaccatgcattgtattttgtcctcaccggaatttgcgtatgggtcctgttgttcatttgcttcgacgatggtgtggtgatccaaaatctttacttattcttgaggatgttttgaatccactatcacttttaccttaccagcctgttgcaatgaaggttcttcaatgtgtatttcctgttggaatagggttgcatgaagttcaacctttactaaagacattgcagccgaagactgttctgtgt

SEQ ID NO: 9038 - DNA, 434 bp, Glycine max
  modified_base (231)..(231): a, c, g, t, unknown, or other
  modified_base (257)..(257): a, c, g, t, unknown, or other
  modified_base (333)..(333): a, c, g, t, unknown, or other
tcgcacacacacagctagcagatattacatacacgtgaatcactaattaacccatggaaaaaagatcaatagctgggtggggctttctcttccttgttctctttgttgctcaagttgtggtgcaaactgaggcaaagacttgcgagaacctggctgatacatacaggggtccatgcttcaccactggcagctgcgatgatcactgcaagaacaaagagcacttgctcagangcagatgcagggacgattttcgctgntggtgcaccaaaaactggtaaatggatccattcacttcaacgtgaagaagatgcatgcagcgctattttataaaanattaaactactatatactatatataataagactggcgctgcatcaatgacctatgtattatagtatatattattaccgatgtcagaactatagatgcatgt

SEQ ID NO: 9039 - DNA, 431 bp, Glycine max
ctccaatggaaaactccaaagatttagacgctctctattactcttagacgtcatgttctgcctcagatactttctttcacactacccttggccttgatatacaaaaagacatgtataagaaccggttgcaagaattggctcaaagaagatggtttaatttgccagcctactcatgcattcgcgaagggccagatcatgctcctcggtttaaagcaactgtcaattttaatggagagacctttgaaagccctacattctgctctactcttagacaggcagaacatgcagcaactgaagtggctcttaacactattgcaaaaagaggtccctctggagctttggcagcaagagttctggatgaaacaggagtatacaagaatttgctccaggaaactgctcatagagctggactgaatcttcctgtgtataca

SEQ ID NO: 9040 - DNA, 182 bp, Glycine max
attccctgctctacccactcttcctaaaaaaaataaaataaaaaaaaaaataaaattaaaaaaatatatataaataaaaaagaaaaagaatataaataaaaataaaaaaaaataacactaactattaatcacaatattaaataaaacatctttcaaaaatttaatacaaaaaataatctcaa

SEQ ID NO: 9041 - DNA, 446 bp, Glycine max
aaaggggttttaactgcgccctttatgctgctcaaaacaaatcgactaggggttatcctggcctgtgctgtttacaagagagatctcccatcaaatacaaccccaaatgaaaggattcaagcaactgacgggtgtgcctagtttttgaatttttttgcatctgacattcattagcttttttggtcaatttttatgatttcttatcattcatataatttagcttattccattttggtcatctaaagctttgaagtactactaagtaactaatcactgtattcaaattttcagagaagattcatgaaatctattaatgtgagaagagtgaataattattggctctccccttgtgataattagaagctttgaagttataaatctacttttaaattcaataaagccaatgggaaataaaaaaaattgtcaaagactattggaaggtgttg

SEQ ID NO: 9042 - DNA, 297 bp, Glycine max
cacaaaccctagaagccaacgtttttcagggtgagtctctccttcgcgtgctaatccatagagtcgcttgttaatttctcaggttgttagagcacgatggttcagtataattttaagaagatcactgtggtgccaaatgggaaggatgtcgtcgacatcatcctctctcgcacccagcgtcagacaccaaccgttgtgcacaaaagatatgctatttcacggcttcgccaattctacatgcgcaaagtgaagtatactcagcagaattttcatgacaagctcttcacaattatcgac

SEQ ID NO: 9043 - DNA, 462 bp, Glycine max
cttttctcttcaatctcaggtctcccagtcacactttcactgtcaaaccaacatgaatctgttactcgccgctgtaactctcctcgtcttttatgcggcgaaatttttttactcaaatttctgggtcccatggagaacagagcggcacttcaagaggcaagggatagggggccctggctaccgtccgatcttcggaaatacatcagagatccgacggctctacgcagaagccaagtcagaggcaagtgcatcccctcctccgttccaccacgacatcatgggacgcgtggctccattctacgaccggtggtctcgcgcgtatgggaaaactttcttgtactggttcggttcgacgccgcggttggcggtaaccgaaccggacatgattaaggaggtgctcatgaacacgcgcggggagtatgtgaaagttccgttcaaccctcagtccaagttgctctttgg

SEQ ID NO: 9044 - DNA, 251 bp, Glycine max
taacgacctagtgctctctctatgcgactttatatattccgtattgcacacactgaaacaagttctggtccttaatctaagtagatatcattatgctaaatcactattaaaccatatccatcatcgtcagctttcattaaacacatatctcaaattgattatacatacacattttcttgttgcatacttatccactcaccattaatatgtgcattatacaatatacaattccttaactgtcaataaaatga

SEQ ID NO: 9045 - DNA, 341 bp, Glycine max
gccagatcctagatggctagacgtacatcttattcattgatcgccagatcatgataggggtaaagagcttcgggaaaacttggaccggtgagaccatcaccctcgatgtggagatctccgacaccatagataacgtgaacgctagaatgctagacccggaaaggataccaccttgccggcacagagtcatctttgcaggtaaacatctcgaggatctgttaacggttgccgactacaacagataagaggagaccagtctgcaactggagcttcgccgcacgagttggatgcaaatgtttgtcaagactttaactggcaagaccatcagcctcgaggacgaa

SEQ ID NO: 9046 - DNA, 292 bp, Glycine max
attgtaaattaaaaaatttgaaatacattttaattgtcaaaaaaaaaaaaaaaagaaaaagtaaaaattaaaaaaatataaaaaaaaaaaaaaaaaaataaaaaaaaaaaataaaaaaaaaaaaaaaaaaaaaaaaaaaaaaaaaaaaaaatgtgaccccctataaaatgaatcaatcataatttccccttatcattaaactctaaaattattaaatagtgacacttaaataaaattcactgaccgatttttaaaaaacatcaaactgaaaaacatttgattatacactata

SEQ ID NO: 9047 - DNA, 303 bp, Glycine max
gcgataaaccctttagagcctgagggttaagaaaagttcatatcctacatgggctaaaggggtccctgtggctgttcaacattagtgcgacgcacgtatggcctcaaaggctttgcttctggacctgaaattgctaggggtatgctgctgagtccataccatgccgggctactacaaatgcttgacattactccatcagctgagacgtataatggggataaaatggaattggctgatgctgcattgcctcttcttaaaggagttgatgctacaacacgatgtggctgaagcatgcactggggt

SEQ ID NO: 9048 - DNA, 434 bp, Glycine max
gccatgtattcttcattgtacttggtacataagagtggctattctgttatggactctgggggataccaattcacatgcatttgacttgatatttcatcttgttgaattggtgtactataacacggcattgaccttggtttgtatattttgcagaagtctcagataaagcttctcacaaagcattttctttggaagacaagcagaaacttgataggcagttgcatgatatggctttagccattgagaggttggaaagcagtaggcagaaacttctaatggagattgactcacaatctactgaaatagagaggctttttgaggaaaattctaatctctcaaattcgtaccaagaggcagttggggcagcagcaagatgggaaaaccaggtaacaatcagcatcaggggtttggccataaatataatttatggttac

SEQ ID NO: 9049 - DNA, 356 bp, Glycine max
caaaatgactcaagcccagattcaaccagttaaacttggaacccaaggctttgaggtactgttaactacattacttgctcttattttgataattgatacaattaatctcattctaggtttcaaaattgggattcggatgtatgggccttactggagcgtacaatgaccctctccaagaacaggatggcatatctgttatcaagtatgcgttcagtaagggaatcacattttttgatactgcggatgtttatggaaccaatggctatgaaactttggttggaaagggtttgaaaccacttgccaaaggaaaggatcagattggcaccaaatttggtattgcttcacgagggttttct

SEQ ID NO: 9050 - DNA, 221 bp, Glycine max
acgcaaaattcaaggcgtaattgaagctggagtttgtagccggcgaggtgaccttgggatgcgcccttccaattcagtgcttattcctgctcttcagactgatggaaatattgatactggagatgaatatcatacacaggtcatgattgaccatcaagctctcacacgtacatagaatatgttgactaatgcttatcttatgagcatattctatcgaacca

SEQ ID NO: 9051 - DNA, 289 bp, Glycine max
gcttcaggtaaatatcatatgcgggaaatgtacgaatggacactgtaaaggtcgggctggatgcatatgtaatgtcacaaatgaatcaaactgctgagttttaatagatcttgcaattccatgtgataaaccgttccctgcactatttcaaggcttcactggtggcattcattcaagatcatgggatctagtatataatggcatgacccaaattggttttgagaaaccccaccatgagtctagctttcatacagggcaaactcaagtagttctgggtatcactgaattt

SEQ ID NO: 9052 - DNA, 391 bp, Glycine max
  modified_base (253)..(253): a, c, g, t, unknown, or other
  modified_base (279)..(279): a, c, g, t, unknown, or other
  modified_base (282)..(282): a, c, g, t, unknown, or other
tcggcggttttgcgttcttcatattctacctttcgccaggtcaagaacccccaaaaccctaggagaaacgctggcggcaccggttctcgattctcggtggtgggaaaccgcccgtctctggtcccgaaatcgaatatctgctattttttttcttctctcgctctgatttcgattggcagttctaggggttctgtggttctgatttgggggtttcggaaatgggaagcagaaaggaagaagagaggaacgaganaattattagaggtctcatgaagcttncgncgaatcgaagatgtataaactgcaacagcctgggaccacaatatgtatgtacgagtttttggactttcatttgtatgacatgcagtggaatacatcgtgagtttactca

SEQ ID NO: 9053 - DNA, 131 bp, Glycine max
aaaaaaaaaaaaaaaaaaaaaaaaataaaattaaaaaaaaaaaaaaaaaaaaaaaaagaaagaaaaaaaaaaaaaaaaaaaaaaaaaaaaaaaaaaaaaaaaaaaaaaaaaaaaaaaaaaaaaaaaagaaa

SEQ ID NO: 9054 - DNA, 216 bp, Glycine max
taaaaaaaaaaaaaaaaaaaataaaaaataaaaaaaaaaaaaaaaaaaataaagaaaaagtaaaaataaaaaaaaaaaaaaaacaaaaaaaaaaaaaaaaaaaaaaaaaaaaaaaaaataaaaaaaaaaaaacaaaaaaaaaatccaaacctaaaatctaaaaaacaaacccaaataaaaatactaacccaaacataaaaaacccaaaaacaccaa

SEQ ID NO: 9055 - DNA, 408 bp, Glycine max
aaaaaaataaaaaagtgctggaaccttttttcatcaaatagttcatatttgattcctgagggagtcttgttaaggaatttagagagcagagaggaagagatttgtattgaggaattcaacccaactaaaaacagtttacaactctgtttatatgacagttacataactgtaactgtcaactaacctgagtgagttagtgacatctgtaacatagctgtcctaactaactactgaccatagttagacttactgacttagctaaacttcggtattctgcttcagtactggacctagccactactgattgctttttggaccaccaagagaccaaattgggtcctaagaaaattgctgcacctaaagtggaccttctatcatcaagatctgatgcccagtcagcatcacaat

SEQ ID NO: 9056 - DNA, 285 bp, Glycine max
cccacgcgtcccgatcgctctctctctaggatctgctgccttttcttctctttctcaattctcattcatagaggcgaattcatttcttcgatctggaccctctatttcttcctcatcacatcacgcgacaacatgttgctctttgactggttctatggcaatctcgctttcctcgatctcatgtcacatagaagcctaaattcttttcctaggtctcgatcttaacggccaaaccacccctctttacatgctcaatgactagagatttgatcatcaccatccgac

SEQ ID NO: 9057 - DNA, 363 bp, Glycine max
cttcacctgccccaccacgatgcaggagctctgggatgattccgtcactccaaacacgaccctttacaggctcatacacatgtggttctcgcagaagtacttgctcatgaagaagaggtcagaggatgttcaaggaagggcttctgaacttcttgagacactgaagaaggtgaagagtcaggctcgggttcaggccctcaaggagcttcaccaattagtggcttcccatgccactgcacgcaagactgtcattgatgaaggtggagtttctggtgtatcttctttgcttggtccttttacttcccatgctgttggctctgacgttattggtattcttgtgactttgacacttgattcggaatc

SEQ ID NO: 9058 - DNA, 389 bp, Glycine max
gccactcgtccgatgttacgggtgcgacgttagtgacaattctaacggcgcttgagggctccataattgcggaagcgtttaatggtcgaacgtgcacgataatgcgctgagcattctatacatacagggctaggctgagccagcaaccatatcggtgctaaattatggtaagcagcatgcgccccacgatgtaacgattacgctgatgggtaccagaagcacaacgagtataaacttgatccaaacgacctgtattgcactgattcgagtctaggatggcctgtgcatactgcagcgctcgtggaactagaggaacggaccatggacatgctaaaaactggtccatacggttagatatatcgaatttgcaacattatattcggtcagag

SEQ ID NO: 9059 - DNA, 547 bp, Glycine max
  modified_base (108)..(108): a, c, g, t, unknown, or other
  modified_base (187)..(187): a, c, g, t, unknown, or other
  modified_base (347)..(347): a, c, g, t, unknown, or other
  modified_base (365)..(365): a, c, g, t, unknown, or other
  modified_base (453)..(453): a, c, g, t, unknown, or other
  modified_base (463)..(463): a, c, g, t, unknown, or other
  modified_base (496)..(496): a, c, g, t, unknown, or other
  modified_base (499)..(499): a, c, g, t, unknown, or other
  modified_base (519)..(519): a, c, g, t, unknown, or other
  modified_base (530)..(531): a, c, g, t, unknown, or other
aattcccgggtgcgacgccacgtcgtctcgctgtgctttcttgtctcttctcgctttcttcaagtgtctgcttcctgctgttttccttttctttcttctcatagatgnggggtggcatcagtccctctaagaagatccaaaaacgtagaactgtcgatcatggaacgtgattctcaatagtaggatnagtgtttgagcagtctgaaatgcttcaagtagcagtgtctttatacatcagtaggaagggggtgcatatcggctttcaaaagtgctttggtaccataacataaattggaagtagaaataaagaatagcatagtttttagaaagttcttgggttttatgtnggaaaccccttgtcttgnggttaatggaaagctgctgctataatggcgcattgtctttggcaaaatggaggaaggaaggggccaccagattggcaggaactttgtncggaattatncgcgctgcttagtgatcatacttcacaattagnttntattgagggaaaaccaatgnctggcaatgcnntgctgctgctcttatg

SEQ ID NO: 9060 - DNA, 433 bp, Glycine max
gcgcgccttttactttgaacttgagagttggtagtggagggagcagagaacccgaacgccatgtttggctccgctcaaccttcttcttctcccttcggcacccctgcattcggtaccccttcttctacccctgccttcggttcttccctcttttccacacccttctcttctcaacaaccacaaccacaacaacagcagcaacaacaaacacctctgtttcaacagcaacaacaacaacaaacttcttctgctttcggctttcagaattcactcgcattcgcagcaccgcaatcctcgcccttcccaaatgctcaattaaccactcagatggctaacgttgcacctgttcctttctccctcgccgatcgcgatgttcagactattgttgatgcatataaggatgatcctgggaaccccaagtacgcctttaagc

SEQ ID NO: 9061 - DNA, 376 bp, Glycine max
tcgctcaggcgtcctatatgttgtcctcgagctcgtttactaggacatatgatgtgacaggtgaggaggtccgtccggattcatggccaattacattcaggatgacgctcactattgcacttgctgaataggggttcgaatatgagtacttggaggacgacttgacgatcatgagacctatgatcttacatatgaacacgattcacaagatgattcccgatgtcatacacattggcgaatccattatcgaagccctcatcgttgatgaggacattgatgacgtttgtaatgacaggacttcatagccgtattaagacgcttacgatagagcttaggctggatactgggccgattatgttcacgttcttggacatga

SEQ ID NO: 9062 - DNA, 434 bp, Glycine max
ggagccaacattttttgtgctaagtgctgaccacgccagaatttcattatttgcattagcttccgattctgctcaaagtgtaacacgaccaattatcgtggtaaccagctatactgataaagggtgcaattttttgaaaattattcccatgattcatatccatcaacgaccactcttgtgtgcccacttacaaagcttctcctatcgctataggtagcggctcctcacttgcagataggggctcaaggcagttgggtcgacccaattcagagaatgctggagggcaggacgccaataatctgatggtcaagcttgatctcttaggtgattctggtgccggtaaaagctgtatcgttctacgatgtgttcgcggtcaatgtgatccaacatctaatgtaactgttggagcttcttttttgtcgcaaacaatatct

SEQ ID NO: 9063 - DNA, 424 bp, Glycine max
gttatatttcgctctagggaacatgaaaactgtggtccacagccagggtgtgttcgggcacatattgaaagtggaggatttaatatttcccccttaaaacctcgaaatgggaggcccaggacccaagtccagcatcttatgcagattgatctgaagggatggggtgtgggttacttgtcatcttttcagcagtattgtgtccgccaaatgttaaatagtgtagctggtttacgtgaatggtttgcccaatcagatgaaagacatgctcattcaagaattcctgtcatggttaatatgtgctcaacagctgtttcttcaaagaagaatcagaagccaaatgatgtttctgtcaatcctacttctctcgatcaaatgaatgctgcaagcaagaagttctgccttgatagatgaatattctgatgat

SEQ ID NO: 9064 - DNA, 425 bp, Glycine max
  modified_base (388)..(388): a, c, g, t, unknown, or other
  modified_base (393)..(393): a, c, g, t, unknown, or other
  modified_base (411)..(411): a, c, g, t, unknown, or other
cccacgcgtccggctgatgcatatatgcagttgcttgaaatgtatttggatccacaagatgataaggatcccatgtttactgctgctgttcgccttctgcataatcatggagaatcattagatccattgcaagttttagagaaactgtctccagatatgccacttcaacttgcttctgacactttactaagaatgttcagggccagagttcatcatcatcgtcaaggacagattgtgcataatttatctcgtgccgtagacattgatgcaagattgtcaagattggaggagaggtcaaggaatgtacaaattaatgatgagagcctctgtgactcctgtgatgcacgtcttggtacgaagctatttgcaatgtatcctgatgacactngtgtnatgtacaagtgttaccgncgtcaaagtgagtc

SEQ ID NO: 9065 - DNA, 396 bp, Glycine max
cctgcgcatgcaaccgggcagtccacgggccatgtcaccgaaggagtggagggctcacatgccatgggaaccaacagaaggcctggtgggaccgatacagctcatcatacccgtgcgggtggaaagccgaatgattatgggtatcggactgggggtacttaattaatgatgactatatcatcaaggcttataggcaatagggtaataataaggcttattaaatgtagtcagtttggggaatggctatcgtacttgttagacaggatatcatggttggtcatgattttctctccactcgatatggagagacttgagtgtggatatgacagtgtactcactacgtggaaacgttatatgtggttaacttgtacgtgtatcatttagtgatgattatta

SEQ ID NO: 9066 - DNA, 391 bp, Glycine max
gcgacgcgtgaccgtccacgactgttcgtataatacgactcattcaaagttaggagcttcagtccttatgccggatcacggcatggggcgacgagacctcaaccttcgacgtaatccgaagcctgtacgctttacgatcagcgtctgtgcagcgcgggtgcaacaaccaccactgttatacaggatagtccgacggctgaaacacagcagcaaagtcatactgcttctaaaaccatcggctgatgcaaatgctgatgacttgcgagctggagctcaggagactgcgcatataagaagtcagcagtcgactgcaaggaaaagcctgacaaccgaccacggcttgcgccccgagcacaactacaacaggatactcttagacgccatcaatgag

SEQ ID NO: 9067 - DNA, 405 bp, Glycine max
ccagaatttgcatcaggggcagcagttgctgatgcagctggtacaagagataatgcatttgaagagaatgagtctgagagggaaccgagcaagtccatttcaacgctgttagtggtggctggggcggcaggagcagctgatgaaggaccacgtgggtcaaaaaagtcatcagtcgtctcagtttcctgggctccagatgcagcagtagttgcttcggttggattattgtttacaggaaaagatcccgtaagagcagagatttgactaggattatcatttacatgaggagaggagtctctaggagcagatggtgctgaagtttccgcatctctttcactgtgtacagggctgcgagattcaccaacagcttcttcatagctaggaggagcacccatattttgctca

SEQ ID NO: 9068 - DNA, 434 bp, Glycine max
  modified_base (310)..(310): a, c, g, t, unknown, or other
  modified_base (312)..(313): a, c, g, t, unknown, or other
  modified_base (398)..(398): a, c, g, t, unknown, or other
aatgtattaaaaaatatattattaaccatattacactcataaatcaaatataacctttatctatctttctttgttgattgatctctacctttaattgatttagaggatttgtttcaatgctaaattattgttacacaacgtatgcagggtgccaacatcaatttgagggtacaaatgttaaatcacctattcatgtactccacaattgctatcaaacttggaggttttgtcaaagctaaacagtacctcaacaaagtgttgtactacgttaatataggaagcaatgattacataaacaattactttcttncnncagtttacctaacaagccgcatctatccccctgatcaatatgccaacattcttattgcccagctatctcagtatatgcaggtatnttataattttctatattggtttcactttgtgtcaca

SEQ ID NO: 9069 - DNA, 409 bp, Glycine max
ggctctctgggtgtagccttcaaaggatgtccttcagggacaaatatcctgtggtaatgttcatatgcagtattgttgtgcttgaggcgctttgcaagtgccttaaggaaatccttcatcagcacacaaccaaatgcaggtccatttgcgatcaccacccgatcaggctgcacaatgatcgcctttgagggttaatgttcttttccaacatatacagaagatgctgtctggtgaaactgctgtaattgctgagacaggggattcctggtttaactgccaaaagctgaaattgccaaagggatgtgggtatgagttccaaatgcaatatggttcaattggatggtctgttggtgctactcttggttatgctcaggctgttcctgagaagcgagtgattgcctgcattggt

SEQ ID NO: 9070 - DNA, 446 bp, Glycine max
cccacgcgtccggcgagttgcttagtttcaagaagtcatgcgagatccacatgtagctgcagatggttttacttatgaagctgaggctatacgaggatggcttgacggtggtcatgacaattcaccaatgactaatagtaagctggcacatcacaatcttgttcccaaccgcgctcttcgctctgcaatccaggactggcttcaaaaccactgatcaagctcattatttttctctgcccatttttattgaactgtgtatctactgtttataccatgtataggaaagaaaagtgtcatttcattttgttaccttatatcagttttatttcttggggttcttcaatcacattttatacctatcctcttgtataggttagataaccacgggattatcttacaatagttgtaaagtacatatatatcatagcatatatgtcagaagtcaa

SEQ ID NO: 9071 - DNA, 348 bp, Glycine max
aaaaaaatgaaaaatatgatcaataactgataactctcacagctgctccctatggttgaaaaaaaaagaagatgttatactaataaaaacggaagaaaaaactttgtcaattggttgctcatggggatccctggattgagcaatcagaataatgggcagcaaagattatgcataactgagcccatttcattggctggaccaactgaggatgatgtgatcaagacgcgtgaacttgagaagtacttgcaaggtgttggattgtacgagagtcacgaggaggctctgggaagggaggaagtgcttggcaggctggaccaggttgaatttgattgtgtttaatgcaatttc

SEQ ID NO: 9072 - DNA, 434 bp, Glycine max
  modified_base (228)..(228): a, c, g, t, unknown, or other
atcatacaaaattatattcttattaaccctatgcacttagagtgcataagctgaggaccctttaaggcgattctgctacgaaaacaccatgattggcagtggaagaaaattatcagccaatattgataaaatattgactgaaatagcactcaaaacttcctacactggttttgatgccaccacatatggcatagaccaagactaagtgtacgcactcgctcaatgtanggcagatgttagcacccaggattgctccaattgcatccaagatgcaacgaaacaaatccgtcaacgctattcaaaccaagtggatggcagaatttggtatgattactgctttgtaaggtatagtaacaagagtttctttggtgaggttgatacatcttttggtatattctatttcaatgttgaaaatgtgactgaccctgaagatt

SEQ ID NO: 9073 - DNA, 296 bp, Glycine max
acgtccacgcgttcgtccactcgttctttttcgtttcgtttcaatggggagcgaatagcataagggcgaattctacctgcgggactacgtccgtcacaaaggcaagtttggtcactagttcctggagttcgagttccttccatacagtaagctccgctactccatcaacttcaactacaaaaactacaccatcattcgcaaggaggtttacctaatccccgccgttcttctcgagtgccgtcgcatcattacctacagcgagattattaatgaagatgataacaactgttccgaac

SEQ ID NO: 9074 - DNA, 354 bp, Glycine max
cccacgcgttcgctcactctttctgctgcattacgctttaatggggcatcattggggtaagggctaatagcaccagtgggacgacgcttgaacactacgttttgcatgctgacatcaaccagctgttcaagctcatgataaacagcttgttcagctacaccgagattttcttgtgtgaaactatcaccaacgtttctgaggctttgaataaattcgatttgagagtttaaccgccaagagcatgttcgatgctaagacatagctattgattcgtattgtgccttacaaggacaacaagactctttgcggtattgacatcggcattgtaatgaccaaagcagattttgtgaacaa

SEQ ID NO: 9075 - DNA, 431 bp, Glycine max
taagtcatcaatttttttattatgagaaaagagaactataaatagttatccaattatatgtgtatagacaagattaaaagttaattagtgatattatatgattatttaaaaagttatctgtatttttctgttgatggttcaaatataatctaatgatcttatttgtatttctcactttcttacaataagaagtattgttatttaatgggtttcacatgcgagttatatataatgactatacattatttttagatagtagattggtttgtgaagatttggccaaaatttaagaccataggaccaaatgtgccatctttcttcttagataagcaatgcgaagatgaccaagattatggggttacacaattcaagagtgaagaatgcgtggaatggctagatgataagccaaaagggtctgttgtttatgtatc

SEQ ID NO: 9076 - DNA, 388 bp, Glycine max
cccacgcgtccgagatggggcagtgatcccctttcttatggttcctactctcatgttagcgttaagtcatctggtgccgattatgatatactcgctgaaaacgtggggaatagattgttctttgctggtgaggccacgagtaggcaatacccagctactatgcatggtgctttcttgagtggcttaagggaagcatcacacatttaccgatcagctcggattcaaaacaatcctaggaagtgcatgcctaagaatatcgtaagcaatgacatcctgggtgatttattcaagtggcctgatttggaatttgggaagtttgctttcattttttatccgtcttcagaaaatctgcagtcaacggggcttctgcaagtcactattggtgatg

SEQ ID NO: 9077 - DNA, 389 bp, Glycine max
cccacacgtccgctcacgcgtacagtcattatctactcctgcacagtctttgaagaggttgccacagcagaatcacttcgttgccctctccttgtccaatctcatgatgtcaatgtcattcatcccgtcttatctgaggtggctgttatgtgcggatggcttggcgttaattgcatatgtgtactactatctcatatgatggtacaggcctactattttgcacttcactccagatatgattagctgttagggtccagacgaactatgggtgctagacttactggtatgcaggttggagatcttgtatcttatgcaggtcatcctttggactcatatgctgaagagctgatacttactcctactaaaggattccctgttccttagtcaat

SEQ ID NO: 9078 - DNA, 428 bp, Glycine max
cggttctcggaatttcccggcgtcgactccacgtcgtctcgctagatactatgctacattagaatagtagtaatcggtgcataaggcggactatctgtgacgatgagcatctccctagccgctatgtgtctcctaagaaagtgttctatgggcgtggaccaatgtaactatgattgtactttaactacagaccagcagggccgatcatggaatttgatggattgaacgcttcatagacagcggtcaatgaccctgttgtgtccttaaagacaggcttgtcgtactggatggcacatgtgcggcctgctatcaatccaggttctggttcaaccattatagctatcaatgggacacttgaatgtgattgtgcttacactactactgttcaagctcgacgaaattactacacgcagtgttgctcacaactt

SEQ ID NO: 9079 - DNA, 421 bp, Glycine max
cccacgcgtccgcccacgcgtccgctcactcactaactcaccctctgcttgtgctcgtctagcgctgtcgtcgactcactcaccattttcgtgctcacttataacagtgcccatgccctctcgaggaaaatatatttgagtggcaatttgcgattagagggcctcgtgataccgaatttgagggtggtatttatcatggacggattcagttgcctttagagtatttattcaaacccccttcattcaaggtgcagaatggtatcccttgatctgaaatggagttcaggccaatgcatggttatggggaaggtagagtcaagtactaaagctaaaggggaagatatgccttccttgtgcgctagttcgacctatgagggcaaagagtaaatattggtgctatgggaccagccatagatcatgc

SEQ ID NO: 9080 - DNA, 419 bp, Glycine max
gacgtgaggaactatagggttcccctttgtgtgctcaatgggcacgggtatgctgttaggaaggtgaaattctcgccacacgtgcggaatttgatggtgtcttgctcctatgatatgacggtgtgtgtttgggatttcatggtggaggatgctctggtgagtaggtatgatcaccacacggagttcgcggtcggggtggatatgagcgtgcttgttgagggcctcatggctagcactggttgggatgaacttgtttatgtgtggcagcatgggactgaccccagggcaccttgaaggtgaaaggtctaccacagcgaaatctgtggcattccaagttcgagctgagaaatttgcaaataggaagaggaaaaatcagtatacgggaatccgtcaacgcccttggggaaaatgggcagctg

SEQ ID NO: 9081 - DNA, 412 bp, Glycine max
  modified_base (171)..(171): a, c, g, t, unknown, or other
cccacgcgtccgcccacgcgtccgcccacgcttccgggaaaaatcaatgtgccaacatgggtgattgagaaagagtaagagagagagagagagaaagagaaaacgtattatatttatgacctcaagacatcaccacaagaaacagcagcagcaactgcagtggcagcaaanaacatagtaatagtaatagtagaggaagagagacacaagagacccaccaaggaaattttgctcaaaaccagaacttgctaccaaagttaacatcttttgatgattccaagtgactttgagcttcaaagtccatagtggggtgtggtgaattttttgaattttgaagagaagaagtgtgtgtgtgtgtgtgtgtgtgagagagagagagagagagagatgagaagagtgagagtggggggta

SEQ ID NO: 9082 - DNA, 371 bp, Glycine max
tccacgcgtccggagcattcagcattgagcatagtatggatatatcaaatcctgcagcctgagtcaatgcggaactgttgcacttctatgttggaagaatggtaaggatcgtggtgcaagttgtgcgatctgatggtggagttgtcatttgaaaatcaacagatgagaaacaactagtttgtaaaagatcacgctcacctgctgctcctcttacaacttatgatgaagtttatggtcttgttaacagtgataagtcaattggtgctgagatatggaccaattttggtgatgccatccatatggatagctacaataagctttgtcagctcgcacatggagaatttaaacacttgatcctgtgaggtctaaca

SEQ ID NO: 9083 - DNA, 350 bp, Glycine max
aaaaaaaaaaaaaaaaaaaaaaaaaaattaaaaaaaaaaaaaaaaaaaaaaaaagaaaaggaaaaaaaaaaaaaaaaaaataaaaaaaaaaaaaaaaaaaaaaaaaaaaaaaaaaaagaaaaaaaataaaaaaaatggggctgccgttttaggggttcaaagttttctttcccgtgattgcaaggtcaaagctttttttttggggcccttaaattaattaaattggccgtgtttttaaaacgtttagattggaaaacccttgggtttcccaaatttaaatgcttaggataaaatccccttttgtccgcttggggaattgccaaaaaggcccgcaccaatcgcctttccaa

SEQ ID NO: 9084 - DNA, 269 bp, Glycine max
aaaaaaaaaaaaaaaaaaaaaaaaaaaaaaataaaaagacaaaaaaatctaaaaaaatggaaggtgtcatactcgtgcatgcggacgtcatacctattctttcaagcaacctgcttttcaattcactgaccctacttctattaccttgactctcattaaacactgacttccctctatttactcgtcttgaaccaaattcaccttgctccaattctgctcatacctattaagcccgcatcgctcgaccttactaacacctactcgacctt

SEQ ID NO: 9085 - DNA, 362 bp, Glycine max
gacagagctactaatgaatccacaggccatggaaaaagcacaaaaggaagtacgaagcatgttgggagaaagacgagttgtcgcagagagtgatctgcatcaattggagtacatgagagctgttatcaaagagatatttcggttgcatcctcaagttccagtattagtcccaagagaatccatggaagatgttgtgatagaggggtacagaattccagctaaaacaagattttttgtcaatgcttgggcaataggtagggacccagaaagttgggaggatcctaatgcatttaagccagagaggtttttagggagtgatattgactacagagggcaagattttgagctaataccatttggag

SEQ ID NO: 9086 - DNA, 372 bp, Glycine max
aaaaaaaaaaaaaaaaaaaaaaaaattaaaaataaaaaaaaaaaaaaaaaaaaaaaaaaaaaagaaaaaaaaaaaaaaaagagaaaaaaaaaaaaaaaaaaaaaaaaaaaaaaaaaaaaaaaaaaaaaaaaaaaaaaaaaaaaaaaaaggcccccctttttaaaaattcaaattttacttccctttttttctaacttaaaatttttttttttgggcccctaaatttaattcatttgccccctttttaaaaactattaacttgaaaaacccttggttttcccaatttaattccttttcaaaaaaaaccctttttcccaaattggctataaaccaaaaagccccatcccattcccttttccaaaaattttccaa

SEQ ID NO: 9087 - DNA, 434 bp, Glycine max
ggtttggattatgccatgatgactggaggagatgttgcacctctgggcgcacaggctgttaccaaaattcatgatatatttgattggtccaagaaatcaagaaaaggcctattgctttttattgatgaggcagatgctttcctttgcgagtaagttctggagcgtttaaaatacattttgaagactgcttctataaaatataactatttaaattactactacgtagcagggtagccaaaattttgtttttgtagtttatctaacatgtgagaaatgtaactgttgtattacaagttaagacagtctacgtataacatctttatacttttacacaaatcctaacggtttatatttgatttatattgtgtttttaataaattttgatatttagaatcacgaagtgtctttaacttcacatattcggagattaaata

SEQ ID NO: 9088 - DNA, 361 bp, Glycine max
cggacgcgtgggcggacgcgtggggcgcgttaagccaaccgcagaagctatcggcgtacgatgttctgatggagtacgggttcccggtgggtcttcttcccaagggagccatagggtattcgctcaacagagacagcggcgagttcgcagtgtattttcaaggagcgtgcagcttcgacatagagtcctacacgctcaagtacaaatccaccatcacgggtgttatctccaagggcaggctctataatctcaaaggtgtcaccgtcaaaatcttgctcctttggctcaacatcgtcgaggtctctcgtcaggggaacgatatttacttctctgtcggaatcgcttccgctgattttggcgt

SEQ ID NO: 9089 - DNA, 390 bp, Glycine max
  modified_base (370)..(370): a, c, g, t, unknown, or other
gcgtcagcccaaacgtccggcaaaacgaaacacccgtcaccctctcatctcagagcttccatatagaaaccctaaacctaccgaaccctttcaccgcttgttctctgctctttgtcgttcttgtgtgattcgcaatataagggtttggcatggcgagaagacacagcagcagcagcagcgagtcaagtgacgatgacgtgagaaaacgccgtggtagtgaatctgacgatggggagagggataagtatcgacactgtggtgggagtactaagaagagttccggtcacttcagtcacacggcgaacggtgatgacagtgattcgggagaagaaacaaatggtgctaaaacggatgggaagagtaagagtanggagagaaaggaggagcctg

SEQ ID NO: 9090 - DNA, 376 bp, Glycine max
  modified_base (190)..(190): a, c, g, t, unknown, or other
  modified_base (268)..(268): a, c, g, t, unknown, or other
gcgtcaggaagaatttgatggagtaaaaaaaagcagaaatgagcagcgattccctgtctctggggaacctgtttgtcttatatgtggaagatatggcgaatatatatgcaacgagacagatgatgatgtctgtagcatggaatgcaaaagtgaacttctggaaattcgtaaactcaatgagggatcctcncacaaccaagttagagatatctcctcatctggaattagtgctgctgtaccagttccagtttttggtgatgatacctgngattataatcaacatcactggtccaaaaagacatgtagtctttctacttatgaatgttaggaatgtcaaagacctggccacctatctgaagattgtatggtcactgat

SEQ ID NO: 9091 - DNA, 400 bp, Glycine max
  modified_base (352)..(352): a, c, g, t, unknown, or other
gaggcacgcgtcaggaagactatctctaactcttccacctccaaaggaagaaactctctctagacattctatccttggtcccaacgggctaaaagggcagtggagaccacctatcattgataaagggatcaagtatccaagcaacatagatctgtctcctgttgaattaccaagcctacaacattccttggaagatgaatctctgaaaaagaaggataacagcattgcagaacaccataaatcagagttagattcaattctaacccaaagtgaggactgccagccccatccccaacctcagcctcagcatgatcaggagcctccttctcttatttcttttgagacaactganacctctgctcgaatagaagttatcagacaaacttctccttcaaccgta

SEQ ID NO: 9092 - DNA, 424 bp, Glycine max
gaatttacgggtcgagcacgcgtcaggatccaccaaacccatcacagaaaatcacgtaagattgtacctccaactcaaaagcttcaaactttttccagtttccaaattaagacacagagagaaaaagcacaaagaagctgcaaaattttcatcttttgtcacttttttctgttttttcatcacaaaagtttgaaccttttctttccttccattgaatttggatggctggcggcggacgtggggaccggccgccgtggaaagaggcggcgccgccacgacccaccatcactctgccgccgcggtcgggttccatggagacccttttcaatggagggttcagccctggtcgcatgactctgctttctggctttttgggtgatggggatgatggaaagtccttctctcagctcctcgccggagctat

SEQ ID NO: 9093 - DNA, 374 bp, Glycine max
  modified_base (8)..(8): a, c, g, t, unknown, or other
gcgtcagnagaaaatacaatccaaatgatgaaatagatgttcatgatttgagaacaataaaatcaagtaaatggggtgcaactgaacaatttcaagatgcatatgaatgtgaagagtgggtagatgaccgagatatggatatgttgtattcatctggtaatgttgaattgaatcctaagatatacacgaagtataaccatacatatgacgaggtggccaatgaatgatattttccagctgatgaatgggttatacctcaatggtctatgggacaagtttaaaggcagtcaattcaatttcggcagttttccaatccatatataaagcagcactcaaagtctagttcttcaaactggtataaatcccaacatttt

SEQ ID NO: 9094 - DNA, 383 bp, Glycine max
cgtcagcggacgcatgggaaaacaggcttgtaacagcattcatgatggtgtggtgtcaatggatgttgataaaccagtgacaaaataaatttgggcatctggggcgaaattctactatcatttgtcgaaattaaattgcatcgtctttcttgcaaatttcttcctgatatgctcactatcaaatcaaatgagtttgctttaattcaataatgctgtcatttcctgcaatattctctctaaatcaaattaatctgtttatgtaaataggatccactgagtgggttgaacaaaaacttattaatctaagttccaaagctgtatcataccttaaggtggactgtcctgtgcaacgtcctaatttccttggtggttcaactcctcag

SEQ ID NO: 9095 - DNA, 387 bp, Glycine max
ggtcgaggacgcgtccgcacacgaatccgcttacatctagctagcaagctgagctctctgttcctctcatcttctcttttcaagtcatgggttcgtcctctagtcgacttgggtctcgcccttctgcttctagttctagtcacagggtcacgcgcttcagactatcgtctcttctatgtggcacctccacctcacgctccattcagcagatggaagaacattcatctgaacttcaagttgattcagctagagattttgatggtgaaattctgaaagacactgacgaattgcctttgtcatatacagaagctagaattagctccactccccctgctgaaactgtaaactcatctgatatgagaactgagttccaggcctatactagtg

SEQ ID NO: 9096 - DNA, 351 bp, Glycine max
acccgcgcgtccgaagaaaagtcataaaaagcataagaatctgcaacaaatagtcatggctgcgcttggggaccaatcagaggaacaagccatggctgcccaacctaaacctcagaaccgacccatttctaacatcgtcatcgtcgttgctatgcagacggaggcacttcccattgttaacagattccagctcactgaggaccctgacaccccgtttccgcaatgggttccttgggtccgttatcaggggacatacaaagatcttaatataagcttgatttggccgggaaaagatccaactttgggggttgataatgtaggcagcataacatctgctcttgtaacgtatgc

SEQ ID NO: 9097 - DNA, 275 bp, Glycine max
gcgtccgaatacaaattcctggcgtcaataccgagcaacgtgcgaaatgcctgacttgaactcacgaacggaggtgatgccgaacccagagtttctaagcctgttttcctcacccgacacactgcagggggtcgtggccctttcagggtcctcctctgtcgcagcttgctcagcagcaatcagcctacgaagcaggtcacacacgtgcatgcactgggactatgatcaaactggcgctcgcggataaaaccccgcatttccgcaggtttcggccc

SEQ ID NO: 9098 - DNA, 195 bp, Glycine max
gtccgaccacgcatccggagtcggaaacaaatgccattcgatctctcggagcacttgagggcccccatggggcaatacctcatgtgccatcccaatagattcgatgtctcggtgctcgcacacgtatcttcggtcagcaacaccataatcagcttgtatatcgtcacagcacaccgtatcctattcagggaaatg

SEQ ID NO: 9099 - DNA, 219 bp, Glycine max
cgtccgcccatgcgtccgcacacacacagctagcagatattacagacacgtgaatcactaattaagccaatggacacgagcctatgtaatggaatttcaagatccaattggtttgtaaatattgtggtttaagtgaattaagttatgaggagtacgtcgcagtggcgaaggtggcttttaaaaatataattttagaaagtgtagaatctgaaatggttt

SEQ ID NO: 9100 - DNA, 93 bp, Glycine max
cagctccttcactcgttgatccggatctagagtcctttttacacgcctcacttctcgttgtagtgcctcgctttcctgatccatcgggtttca

SEQ ID NO: 9101 - DNA, 347 bp, Glycine max
cgcgtccgaacttatggacagcctgctcaacgatatcctgctccgggttatcctcctactggttacccccctgctgcttatcctccaccaggatatcccccttctggctacccgaagtgattggtctacagcgcagcagttgatcgtgcttcatagaacaagggaacatgtttgtggtgaaatacaacagttcgattgattaattaagttccattagtcttataattcgcggattaaccttataatccctatccggatgtgcattcggatacttcgacctctgtttgtatactgttctcctttggtggttatacatagttcacatgtttcgcctgttatgtgcaaat

SEQ ID NO: 9102 - DNA, 56 bp, Glycine max
agtgcatatggggtagatgaaagcacatattggcgtggtggctatggccactatgg

SEQ ID NO: 9103 - DNA, 157 bp, Glycine max
cggttccagcatgttcagtccggtgaacacatggccgccatgggcgtgtttttcttgcttcaggtatttttcttcctggattgggtgaagcatttgcttagctggaggacgttgtttcaggcatttttggcgataactgtgacgcgggcggctgctg

SEQ ID NO: 9104 - DNA, 102 bp, Glycine max
ttccgggtccaccagcgtccgacacgcgtccgaaaagttcaatcatgcagcactccactctctctctctctagagagctcgggatagcatgtcactacaaac

SEQ ID NO: 9105 - DNA, 94 bp, Glycine max
acgggaggatgcactataggatacaacgcttactgtaacgtcaaagccactccatagcgcatcaaagttgaactcaaagttcagttcattggca

SEQ ID NO: 9106 - DNA, 361 bp, Glycine max
cggaaaacaccgcaaccaaagacaaaattaagaatagaaaatcgttcgtgacttcttcttaacttccatcgtccatggcggtttcggggttgagaagcggtggtttgcctctcttccaccatcaccaccaggagcaccaccttcgcttccttcaatcccctccttcctttgccaagctcagttttcttggctccaagtcgtcgaagaaggggttcacagtcttctcccgctatgcgcaagcgcgtgaccgtttctcctcgcgtagattccaagatagcatggagaagctgccgaacctgcgggaggacattgtgcagacatgcttaaacacgggtccaacggggtgtccctgaggttggct

SEQ ID NO: 9107 - DNA, 77 bp, Glycine max
ttcaacgatttgcgctgtgaatcgatcattcattaacgatctttcaaggaaatattcgttgcgatcggtgattctgt

SEQ ID NO: 9108 - DNA, 344 bp, Glycine max
ggtccacggacgcgtccgaccacgcatccggggttcagttggggtttaaggttctctcatcacatcggtgttatcactgtcacggcgtgagctcatctcatcgttgagtataataatggattcggacactgaagaaacaaaacccaagcatcccaagaaggagaagaaaaagaagaacaagaagaaagaggttgaggttgtccaacctcaatctgaacagattgaggttgaggtcgaagttgtccgtgagcaccccaataaaacacctcctgttgttggttatttcccttccggatttgatccggtcaagaatcatggcgggggtccctccaattttcaagttt

SEQ ID NO: 9109 - DNA, 291 bp, Glycine max
cttacactgcaagtcctgtgttctgagcttccactttccctatcagagactttcctcttctggcacacgctatctgatgcaatggaccatgcataaccctcatcgactgcgaaggccaagtcatttgcatcaacggaaggtgcaacgacgaccgcgacgtctgaacccacatctgccgcggcggaatgccgccaaatccgccaccaatctgcggaagctgccagtcctcgggaatcctaaattgccgcggaaaatcgtatcctcagtaacgttgctctccgccggtaactt

SEQ ID NO: 9110 - DNA, 407 bp, Glycine max
ccacgcgtcaggaatcagtcataacttttccaggactcctttcaccttttgactcattcttgctttcagattttacctttccttcctgattagtttcacacttttgagtatcttgatccaccttacatttcattgtatcacacttgatcctttttgaaattgcaaatgcattacacttgctattaatcttaggatcagttgaattattattctgaaaaatttccgttttatgctctaaaactttttgcataaagctactccctgtattttgcttctcaatcttgtcaaaatcctgaccagatattgactctagtgtatcctccttcactgcttcagtggaaaccattctacatttcacaccatcctttatcaacctccttggatacttcaaaagccttaacagtgac

SEQ ID NO: 9111 - DNA, 386 bp, Glycine max
cacgcgtcagggagggagtgggaattcttcttcagataatgatgttagttttgtcattcgtcttaggtcacgtccttcgtcgcaagaagatttacgttcttcccgaagccagcgcttctcttctcattggcttactcgttggtactctcgctaacatttctcacactcaaaccagcatcagggcgtggttcaattttcacgaggagttcttcttcctcttccttttgcctcctatcatattatatcctctttcatttcattcttcttcttcttcttctttacttttcatccctcttaattcattaattccttgaccttattttttctcgctttactcagtctggcttcagtctctctcccaagcctttcttcgctaatttcggagc

SEQ ID NO: 9112 - DNA, 438 bp, Glycine max
gcgtccggggagatctgagagaagcagagctgaagaggtgaagtgaagatgatgtccggaaaatatacgtcgattgacgcgcagcagcttcagggatctgttcctgccgttccagattcacgacccgccaccgtcaatttcgcagattcaaatcttcagacttttcctccttctggagctcagggcaagatcaccgctgcttccgggcctcctcgtgacgctgatgattcattttcaaaacctgtatctggttctgatgaaccgcagcagggtggttggtttcagacttttacaattgctgcttacaaaccatactttgatgttgacacttcagatgttctagagaggattatcgactcactatttccatttagaggatctttcaatgaaaaaactgctaccaaccctgatttgtatggtccattctggatttgcact

SEQ ID NO: 9113 - DNA, 350 bp, Glycine max
gacactaataatgtagctcatttaagcaattatttatctacaattttaaaggacggttataaaattacagaaaggaagcattgaagtctgtatgaaacggatggtctcatatcgtgataaagactaacagaactattacaatacacaattcgctaaagtgaaatgccacattgcaacttgccacttaacacaatttgcagttcaggtgcgtcgttgttcccttgtttaaagagcttcaatttccctcatcacttgagctttgtcggcttcaaattgttcatcctctttatcaattttgaagtcttccaatagtctcagcatcttacttttgttcgcaacaaatatactga

SEQ ID NO: 9114 - DNA, 224 bp, Glycine max
gacccacgagtcacgaaataaaaaactgacaatgaaaaaaaaaaataaaaaaaaaaaaaagaaaataaaaaaaaaaaaagaaaaaaaaaatgaaaggcaaccaagggggtctctcttcaggtggctcgacactaaaattagtcttgcagctaacgtcggacctctaaattctcgtcgcgggccgtcattttactggccttcgtttgggaacatcatgggtttaa

SEQ ID NO: 9115 - DNA, 399 bp, Glycine max
gccgacccacgaatccgaacaagcatcggcaacataggttcacatcacaactaggagttgtggttgctgatcattcgcttctcatcactgggacttgatacattcctctcacgcagctaccattcgtaatccacactcacattgataggatgcatcttccgggttctgaaggtgtgactccatcagtaatataaattgtagtaaggaaaagacgtgtctttgcagtttgaacaacattagattcgcaaacatatatggagatgattgatagctacctcgaggtcatgaagaactagtaatacaaggtgttctagcgtgcgtaaggcaggatctagtagagagaaacttacagagtaacgctagacaggtgtacgatgaacaacagaaacttggctgaca

SEQ ID NO: 9116 - DNA, 387 bp, Glycine max
gacccacgcatccagccccttctgccctccccagccattaactgaaaaaaaaaaccaaaaaaccaaaaatactacaaatttttttcagtttctccgccgccgcacaaccaccacctcctccgttcggatctccggcggacctactatccctactactactctactctatttacacggaagaacagaaaactatccccctcccccaaaaaaaaccccaaagcggctcggttagggtttagttttgtaccatttcgtgtaatctaatttttcatccgtaaaaatctaattttgaggcggcgagatggcggagagttcaggtgcagcatcagagtcgggtgtcggcggctcctcctccaaacgcggcgtggcgaacgccccgaacaacgc

SEQ ID NO: 9117 - DNA, 324 bp, Glycine max
cacgcgtccgaaaaatgaaaggcccttgttgtcctctcccctccccaccagcaccacgagacacagccgtctcccccgtccactacgcccgcttcctggacttcctgaaatcccactgggccccacctttcaccccggacaccctcctccactttttgaaatccaagctccatcaccacccttccttctcccacttcgacttccacctcttcacatgggcctcctcctccctcgactctttccgccacacccacctcaccttccactggatggcccgctccctcgcctccacccaccgcctcccccaacgcggcaccctcctcc

SEQ ID NO: 9118 - DNA, 201 bp, Glycine max
gcgtccgaaaagacttagaatgcgatgagcaaaaatagacctcaattccgaattcagagatagcacgcaccaggagaagccatggctactcaatccccttcacctcagaacctaggtggtgaaatttagcaaacagaaaatgtagatcagcataatatgggagaagagcttggtaaacagagtttatacacatccggtgtt

SEQ ID NO: 9119 - DNA, 362 bp, Glycine max
  modified_base (334)..(334): a, c, g, t, unknown, or other
acgcgtccgaccacacgtccggcagtttattctatcatatccttgttcaaataattttcttttcaattacaataccccaatcccagaaacttatgttcatgaccatcctcaaggtcccaataacatttacttgaagacaattttgagttgaccttacagcctagttccacctacaaacacccttgatccttcaaagcctctcatagttccaatactggcaacaataatactcttgggcatctaaactatctccattcttttttccccctttctttgcagtggatttgcgaggttttaaagaaattagaggcgtttttatgtgctaaagagctangtaattatagaattcatctcacacatac

SEQ ID NO: 9120 - DNA, 409 bp, Glycine max
cgcgtccgaacaaaagcctctttaatttccccatcccctctagattttctctctaaatggttttccaaagatctctcacaatggcctttaatctcgtgcttttgttctgtttggttgcggtgatcaacaatgttgtcattccaactagtgctagacaactcatgatgactgcatcaccaaatgagaaagaagtgatgaatattggcactgaaaatagaggacatgatgaacatgatcatcaagcacaagtactagacgatccaacaagcaagaataacgtggaaaagaaagaagaaagatttgacaagagcgagctcttccctccctttttcgcacttccgcgatttactcgtccatttccacgtgctgcttttccatttccacgttttccacttccagggcttccatg

SEQ ID NO: 9121 - DNA, 145 bp, Glycine max
gcggcaaccttcgatcttaatcccacggggcaacgttggatctgttgaacttcttcattgagatgcactctgtgatttcgctacaccctcactccgcttcgccacgctatccgggacaacagcacgaacaacgatgccttcatgc

SEQ ID NO: 9122 - DNA, 238 bp, Glycine max
gtagccagtgagaaactcctcattctccttcttcttctgctacccagggctttgtctgcgtctgagcctcctccaccttcagttcctgctcccgttcaatcgagcgctcctccacacttgatctacaaaaatcgttgacaagagtttacttcagactgaggcgatgtgactttcctgtgtatcagaccattaaggagggacaggatcatagtccaaaatttaggtcgacggtgtgggt

SEQ ID NO: 9123 - DNA, 179 bp, Glycine max
aggaacttgattcaaatattcacaaagccttgcaatgccttgggaaataacaatttaaaaaccaccagaccaacaatggtaaactttgggccggggaaaaaaatttgtttgattttcttgctgaacccattcaagttagttcagactcaaaggtggtaaaaataggcggtggcactctt

SEQ ID NO: 9124 - DNA, 270 bp, Glycine max
caacataatcatgagccaattcttgttgctaccaacaacaacaaccctgaatcctctgcagttccggctccaaaggcaatcctcaaaagtgccctcaagcgcctcaaggatactcaagtcgatacccaagctggagcacctaatagaagcttgaactgcaggaggacaacggatgcttctgaagcagaggttattgaggccatgcagaacataacttcacaggtcaacggccctgcagagttcagcaaggcaacaaagcttgctatacag

SEQ ID NO: 9125 - DNA, 272 bp, Glycine max
gcaatccaacatgtcgctacctttccaccagcagtctgtcccgagacatcctacacgtcacggatccaaggtcctatcgcaatcggaaggaagcgatccatgggtccattcgcgcctgcgaggacaagaagaaacaacgcggagttaaaaatttcccgggtgacacgcgcaatgctccccgccaagaacagcaatccgccgggctcggaaacctccctcacattatgaagcacgccgtgtccctcgtcctcgggcacgtcctccgccccaag

SEQ ID NO: 9126 - DNA, 279 bp, Glycine max
acccacgcatccacccacgcgtccgcccacgcgtccgtttttaagaatttattaaacataagctttctagcaaaaaaaaaaaaaaaaaaaaaaaaaaaaaaaaaaaaaaaaaaaaaaaaaaaaaaagggaagaaaaacaaaaaggtaaaaaaacttaaataaacataaaagcaatagtaaacaatattctaaagtgtcacctaaaattcaattcaagggccgtctttttaaaatgttctttattgggaatcccctggcttgacctaatttaatcgcctt

SEQ ID NO: 9127 - DNA, 283 bp, Glycine max
acgcgtccgaaccaatgaagtctcccatgcatgacttgggataagtcgtaaaagcatgtaagatagggtttataaaaagtctctgttccctttccctccttttagaagactcccaatcaacgggaacgctaaccagaagttttaccttccctttccctcccaaatccctcatccaaacatgcccctggtgttctgacatcttcaatatgaagtttacttctctaattcacaatttatacaacatcagatgttcttggaaaggggtattgtgccattatggttg

SEQ ID NO: 9128 - DNA, 147 bp, Glycine max
acaaccgatatggtcacatgagcgtcgtcccttcaatcaactatctcgtctgattgcttacagctactatcggattcttcagtttcaatccgtcgaagctatgattcaatggcaccctttaccttctacagcacacttaggttttgt

SEQ ID NO: 9129 - DNA, 123 bp, Glycine max
tataggatccaatcttatctacacgtgcacgaaaggtaaaacctcttctatattgtcatctaaattcaattcattggcagtcgttttataacatcataactgggataacacatactttaccca

SEQ ID NO: 9130 - DNA, 158 bp, Glycine max
acgcgtcggcaactggtttggtgagatgaatggtgttctttccaacagcgtcatgtattcttgcgtgctgctacctatggattcctcagtttcacttcctctaagcattgattcagaggcagccttaaccgtgaagcacatacgtggcttttgtacgt

SEQ ID NO: 9131 - DNA, 332 bp, Glycine max
ccaaaaggttccaacctaacttccccttacggcgacgctctacacttcaaagcttacatatgcgtgcattccacggcccacctcttcaaaagtgccacccgggtacaacccagtggtcgtccatttaaaccgccttgacggggaacccccttccgtaaccgggcttaatcgccttgcggcccatcccgttttccctacccggcatttccccaaccaggccggcaacggtgaccctccccagaactggccactcctgacgggggattgggaggctccccgtagcggcacagtaacccttgcaagtgtcctagttacgcccattttgacttcca

SEQ ID NO: 9132 - DNA, 286 bp, Glycine max
gaccacgcatccagtttcatctaagccctcttgtcgcaacgtattaagaataattaatcaggcccttcgatcttcgattcatctgaaaagaggtcttttgtttcacatcaacacgagttcatgcacagtaatgggtatcgctcactttccttgtatagcatttccagtgcagagagatgtgaaccctcttatgcaaatttctctgcttgtggtgaaagatggttgcaaggtcacttttgtacagactgagttgaacctcaagcgagcagagacttggggtgctgac

SEQ ID NO: 9133 - DNA, 236 bp, Glycine max
gggccgacccacgagtccagggtcattggccaaaattgatatgtgtccaaacggaaggatttgttcagtttgacaatcctcgaaaatctgagaggcgaatggacaaatgctgcattatgcaaatggaaaattagttaaaggagatggagcaatgaataaatgtgtcatagttgtggatataatttgcattgaaggagcagtacaattgtacttggtgggtgaagttgttaagaatt

SEQ ID NO: 9134 - DNA, 225 bp, Glycine max
agcgtccgaccaagcgtccgcccacgcgtccgcaagcagtcaaaatgaagtatgtacatataaaaattgattttcagaataacgagaattcgcagttagaaagagcaatttcaacaatagatgagagtaataggaggcagtacgacaacaatgaacctaaggagggcctgagcttcagcatgtgcaaaaagttggtacagatgatgcaaggtaatagatggatat

SEQ ID NO: 9135 - DNA, 313 bp, Glycine max
gccgcaaacccttcctctgaactctgatccgcactggcactgaagccattgctgtaccttccaaaccctagcgtagccacgcgctgaattgcgatacgatgatcgtgcgcacatgaggcggcacggcacggcacgatgatgaacacagccaacggcacgatgatctcaccgtcgtcttcgtcgggaacggcggcgcagtcgccgggactgaagacctatttcaaaacccgcgagggaagatataagcttcaataggagaagactcacccgtccagtcgtcttcattacgcccatggcagaaccgttacgcagg

SEQ ID NO: 9136 - DNA, 211 bp, Glycine max
gacgcacgcatccaccgacgcgtccgcgcacgcgtccgcccacgcgtccgcccacgcgtccgggcagcagggggatattcaaagttcgtcgccagccagctaagtctgcgccttcggcagatccgtaggcgggagtacgcgtggtggctcccacggaagccaggtgcgaagcaggctgagaggaggggggaggtagaatgagctggggaaa

SEQ ID NO: 9137 - DNA, 204 bp, Glycine max
acgagtccacaaaggccgagtccgtgccatgactgttggcatcaatacactctttgctggtgcagaggatggtgtcttttttgcgtggagaggaagctctaaagccgattctccttttgaactggttgcgtctctcactgggcacactaaagcagtggtttgtctggcggttggatgcgagatgctgtaggccgggtcaatgga

SEQ ID NO: 9138 - DNA, 442 bp, Glycine max
  modified_base (429)..(429): a, c, g, t, unknown, or other
ccacgcgtccaaacattgttcaggctcctttgattcctagtcacactgatattgctaagattgtccagaaagtgttacaaccaaagcttcctgtccatcccacgtggactcctccatcaagggattatatgaataaggctttcacatgtcagatgtgtgaactcagtgtcaatgaggttgatactgtacttctctgtgatgcttgtgaaaagggatttcacttgaagtgcctgcagccatcagtcttgagaggaattcataatagagttgattggcattgtatgaggtgcttgagtttaagtggtggaaagcctttgcctccaaaatatggtcgtgtcatgagatcctcaaacacaccgccaaaattgccctctaatacaggtggcgttcaaccatgttctgagaagaaagtagagaatatcgattcanaggtcatcccaca

SEQ ID NO: 9139 - DNA, 402 bp, Glycine max
tgttgccaaagggctagttctgtcatttatgactgacttctttaaggagtatctgattgacaacagccttgatgatcttatttcaattctaaaacggggaaaagtagaggaggatcttttggacattttcccccctacaaaaagatccattgaagctttctctgagcatttcaccaaggaaggattggtggccttggtggagtataatgaaaagaaaatttttgacgtgaaacttaaggaaatgaagtcttctttaacagcacagataacagaggacgctgatacatctgaagtcattgagactgtgaagctgcgagttagagatgctaaattgccggaaattgacgtggtaccgattcttgtgggaagttttaaatgaatgccgttcaattggctgaaaaa

SEQ ID NO: 9140 - DNA, 357 bp, Glycine max
ctccctcaattttctctttcttcatctttctcttttgcatcatcatcccttttccttttattcgttagggatcttcattcatgcatgcgattccagctccatgcacgcaagttgctgaagacgaatttttatcgcaacatattcatctcaagtaattccttcttatttttctttcacgacagctttgtaactaattttttttaaccttcagtttctctgcgagtattttccgcaatggccgaagaaattgtgaatgaatttgttcaccaaaacggcatcgctgtcataacacacaatccccccaaaagtaatttcgttttcctcaaaatcttcttctcttttccttttaatcctttt

SEQ ID NO: 9141 - DNA, 399 bp, Glycine max
ggtcgaccacgcgtccgataaaatctcacacaaattacacatgtcatcaactctctcggttgcatcatcatctcttttcaatttaatctcaatgtgacttcaattaagcaagacaaatccagttcaatgcccgtcaatttcaatcagtcgtcatttatataaagaggggattcagctcaagttattcatttttagtttactttcactaaaactttctagcctaatcattttgcagcttcattttatttgccattactttctttaatcactcttaacagtgaaaatgaagttcttcataacggtggcaccgttgccagaaatctcaatttcaccttcagtataatcgctaaatttgccatcttctatgcttttaccattactatttctgcttataccttc

SEQ ID NO: 9142 - DNA, 420 bp, Glycine max
cttcggttctcaattgaaccaagctggcccaacttcgcaaaatctcagctttcgtttcgtcacacaaacaaacctcgtcccgctcctagttacacactacaatgaatgccctttaacatttgttgtcttctttttttttctcccccccttccccgagcattgtatgacttcacttccgcttcctcggacctcactctctctcttcaattctcggttttgttattgtagaatggttttaagttaggggggcggtgtggcgtgttagggtttttcctagtccaattcacgtcggtctcggaacgacccatcgtaggtttaagaatgtctggtggtggtggtggctgtggcggtgttttcgtgacgtgggaagagcaggtgatatgtcaggagcgtgggaaccgagtgattcacttttacctg

SEQ ID NO: 9143 - DNA, 461 bp, Glycine max
gcgtccgattcactctacgctcagacctctggttgaagttcttttccatgtaggtcttcctctccgttgttatcgttgctgttgccttaactctcctctgccttctcctcaaatccgttccaactttcgctttcgctctctaactctcccggttgtgattcttctcccgaattccgctgtaaatacctgaatctagcttctctcaatatctaagcagcagtataattgtagtgagtgagatggatcattatggttcttctggatgaagctggacgatgatcctcaaccacaattcaagtattcaatcccaatcccaatcgaaccaggaccctaacctctttcttcaacaacaacaacaacagtttctccagtcacaaccttttcagcaagcactatcaccccaatccccatttcaacagcaccaccacctttatcagcagcagcagcaatcacaacaacag

SEQ ID NO: 9144 - DNA, 449 bp, Glycine max
acccacgcatccaaaaaaattaagttagtatgtatggatgtatgtgttcttagtaatcataaagtgctaagtcaaatacaaatattgtttgtgtgtggtggtttgatcaacaacacacagaaggggtatctcaaaaacacaacaacattggagattatggagctagcgcaaaagaaaggatttctggttcatcatgagtacgatgatcttgttggttctttttattcttcctcgacatcttcttctgtttctggaatttcaagtgggtcatcgttggaatctgattcttttgaagaagtaacatcccctgcctcttcttctccctcatcatcagttgatgatcaacttgtacttgttgctgatccattgagtgacatgtcttctctctttcaacaacttcccatcaagatggggctatcaaaattctaccagggaaagtcacaatcttt

SEQ ID NO: 9145 - DNA, 397 bp, Glycine max
gtttcattttaaaaggggtaaccaaaacttcctgggttcccggttggcttaaggcccccaacccccgcaaaaggtttggttggccaaaaatttgcaaaacaaagttgtaaaccaaggaaacgggcgggttgtcaaaggggggttgaacaaacaatccccctttgatggaattgtcagaaaggatcccttggagggaacccaagtgcaacttaagtctacatagtttaacacgtatctcacttctgaaaatgagggtggagctgatgttgtatccaaccgtgactcagcttctggttgggaaacattcaatctgtggacgatcagtgactcatccttcaacttgagagtgttcaacaagaaatttgttgagctggaaaatcatgggggtggaaacaaa

SEQ ID NO: 9146 - DNA, 361 bp, Glycine max
cttctcttctcacacaatctctgttcaacaacgctagagaataatatctcaagtatcatgtgatgagatgaaccaagcacaacaacttcaagaagcttgaagtttggggtgtctcaaacatgttctcaaagcttcagccacaacaccagcaacagcatcaaccttttcaattctctcgtgaatgtcaaacgtccgaggacgatgacagccgaagcagcggtggccctaacaccgccgtcgcccaaaaatcagttttaggcggcggaggatgcagcgatggggccacaattgaagtggtgcggcggcccagaggccgcccgcccgggtccaataagaggcccaagccggctctcataataac

SEQ ID NO: 9147 - DNA, 427 bp, Glycine max
gggtcggccacgcgtccgatcaaccacgccaccgtcttggctcaacccccgcaaatcaccctcccaattcaatttcaactttggcccctccccggggctccaaattccaaattcgccccaatctcagttcgatttcgcagaacactggattccagaagctcggttcttgatcgccaagaaacggagccctaaaaataattcttttagggtttctctgtctctgtgtggttttggcactaaaacttttgatccgtttgagaatgggggatcgaggagaagacgaggatttgcaaatggcgattcggatgagcatgcagcgtgggacgccggagccgaagcgcagcaagccgcttgacgccgtcgccggggcggtttcggggtcgccagaggagtctccggagtacaagacccggcgacgggagctcat

SEQ ID NO: 9148 - DNA, 433 bp, Glycine max
acgcgtccgataaattgggaggtgcagctacagaattgatttctgctccaaatacaagggaaccatgccagagtaattccattgctgaggatagaatggtggtttctgaggtatcttctggcggtcttggaaatgaattggagaggcatagagtgtcttctaccctatgtgttgatgatagagataataagcatgaagctgattcaggtgttatagttgatatgaaaagctctgtgcatgatttaagcactatgataaattcttcaatctcatctttgggcaattcttgttcaggattgagttttagttctgaaaataagcatgtgccccttggaaatcctcgtgtctctgcattgtctatggacaaccttcatgcacttttgcaaaatacagttgctgttgatgttcaatgtgagaaaactgctagccaaga

SEQ ID NO: 9149 - DNA, 432 bp, Glycine max
gcgtccgacaaacgtccgcggacgcgtgggttttttttttgctctatttataatggaatcatgccaaattaattccattgctgatgatataatggtggtttctgatgtatcttctggcggtcttggaaatgaattggagaggcatatagtgtcttctaccctatgtgttgatgatatatataataagcatgaagctgattcatgtgttatagttgatatgaaaagctctgtgcatgatttaagcactatgataaattcttcaatctcatctttgggcaattcttgttcaggattgagttttagttctgaaaataagcatgtgccccttggaaatcctcgtgtctctgcattgtctatggacaaccttcatgcacttttgcaaaatacagttgctgttgatgttcaatgtgagaaaactgctagccaagatca

SEQ ID NO: 9150 - DNA, 173 bp, Glycine max
ttttatgcctgaatgtgatcacttggcttcaatgccaaaggctttttaacaaaggttggatcatgttgatgtatgcatgaaattggttcaaccaatttcatcatagcaatctgaaggtgtctatcaagtttcagcctgaatatacgatcttctcattaacgacactgacctca

SEQ ID NO: 9151 - DNA, 415 bp, Glycine max
aagatttggttggataatggggtagttccaatttcctggatggtaaaaggcttatgggacaaactaaaacttggaatcctggaattttcaagtttccctggctaaaatcaattggaattttagcaaaatggttacttttcccccggcttttgcacaggcaaatgcaaaagggaaaccggttgttcagcacagcgggggatcatgcattattctgtgttgccaatcaataatagtttttatcacactatttatttacttcaaaaacttgtctgtaatttgagcactaaattgaaagttgtaaatactggaaattccttttatggcagaattgtgtctaagttttgtaacgtgttaaatagaattttccttaaaaaaatttcgttccggttaaaaaaaagagcataaggtataatta

SEQ ID NO: 9152 - DNA, 453 bp, Glycine max
  modified_base (442)..(442): a, c, g, t, unknown, or other
gggccgacccacgcatccaatcagagacaaatggttctgttataaatactaatgaagttggaaacattcaagaagctgaagccgagggctattctatttatgtgaaaggtctgccaccaactgctacgcctgcagtcttggagaatgagtttaagaagtttggacctattaagagtggtggcatccaagttaggagccaaaagggattttcctatggctttgtggagtttgaagtggcaagtgctgcgcaaagtgcacttgaggcttctccaatttcgatcaatggccgtctcgtcgttgtagaagagaagagatcaactaatcgaggtagaggacgtttctcatctggcaaggctcctagcttcaggggtgaaggtgcaagagggcgtggaaattatggaaatggccgaacctatggccgtggtggtgactttaatggcangggagaatatg

SEQ ID NO: 9153 - DNA, 378 bp, Glycine max
acccacgcatccacgaacttcttgtccaagaaagatcaactgccgcagccaaaaatgctgcagttattgcttttttgcaacagttatctggtcagcaccaaaattccacaacacaagccaatttccctcaacaaccacctccacaaaaagttacaatagtacaaccaccaccacaacaagctccacaaccacaagctccattggtgttgtcaaatagtgacaacatggagattcagaaaatgaataatcctcacaatggtggtaacggcaacggtaacggcaacggcaatcctaaccctaacaacaacttccgtgccggcggcaatggcaataacaacaatccctcctccatgaattccttaacctcctccaaggtgg

SEQ ID NO: 9154 - DNA, 65 bp, Glycine max
cacgatcctttcctagttaggcatgcttcatatctcctctatcgtcacgtcagttcacttcactg

SEQ ID NO: 9155 - DNA, 348 bp, Glycine max
gcgtccaaacaaaagcttcttgcacgcacgcctttacgaggcgtgctgctactaccggggcatcgtccgggtcatcggcggtgggcgctctataggctccatcgctactttcgcgtactggcgacctctttactcttctaaagtctcacccagggggatttcactgtcggtctttttagaacttcatgacggggaaacccctggcgtcgcccatcttattcgccttccggcatatccccgatttcgctagctcgcgtgatccccactaggttcgtcccgatcgccactcccaaactttccccagcttgagcggctatgggtaaccgccccgttgcggcccattacccc

SEQ ID NO: 9156 - DNA, 304 bp, Glycine max
attcggcgtcgacccacgcgaccacccacgcgtccgatcctctcaccaaataaacctcaatttattgcattgcataataccatgtcaatgaagttgtatgcttccctcacccttacggtgtggcttttcatggccacattttcgcgagcccaatacgttattgacacaaatggcgaacccgttgacaatgatgatgagtattacatcaggccagccataaccgacaacggagggcgtttcaccttgatcaagcgaaacgggtcgtgccctctctacgtgggtcttgaaaacaccgatacgccac

SEQ ID NO: 9157 - DNA, 197 bp, Glycine max
ccggtcgaccacgcgtccgacgaagcatcagaaactttagacaatgaatgctaaatttacagcactgcatcattcagtatccatcatcttttgggcctcactaaacataaggtgcggccgctctaaaggatcgaggcttacttacgcttgcatccaacttcataggtcttctaaagtctcccctaatttcaattcat

SEQ ID NO: 9158 - DNA, 310 bp, Glycine max
gacgcactcgaccacacttctgtggatccggattctgccgtgaagttcgactcctctttcgcactttctactgtctcttatcgctttgaacgcattccttccctcgttgtaccgtgttcaggtgaaatgacaccgttttaccgttccatcttcgcggcacagtatacgccacgttcgtaaatatatagggaagcatcaacgtgaatgatctacgtgtcggaaatatcaagggactgtcactggactactgtactacaaatgttatggcaagtgtgtgattcgtgacgcatacgtgcgttcttgtacacat

SEQ ID NO: 9159 - DNA, 456 bp, Glycine max
  modified_base (382)..(382): a, c, g, t, unknown, or other
cggggtcgaccacgcgtccaaaaaagcattcctcacgagtccgaaactgctatcgctccccggcccaaatcaaccattcaatggaataggtttgaagaatagaaacagttcgagctaatcggaaagctcgttcggtgaaaccccccgattcctgtttatcgtcttccaattcaaacaagaaatggatggttccctataaattctacgatgtcaagggtcccaattccgagtcagaccctaatgttgacccgtctagttgggttttgtgcaccgaggttcaattggaaaccattctgttgagaaacattgaaattatatacaaatgaacacttggtgcgcaaagcatgtttgcatttggggctacaagtgaaagagaattggnggtcaaaagccaattctgtacaatggacattgttacggtgccaatgatttggcaacaaacgtgctgcacaactc

SEQ ID NO: 9160 - DNA, 144 bp, Glycine max
cgcgtccgacgcagcgtccgcccacacgtccgaaattttaaaacatgctgaccgtagttgggaattcttccacctccatccttattatagtcatatcctggtaatccttttaatccttcggtgatttaccccgattcctgttta

SEQ ID NO: 9161 - DNA, 422 bp, Glycine max
aattcggcgtcggactcttgctacgagttgaattgtcactcttggttcgcattctgtggatgcttctaccactgtcagaatcagcatgtgagctatagtttatttttacaatcacttaaatctcttagttcttgaggcaatatgcaagatatacttaaaatccccccttgataattttccattcagtcatgtccacttcaaaatttccctgattactcgagatacgtaaatgcttctgccgtgtcccctttgcatatataaacgccagtttcttcacttgggtctctgaaagttgttcacctcatcctctatgatcacgaatggtttgcagttatagcaacaatgtcagatgacatgctcagacatttctcatctaactcatcaagtcgttcatatcagtctctgtctagatagatcgcaca

SEQ ID NO: 9162 - DNA, 327 bp, Glycine max
ttaaaaaattataacgttaatcgtccattttatatttcgtacaattcgtgtggttttactttcataataaacatcactctaaagtaatttaggattaataatctgataaataatataaagttctattattcataatttggagtacaaagcaacattttccccccccctttttccatccatgatactcttatctttgccatataactgcaaagtgtaaacaaaagcttgaaatgaagaagctaagagcaacccttgcaataatttgtaatctataactacattttgagcacctcttatttagcatatactcaatacatctcctgacat

SEQ ID NO: 9163 - DNA, 306 bp, Glycine max
ccgggtccgaccacgcgtccgagtacatctaacagatgaagtaactcctaccccttggcctctcattttggaggaaaggcacagtgctgagaagacaaatcgagaggcccatggccatatgttcactcctagatggtttgatttatcagattaagtgactcctaccccttggggtgacttggaagtttaccaatacgaaggtaaatatacccaacattgtgctgccgtagataattctgagtgcattgaagttcctgacatctgaccagatatcatcccttggaaatatgataatttggatgctga

SEQ ID NO: 9164 - DNA, 211 bp, Glycine max
ttcatggcttttcaaggtccgccaatggacccgggatgctcacacacacatttttcagggccatcgccgcagtcaaatcacgcgccgcctccattttctcctcggggcgaccacgacaaccacctgacgttgcgtcggcgacacgttggcccaacgccccggattcctccctttcccatccttcatttcgaacccgcaaagggacttgcgg

SEQ ID NO: 9165 - DNA, 388 bp, Glycine max
tggttggaaccaacctttgggctgatgagtctatcagctggtggttgtttccccccgccccccccccccccccccccccccccccccccccccccccccccgttggggggactatagctaatatacaacaccaaaaaagggggtacggaaatagttcaatatacggtagccttcctataggaacccttatgaatataaggtatatattagtaaacttattaatcatatttgaagcccttaatcaatagtacagaggaacggagtaatagattagtgatgttttccccagagacggaaagggggcaagggcccaaaatgccttcggcagttgtttcggttattaggggtctatcgggttagtactcgtgtggtaattggtcctcgacgt

SEQ ID NO: 9166 - DNA, 179 bp, Glycine max
gggtcaaccacgcatccgattgcgcttactttgtacactgctgggaaagatgttctcggatactgcctccaatgtggtgctcactaacgatataatcacacttgctggtcataggagtacccacgatgcagtgaagaatacagttacgcatattccgaaactcaatgaggccgctgaac

SEQ ID NO: 9167 - DNA, 450 bp, Glycine max
gggccgacccacgcatccgacaagtttgtataggtctgaggtcaaccgaaaacctgccggccagaccgacttgttgagaattgaaacactacaccatgctgataaagacaaaacagaagcttatatacttgaactggtcatctggcttcatcatctagtgagccaagtaagagttggtaatggaggaataaggtccccagtcaaatcgcccatatgttctcctacccaaaagacagggcagttatttacacagaaagcctgctcttcccccatgttaacggttgaagatcagcaaatgcttcgtgatgtcagcaagaggaaactaacacctggcattagcaagagccaagaatttgactctgccaagaccaggttgagtaaacaccataggctaagcaagagtagtagtcattccccaatcagtgaaagtaaaaatgatatattctctac

SEQ ID NO: 9168 - DNA, 143 bp, Glycine max
atattttatgattatatttgtttatgttattttttttttttcaaccttgggttaaccctccaatttggttacaatttgggaaaaaccctctcctttgaatttgagcataaatttgttcaaaacacgggaagaatgaaatctcg

SEQ ID NO: 9169 - DNA, 250 bp, Glycine max
ccgatagattttgtgattagtctcataaacgtcaatcatattctcaacttgattacattatctgtatattatgatcacatatctcgttatcacaattgatctgacaccggagggggatataggctactgaacctgagagacatgcgggataatgcttgaagatgtcgaagtgtggggcatgaacgaaactaaggacacagtatgtagtggtatcattgggtgaagaagatatcatcgacgaaattgctga

SEQ ID NO: 9170 - DNA, 311 bp, Glycine max
acccactcatccgatcacttacctatgaattgatatcgaggtgtatggtggcagccttatacttttgcaacccgattctaccatgaaatgggttatacgtctcgacggtactaataagttgtgggctcttcccagtgaaaacggtaagttgtcgtgggaggaaggagttttggacttggatagtgcggtattgcacgatataaggcatttactacggcttgaccactctaacaaagaggactctgttatgtacccttgcatattgccttcatagcaaccaaatgtgcagctctcgaaatctgatacgacca

SEQ ID NO: 9171 - DNA, 427 bp, Glycine max
acccacgcatccgaaaaaaaaaaaaaaaaaaaaaaaaaaaaaaaaaaaaataaaaaaaaaaaaaaagggaagaaaaacaaaaaagttaaaaacttaaataagggtggatgcatacgtcggatctctgctatatttgtcatttaagttcaattcatatggctgtcgttttataacagtcgttactgggaaaagcctgtcgttttccaacttcgtcgctttgaatctcttgcccttttcaccatctggcgttttaccgattatgcccttttcgatcgctgttcccatcagttgcacgccttgaatgttaactggtacgcgccttttaccggctcattaggcgcggcgggtgtgctggttactcgcaccttaaccgctgcagttgtgagggtccttccgctcgttcctttcactttcgtcacttcctttc

SEQ ID NO: 9172 - DNA, 395 bp, Glycine max
  modified_base (367)..(367): a, c, g, t, unknown, or other
attataacacccaccaaagaaccatggctacccagttcctcaaatccctccttctcctctccaccttaaccctaaccatctcagcagaatacacaggctttgtgggcacaatagacccaaagtcaataggcataaagcacaagaaaaccctaagccacttcagattctactggcacgaagtcttcagcggagaaaaccccacatcggttagaatcattcccgcactccccaaatacaacacaaccacaacctttggttcggttgggatcttcgacaacgctttaactgtgggacccgaggtttactccaaggttgtcggaaaagccgagggcttgtttgcctccacgtcgcaaacgcagttggatcntttgctgattttcaacttcgcattgaca

SEQ ID NO: 9173 - DNA, 185 bp, Glycine max
gtttgctggggcttctgatacggctggtccgatggatatggcggtctagtttgacatcgtcgacgctgatacgttaggattggatcagttcatgactgtcgggtagtagtgtattaacgtcaaggataacatcggtggtgtacggacaaagacggcaagttctgtatcacctatgcaggatggca

SEQ ID NO: 9174 - DNA, 347 bp, Glycine max
atcaccagctagagtctctcatcgaacgacaccttcgatttcaatcgtgcaaggatttccccctatctcagcgctccttcctctcccaagcgttttggccaatttgattagctaagcgcccccgcaagcccttctaaagattttgatcttgcggctcacgatgatgatgccttcgcctttttcgttactggggaatcgaagagccctcgatccgcggcagagctttacgacggcggcaaaatcacgccgctgagcgaggatgattcctcggactctggtagaagctgacttcattctgacaaacgatcttccagttcgcaaggcatttaagccattcgcgaagcctt

SEQ ID NO: 9175 - DNA, 363 bp, Glycine max
  modified_base (277)..(277): a, c, g, t, unknown, or other
gacccacgcgaccgaagagaattaggcaataagataattaaagatgtctgacgattgcaaaggtaagagctcatggcctgagctagttggagtgcaagggacagttgcggaggctacaattgagagagagaaccctttggtggatgctatcattgtgcccgaaggaaacatggtcatcactgatttccgctgtgatagggtttgggtttggatcgataaagatggaattgtcaaggaagttccccacattggatagaaactgctccccactagctanggatcaaataattgtttccagttttatgttattttattcagaataaagtttcagaaatgtcaaaagattaatgtaataaaccaact

SEQ ID NO: 9176 - DNA, 422 bp, Glycine max
acgcatccgacagatttcaccctttctcagtttctctctctagaaaaaccaaaacctggctcctttttttagctctttccttatttagccttcacacactccaaactgtgaaatccatttttagcaaagtaaaaaaaagtgagccagtgtgagagagagtggtcatcagtcatcaccgttgattgattaagatgcagcaatcaaacggctctgattcgacgactacgatggagcagagcgcgccgccgcctccgaggcaatcaccggcggtggcgaggccgcagcagtgggtgccgatgcagtaccctgcggcggcggcgatggtaatgccgcaccacatgttgccgcctcagcattatgcgccgccgccgtacgtgccttaccaccaccagtacgcggcgcagccccagcaccagcaacag

SEQ ID NO: 9177 - DNA, 340 bp, Glycine max
cgggtcgggtcacgcgtccgagcttaatatttgctttttctttgattattccggtcttatgtcactcctatagccgagttagttgtatgcgtatgctcacctagaagctactagatagcatgcatagtctgctatgaacagtagctttcacattatttcgtcatacaagttgtcgtgaattaacttcacagatccgcagtacacagacgagcataggcctgagatcattgacgatatttgatgtgcatagattctctatccttcattaagttttcaaggcgtagtgtacaggatcacttcatcagtaatctgacatctacagtcgtccactccaattctg

SEQ ID NO: 9178 - DNA, 421 bp, Glycine max
  modified_base (382)..(382): a, c, g, t, unknown, or other
ctttcggcgcaatgggcgcgtgcgcatcttctccctccgcgaaaacgacagcagcaagtgtgaacaagggtggtggtggcggcggtgcacctgcgtcggaatctttccgccgaccgtcgtcgatcatggtgatggacatgctcggtcgaatcaacgagtacaaacaaccaatccccgccagaaacgtgctctccgagaatcctcatttctacctctgcaactcggagacagtgcacatcggcacgtgcatgccacgtgtccccgatgaagaagagcttctacctggtcgaatctacttcctcgtccctctctcgcattccgattcccctctgtcactccctctcctctgcgatctcgccgttaaagctggttccgctcttcncaaccctaataataacagttacaatggtcaccgtaaaaa

SEQ ID NO: 9179 - DNA, 391 bp, Glycine max
ctcagcccacacctccgcccacgcctccgggcactttcaaaattcccaattccatcggcgtcctcctccggggaactgagatcttcaaaaggagcagattgttcccaatgtatgttgtttttggcaccaccgtggggctgttcttgccgctggcttacgtgcttggtgggtttgcaagaagggatgagcatgcagtgcgttctgccaccccgcacttgttcttgctatcgtttcagatactcactgagaacattattggtggtttgtctctgttttcgccacccgtgaaggcgttggtgccaatcatctacacaattcggaggatctttgtggatattgattggattcatgatgtctggctcaacaagactttgcctgtcaatgccaaatt

SEQ ID NO: 9180 - DNA, 251 bp, Glycine max
ccggccacacgtccgggcactttcagaattcgcatttccatttgcgtcctcgtcggggaacgttatcttcaaatggaaccaagtgttccgaatgtatgttgtttttggcaccacccttgggcatttctttccggcggcttacattcttgggtcgtttgcaaaatcggatcaacatgcacttcctgctgccatccctcacttgttcttgctatcgtttcatctactcaccgacaggattattggtggtttgt

SEQ ID NO: 9181 - DNA, 351 bp, Glycine max
gacgtcagcccaagcgtccgctcatcatttgctgaaccttgttgtgatctgaaattgcagaagaacaccgtgtaacgattctggtggccgttgcaccaagccaaggttggcatccaagttttataacactaactactgcatacaagagtatgagaatatacataacaacagttactgatattgttgtgattgtgtgtgattttggtgtcgtccctttttcgtatgtttaaggttgtaccgagtttatgtgtggattcaattcgtcgatcagacaccttagtttgatatcttgattggttccgtggacagttttttcttccttggtgtggtttttgggttgtgctgtttttg

SEQ ID NO: 9182 - DNA, 398 bp, Glycine max
caacccctaaatttcaatctagggtttctttgcacgctaattccatcttcaaattctgccttcattcgattcaggggggaattaaattgtttctattttttttcgaatttaccacaaattagaaatcgataaagaaaaatggtgagggtgttgagaagctgcattcaatcgattttgaagctggtgaactcggtgattgggatggcggggctagccatgattctgtactccgcatggatgattaaggtttggcagaggaagatgggcgaacttccctttggtcacgattctgattacccacctccgtggttcatttacatgtttcttggccttggagttgctttctgtgtaatcacttgtttaggtcatgttgctgctgaaactgctaatggctgttg

SEQ ID NO: 9183 - DNA, 393 bp, Glycine max
  modified_base (56)..(56): a, c, g, t, unknown, or other
tcaagttttgacgcatccatctgttgtggtgaaaatggaaggcaaagatccattanacaagccgttccaagggttaaccgtccggccaaaaaagcgcgaagctaacggacaaagaaatcaacaaggcctaccgatggaaggctctcgaattgcaccctgacaagaagcccgacgacgccaacgccgccgctaacttccaacaactccgcacctcgtacgacatcctcagggacgacaaggcccgcaagttgttcgacgacctcttgcgcgtcaagcgcgaccgcgagctccgcaattcgcagcgcgacggaaagcgccgcaagatggtctccgatctcgagcgccgggagcgcgacgccaacgcccccgatcccgccgcgaaggaacgcgaag

SEQ ID NO: 9184 - DNA, 283 bp, Glycine max
ttgaaccaaaaaaggaacctaaaaaaaaaaaaaaaaccaaaggaaaaaaaccacaaattggaactaaaccctcccagaggaaaatgaagaaaaatctgatccccagcttgcacaggtgaaagtaagacttgagaaacttgaagaggctgtgaaggagattgtggttgaaacacagaaacattcacgcagcaaccttggagaaaatcaggcaactgatgatgagaaaaaacgcctaaattcttctgcaccaagggacccaagtaccactgattctgcatcaaat

SEQ ID NO: 9185 - DNA, 389 bp, Glycine max
  modified_base (253)..(253): a, c, g, t, unknown, or other
  modified_base (301)..(301): a, c, g, t, unknown, or other
  modified_base (318)..(318): a, c, g, t, unknown, or other
  modified_base (376)..(376): a, c, g, t, unknown, or other
acgcgtcagattttatgcatcagtgatcacaatagaaatgatgataaagctcacaattcatctgttgctcccataataattatacgaagcctaacatccgttaaaggtttaaaaagttattaacctccggaaacaatccttaactaaccttggcaaaatcaaggggtaaaataataaggcaataatgaaaacaattaagctaagggcttttagcatgtgagacccgaagggacagcgcatgaagtagtagcangtaaatcaagttctgaatgggaaaagaaacttgacttattttggcaangaaggctgaatggtcangatcccttggaagtaatgactgctaaggagaagatagatgctgcagcaatggaagtantggattcatatgt

SEQ ID NO: 9186 - DNA, 81 bp, Glycine max
cacgcgtcagaataaaaccaataatggttcctaaaggtctctttccattctctcggatgctgcactgagttgatatactct

SEQ ID NO: 9187 - DNA, 159 bp, Glycine max
acccacacgtcagattttgacaaaatagatgggaagcctagtgcagatggggtagatgaaagcaagtattggcgtggcggctatggtggcggctatggtggtggttatggaggtgggcgtggaggctatggaggtgggcgtagaggctatggaggggga

SEQ ID NO: 9188 - DNA, 418 bp, Glycine max
gggtcgaggacgcgtcaggttggatttggcgttttgatttgtgcagccacatggattccaatgctggggtttttgtcctatttgtttgagaattggtgtgacttgaatccttcgatgttaagttgttgaatttggagagcttgtgctgtgtggaagttggagttagaaattagttgcatttgagggaaaagggtcagtttttttgttgatcctattcttccatatgagtggacaattttgtgttcgttttctgtggcagtgctggacgaattgaagtttgaattgtcttgttatgaaaatcctgtgggacaagggcaaatcttgttgctagaaaaggccatgtggtgaatttgttttgcggtcattgttttttttttataggtcgtaatgaaggctccatccaacggttacttgccta

SEQ ID NO: 9189 - DNA, 396 bp, Glycine max
gcgtcagatccaattcattcttcttcttgttctttgttaggcaatacaacatttattacgcatactcaaagtagcttcgaagttcgtatttttattggcatatcatggagaataataatcagtcgttttggcaattcagtgaccagctgaggttacaggcatctaatttggcgaacctttctctaaacgattcgatttggagcaacagttacatctccaagaggcgtgatgaaaggattaattttgacatcaaagttgggggtgagatcaactctttcaagtcaaaggagccagcttgtgattacaatgataacatgaatggatctcttcgtgccgtgccttacaacaacaataacattttgggtgttggtggagttggtctcaatggaggcttca

SEQ ID NO: 9190 - DNA, 145 bp, Glycine max
gacccaagcgtcagactaagtctcagcagtggggacagtttgtaaattgcgacttccaatggcgagttgcgaatcaagcgatgatggaaaaagtgcggcaaatgatgtgtgtgcttgctccggtgtctgcgctgtgacgtacgtg

SEQ ID NO: 9191 - DNA, 421 bp, Glycine max
agcacgcgtcaggctaacagcttctctgtgtatgaaaccttgagatcttattggcagtcaaatagatcggatgattcacctgctgtcgttagtctggcttgcggcagtctttcaggcattgcatcatcaacagagaaagagagtttggtgcaggaactgcaccaagtatctaaccagactgacccatagaaccagagaccaggttggagttgttattgtatctgtggcatatgacaatttagtaaggaaaatgacaaaaaacatttttctcgtctttctgtaactttattttttatctaaagatcttgctcaagtaatcatcttcccaagttttgttctatgacatgtctccccaagctatgcaggggattccatcatgtggtggcattacttggatgaaactatatgattccctcagtta

SEQ ID NO: 9192 - DNA, 294 bp, Glycine max
acgcgtcagtgttattcttactagagttgattcttttccagtagctttactggctgttccttttggcgttaagaatgaaaatctgagttctaacgccactaaccctaagctgacgcgacctcttgagaactgttagagtcccaaataactgggtgaagagtgtccttttgcatttgtgaactaatgtgtaataatttattcacttaaattaaagcgcattactatgtgcaatgagtgtgtttaaatattaaaaaaaaagcaacaagaggacacccgggaggctgctctacaagg

SEQ ID NO: 9193 - DNA, 249 bp, Glycine max
gacccaaacgtcagcccagccgtcaggattagggagaatccactagatcgtatcacggttcattgtcagcaagagttaagacagcttgctcacaatcattacgctgccataaataccctgtctgagcagatatgataattggacaattcatctagcaatacgttaaaatgatcacatttatctcacgacctccagccatcatcttagcaggcaacatccatcttcacgtactgagcatcaggctcagtc

SEQ ID NO: 9194 - DNA, 391 bp, Glycine max
cccacgcgtccgcccacgcgtccggtgactgggggtgactctgggattggacgagcggtgtgtaacttgtttgccttagaaggtgctaccgtgggcttcacatatgtgaaggggcatgaggacaaggacgcgagggacacgttggaaatgatcaagagggctaagacttcggatgctaaagatccaatggcggtaccagctgatttgggttacgacgagaattgcaagagagtggttgatgaggtcgtgaatgcttatggttgtattgacattctggtcaacaatgcagctgagcaatacgagtgtggaacagtggaggacattgatgagcctaggcttgagagggtctttcgtacaaatatcttctcctatttcttcatgaccaggcatg

SEQ ID NO: 9195 - DNA, 73 bp, Glycine max
cccaaaagattcaagcttaattaacccttcaagcaaagttaaaacccttcaaaaatgtcaccaaaattcaatt

SEQ ID NO: 9196 - DNA, 164 bp, Glycine max
acccacacgtcaggaaatcgatatccaacccgtcctagcagaagcctctgtcagaatagtattctctcgatgccagatgaactacatcaatatcatatcaatcacttgccttacagactgacacgtgcattaacaatcagctggtcctggttacatacagcatg

SEQ ID NO: 9197 - DNA, 414 bp, Glycine max
gcgtcagcccacacgtccgaccgaatgtaacgtgttggaattggcgtattggtgtgcagtatctatttagagagagtgggaatcattcgtttcgtttcgttcagaggtttgtttcactgtttcagaatgaacggcttaagaagtgaaagagcccctctcttggaggctgagcgtgctgtaagtctatttctcttctcttcttggcccatatgcacagtgccattcattggtgctcaccttcagcttctcctgcttcagcaatttggccacactcaaacaatttttgtcttttgtcaattaattgtgtgatgaattggaaaaaaaaaaacttttttccactgcctctgggataataataggaatatcctattgcactgtttgaaaccttttctatttatgaaatcttttgatgtg

SEQ ID NO: 9198 - DNA, 390 bp, Glycine max
gcgtcaggaacagtttttggtttgggttgcgtggcgtcgcgttgcggcgagggactcaccttccttccttccttcttcctccttctcgttattctctcgtccattctatggagcttcagaggcgtccagatcagtgcctcccggagaggaaagggcagaagaagaagctcgaggaggaattcgatgacgacccacagatctcccctcctcccaccggcgacgctcgcgacgccctcctctccgacgttaaggaacaggtttccctcctcgattccactttctcctggaacgaacccgatcgtgccgccgccaagcgcgccacgcacgccctcgccgatctcgccaaaaacgaggaagtcgttaacgtgattgttgaaggaggcgccattc

SEQ ID NO: 9199 - DNA, 447 bp, Glycine max
gacccacacgtcagaacatttctaaagctccttctcctctcaatatctcatggcaaacgctcttgaagtctctgctctcaatcgcatcaagctgcatcttttaggagaactctctcccctcacccaatttcaggaaccaaacacaacctccctctgttcccaatcttcaacttccgattcattcaccacagttgaccaaatcttctccgaattcctcgatttcccaactactactacttcttccacagaacaaaaccagttttctgcattcgagtttgagccaaaacccgaaataattgagccacaattggaattcagttttccaaccacacgctgcaaatcgagtcgaaggccgtcgctgcaaatctctctcccgaagaagaccgagtggatccaatttggagagcccgaggttaccgaaacggtgtcgcagagtaacccgaacgc

SEQ ID NO: 9200 - DNA, 334 bp, Glycine max
cgtcagacataaaatcaggcctcaaaacaaaaaaaaaaaaaaaaaaaaacaaaagaaaaaaatgcaaaataaaaaaggaggttcacctctgtgatacgatctacagttgacctagtcttttagcagatgctccttctattgtattttctaaatgttgttctcatacggtgtcttatttggaaatggactggagtagcctaatctagttcgtcgagaataatccacacatttcaaagcatactttcttccggtgctttcattaagtcttctcagtccgatcaatttaatcggattttgggataatcctgttttccatgtatgaggtccattccta

SEQ ID NO: 9201 - DNA, 409 bp, Glycine max
gaggcccgcgtcagcccacacgtccgatctgttctggcgaggtttcatattcttagatctcgggatgaatgttcatgttctacttcttcagatcggaaacagttacatggagatgaatctgctgctgtctaatgaatggatggcataacagttgcaacaaatgtatctgagggtaaaagtttggatgtccatgcaaatcctgttgtggtgcatctcaattcctacactgccgtggacatgtcaatccgaaaggagtttcatctggattctgacgacaatcaagaaactcagcctagcggaacctgtgagtttcagcctcctacttactactccgatggcatcgcgtcagactgggaacatgtggagataagcttgtataactattttgaaaccttttaacactttggtt

SEQ ID NO: 9202 - DNA, 229 bp, Glycine max
gcggccggcggtaataatgacattccataactcccaagctatggctagatagctatataataaataaagatgaccctgtagcttcctaatttcccctaacttaaaaatttaaaaatttcccaaatttaatttggtaccaacctcctgaattctctccctccggaacttcccaaccaaatgttaatagaatatcatttacaaatttaaaattaaaattaattgtaatgtt

SEQ ID NO: 9203 - DNA, 446 bp, Glycine max
cggctcgacccaagcgtcaagtgtgattagtatattgtcggtactatggtatcttaattcatgttgtaacctatgtattaggacaccatagtcctacctaaattggactctctgtaatcattccggacaacttgtactgctatatatataatacaattctacttttgctgattaaaaaaaaagtgttaagacttaaatatctttttagctcttgtaatttagtgtcatttttgctttagtcttgcaaaattattctttttatttttagtccttgcaaattatgtttgttatttttcttccttatgatgctttagataacattttttttactgatctaagcgctatctaaggtgttttaaggactaaagataaaacaaaaaaatttgcaaggacaaaaaaaagcaaaagagcactaaattgtaaggaccaaaaatatatttaaacat

SEQ ID NO: 9204 - DNA, 63 bp, Glycine max
acccacacgtcagaaaaaaaaacaagaaaaaaaaaaaaaataaaaatataaaaaaacgaaaaa

SEQ ID NO: 9205 - DNA, 319 bp, Glycine max
cgtcaattcataacctctcatagttccaatactggtaacaataatactcttgggcatctaaactatctccattcttttttccccctttctttgcagtggatttgcgaggttttaaagaaattaaatgcgtttttatgtgctaaagagctaggtaattatagaattcatctcacacatacttctttttactaccttttatcttttagattttatttttgaattatccttgtttaatggagtaatttaattcgttgaggggttgtggaatttgtgtagaagattttcctataagaatttttaattcgctaagaaaatcctc

SEQ ID NO: 9206 - DNA, 382 bp, Glycine max
gcgtcagtcgggcctctatattttttccctatacaaaaaaaaaagctctgtgctttgtctaatcaattgagcttctagaataggaaagaataatatgtaggaaatcttacagtactcacaaaatttgttatttttgctgccctgagaatttggagagatatcttgttcggaatttattactaaatcagtaaagtctgaataccttcgattatggatctagtttcttgggtgtgtagagactatatcctctaattctaattcttgatcttcaaatctactcactaatttcagtaattttcaatgttcactacatgctgttaatgatttgaaaaagatgatttcattacattgttttatttagtgttttggattggctatgcat

SEQ ID NO: 9207 - DNA, 368 bp, Glycine max
gaccgacccgtccgcttccttcaatggcggtttcttctctctctgttactcctctttcgctctcaaattcttcgccctctctatcttccaagccaaagtttccatctttgtgttttctctctggcaacaacaccacattgagggtaacatgcccaaaacctctgcactcatccactgttgttcatgttgctaccgaagcgttggattcatcccctgatcccttggacccacctccagaaacccttgatgatgactctgacgccaccacctttgaggttggtgacttggggactcctagcacttcagcaattagcattggtggcgatgcagatacaatggcaccaaagcagaagattagaatcaagctt

SEQ ID NO: 9208 - DNA, 242 bp, Glycine max
tctagaattcaacggtcgacgcgacgcgtcagctctgaagttgcacccgatgatgcataccagaattttgacaaaacagatgggaagcgtagtgcaaatggggtagatgaaagcaaatattggcgtggtggctatggcgactatggtggttggcgttgtggtggtttgcgtggttgctattgaaggttgccttgtggctatggtggtgagcgtagtggcccttaataaggtggcggctgggg

SEQ ID NO: 9209 - DNA, 257 bp, Glycine max
aattctaaggccgacccacgcgtcaaataaaatattgtgttacaaataagaaacgaaacccacatcacaatccaattccatgaacccttgtatgggtgcagaaaatatgagccaagtggaagaagagcaaggatatgtcttcaaagaagaaattcaacccacggtgttcaaaacttccctgttcttcgcgggcgaaggcttcaccgtctaagaatgcaaagggtaacttgtgttcaaaattgactcttaagggcccg

SEQ ID NO: 9210 - DNA, 269 bp, Glycine max
acccaagcgtcagatttaagtgtcactgcaaattttccatcaatttcttgagtgagccccatcagctgatttgtagtattctagctatacttgcaaaatcagtgtcactcagtaatggtagcctcttgatccatgatgctcacttcaactatttggtgcctttgcaaattgcaaattttcaactgaaatcctctcctctatgaaatctttctttttgcttatcacctttctgaaatgagaattgcaacataacttgtaattgtaagttg

SEQ ID NO: 9211 - DNA, 359 bp, Glycine max
gacccacgcgtcagccaaattttcagtttcttcctcgcttttctgcaaaatcatctaaatccgtttctgatcctgaatcatcagtttttcccttgaaagatgggaagtggcaaggacaaacacaatgaagaagagaaaggagttttctcacatctggctcatggagtatctcaagctgctcatgggtaccctccaagggcatatcctccacctcctgtggcataccctccttaccaatggtatccacctgctcaagggtaacctccacaaagtggctatcctccggctgggtatccccctgctggcgaacctcctgctgctggtgggtaaccccctgctgggtaacctccacatgggta

SEQ ID NO: 9212 - DNA, 161 bp, Glycine max
cggacgcgtgggaaaaaaaaaaaaaaaaaaaaagaaaaaaagaaaaaaaaaaaaaaaaaaaaaaaaaaaaaggaaaaaaaaaaaaaggaaaaggaaaaaagaaaaaaaaaaaaaaaagaaaagaagaaaaaaaaaaaaaaaaaaaggggggcgccccagaa

SEQ ID NO: 9213 - DNA, 168 bp, Glycine max
gcgtcagggttgaagagcatatagagtttttgcgttgaggtggatcggaaggttaattagctagacggagaaggtaggtaaacggtgaagacggaaagtgggggtagtttgtgatttgcgggtgagtgcgtggaaatacggttaggtgggagaagctcgtgactcgtg

SEQ ID NO: 9214 - DNA, 195 bp, Glycine max
gactcacgcgtcagtacagttgtccagattctcatatcgttatatgcgtatttctttcaagactattactgcaaaagagttacatactgtcatgtctttacgagctttcctgttatccgtataattatcattgtcttacattttcatgagtactttgggtgcttccaagtagttgtaatgggtaagcattaattg

SEQ ID NO: 9215 - DNA, 396 bp, Glycine max
cacgcgtccacactcctaaaaatggtagcagttaatctattgttgctgccaaaaaaatgagttataaattcaaaaatactgatacttccaagaaaagtgaatcaaaggatgatggcagtatcaaacaaaaaccttctgccaagtttaagcatgaaactccaaaaagtggaaaatccaagcaagaaaccccaaaggctgccatttccaaaggaaaacctgtcaaaagtggtggaaagactgatgttaatggtaccagcaaagcaagatctggtttaattgaagagaaaagattccgagaattagaactctgatgtttcagctggagagagagagaatgcaagggcaagagtgcaaattcatcaaaggcaaaaggaagtgacctgaagagtggaaaga

SEQ ID NO: 9216 - DNA, 102 bp, Glycine max
aattcaaaggccgaccgacccgtcaacccacgaatccgacccgccttcttccgagaaacaaatcctttgagcaacaagcgcttttcaagcgcaaggggaatt

SEQ ID NO: 9217 - DNA, 355 bp, Glycine max
aagctgaagaattggaagtgaaacgtcatcggtgtcatgaagagaaaccaagattttctaaggttggtgtccttgaggagacagaagagaaaccgattctttctggaagttgtgtggctgatgactcaatagacgagttgaaggaaatcacaactggctttgaacagtgtcaaacaagtgaagaatgtatggcaacaactttgaaaaatgttaagtctgaagtagcaggagaaagtgaagaaatggagagagaattggacgaagttgtgaaaaactctggcataggttgagaggttaatcactttccgaaggaacctatggatataaccagtaatgcaagaggtaactattggta

SEQ ID NO: 9218 - DNA, 409 bp, Glycine max
tctagctccattccagtttctccagaggagatgtacagatggtcaatagagatccaagtttgagtcctttttaagacttggtgtttgatgcattgttgtatcaggagaagggttttgttgtaattaagcattgagggaattgttggagtcaggcagagagagaggggggaggtttgttgtaagacacctagtattagtatcatgtagtggagaaaaagggttgttgatcctaatagctagacaaggcatgttgtagtagtcatggggtggggaagtccttttgttgtagcatgtaatttggtttagacttgtagtatgtcatcaattagatggataaagagagaatattgttatctacccgaggatgtaacaatgtttgtttctctgaataaaaatttcacatctgtct

SEQ ID NO: 9219 - DNA, 112 bp, Glycine max
gagagttgaaaacatatagggaaatggtagcccattaacgatcaataagatcactttccttaatgatcgccaaacgatatttgtgctacccactctataaatcaatgttgat

SEQ ID NO: 9220 - DNA, 392 bp, Glycine max
attcgcgcgtcgatccatgcgaccacctacgcgtccgcccacgcgtccgcccacgcgtccggaatattctcagccaagggtaatcccttatcgtcttgcagctcatcttacatcagcatttgctatttactgtggcctcttttggactgcactttctgttgttatgcctgaaccaccagctgaatcactaacatgggttcgtggggcagctaaagtgaggagacttgcattgcctagcatcatacttgttggtcttactgcagtctctggtgcattcgttgctggaaatgatgctgggcatgcttttaatactttcccaaagatgggtgatacatggataccaggagacatttttgaaatgaagcctctgattcgaaatttctttgagaata

SEQ ID NO: 9221 - DNA, 396 bp, Glycine max
acgcgtccgaaaaaaaagagagctcaaattcatgagtctgaacgagaaagacaggctcacataaacattgctgatggaaagaagagttcagttatcttagcatcagaagccgcaatgatggatcaagttaacagagctcaaggtgatgctgaagccatccttgctaaagcaaaagcaacagctgagggactaactgttgtgtcaaaatcgctaaaagaaagtggaggaccagaggcagcaagtttaaggattgcatagcattatattcaagctttcagtaacatagccaagcacggcacaacaatgttgcttcctagctctgcatccaatcctgctaacatgatggcccaagctcttactatgtataaaatcctgcttggtaatcctatcaatgat

SEQ ID NO: 9222 - DNA, 378 bp, Glycine max
ccggtcgaccacgcgtccaaggacgcgtgggaaaaaaaaaaaaaaataataaacataaaaaaaaaaaaataaaaaataaatcagcgatataaaaatacaaacatacaaaaaaaatttcaaaatccaataaacatttacaaaaaacttaaaaaaaaggggggcccccccaaaggttcaaactttacttaccctttaatccaaatttcatacccttcaaaattttcccctaaattcatttcactgcccttccttttaaaacttcttcatggaaaaaccttggttttacccaatttaaaccccttccaaaaaatccccctttctccaattggcttaataccaaaaaggccccacacattttcccttcccaacattttccca

SEQ ID NO: 9223 - DNA, 95 bp, Glycine max
gctagaagaatcaaacgtaacttaccttgctatcaatgttatcgcccttctaggttgtcacctaagttcacttaattggccttcctttcagttct

SEQ ID NO: 9224 - DNA, 179 bp, Glycine max
ccacgcgtcagcaccaatacaaaataaccactcactgaatattcggtcgaagatgtccgccgccgaagaagctaaagttcccgccgtcgaaaagccggtggaggacgtgaatgcgcccaagcttggcaaggagaaaaaacctaaaggccccaaagaaaaaaaacccaaacaaggccaaa

SEQ ID NO: 9225 - DNA, 80 bp, Glycine max
cgcgtccgaataaattagtgttttctcttgtcacataaaagtcatctaagaagaattacaagattatcaacacaataaca

SEQ ID NO: 9226 - DNA, 397 bp, Glycine max
acgcgtccgaacagatatagtgcaaacttccttttgtcatatgttctgaacaacttttactagcttaccaacatcagggagaccatccttccttataacaaatgttcgtttcctctcatgatctagcaccgcaattatgtttggagagctaagatacactcgatccacctgccaggaaggaaggatgaattttgaaaaactctttattcatacccttcattattacaaaacctaaagactttagtgaatttgatatgattgacaaaactgcataggctagtattatggtgctatagttaccacaacttgaagcaaaagcttataattgcatcacggaactatcaatatctacatgttgtaaacattaatataacctggagagatttacctcagattc

SEQ ID NO: 9227 - DNA, 392 bp, Glycine max
attcgcgcggtccgaccacgcgaccaattaaatatcaacaatttcgcccaagaaaccctctctcttgtctcgtcgcttcaaactcctctgcggtttccccttcatgttcttcttcacagaaatggaggtaacagtggccaaagcgttgaaaccgagtttaaggagagagttcatcgttcagcaaatgctctgcgaggatattttcaacctgaacgccaacaccgtcgccgccggcgaagatttctccgtcgacgacctatttgacttctctaacggctctcttcacaacgaacaacaacaagaatacgatgaatggaaacaaagtttaacggcttcagaggaccgcggagaatacgattgcaaatccaattccaccggcgtttcccatgatt

SEQ ID NO: 9228 - DNA, 277 bp, Glycine max
  modified_base (252)..(252): a, c, g, t, unknown, or other
gacccacgcatccaaccacgcgtccgcacttttcttgcacgttcgatcaacttgacatatcatcttcctgcttggtttgttaaactagaggagaagtttggtcatacctggctccttcactctgccgtgagcttggaattgtggtagtcgcaaccttgccattgtctgtctaagtctcaatagccaaccacaagcttggtcttcacttcgaccatcgtgcgggtgaggtaatcaatgaagggcaagtcatanggtatttggatcaatttggcactgg

SEQ ID NO: 9229 - DNA, 410 bp, Glycine max
cgacccaagcgtacgtttgaatctgtattttcttaaaggaaactgtgtgatcgatgttgtaaatcttacaatataaagaaaatcaagagattcagttcttcgaagtgacaacgttgttggaaaacatggtgtgcttttgttttcttgtggatcagacaaagaaagtgaagcggagcaagccggtggcagggtcgtgctcgcggtgcggcggcggcgccagcgtggcagacatgattactcaaactagattttgctttgttcctttctattggaaatcttggaaggctattatgtgcactttctgtggagccatgctcaagtcttacagatgacaaattacttgcaaacaaggttttaaattgcattcgcgattaattaggtttctttgtatttcatgatatcgtaagaaa

SEQ ID NO: 9230 - DNA, 404 bp, Glycine max
acgcgtcaacgatttgcctaaggagtccttaagaaaattttgcctgaaaaaaaaggttaaggccttaaaaggcatttcattcacggctgaaggaaatggcgttgttttttatgttagcggctaacgatttagacatatatcttaaccgtcaggaaaaattcctcgaatgtaagtttagagatactgaaaacattgccacagttgcaacatatggagcatcaccaaagaggtggcacatttggtgatggtggtggtcgtggttaccggtttggtggaagaggtggaggacgcacgaatggtaagttctccaatggtggcggaagaggtggacttggcggcaactggggttgaaagagatgggtaagctgagaaaggacttagggagttgagttttcactctgctc

SEQ ID NO: 9231 - DNA, 426 bp, Glycine max
  modified_base (397)..(397): a, c, g, t, unknown, or other
acccacgcatcagcggacgcgtgggcggacgcgtgggcggacgcgtgggcaaggagctggggttttatttgcagcttatagattaatagagaagatagttcttctactctactgtggagatattcctgaaagatactcagccatagcatcaaaatcccgtgagtgctttgggttctttcgacgtgggtcaaggttgcttggttggtggtcaatagatgaaggaagtagagaggaagaagctagacttttttgtgctgggagtcctgggtataatactttcacccctgatacggtgaagaaaatgcctagggcagatctggttgaggagatttggagactacaagctgcattgggcgagcagacacaagttacaaaatttagccaggatgagtatganagacttcaaaatgagaagatcttatgcag

SEQ ID NO: 9232 - DNA, 392 bp, Glycine max
cgacccacacgtacgcccacgcgtccgggaaaagcacgcagcagccaatgaatctgcacacgccgaatccaacggcgtctctcacggcgccgaccacggttggcagaaggtgacctacgctaagaagcagaagaagaagaccgttaacgccgccaacagcgccgattcccgcgcgaattccaacaagctcgttccgaacggcacgctgtccggcaacgatggcgttttccggtcgctcgagctgcagtcggaggaccggcgccggaaaattgtggaggcgaagaagctggccgatgccgcgtacgacgacgaagacgcgccgctcagatcgaagcagcggcaccacgacgacgacgaatacgactacgatgacgagaatgtggaccgttctg

SEQ ID NO: 9233 - DNA, 318 bp, Glycine max
gttatttcttgaacgaggtaaatttatttttctttaaatgtaaagcctagaaaataagacttcatttttttcgcacgcgtccgcttctctcgcgttcgcatcaaacacagggaaacactcccaatcgctctcgctctctcgctctccgagctagcgagaccgagcgatttgaccctaagctcgcgatgctccgccgcacaaactcctcccgcctcaccggcacctcccgcagccacgtcgcctccgaagtgccggcgacacccgccgcggagaccgccttcgcggaggcttggaagaaagtgagccccagcatcgacc

SEQ ID NO: 9234 - DNA, 288 bp, Glycine max
cttcgcccaagccttcggccaagccttcgcagggtgatttccaggtgcatccctggtcaaatttgcccaccctctcctgcttccagcgggtttcttgcacaaacgggtttagtccctgttgaacatcaaatgcgtgagatgggcttagagaacctaaagagcaaatgactttttcttataagatgcgtgagatgggcttagagaacctaaagaacacatgactttttcttataagatgcgtgagattgggagcttttctgaagatactcttgaaatgtttgagaaata

SEQ ID NO: 9235 - DNA, 335 bp, Glycine max
cgacccaagcgtacggggtaatgttctgcctgtcactggttcttgtctcagtcaccattgcacattcttcgatgcatattctcttacgcactctctctcgatctcacgctttctccttctgtctccattgatcgatttcaaccacgctccacttcatcagctgtgctccgccgttctcctcggtgttactccgcatcctttggtcctacactcttagcttccgaaaacgaatccatcatgcagtttgtgatttttggggctgtttatagctctgttgcaaaacatgaacaagtatgctctaccacagtaggtgagcattcagacgtctgttgcac

SEQ ID NO: 9236 - DNA, 417 bp, Glycine max
accacgcgtcaacagattcagggatgaatataccttcggtatgttctcccaactcctcttatcacctatttttttttttattactaccattattaagggtttactttcttatctgagacttgattgatttggtgtgtgcgcagaacaaaggcttggagaatcgcgggatattgtggccaaataccccgatcgagtccccgtaatcatcttctccttaattaatcaaatatttaatctcggtttatgtagaagcacacggtgacgatgaacatgctttccctaaccctaattttgtcattatatgatcgattcttcttgtttttcttctgcaggtgattgtggaaagatatgcgaaatgcgatctgcctgagttggagaagaaaaagtaagatcatccttcatgattgaagtcatgat

SEQ ID NO: 9237 - DNA, 388 bp, Glycine max
acgcgtcaactacgactcctgttggttgttctctcaagtctcaactcccatcccccctctttgacttttctatcagaagagcttgttggagttgagaactgataagaaaacatggcagcacaaaggcctgtggtagtaccatcacttcgaattttctgtttagctggaagttgctatgggaaggttcacttctcttccttgacaagaacccttgatgtcactgcttcccccaagcaggaacaagttctggaggctggattagacaaaatcacagtgacatgggcattgaacaagaccttacccgcggggacagactctgcctacaaaaccataaagctgaagctatgctacgcgcccattatccaaaaggaccgcacgtggagaatga

SEQ ID NO: 9238 - DNA, 127 bp, Glycine max
ccacgcgtccggagatgtgttatataaatagacttgtctcctaatatattatctgtagatctattacttatttcgggacatttctaactgtatcgcacatctacggtcgcgtgcacgtgtgcattgt

SEQ ID NO: 9239 - DNA, 392 bp, Glycine max
ccgggccgaccacgcgtcaagaaccgtacaagtgatgatgtactgcaaccgagtccattccatttccatgtccatgtcctctctgactcgaagagagggttagaacccccatcttcttcccctcaacgatgccagtgccttccaaacccataaacaccttcaccatcacaatcatgctcaccttcaccttcttcctcctcttcttctccggtttcctccacttcccctccgcttcctcctcctctttccctcccatcacccgccccacaaccacgccgcccacggcggaacccttctccgatctggtcgcggccttcaggaaatgggattcccaagtgggctgcgctcgcttcaaacaaaaaccaaatggggtgccccttaaacactcaaag

SEQ ID NO: 9240 - DNA, 354 bp, Glycine max
  modified_base (304)..(304): a, c, g, t, unknown, or other
cacgcgtcaagttaagattagttattcattgcaaccattggatttcaagaaaatctttgagtaacttgatccctcctcatatatatataggcaatatcatgcttttgccttttgtttccttttatattaattgaatttagttatgtctaaattatgctaatgctgattcaaaagtaacgtgcaccataaatagagatagcaatggtgaacagtgcttttagactacagctttatatgttctctttattgaacaatctctttgattgactaaaatttattggaaatcacatatttttgtaggtcncacttgttatttaataattctctcttttgattttgtaattttctataaat

SEQ ID NO: 9241 - DNA, 353 bp, Glycine max
  modified_base (200)..(200): a, c, g, t, unknown, or other
  modified_base (208)..(208): a, c, g, t, unknown, or other
  modified_base (232)..(232): a, c, g, t, unknown, or other
  modified_base (310)..(310): a, c, g, t, unknown, or other
cctttaaaattaataaccaaaaaatggtggaattgggaataaaactaatgggaaaataaaagttgttggaaaataaaaaaaaaaattaattataataatataggatttaattcatggatggggctaatttaaggatggccctttttccttgtaatttgaattgtgttttgtgaggaattttgttctgcctagcatttganaaaggcanagatggtttaattaaggggcaagngtggatgtttaaggtttacacccgccaatttcgtttgttgtgtggttcgtgttatgttatccacaattggaaaatganaaaaaaaagtgatattttctagcttagcgaatgagaatagaat

SEQ ID NO: 9242 - DNA, 408 bp, Glycine max
  modified_base (354)..(354): a, c, g, t, unknown, or other
ccgggccgacccacgcgtcaagagaaatctatcaagacaaaggttggagccttttctgttttgaaagaacttgtggttgtattgcccaactgtcttgcagaccatattgggtcactcattccaggaattgaaaaagcattaaatgacaaatcatctacctcaaatttgaagattgaagccctaacatttacaagattggtattatcttcacattctcctgatgtttttcacccttacatcaaggctctttctgcccctgttctgtcagctgttggtgagcgttattacaaggtcactgcagaggccttgagagtatgtggagaacttgtccgtgttgtgcggccaaacattgangggtctggttttgatttcagaccatatgttcatcccatatataacggcattatg

SEQ ID NO: 9243 - DNA, 395 bp, Glycine max
tcgacccacacgtacgggtcaatctggtcatttgcaatctggatatcccccttctcagcccccaccttctggaggatatgcccaaccagagtcaggttctcaaaaagctccaccatctggttacggtggtgcagtgcagccggggtatggtccaccatcatatggtggtgtcccagcaggtggtcaaccaggttatggccaggctcctccatcgtatagcaacagttcttatggtgctggtggttatgctcagcctccagtatattccagcgatggtaatgcatgtgggactactcgcggaacctatgatggagcacctgcccaggctgttcaacaggctagtgttgctaaaacgtcacctcagagttgatttagtatagtttgtcaaatttgga

SEQ ID NO: 9244 - DNA, 339 bp, Glycine max
cccccgaaggttgaacccaataatccatacaagaattttgccaaaccaaatggaaaccttagtgcaaatggggtaaatgaaagcaaatattggcgtggtggctatggcgactatggtggttggcgtggtggtggatggcgtggtggctatggaggctggcgtggtggctatggtggtgggcgtgctggctatggtggctggcctggtggctatggtcgtgggcgtggtggctactgaggttggggtggtcgctttggccctaacgaacataatgacgctgggattgatgctagccctcacaactaagaacgaaacttgctaaagcttatataggattta

SEQ ID NO: 9245 - DNA, 413 bp, Glycine max
tcacataaagggcatatactacattcaatttttctcattggatcaaatgctgcagccatacttcctgcctattggtcccttcggcagaaggcatttgcagaatggattttgttcacatccagtggcattgctagtgggctatatcatgcatgtgacgttggcacctggtgtgcattgaactttaatgttttacaggttactgctctcttcctttagtggtctctcttacttgaatagctgtgacaagcttcaacattgttctgtgacctgagttccaaataagattctcattcttaacaggattattttatgctgtgaattactcccaggacttgggtgtcaatgatagtagcatgtataaacactcggatgaaaagctaaaatcacttagaatgtgtttggtttgcattttc

SEQ ID NO: 9246 - DNA, 400 bp, Glycine max
gacccacgcatcagcccacgcgtccgtgacgatattggaccgatcactttctctggtaagaaaaagaagtcatcccaaaaggctgcgaattctgttagcaaaggtgcttctgttgaggaaggtgatgacaaagatgaggatgatgtttcgttagttgcattttcaggtaaaaagaagtcttctaaaaagaagggcagtagtactgctgccaaagggagtgatgaaaatatggatgcagtggatcctgaggcaaccagtgttggtagtactgatgctggcaacagcaatgtaaataagattgaacaggtcactggaaattccataaatacacagaagaataagaagaagagtggaagaactgctcaagatgatgaagatttggacaaacttcttgcagagc

SEQ ID NO: 9247 - DNA, 76 bp, Glycine max
tagacgatctaagcttctgtacgcgtgcatcacaagcatcaatagctcattctatgagtgtcacccaaattcaaat

SEQ ID NO: 9248 - DNA, 103 bp, Glycine max
acggcgttcccagcttaattaggcgtgacgtccacgtgattactcttcgatagctgcttcgaaagatgcacttcaaggtgccgtcgttggccagtctctttac

SEQ ID NO: 9249 - DNA, 228 bp, Glycine max
ggcgataattatttatagttgaagattaatattgttggtaaatgaagagaattctcgagaaaatatataaattactgcatagatatagtagctgggagttgctgacagattctttctggtgatatgtatatgtatagttgtgaagtctattttttgggtttgatggtatcagttttgtttttctttggaaagaaagaaaataaaattatattgattgggttagtcatg

SEQ ID NO: 9250 - DNA, 239 bp, Glycine max
gcactttcggattcccctcccattttcttcactccgtttcccgctttaggtttttttcctggatggttgtttctcgtccccatactcttcgattccgtggtgcgttccatttcgttcaagattcactcgggtcccttttctgaagccaggcctcgctgccatctgttgaatggttcccgcattatgctttctatcacttatcttgccgagtgctactctcttttcggacccccaaactg

SEQ ID NO: 9251 - DNA, 422 bp, Glycine max
gacccacgagtcaacaacaatctccacctccagatttgcttgacttgggagaaccaactgtcactgttgcacctccctctgtggacccattcaagcaactggaaggacttcttgacccaaaccttagttctacagcaaatcgtagtggtgctgctgttacgaatgcaccagatatcatggcactctatgcagagactcctgaaagtagagagagcggcagtggtgactattctatccctgtgaggggggataatgtgaatcttctatcagagttttcaaatgcagctgccagaggtactactgtagaaacaacagtgacgcctttgtcacagtctgtaaagggtccaaatgttaaagattctttgcaaaaggatgcaaaagtcaggaagatgggtgtgacaccctcaggtcagaaccccaac

SEQ ID NO: 9252 - DNA, 415 bp, Glycine max
gacccacgcatcaggtcagcagcaaaatcaacattcgcctcccattttcatcaatcggattcccgagtttggtttttttcccggagggttgtttctcgaccccaagatccccgattccttcgttcgatccatttcgttcaagattcacgccactcccttttccgaagccaagcctcgccgccaacggagaagggttccggcagcgtgctttctatcagttagcttgccgagtgcacatctcgttagcgaacacaaactgcaaaatggagaacactgtgtccgaccaggagacaacctcaaacggtgtcgttcagcagagagaggttatggtacgacgatgcaatgccgtcatcacgactaaacatctctgagctggtgctatagccgctatggtctcgagaacttgtgtggctcc

SEQ ID NO: 9253 - DNA, 405 bp, Glycine max
  modified_base (327)..(327): a, c, g, t, unknown, or other
  modified_base (397)..(397): a, c, g, t, unknown, or other
gtgaatgcactaaaagaaaatgctgctcccttccatgtgagggtttcccctgtgaaacttcttgaacaaccacgtgtttctagtatacctgcaccagaagcaccagctcctagcactgacagtccaccagaaaagaataatgagattggaggtaaggcttatgcaatatttgttgcaaatttgcccatgaatgcaacagttgaacagctggaacgtgttttccagaaatttgggcccattaaacgggatggcattcaagttagaagtaacaagcaacaacaatcttgttttggttttgtggaatttgaatctgctacttcaatgcanagtgcacttgaggcttctcctcctgttaccttggatggacgtagactttcaattgaagagcgacgagcanataatgat

SEQ ID NO: 9254 - DNA, 244 bp, Glycine max
  modified_base (58)..(58): a, c, g, t, unknown, or other
  modified_base (101)..(101): a, c, g, t, unknown, or other
cctcagggtatggtgattaggcctgcttttttcattaattatccaaatctttctcctntgtgatctacttcctcatctgctgatgcatcttccatgatgtntgttttttcctgtttctctctctctctttgtatctcaagactttagatacaaacccttaattttcttggaaaaaattgttcctttgagaacaatgcatgttagatcctaagaatttgctggcttttcttaatcaccaaatatt

SEQ ID NO: 9255 - DNA, 414 bp, Glycine max
gtcagaaagttcaaaaccctaaacgctacgattttaattttctggttttctctttttcaatcggtgcttcctccggcggcgcgtgggagtgtctttggcgcgtgattcctagttccccgcttacctatgcttcgctcgacccgcattgtagagttcacgccggagagacggcggaatctcaccggacgatcgtgatttcgcatcttcatggcttccgcctaccggaacgaacctaattggccacggcatagaagcggtggagctggattcatgggaaaagtacctttctctaaccctaaccctaaccctaattctaaccctaaattagcgaatggcaagaagaccaatcggcgtccgatgatgcttcctctatcaaccggagatcgaacgacgccgcaactcactcccagtatg

SEQ ID NO: 9256 - DNA, 389 bp, Glycine max
gcgtcagaccatattctgttacgccaatctgcgtcggcgacgcgaattgtgattactgaacggtgaattttgaggatctgctacgtttttcaacattgaataaggtgtatgtatcagacaagtatttgtcagaatcacattgttaattctcttcgaaagaattcattcgttcatcctccggaattaaaggggccccaaaaattccaattttggaaaatcaattttccccggaaaaatccccgaaattccggaatcctgaacaaccggcaaaattgtgccagagtttgtacttgtggccatggttgcagatcgaagctctgaaatgtcgttattagttggattttagaaatagatttgcatttttccaagcttcagaactgaaaccagcg

SEQ ID NO: 9257 - DNA, 256 bp, Glycine max
  modified_base (224)..(224): a, c, g, t, unknown, or other
aaaaacactggggaacatcagactccaatacatcattcattgagactctgccggagcaaatattcaagccatcattgtccacaatcattcccgagaattcaaaacttgtaacagtatcaccaacagattcagttctgacaacaacaaagaagatgggtgaaatttcgtgcaaagttgtgcagttgtgacagttaatgacaaacctcgtggcatctttacttcanaagatattttgttgcgggtaattgcacaaaat

SEQ ID NO: 9258 - DNA, 367 bp, Glycine max
gcgtcaacccaatttctgttacaccaatctgcgtcggcgacgcgaattgtgattactgaacggtgaattttgaggatctgctacgtttttcaacattgaataaggtgtatgtatcagacaagtatttgtcagaatcacattgttaattctcttctaaagatttcattcgttcatcttcggtatttaaaggcgctccataatttctagttttgcagatacatttttctctggaaaaatctctgaatttcggaactctggactatctgctacattgtgcctgagtttgtacttgtggccatggttgcagatcgaagctctgaaatgtcgttattagttggattttagaaatacatttgcatttttcgaa

SEQ ID NO: 9259 - DNA, 58 bp, Glycine max
aaaataaaaaaaaaaaaaaaaaaaaggagccaaaaacaaaagtatcagggcaggggag

SEQ ID NO: 9260 - DNA, 410 bp, Glycine max
cgcgtcagcccaagcgtccgcccacgcgtccggtctttttctttgccgtgattattctaatttcagatctatatttgtttggttgactttgtttctggcgtcctagttgcgttctcgattaggtttgtgtttgcgattctggtttaactaatgccagggaaaattggtcaccgtcactaattgtcataacttgttgggaattagcgtctatcgagtcggtgatggttcagacttcagaatgatatgaggatgcagttgtgttaaaactaggggatgaaacttactgttgttaaaaattttaagatgatgttgctgattagctattgtgttggcttgaaatttcttatcttatggttttagttaggatggccaaatagataaaacaatatgtaggaagtaattaagttttt

SEQ ID NO: 9261 - DNA, 417 bp, Glycine max
gacccaagcgtcagcttcaattctctccaacgttaacaaccttcattccatcctcgtatcggttattattaattttaattccacgtaatgggcaactacgtttcatgcaccttggcgcctcctttgatgaagaattccaaggccacgagggttatcatccccaccggtgaagtcaagcaattcacagagatcgtgaaggctgcggaactcatgctcgaacaccccaactattttttggtcaattctcgttctttgcatataggaagaagattctctgctctcggtgctgatgaagagttggagttcggcaacgtgtatatcttcttcccgatgaggagagtgaactctcttgtcaccgcccctgacatggcagtactcttcttggccgccaactctgccgccaaaagattgtccggc

SEQ ID NO: 9262 - DNA, 384 bp, Glycine max
  modified_base (341)..(341): a, c, g, t, unknown, or other
aaaacagctttgattaatgctgttactggtggcattcaaaattgtttctgccaatgcagacaacacaaaggttcaacccccaacttctaagaatatggtgtattatcctcaaagttgtaagtgctgctggttcatatggaagccaatgatcaaatgtgggaaagtttgttgtgaagatggatgttgctcttaaacttatgcaacacaaggttgaagcagacctcctataatttctacagttctatatatgtttctcttcatccagatgcttatataatgtagtgctaaataatcatccaggaatccagaatttgattatgtgccctgcgagtagtttgaanggtaattgatgagttaatgtgatcaaagtttttatttctatat

SEQ ID NO: 9263 - DNA, 395 bp, Glycine max
acgcgtcagcccaagcgtccgcccacgcgtccggtttagaacaaaaaatatatcttctggaaagcgatttgaattctttagtcaagaaggagaattcaactaaagaaactatttcaaacctgaatggaaacattgctgtgctacaagcgcaggtggaagaattggaggagtccaggaataatctttttctagaaaaccagcaattgagggaaaaagtgtcgagtcttcagtcaacggtccaaaatcatgaaaacagtaacacttcttcctgctcatgggatgcatctgtaaaggatcttgcttctgaaaacgaagacttgaagtctgaaattgaagcagcctttacgttggtggagaaattgatggctgaaaatgcagaacttgttgagaaagtc

SEQ ID NO: 9264 - DNA, 403 bp, Glycine max
gacccaagcgtcagcccacgcgtccggatggtgatattgaaaagaagtcgagagctattgacgaagagaaggcgaaagaggaagaggacgcggatgccgaaatgcagctcaacatcaaccaagagtctgatgagttcagattgcctaccaaagaggagcttgatgaggaggctctccgcccacctgatctttccaatctccagaggagaaccaaagagattgttcgtgttctttcaaattttaaagctttgaggcaagatgggtcaacgagaaaagagtatgttgaacagcttaagaaagatttatgtactctactctagagtttctattatctagtttcaatcttgtcttgtaaaagaaaaaaatgaagaaaaaagaataaattaaatgggaaataataagg

SEQ ID NO: 9265 - DNA, 313 bp, Glycine max
cgtcaatttccaactgccagccacgtggaaaccacgtgcttaacaattaagaataacctcgttaagtttttcaaaactagcttccaacaaatgccttcaaagaatcctaacacagttcaatggggtagtttttaaaggtgattaatttgaccattagcgaagcttaaacatgtataatgaacagggttgattcctaatcctttgtatctgttctacctttggagtaaacacatgcatgtactcccttaattattgtaaggcccgacgacagcagatattattataaaatttacaacttgatatttttagattg

SEQ ID NO: 9266 - DNA, 420 bp, Glycine max
acgcgtcagcttatacagattgcatacttcttggagcccagtcatgattgtctagtggagtgcttgcctacctgcaaatcagacagtaatccgcccaaatttcctcccatcttatgccatgactacctaactcagcgctacaacgacactcatgctgacttgaatgtttataagaaacaacaagcttgagtagtcaacctttggaactgaacagcctggagatttctcacaaggacactcacctaagctgatttggatgtttacaataaacaacatgcttaagaagttagtcttttggagctgagcagctggggaattttggactgcattatgtgttagagttaacagcatcatattgcattggcgatgttatgtagaatttgtttgaatgggaaattaattttgtttttgtgaaagggg

SEQ ID NO: 9267 - DNA, 392 bp, Glycine max
acgcgtaagctttatttctgcaaacaaatcaaccctcaaatttccttttgcttcctagaaagagttagttcccggaagcttctctctttgcacttgcatgatttgatctccgccgtggattcgtgatggtgattttatgaacttcctcctctgccccctctttccttttctgattatcattatttttatatttaactagagagagagactcatccttccttcgagacatgagatgaggccgatgcaactgccaccgccttccgcttccggggccaaccctgcccctgcaaccaccaacaacaacaacaaggagcagcgtccccagcgccgccgcaaggacctcacgctgccgctgccgcagcgagacaccaacttggcggtgccgcttcctc

SEQ ID NO: 9268 - DNA, 344 bp, Glycine max
cgcgtacgcatctgcatgagcgtagccttagtgtgttagcttgccgttatgttgatgaacttactattggttcaccttgggaaattacaaacgacatgatcaccactttcaatatctcagtaattgtgcatggtactgtttctgagaagtcattaaattgtgaactagatccatatgagatccctaagagcatgggaatattccgcttgctcgaaagcccaaaagatagtactactgccacagttgcccaaaggataatggctaatcatgaagcttatgtgaaacgcaatgctaagaaaactatgagtgagcagagatactatgaagagaacaaatacgtctct

SEQ ID NO: 9269 - DNA, 402 bp, Glycine max
gacccaagcgtcagatctgaagcttgatgctctcggttctatcacggatagacccaagtttcattttttatggcagatagctagtaacattcttcccttttgtttttaaagaaggctgatcacttgggagtgaaagaagtgggtgggttttgatcggaaccctgcattttgcaaatattgcaataagttacaggtgtctcaatcccgcctgcttaacagggattttttttttcttttgggttaaaagttataggttggtggttgggtaggggtaggctacggctgttttgtctgcagtggaaggtgctgggcaattgcatcttttggggtattttgatccttttttctttcagagggttgattctacaagataaagtttatgatgtctttggtcaattttac

SEQ ID NO: 9270 - DNA, 368 bp, Glycine max
  modified_base (42)..(42): a, c, g, t, unknown, or other
  modified_base (60)..(60): a, c, g, t, unknown, or other
  modified_base (285)..(285): a, c, g, t, unknown, or other
  modified_base (304)..(304): a, c, g, t, unknown, or other
aattctaaggccgaccgacccgtccgtgaaatattctttatntcagatcctctcttctcncctgattctctcctacatcatcatcttctatctccttgccaaaaacacctcctgtggtgtggacccaaaatttcttgcatgtccacccacaacctgcgccaacaacaatcaaagtataagttatcccttttacatccaaggaaaacaagaacctttttgtgggaatcccggttttggcatctcttgtggcccaaattgttttccaatccttaatctgtctaatanccaatacatcattcaccanatattctacgaaaatcagacacttcgagtgtccaataccgcgttttcagtttcacgaacaaaca

SEQ ID NO: 9271 - DNA, 385 bp, Glycine max
ctcccggccgacccacgcgtcagagaagaagaagaagaagaagaagaagagatgagcgtggaagatcttcctgggaaagaggtaaacgtgctgaagggtcacgagggtggcgtgttagccgcgaggttcaacggcgatggcaattatgttctgagttgcggcaaagaccgtaccatacgcctttggaatcctcaccgtggcatccatatcaagacctataaatcccacgctcgcgaagtccgcgatgtccacgtcacacaggacaactccaagctatgttcctgtggtggagatcgacaaatattttattgggacgttgcacctggacgtgtaattaggaaatttcgtggccatgatggtgaggtaaatggtgtcaaattcaatg

SEQ ID NO: 9272 - DNA, 387 bp, Glycine max
accacgcgtccgcttcaaatctccttctcttttcgcttactcccccttccttcttcgcgatccatcactgccaaatctccccaagatttcgattccgcactgtttcggtgatcgattttctccataaccctcgatccacataggtcatctataaaaatccaaaaccctagttttttcttttccttaatttcatggtggagttttagattaggcacaaacccttcaatgattatggtccctttcgttttccctcggagcaaaatttcatgggtgttcctaaagtttttgaattgaatcgcttttccctgtgattttgtgttccgactttggggcgattcagtgtagatagccacctcgcgatattcattgaacgggagagtgtttttc

SEQ ID NO: 9273 - DNA, 353 bp, Glycine max
cgcgtcagcaaccactggagagagagacatcccctccgacattttctctattcttcaagcaaactcttcgtctcagatctctctttctctctctctagggtttccgtttctctctctgctatttatgatcactctctgacgcgcttctgtcaccaaatcaagtgcttccgtctcttccccttcttctctgattggaaggattcgtgtggtcggagatggtggtttcggggccaatcacgccggggcaggtgtctttcttgctgggggttattccagtttttgtttcatggatatattcagagtacttagagtacaagaaactctcatctcctcccaaagttcattcagatgct

SEQ ID NO: 9274 - DNA, 433 bp, Glycine max
ccggccgacccacgcgtcagcccacgcgtccgcccacgcgtccgaaaccatcaaggtggaccactgcaagtcaggagctgatctggctaatggcagtaccacagttgaggaaagctcattggaagtggctgagaagcaggatgctcctgaaattcaagcttccgacaatcctgagcaacatgctagtgaagatagtggtaatgcctcaaagcgtccaaggacagaggagtaagccatatgatctactgaatcagcattgaactgacaagacgataccaattcatttaagatttcgatttagtaaggaagacttggtagatccataacttgagtttcccctaacctgttgtgatcaatgaggacttgcatatgtatgtcattgtgttacaaaaatgatgagtcaatttttggaccatgaggttcttcgaacttc

SEQ ID NO: 9275 - DNA, 435 bp, Glycine max
ttcccgggctcgacaaacgcgtcagctttgcaggcatctcagactccagttgatgagatgatgagacatgcgtatgttgatcctaatgatccaacaaaaatatttctgcaacaacccaattctgattctcagcttaggcgtcgaacatatcagccacaggcagatggaggccatgtctgagtctgaaatttcactctcctcactttcatcgtactatatatgggaattgtgcattaatacatcaaaataaataaaaatcttatgagactgtttggatctatgtttatagaatttattttagatcaatatgattatataaaatttgattatgaagtaatgtaatttttttttgtttggataagagattgaagtgatttttacgacaatgttggttggattttttgttgacattgaagcttcttataaaagtcatga

SEQ ID NO: 9276 - DNA, 374 bp, Glycine max
  modified_base (339)..(339): a, c, g, t, unknown, or other
  modified_base (361)..(362): a, c, g, t, unknown, or other
acgcgtcagatccgtaatcaacttctatagctaatgttaatggcgaggcaaagattgagccgaaggctgctattgcaggcaatgctggaggagggacctgaatgacaggtcgcgtctttaatttgtaggaatttttctttttttagcagttcaaaatttgcagagcaacctccacaccgtttctacatttcagcatattaatcccagatgcgactatctttcatttgttcattgatgccctcctctatgagatggaaaatattcaagtggtctgaagaagcttgtgttttgttttgttgtagcgttggctttataggtgacagcttttggggtaattantggccatcttcatagggttacnntatctaaaaatc

SEQ ID NO: 9277 - DNA, 437 bp, Glycine max
attcaagggccgacgacgcgtcaggacaagaaagacgtttttgatcgtgaagcataaggatatgacaagttagcccaagcaaattatgacaggtgtgctgatgatatcaagcatgatatatttcagcaatctacggaatacaatgaagcaattagtcaatctttctcagatgccacaaaatctggtcctgagggtggagcatctcaaagcgattacgtgtacgaggaatcttctgggtactaatacagcagtaattttggccattattatgatccaaatacaaagctctattactcagcagcatcagggcaatggtactcctttaattatgagactagcacatatgaagaagttcacgacgttgcatccaatgtgagctgaatgactgatttaatgtggagaatacgctaattagcaataccacaatcactgtctat

SEQ ID NO: 9278 - DNA, 432 bp, Glycine max
gacaacgcgtcagggtggttcgtccagtcttcgggttattggcaaccgtagatggggagataatggttatgtcagggctggtcgtcaagaagctcggccagtccatcgtccaaactttcaggattcaggagcaagttcttcttcgcatgagccgaagaagaaagaggctgggaaaattatcacaggcagaagggcaaagagggcacagaaaagggaagctgctgacaaggcggcggaagcaaagcatcagcagcatttagtaaggttgggtaggaagtgattctattttatttatgtcaggccatggccttgaactttccttcccataagttaaatattttctttttctttacattttttttttcttgtacattgtttctgtgctctttactctgaagcatgtaatagatcttggggaaggtgttttagaat

SEQ ID NO: 9279 - DNA, 306 bp, Glycine max
cgtcaactggaatattcataaggaaaatggtttggacttccgaattaaacatagtctttgcaactttttgtcttcctattggtcctttcagacttgcaagttgcaaatagcaacaaatggcccgagtttgctggttgtgttgctgtccttcacttttgctgaaccaaccgtatcagaagcttgtaaagaggctgttaagtatcaattgattgtcaattctgacttctgaactagagttttcaaggatggtggataaactttaccatgactaagttagtcaagatgtctaactctgatgaacatatg

SEQ ID NO: 9280 - DNA, 274 bp, Glycine max
  modified_base (70)..(70): a, c, g, t, unknown, or other
gcgtcagccgaaaataacggagggatttccttaacccacaaactctcaaataccctctctctctcaccgnacactatgttgcagagacctagacgccgctgcgagggcactgccatgggcgccatcgttctcgatctccgtcccggtctcggaattggacccttctccctcgggatgcctatatgtgaagcatttgctcagatagagcagcaacctaacatatacgatgtggtgcatgtcaagtattttgatgaggaacccctgaagttggatg

SEQ ID NO: 9281 - DNA, 384 bp, Glycine max
  modified_base (327)..(327): a, c, g, t, unknown, or other
gacccacacgtcagcccacgcgtccggacatttctcacctcacatgtgccgatttccttcgagcccctggagttcagacccccctcatcgtccgtttctccactgttatccacgagcgtggcagccccgaaaccctcagggatcccagaggttttgctgtcaaattctacaccagagagggtaacttcgaccttgtgggaaacaacttccctgtcttcatcgtccgcgatggcctcaagtttcctgacatggttcatgtcctcaaacgcaacccaagttccacatctacgagaattggaggatcctcgatttcttctcccgacatcncgaaagccttcacatgttctccttcttattcgacgacgttggtatcactcaagatta

SEQ ID NO: 9282 - DNA, 310 bp, Glycine max
gcgtcaggaattcttctctgctattttatccctcctttgatgattatcatccctttcgtatctctatgtttaaggggaggtaacagtgcatggggtgtagaagaataagggaaaagatgagaaggaagcactgctacttggtaattaaggttgttgacagaagatagagagcacagatgatgatatgcatattatataatatatagcagggaactcatgatgaattgtgcatcttactcctttgtgctctctatacttctgtcatcaccttcagcctccatttctcactattccccctctacaccaactg

SEQ ID NO: 9283 - DNA, 436 bp, Glycine max
  modified_base (57)..(57): a, c, g, t, unknown, or other
  modified_base (155)..(155): a, c, g, t, unknown, or other
acgcgtcagcgctgaagtcagcgcttgcgtatgacgtggccatggacgtgtgggtcncgctccccgacatgtcgcgtgagcgagacgagtgcaaggccgtgttccgacgcggcggcgcgctctgcgtcgtcggagggtactgcacggagatgcangggcgcttcgagcggagcgcggaggttttcgacgttgccaagtggaagtggggcccagtggaggaggagttcttagatgccgccgcgtgtccgcgcacgtgcgtcgacggcgcggatggtgcggaggggagaatgttcatgtgccggggtggtgacgtggtggcgctgcacggggacacgtggcggaatgtggcgaaggtgccgggtgagatacggaacgttgcgtgcgtgggagtgtgggaagggttgatgctggtaattggatcgagtgggtttgggga

SEQ ID NO: 9284 - DNA, 400 bp, Glycine max
  modified_base (197)..(197): a, c, g, t, unknown, or other
  modified_base (284)..(284): a, c, g, t, unknown, or other
ccacgagtccggacatgatgaaatcttagtttactaagttgtccatttgagctaagcaataagcatccatttaataaaattgcgacgtggtgtgaggaccagcagtataattttccttcagcaaagcaagttgcggttgtggatgtgttgctgagatgttcagacattttctgtccttttctggttggttctaatanggatcttcctcctcatcgacattcaattaattccaatttttggtattgttacaatagcctcatatttaaatactaactgccaaatanggccaaataaatgtcagtgactgattccatatttaagaacttgtgcttccattagtcagcaaatacgtaagtgtgtttttggattctgttgtagtaattggacccatcaaacaatg

SEQ ID NO: 9285 - DNA, 435 bp, Glycine max
  modified_base (398)..(398): a, c, g, t, unknown, or other
  modified_base (426)..(426): a, c, g, t, unknown, or other
cgtcagggaaaataaagcctcgtgtcggtggtgctcttgcagtgcacgcaccctcgtgtcaatattcgctgcaattcttctcctattccaaccaaattgcatcgctaagcaacagcaccaaccatgccctccttcatcctgcggcataattggcaacatatcgttcccatttcgcctcaaagacgacccaagccactgcggcgacacaaggtaccagttagattgcgtgaataacgcgacgctgttaaccttgttctcgggaaaataccatgtacaagatatcgattacaagagatacaaaatcaaggttagtgacgcgggtgcactggaggactcaaattgtttcatccctcgcaatttcttatgggatggtaatttcaggcccaccggcctggtcngcccagatgattttggattacagccgtntgttttgga

SEQ ID NO: 9286 - DNA, 353 bp, Glycine max
acgcgtcagcggacgcgtccgcccacgcgtccgcccacgcgtccgaaaaaaaaaaaaaaaaaaaaaaaaaaaaaaaaaaaaagaaaaaaaaaaaaaaaagaaaaaacaaaaaataaaattaaataaaaaatagggaggtcgttcataaggttagctcttatacttattcatgaatgtaatgtttaatacttttatatagtgtaacctggggttcatttccctggtgattcctctttgaagttcgtgaccgggaatttgttgggctttactaaacattaacgtccttgcagatcacccggctttcgttttcagccttcttagtggagaagcctacgcgttttgccctttcaaac

SEQ ID NO: 9287 - DNA, 115 bp, Glycine max
acagctcactaaaaatttcatgtatacagaattaatgtgaatcctgttcccttctgacattttttttttgtccccatctagtaattagaccacatccggaacatcgtataaatct

SEQ ID NO: 9288 - DNA, 123 bp, Glycine max
gcgtccgccatactcaacctcctactgagggatggggccccacttcttgccaacgtgtaaccataccttgcttatgcaaatgatcaaagcagtcctcgtgactatgctcggtttaaccaacaa

SEQ ID NO: 9289 - DNA, 398 bp, Glycine max
ccacgcgtcaaggaagagagaaaagagggcttttaaacctgagattttgatcagagttagagacgcctctgtttctgaagccgaagctgccaccattgctgctgaggttttgtggggttccagcccatgaaaactgaacttcctcttccaagtataaaagaacttcaattcgagaccaccggttaaactcaacaattaatcgattatgtatactataggtttaatttgtcctgtgttgtatcatgtatgtacagattgggttttacgaacggggagttcaattcatcaaatgtgtaattattgattctttcttcacccactggtcactggaggtgaataatgcatgtgaagaatcgagtttgtcatgttgatatgtcattgatggcttgtcaccttta

SEQ ID NO: 9290 - DNA, 363 bp, Glycine max
ccacgcatccaccaatccgtgtgttctggggaccaaaattttgaagaatccaaatggggaaacctccacacaatttgtgaaactgagtcactttggggattcactgcgactatcttcaccaaagaggagagacaacttgatttacctcggaaaaactaattccttgagtcttgggaactgggcttaaaccccatcctaacaggttcgccacatgcaggtgatatcttccacatgatcagtggactcaattttgactattctgttccaatcacgccacttttcacttcaagtagctctccgcaaatgccacactactggttggaaaccaattttgacttctcaagatttgattccttcagaaca

SEQ ID NO: 9291 - DNA, 81 bp, Glycine max
cgacccacgacgtcagcctatgcgtcggatgtgggttacggtcgaggtccgtttacaacagctgatgactcatcagattcg

SEQ ID NO: 9292 - DNA, 300 bp, Glycine max
acccacgcgtcagcccaagcgtccggcctgggtgtggcttaccctgtgtatccttttgatttcatattctgagcatttgaatttgatagactctgtatcatatggacaagtagtcgttcagaattagatagttatcctacgctttttatctggggatgtaccaaattgtacacttaatttaggctagacttttttaacttagttcatttcacaatattctaggatttctgtttatgtgacttcttgagttccacacatgtgactgtgacctatcgtgttttttttagtacaggcttaagt

SEQ ID NO: 9293 - DNA, 392 bp, Glycine max
ttgcttcgacttaggctctaaagtgactagcaaatcacgtgtcctcattctcgtcgagagtatgttttctctctctgttcagacttcagagtacgcttcctctctcacggtgggtttcattatgccataccactgaagaacgaagtttatctctctcttgtgacttgtgagcaattcaaattgcggagaacctacacactgcattggaagatacaagaatatcatcagtttctcctattcattaactccagttactcactgaagataacattggaagcattgggcaataaaaatgagcaattcctctgctggaacctcatcaaaaccaagaacagcttcctcacaaccatcagaaacttcgtccaagcgcaaaagaggagttttccaaaaag

SEQ ID NO: 9294 - DNA, 371 bp, Glycine max
acgcgtcagcccaagcgtccggcctgggtgtggcttaccctgtgtacccttttgagttcagattctgagcatttgaatttgatagactctgtatcatatggacaataaaaggttcagaattagatagttatcctacgctttttattggggatgtagcaaattgtatacttaatttaggccagacttttttaagttatttcatttcactagattctacgatttctgtttatgtgacttcttgagttccacacttgtgattgtaacctatcgtgttttttttagtacaggcttaagttaaaaaacagaaaatacaacaaaaattgaaagagaaacaaaatactggaaagggtcaaaaaaaatattgcatatgt

SEQ ID NO: 9295 - DNA, 269 bp, Glycine max
acgcgtcagccaacgcgtccgatgagttccaaagtttttcttattctacttatgttcatggccactatacttttgatctcctctgaggttgcacccgatgatgcataccagaattttgacaaaacagatgggaagcgtagtgcaaatggggtagatgaaagcaaatattggcgtggtggctatggcgactatggtggttggcgtggtggtggttggcgtggtggctatggaggctggcgtggttgctatggtggtgggcctggtgggct

SEQ ID NO: 9296 - DNA, 405 bp, Glycine max
acccacgcatcagcccacgcgtccgagatcatctcaaatcatattcatatcgcgtttggttttgttttgtttttctattttaacacaacagaagcaccaactttctttttctctttcttttagggtccttcctcactctgaatccgccattgggctgcgatggcgaagacgcgaaagtcggtggcaacgcgccttgacgaagtggatcgaacgatgtactccactttctgcagcagcgccaactccctctctcagctctacacccacgccatgaagcaacaaaaactctcatttcaggccggtgaacgacacgctcttgagaaattgtatcaatggattctcaggcaacagcaagaaggatctagggtggccaccattgatattgttacccatttgcagaatgag

SEQ ID NO: 9297 - DNA, 405 bp, Glycine max
cacgcgtcagccaaattcaagaaattttttaaacttgacatatctgctatcaccttttccgtttcttgcgattcgacgatggccgatcaaaagctttcagaaccggcgcttaaacgtgagcagcgtgatgaattcgtgagtagtctatattttgaacaacgaattcttgaactccgacttcttcaagacctcgagaacaatgatgaatgtaagaaaaatgggagcctgaaaaggttaaatgaccagagtgatgtctgtggatttagaagttgcttcaaaaatcattatgattcgcttccgaatcagaggtgcttgaggaatcgagaagaagtgattcaggagacgatggaaatggagttggaaaatatgatggaactgggcaccctcaagggcaagaaaacatat

SEQ ID NO: 9298 - DNA, 142 bp, Glycine max
aattcgccgccgacccacgcatcagcccacgcgtccgctcatgtctctcttcgcttaatgttcatttatcccgctcggtcctcacctttacttcctgggagtgtttgtattagactatgggttcatggaggtaatgatggtt

SEQ ID NO: 9299 - DNA, 413 bp, Glycine max
gacccacgcatcaggccacgcgtccgctctctccctacttcgcaacgatgccgtcttgcaacgtcggaacgcagctaccctcccccgtcgccgacgtgcccctcagaaatgacatcgagatagtctacagaagttacggtggcggtcgaaccaaagtgctcctcatcatacgattggccgcgacgcacgaagcgtggggcccacatatcaacggcttgactggagcaaccgtccccgacgacgtcgtttggagcgaacaataaggcaatggtggcatccatgtatgcgcgtctgacaatctcggcgtcggtcgcaactccgtgactgtccaaaaatctgaattctgaatcaatatcatggcgaacgatgcaattgcgctgttacatcatcaaagttggaaaaaagcccatgtt

SEQ ID NO: 9300 - DNA, 324 bp, Glycine max
acgcgtcagcgattcttctctcagattcagataccaattcggtttcttccgaaccaaacttgtttttgagaaattcggcaattgattttccatggccaacaatccgtcacagcttctcccatcagagttgattgaccggtgtataggttcgaaaatttgggtgataatgaagggtgacaaggagcttgttggtactcttagaggctttgatgtttatgtcaacatggtccttgaagatgttactgaatatgagatcactgctgaagggagacggataaccaagcttgattagattttactcaatggaaacaacattgccaattt

SEQ ID NO: 9301 - DNA, 187 bp, Glycine max
ccacgcgtcaacccaagcgtccgcccacgcgtccgataaaaaaaaagctatcaacactctcaatatcatacgataccatttaaggtcaatctcaaaatgggcagcatcgctacaggatcgaaactaacgtaatcgtgcatgcgacttgtcaaggtcttccacgatgtcactcatgttcaattcacat

SEQ ID NO: 9302 - DNA, 375 bp, Glycine max
aattgccggccgacccacgcatcagggaggtggctcccttgctcgttccttataatgcggtggctcctcctcctcccttgtcggcggttgctgataatgtggtggctcatcctcctttgctggcggcgactgctgataataattatctggtggctcctcctcctcctcccttgcaggctattgttgatggggcctatgtttcaaccgacgaccttgacatggaacttgattggagtggtataattgacagtgatactttgccatcattgaactttcattacggggagtgtagtagccatgctgagtattccaaagtattcatcaaggatcaggagccattggcagacacttttgaaatttcctgtcctgaaaatg

SEQ ID NO: 9303 - DNA, 353 bp, Glycine max
aattccccgtctgacccacgcatcaggccacgcgtccgctcttccccaacttctcttaaaatccatctagcccgttcggtacgcaactacacacactggttgtctacatattcgtcgatgagatcatcgccctagtggctccagctacagtttgcagtcgtacattagatatcatcacacatgtcatgctcgcgagctacgaagcctgtggctcatgtctcgacggcttgtgtacatcatgcgtcagcaactacctcgtatatagctagcattaacgcaggagaggcaaacttgtttgcgcgtctgatagtctcagcttctgtcgcaactccgtgacagtcctacagtctgat

SEQ ID NO: 9304 - DNA, 227 bp, Glycine max
  modified_base (75)..(75): a, c, g, t, unknown, or other
gacccacgcgtcagacctacatgcatgtaggtgtccaggcttgtacctatggtatcaagtttccattatttctcncttttcattttcaatgcatgggtatttaattctgcagtttttttaggtgtcctgtattcttcctgaaattatatttaacggaaaaaattgtcatctgaaaaacaaactctgattgtattggatttgaagaaagtcaagttattttttattgc

SEQ ID NO: 9305 - DNA, 409 bp, Glycine max
  modified_base (394)..(394): a, c, g, t, unknown, or other
acccacgcgtcagaacaacctcaaaatatattggaccaaggcctactacttctgttattctgcatatgtattctgcatatgctgtcaattttattttaaccactttttgttatttagttaattctgttacaataattatgtttactatgtttagtagtttcctattgtttttcctatatatttgtgtatagctggtgactaagagagacaacttttgtaaactttcttgcaagtctatcaatatactgattctgagttttccctcagcattcttttgtttctttcttccttcttgttttttttcattccaagttattacagggctaataacttcaatatggtatcagatgagcaacaacctttatgatcctcttcctgaatgggcctatgatcntctcctttgtcccct

SEQ ID NO: 9306 - DNA, 156 bp, Glycine max
ccacgcgtcagttatcacttttcagatctctctcccttccttccatcacaaccacaaggttgctgagaggacatatactatggtgaagatttgctgcattggagctggctatcttggtggtgcaaccatggttgtgtttgccttgaggtgtcgtga

SEQ ID NO: 9307 - DNA, 202 bp, Glycine max
ttttaagtttttgattacgatgttttattgtggtcaattgatggatgatattaaatgttaatttattttataattgtatgttggatgtaaatatatttctccgaaggcaatggtggttcagaagttacagggaggaaagaaaggtttatatgttaaatggattttgttcataacttttttagtttatattcaatggttgttg

SEQ ID NO: 9308 - DNA, 372 bp, Glycine max
acccacgcatcagcccctttttacgttgcagtcatcgagcgctacaacttttcaaatgtattgcacagattttgggtatactccattgataagcctcatattcaatgcagcaattttaatcgacgaattgacattcgtatcactggatacgattatacatccggtgtgtgacaatttcaagggtttttatacgtgcctagtgtgcacaagctgggtgtgcaaccaatacgtgtttggtggactatcttctgcctcaatctctcagactagggtctatggtggttctctctctcattaccaatcacctagtctggacccaatcatctacaatatgtggatccggtttaacatgatccatgatgtcggtgccaa

SEQ ID NO: 9309 - DNA, 316 bp, Glycine max
cacgcgtccgcccaagacgtccgcccacgcgtccgcccacgcgtccgaggataaagatacaaagtgggctgatagctatggctgaaaacttggcttcagaatctgggttcatggaacgcaggcttcctaacggcaaagtggaagtaggcgacgtcacgataccaagaatcaccatttcctctgcggttgaagtcactaaagtactaaagtgaacaattactacaatcaaggcggtggcgtggcatttctactaactttgaaaaatctcattctctcttcaaaccttcgtgggaatataacaacatattcactgtgc

SEQ ID NO: 9310 - DNA, 341 bp, Glycine max
acgcgtcaagcatcgcgtccgaaatttcttactcttcgttgtgatagagatacaatggttatatctaggaaagatgctattctatagacatgacatgggataagtttcaattcttgtccgtgagataattgttctgtatatgttgacgagatcgttccaagctccacttcccttaagtgaattactactttgcttcttcactttttcacttatcccttctgatctcatgcattttcccctcatggatctctttgacttgattctcggttggttcggcttaagctacctggaatatttctgtaccactttttatggtctatctatgttttagccatttttgt

SEQ ID NO: 9311 - DNA, 420 bp, Glycine max
gcacgcgtcaacacgagcaggagactgggcttttcaaacatgtagcttcctttttggcaagttcttgcagcagacaagcatcaggtgatggagacacattacctttcattgctgcaagtgtttgttgccaaggagcagaaattttaggggggaaacctagctcatcagggtattgctgtcgagagacatgtatgaaatgctggaaagccgaagatgacaagccaataacaatggtttcggggactgtggtaaatggtaacactgagcaaggggttgatgtgttgattccttcatcatctgggaaattatgttgcatttgctctaaaagtaagtacataagggtgcacccagctagcactgatgtgctaacagtgcttctgctgtccttaccatctacaacatgggctggcatcacagatg

SEQ ID NO: 9312 - DNA, 353 bp, Glycine max
cacgcgtcagccagcgcgtccgaaaaaaaatactccgaaagaagagagagaaagagagaagagaaaagggaaacaaaagaaaagagagagagaacaaaggaaaaaaaagaaaactgataactgagataacaatactgtagatatagagagatagttccaagctccaattcccagaaaaaaattaaaactttgcttcttcactttttctcttaccccttctgatctcatgcaatttcccctcatggatccctttgatttgattcgcaaagggtttggctgaagccacctggaatacttctgttacagtttttaaggtctatctatgttttagtcaattttgtccaaattcctgt

SEQ ID NO: 9313 - DNA, 316 bp, Glycine max
cacgcgtcaaggagtgggagagaccgtggatatggtggtgacggcgggtcccgctactcgagaggaggcggtgcttcggatggaggaagctggaggaattaggattaggttttttagtgggtgaaaaaatggggggaggttctgttggagtaatatcatccccttgatattaattgtggtaattttaggtttggaatatgcgttgtggtttgagcatatgttactgttatggttggttggtttccgtgttactcctgtcctgtggttctcgtttttgacctctgataatgaatctgtgttcttgaaaaaaaactac

SEQ ID NO: 9314 - DNA, 213 bp, Glycine max
acgcgtcagccaacgcgtccggagacgcgtgagtaatcatcaatacagtgctgcgtgtgttgctctgtgaatccatcatcttcttccattggaggaccagttcctcctggaatagacatgataatacaggttgccttaatcacttctctgagttgctaagttaattgctccgtcattgtttcactcttgggtctcgcgtacccgtgtcaccgt

SEQ ID NO: 9315 - DNA, 71 bp, Glycine max
taaaggatccaaccgtacttacgcgtgcacgcgaggtccaagctcttctagactgtcacctaaattcgcat

SEQ ID NO: 9316 - DNA, 76 bp, Glycine max
gacccacacgtcaggtccattcaagccctacgaatggagggttgcacgaggacccgagactgaaacttcagataca

SEQ ID NO: 9317 - DNA, 371 bp, Glycine max
gcggaaaccgtatcacctgtgattccccataatcaagtagttactactacataaatgacccgatcaagccttgatcctaaattacttgcaacagaccaaaatattccaatcatatcaagctactgagacctaaatttgtggacacggtcactccaaagacataaataccaccaaagccaaaaatctcgatacttcaacatcttaatttgtaaatgtaaaaatggcacaatgaagagtgtacaggtaatttggtgtattgcttaagaaaccttgcctctaccatacaaagcattaagtccttaacggacacattctactacagttgtttagcacttccaatgatgcttgctgtcctaaagcctgaggaccta

SEQ ID NO: 9318 - DNA, 425 bp, Glycine max
acccacgcgtcagcacaatgtaagtttgtccaatacctccttgttttaacttcacattcttactttttcatagatggacttctttttatttaatcattttgttcttagtcccattcccatcttctgtttgattttaacaccacaattgacactggctttgtttttcaggaaggggctgctaaagcaaaagaacttcttgatactgtgatgaatatttacatcaagactatggttgaagatgatgacaaggaagtggttgctcaagcatgcactagtgtggctgacatcattagagattttggttatgcaactcttgagccgtacttgtcccagcttgttgatgcaacttcattgttgcttcaggagaaatcttcttgtcagcagatagagtcagacagtgaaattgatgatgttgatagtgcaca

SEQ ID NO: 9319 - DNA, 83 bp, Glycine max
gaccacgcgtcagccaacgcgtccgaaggaatttttaaataaagttgaagggttttccgtggaacttttttgttgggttcaac

SEQ ID NO: 9320 - DNA, 409 bp, Glycine max
gacccacgcgtcagcccacgcgtccgtctcattgctcagccatcacagcctcgtcacaatttctaacgtcctctgcgctgctccatctaatcacagatcgcagagatcaactgcatgtactgcaaggttgtgaaagctagatagtaatgatatagctgagacgaatatcgagacacataccatagtactactacgcttttgtagtatagatatcatctaatatcgtatggtttcacgatttaataaatctcagaatctgccttggtgtgtgatggatcatagatacagataaggagatagatcggatcagatgtcagcatcagctaattcaccgtgcgcggcgtgcaagtttctgatgctaaagtgcatccatgagtgcgtgtgcgagccgtactttccgcaggatgat

SEQ ID NO: 9321 - DNA, 336 bp, Glycine max
ccggccgaccacgcgtcagccaacgcgtccgggtagacgcacggatgtatgatctaccgcaggagagcctccggcagctgttctgcacgctgccattgatggacagcgagatgtgccgcgtagtcttgaaagtcctcatgcaactgctgtcaggacatgcgttccacgaggtccacaccagcgcccatctatagatccagcgcctgcaccaccgcaatcgttatcacaccgcttggcaaatcgctctacacgtcttctactcatcgatccaattatggttcgacatcctcctcgacctcatccctgtccacgtccctatctccgtcgacgtcttcc

SEQ ID NO: 9322 - DNA, 132 bp, Glycine max
acccacgcgtcagaaaatattagtcttacatgttacaactatttctaatgaacctgcatgttgtgtatccgaagtccacaatatttaaggctagatacgatcgttttgtattgtttgtgaggttgacggtct

SEQ ID NO: 9323 - DNA, 267 bp, Glycine max
cgacccacaagtcagaaagtgttcttggtaataatgcgagctcccagacttttccgagattttcagactcggtcttgtttcatggcaaacaaatcttttggctagttatccattaacatttgcgaacagtaatattgggagatgatttttttttttcagaacaacgtgtttacatttaagttttatttgcccgttttatgcaaattcccgcattcctctaaaaaaaaaaaaaaaagaagatacaacatcaaatattactctgaacaa

SEQ ID NO: 9324 - DNA, 421 bp, Glycine max
gacccacgcgtcagctcacggagcatgcaatgcaaagacaagtgaagaattcagcgacctggttcaggggcgcccagagtcaatgatggatcatgacttggagaccgctgctttgggggcttaccaggacaagcctagaaccttccccaacatgcgcactaaaccttacacccctctgatatttcgtattttacttggtatcaatgttcgtgtcctcttcattcttttgctcctcggcttgggagctatcttttacgtcggagcttctacttctcctatcattgtctttgttatctctgtttgtattctcagcttccttgtggccatatatcttacaaagtgggtcctcgcaaaagatgaagggcctcctgaaatggttcagatatcagatgctatacgagacggagctgaaggatttttc

SEQ ID NO: 9325 - DNA, 189 bp, Glycine max
ccggctgactgtacatttaatcatagttagggttcaattctcaatcttggtccttgcagttcccaattcccaataacgttaacctaaatccccgggttcctccggaccaaccaaaaggatttcaccatcggaaaccgaaccgttcggttaagggaattaattaaccagattgaaccaattcaagccccc

SEQ ID NO: 9326 - DNA, 407 bp, Glycine max
  modified_base (234)..(234): a, c, g, t, unknown, or other
gaccacgcgtcagctaaaatataagtacgaactgttctaaacttgaaatgaaatagtgacgtctgcttctttagctgctatacctttcctcagttatcgttaaaatgctcgtatctgttgagatagtgtggttttattgggtatataccatactttgggttcttaacataacgttttgctttcggcgtatataatgggcgtagctgtggttagtgtccaagtttgaatgtgacnccgcatgaacggagagtgttttttagtttctccttttagattttgctgttgccacgtgcaatgtatgcatattgttgctgtgaagacactaaacactgggtacgtcgaactccttcagtttatcaagtatgtactttatatctgtggcattatattctctctcattcttaacg

SEQ ID NO: 9327 - DNA, 361 bp, Glycine max
gaccacgcgtcagcaaaaattcaggaattaagaacgctgggccggtggaccccaaaggaaacacaaagtattgctaggaaaagaaatccatatatcgcagccgtttatttcgggtgcttcaaccatccaacggtgcaaattctgagaagcgaatttcgtaaccgcgtcgaagacaaacgagtaacaaacgtcacgtttctctccaatctgttcaatttcccgcaacacggatttttccttcgctacgaagatatccctctctttcattctcatagttttcagttttctgccaaatcgccgatgctagaatctgagcttcacgatttatccgatgacgccgattacaccgcgtcgcagcaac

SEQ ID NO: 9328 - DNA, 430 bp, Glycine max
tccgggccgacccacgcgtcaggcaccctgtcatcaaccaaggctttggtgcaaccatcagagccattaacggtcaacttgaatgtgatggtgccaacccttccacagttcaggctcgcgttaattactacactgactactgtagacaattcggtgttgccaccggtgataatcttacttgctaaggtagcaagccacgctacctatacacatattatatagaataaattatgtatcttcttataccactcattttttcttttcaataaagaattgaaagcttgttccctcgctcaattcacttttaggaggagttttaaacgtatatatcttcattcacacttgtatgagagagattaattcttctagatttctttatgtccatgaatttgaaactcaaatataataagattacgtgtttaatatattt

SEQ ID NO: 9329 - DNA, 438 bp, Glycine max
  modified_base (409)..(409): a, c, g, t, unknown, or other
gacccacgcgtcagcccacgcgtccgcccacgcgtccgcccacgcgtccggggatctggatccatagcatagagagagagaagaagaaaatcttggcttgataattcagatttgaaagagagagaaagataaaagggcaaaatgacaacactctttgtccagaaacccataagagccttcttctcttctgctgcaaccattttattattactataaacaattactataagcaaggcggtggtttggcttttctagtaactttgaccattctcattctctcctcaaaacttcatgggaatattacaaagaaactcactgtgccaccactcatctcaacttggtaagtagggcttgtgtgtgtggttgagaaagaaactttacatgttacacgagtgagtgagatacatgnacactagagagtagagagagaaagagaga

SEQ ID NO: 9330 - DNA, 428 bp, Glycine max
gacccaaacgtcagatgcttattattacaaacaacaaataacaaatcaaaatactcaaaggatttaaaatgacagaggccgacacagatgatgttggtacgaagtgtaacttctcgttcgcattcaacaacatcaatttctcagaccgaattctcaacattgaggttatacccgaccctcatttcatccgcgcccaatcccattctctctctaccctcgctccaaatcgtaagagacgcagactctctcttatgaaagccaatgatgtcctcttgcaacctgaggaaaaattaaattgtaatttaccagatgcagaggaagttgtggcaatcactgacgcatcactttcaggtgatgaagtttctcatggcaatgattcatcattgggcatgagttggtcaaaagttcttagagttaggaccatacag

SEQ ID NO: 9331 - DNA, 423 bp, Glycine max
cgggccgacccacacgtcagggcacatggtgacgcaccgtaggccccaaacgcactgccaccacctcatcaggctgatccagctgggtcatttggcatggagcagtatttacagcacttggttcgccagcaggcggccaaccacagggggcaggtgcagacccatgagtgtctctaccagctcagcctcagtctgcagagacagggtttcgctccttttgcgtgccctactccagatcagtttagggctaaggttgcatggcccggagattggcctgaggcccaggcaggggaggcgcccacagaggctcccggcgccacggagaaggcccgtatggatgaggagacgacagatctactcgatttcttgggagggagcagagccacatgaccagaggacccccagattcatattttcttttat

SEQ ID NO: 9332 - DNA, 418 bp, Glycine max
  modified_base (347)..(347): a, c, g, t, unknown, or other
cccacgcgtcaggtaaaaaaatctctcaacaccttgagaaattttatctgttagtaatttgctactactattttacattctctttctctctacgttttattatagtcatggcatctcaagcagtttccttcaagtccttcgccgttgctcttcttgtggcgcttttcttcgccgccgccgcctccgctcaggacttgcctccggcggcggcgccgggacccgatgccggggccgccggagccgtttcgagctcggtcgccatgattggagcttccgtactgttgtcaatgctcgccatcttcaagcactgagtataatctgatggatccatcttgtgtgaagattantgattcgttctgcacactcagatctattgttgctgcttttataatacgttacgagtgatgattattaattt

SEQ ID NO: 9333 - DNA, 245 bp, Glycine max
tacggtcttaattccggggccaccacgcgtccaacagccgagtacctcaccctcgtcgcttccaagcccgacgagtacgagaagctcggctcctaagccctcatcgggctccccggcaactaagccacacgtttcaactaacccggcgagatctaaacccagtatgccatcgtcatccgcggtggggaatttggttttggggctcctcgcgcgagcacgcccgtgtcgcgctgggcgcctcgggc

SEQ ID NO: 9334 - DNA, 371 bp, Glycine max
cctgaggcagtatcagctgaatagcttgctcgataatttggatttaaagaaacctggttaaaacacttccatgttttgaacccttgtcagcgtacgatgggattgggattacggaaagtgcagaatggttggtggatgtgatggagagaagcatgaggactgaaatgttaacagcgagggcaggtgcaatgggtccaagtcactagaaaggtcttacattaaactgaagtgatttctcgattcctttatatagctttgtaaatccaaattggattatacctgatcataactgcagcgagcagaatatgtaaaagaataacatcgtgttgcattaaactgagccttgaaatttgatgccatagttgttatac

SEQ ID NO: 9335 - DNA, 433 bp, Glycine max
acgcgtccgaacaaatttcaatcttcttttcatgatttgttcatctttggtctgaattctcttctgggtattcgagattttcggaaaaggttgatttttcagtgaattgacttagttcgttggccatgtctacgtccgacactggaagtgctggatccagtgactccaatgctaccaggagacacagcaagagacgcaagtactcaaagtttactcaacaagaacttccagcatgcaaacctattctcacaccaagagcggttaattcagcattcgtgaatgtcatcattgtgttcattcccattggagttgcttcattaattgcttcacatgatgttgttgaaactaatgatacgtacgactcacactgcataccatcaaatgtgacagacaacgtggcatacactcagactcctggagaataccatgcaac

SEQ ID NO: 9336 - DNA, 357 bp, Glycine max
cgcgtccgatcgaatgccaggatcgattgcatgcaccttgcagtactcgatttcagcacttcgacgggggcgagaggcttgccggcgatagtggtggtggccgttgccgcacttgacttgacgggatcctccagctggtggacggatatcaactgcactccgctcagacatgatcgcagcttcgaccacctctcatcctctacagaatcgtcgccgctgtcgctctagttcaattagttcgagtacaatggagagtgtcggagtattgttggatcatgcacgacgtcattcacttactcactttcattgagaatgcagttcggtgttaagttgatgtcctccgtcgggatgtgcaga

SEQ ID NO: 9337 - DNA, 425 bp, Glycine max
acgcgtccagattgagaccctgatcagtcactcactcactcgaagacgatgagttcgatccgtgatggaaccaccaagccagattgtctcattgcggactaccacgactgatcccgatcatgtgaaagtcattcagtgggacgacttccagcacgatcttgcaaggttggcgagtctctcgtctgcactccacgaagccaacgagaagaagcggaatcttcagcacaagctcgagtccctaatcgaggtcaatgctgaatcattgggtcggttgaatgaacttgaggagatgcgtcaggaattggaatcaaagaaaatgttgatggagaatatgtcgatatgttctaggctggcaaaggaggaagctagcatgcaggaggagcagcttagtggtgcagtgcaatctcttttggtgtcagggggtg

SEQ ID NO: 9338 - DNA, 152 bp, Glycine max
gacccacgcgaccgacctaccagacctgcattaacttgtgatacattttggacaactgtaaacatacactcaattttacacaaacaaacaacagcagcacagaaaaaaaaaaaaaaaaaaagaaaaaaaacaaaaagggacgctctcacgaa

SEQ ID NO: 9339 - DNA, 275 bp, Glycine max
cagttgttgtagttctatgagtcatagactgccaattcaccttatgagattgctggcgacaagtctagcaaaaaggttgaataagttgaagcatgcccaataccaatacttccgagtcacataacatatactgcttttttctgagaaacacgtttcttttaaagctaacttatttcagcagcacacctctgtaactgattgtgattaataaaaaatgtattacttatttttcaaattggcgttttgcttttactggctgactgccccagtctggg

SEQ ID NO: 9340 - DNA, 435 bp, Glycine max
ccacgcgtccagaacgacttatcggttgttcgggacaaccttttagtttttggcttcgacttttttaagattctgttttctgggttgcggggtcgtaactcatccagaagaaagggggagcagagaaacaaggtcgatgagagttgagtttataaggttgcagcagtacgagtgaagtttcttcgttggtgctataaataattaaacatgtcttctgcggcagcttcaacttggatcacgtccttctcgtgttcacccaatgcaactccaaatttacctcactggctgagattcattttcctctctccgtgtcctcagagggctcttttgtctggtgttgagattcttctcctgttgactctctttgtgtttgcgctaataaagctctattcgaggttcacttccattggcaaccagaactcagagctcgacaag

SEQ ID NO: 9341 - DNA, 268 bp, Glycine max
ctattctacggcacgccgcagatgaacgctgccgcgtgcgacggcggagcagcgtcggagaaccggagacacggtggaaggttctggatcctctcgaatttattccgagccagatcgaacaagaccgaatcctcgccctcgcatcctccgccgtcatggttctcgacaatccttcacgcgcgccggcacaataagtgtcggcacgcggatcgaggattgtcgccgttgacagaggtggagaatttcaccgaattctctgctgacacag

SEQ ID NO: 9342 - DNA, 404 bp, Glycine max
cggtcgacccacgaatccaaaatttgcttcctctgtttccattcattcttcttcattttggtgtcttcttcagttctacttttttcttttgttttcggttgagttttagagctgctgagggcttccatcttcattttattttttgcgattttggtttgggttctttttctttgattggtctgattttttgtggttttatttttggaacaggctacagtaacaacgacaactttggcatagaagttgtcggaaaagttaagaagaagatagaggtcaattatgggaacctcatgtatgggctgatgaaggagtatatccaacataactgaaatgtcctgtctgatccctttttgccaaagagtgctgctgacactggaggaaaaacatctaccttatgaccccaa

SEQ ID NO: 9343 - DNA, 141 bp, Glycine max
gtccgcccacgcgtccgcccacgcgtccgcccacgcgtccggtagaactattattgttgtattaatatcactggatcctaataggtgttgggctaaaggcctagagctgtatatgcaccttatatttcaatttgcagtacc

SEQ ID NO: 9344 - DNA, 113 bp, Glycine max
acccatcgcatcaaaacacggattttctcatcgccagcatcgccttgtaagtgatcgtcaatgggttggtgcagccgattatattcactaacgggaaaaatgccaatccggtc

SEQ ID NO: 9345 - DNA, 254 bp, Glycine max
cacgatcagtttactaatgttgatgggtaacacttaattggtaacataatcaatgtagggaagccgcccaggagattacagccttggttacgcgtactgcgtcatgattcacgctactaaattgttcccaaaatactggacacaggccatcgatatcagcctgttactgggcaaaaaggattgcatgacccacataagaccgctcaaaggattgcccactttcagcacagggctgcaaccagccaatctgagca

SEQ ID NO: 9346 - DNA, 280 bp, Glycine max
acccacgcgaccgagcatacataaggtgaaaataaacatcataaaaaaaaaaaaaaaaaaaaataaaataaataaaaaaaaaaaataaaattaacacaaataaaatttataaaattaaataaaaacatcaaagctagtcaaagggctccccctccataggattctcacttcatttggcttacgtgcaaattcttgccacttccaagttctcacccaaatccaattaatcgatcttccttttcaaatttctctctcggtaaaaccctgtttttacccactt

SEQ ID NO: 9347 - DNA, 301 bp, Glycine max
ccgtccgatcccggtcgaccacgcgtcgccgcgagtacctacctcgtcccttccagcccgagagtacgagagcgtgctgctacgccctcatcggcctccccgccacctacgcccgcgttcatcgaacccgcgagatcaaaccagtcgccatcgcatcggcggtgccaacttcgttgcggctcctcccgcgagcacgcccccgtcgcgctgggcgcctccggcgccgccgcagtggtcgcggaatcgtacgctaggatcttctttcggaactccgtggccaccggcgaggtgtatccgctag

SEQ ID NO: 9348 - DNA, 321 bp, Glycine max
acccacgcgtccacggacgcgtgggtgcaagcacacaaaaaaaaaaacaagaaaaatataaataaaaaaaaaaacaaaaatgtaaacctgaaaaaagaacaaatcaatcaatcaaaatatagatttggtgtcaggggcggcccctccaaaggttcgtggctctcctactcttgcatgcaacgtcgtacgtcttcgagcctggcacgtgtatccaagtccactgggtctccttttgcactgcctgtaccggggatgcctcgcgataactcatcttatcccccttgcgccatacccccctttcaccattcggctttctgccca

SEQ ID NO: 9349 - DNA, 227 bp, Glycine max
acacgcgtcaaatatttgttgggcatcgatgtgcgaatcacaagttcagatgatcttccattgtgggggtatgttggcgagttacatcccgatgagaatggtgataatggcaagcatgtacgttacacacacaagaacatcaatgttcagtagaatgcagggtcagggtagtcatgtgaatctaactaatgactaggcaaggcctctggaagtaagaaaagctttgg

SEQ ID NO: 9350 - DNA, 59 bp, Glycine max
ttcggggccgacccacgcgtacacccacgcgtccgcccacgcgtccgcccacgcgtccg

SEQ ID NO: 9351 - DNA, 309 bp, Glycine max
attcccagtcagacccacgcgtcaacgttcacatacgaagttctgaaaaatgagtaccaaagtgtttcttattctacttatgttcatggccactaaagttttgatctcctcagaggttgcacccgatgatccatagtagactttatgacagaatagacgataagcgtggtgcatatggggtacatcattgcagatattggcgtggtggctatggcgactatggtagttagcatggtggtggttggcgtgctgtctatagacggaggcgtcttgcctatggttgtggacgtaatggctatatgaggctgg

SEQ ID NO: 9352 - DNA, 334 bp, Glycine max
acccacgcgtcaagttattcttaagctcgctgctgaatcaatcattctcggttttcgcgtactctactcgttcatcccgacatggtttgcttggcttgtttgctgcacctcattctcgtcccaatcgtcaacatcctcactcttcacttccaatttatcatggggaaaatctatcaggtttttggttgggaataaaggaaaccggagagggttcatcctgcatgtccattcaagcctccagccaacagggttagtgaattaagccaattactaatttcaattgtttacgaaaaagtttaatttttatctgctactatcaatcatacattacaaa

SEQ ID NO: 9353 - DNA, 333 bp, Glycine max
acccacgcgtccactcactcgtcagactcattctccgatcaccattctctgaagacatcggccctggatgtagcaacaacgatatcgagcatcgcgtcacctcggtgcctcgtcatactcttgggagtacacgaattctgcatgtctacattggagtttgctctgctccaggctctagctgctatgttccgtttcagaaactagttagaggacatcagtcaggcaagttcaccagattcatttcagatggactggctatttttataccggtcaccatgtgatctatcttgtaggcagtctgcagatcatatacagacttttcagttcatattt

SEQ ID NO: 9354 - DNA, 329 bp, Glycine max
cacgcgtccgaggcaaatggccgttagcattggcgttggcgccacaaaagcgatatcaatggcaatagcagcgaggcacctcggaacaaaaccttacgcagcagcagcaacaacaacggcacttgctcttctctcactccacaaacctcttttcctccctcattcctctcccttctcctctcgccgcgctttctgcgccgcgactcttcgcaccgccgataacagagtgcaacagttccgcaggaagcttagggtttccgaaatcaaagaaggcgacggcgccgacgtgttcggccgcaacctcgtcgtgcagggctgggtccgcacgc

SEQ ID NO: 9355 - DNA, 177 bp, Glycine max
acacacgcgtccagtttcacataccgtcaacaatcgcaaccgcaccgagccagcgagcgagaacaagactcattaaaaaaacgtggtgtgtcagtgttactcaatgcgcggcatcgcacgtacgtgaattcggcacgtgagtgtctattcgtcagccgagtcagagggattctcgat

SEQ ID NO: 9356 - DNA, 381 bp, Glycine max
cacgcgtccgaaaagttacccctaaaccttctgatggatcagcaaagggtggtgttgttgataaggagtggtggaagaagagtcctttagcgtgtaaagagagtgatagtggtgaatcgagtatcaatagtgacagtgggaagagttctggtagcagtagtagcaatagcagcagtagcaggagtaacagcaggcgtgagaacagtggtaggcgttgctggcctttcattcgcagacccaaaaatcgaacacaaaaaagtaagatatccttctgatgaaacaacacagtgctctgagaactacacatgttcatgatccttagaagctttatcttcataaactcctcacaagttttaccgcgagtcatttgattacaaccca

SEQ ID NO: 9357 - DNA, 387 bp, Glycine max
cacatatacacactttcaattttcggtggttcttcttctcacttctctaatcttctcccccctctgttactccccgcttctctgaatccctttctgttaatcatctgtctttcacctcgtgattccatatcgattcagactttgaaaatttttctcgaaagccaggtgttttcagaatcgagatccagtttcttatttatccttttgttaataaattattattttctttcattcagccaagatggttgtttttgatccctcaaagcttttttctttcttcttggattaaaggggttgtctattttaatcctcttccatccctttttttttatacgaaacattattatttttttttgtaatttttaagagaaacgcaagttgattttt

SEQ ID NO: 9358 - DNA, 340 bp, Glycine max
tgagttagggcatgtgtgagctgtggctttgcagggaagaatagtgtcagtagaatatacatgtcctcttcgcagggatactctctatttcacagattcatacctaagtgtcagtgcatcgcttgtcgcctaccttcactgagagacagtgacaatgacgtaggctcgattcgagtcgtggatgccgctatactacaccacatgcggcgtggtggtaggttacacactatgctccatcctcctggccatcttcaactatatggccatccccacgttcacctagccaggcctcttaacctcgctccattagctcacctccgcaaccggcgtcgacgtcttt

SEQ ID NO: 9359 - DNA, 251 bp, Glycine max
cacgcgtccgcgcacgcgtccgacaatatcaaatttacctttccctctctattactctctttcggattagagatattattagatgattcaggacatagtctcattgtagttaaattttttataaaattgaattttttgtttatatgaaccatggtcaagaacatagacgctgctagtttgagattatgtaccaatagtttagatatgatgattgactctgagcctgtgctttcactaattttaaattctga

SEQ ID NO: 9360 - DNA, 117 bp, Glycine max
cacgctccgagaagcccgtatgctccgcccgctgcacccgactcccttttcacatgtgtgtgcggcctaacagaccgaagacttaacgactttttgcaggaccacaactccgatcct

SEQ ID NO: 9361 - DNA, 161 bp, Glycine max
ccacgcgtccgcccacgcgtccgggcagcagtcctgtatgataatagttctgatggcatcaaacttggtggaaatgaagtatggcagttccgattggcttatgcaactaaatggctatgagttgttcttataatttgtccttatcatgatcgtttcatttt

SEQ ID NO: 9362 - DNA, 141 bp, Glycine max
  modified_base (6)..(6): a, c, g, t, unknown, or other
cccccntccacccacgcgtccggatcacaaggcattgggtttaaagatataaagacaaggttagccatttccggttctacttccacgagaccttcaccggaagcaacgccaccacggtcttcgtggttccgccgctccccc

SEQ ID NO: 9363 - DNA, 374 bp, Glycine max
tggatatggaagagagaaggacatggaaagacgagcttgaacaccaagcccaacttattgaccaatatgaagcaatggagaaggttcaaagagaatgggaggagaaatttagagagaataacagcacaacaccagattcatgtgatccggggaattactcagatatgactgaagattaagatgaaagcaaggttcacattccatatgctgctaaggtggtcacctcagatgctcaagagagtaaaggagaacctagaggtgtttgcttatctgaagaagaattcaaagctgaagccagaaatattatgccaaaaactcatgatgatacaaggggttatagtgaccataagagtgcaactattagcacttctgat

SEQ ID NO: 9364 - DNA, 383 bp, Glycine max
tgcatccctcaagcaatcttaggaatggatgtcagttgccaagcgaaatctgggatgggaaagactgctgtttttgttttgtctacacttcagcacgttgatcctgttcctggtcaagttgcagctcttgatctttgccacacaagagaactggcttatcatatttgccacgaatttgagaggttcagcacatatcttcctgatataaaggctgctgttttctatggtggtgtcaacatcaatgttcacaaagaattgctcaagagtgaatgctcgcacattgtcgttggaacacctgtgaggattcttgctatggctagagattgtgaccttggtttaaagaacgtgaggcatatgatactcgatgactgtgacaagatgct

SEQ ID NO: 9365 - DNA, 362 bp, Glycine max
aagcacccattagaccctttgcctgagcgactcactcccatggaatgcgatctaaacgacgccgttttccccgaagaagagctcgacgacgacgacgacgacgacgatgaaactccagaggacgaagaggactacgacgacgaaaccgaaccccctccgttcgtcctcgccgtcgtagcagtcgcgccggccgcttccagcgcctccgaagcactcgacaccacgttgatcccgatctccgccgtcgccgattcctcactgaaaccactgcacccggagctaatcgaggagaaaaaagcgctggacgattcgcggcgactgttccagcgtctgtggactgacgaggacgagatctggctctt

SEQ ID NO: 9366 - DNA, 330 bp, Glycine max
gttgtaatgtctctggtcaactcaactgtgatgcacctcttgagtgtttgatgtgttttggcgcaatgttatacttggagctcctttttctttcttctatagtggacaagatatctttcattaagaaattattcaaaataatgtatcgatttttcattattgattgtataagttggaatgttaatttactttcatgtctcttggacaattttgtacgcctgcagaattagttgacttcattcttctgggatattaatttcttctggaaactagaatgggctttaaattttggatattgtgcttgcttttactgtatccatcttctttcac

SEQ ID NO: 9367 - DNA, 382 bp, Glycine max
  modified_base (319)..(319): a, c, g, t, unknown, or other
agacaaaaaccaaacaaaatggggtcgcgttcagacacactcacaattcacacaccaacaccaccaatccccaatctctaacttttcccgagaaaattataatttccattctcttttctccctcagattcccggaaaatatagtattcacaacgttatattttggcaccgccaagctccaattcaatccgtcgtcgttttcgcgaattccgaatgcgtcgacttcgggttggagaatgagttctccgtgctcttcttgtggctgtttgttggcgttcttggatctctcttcaaaccctccacagtctcctgtccaattntaactctcttagtcagtttaactatgtatcacacaaagaaattttcaccggctagcatggtgc

SEQ ID NO: 9368 - DNA, 395 bp, Glycine max
agatcggagaaaccaaaaaaaaaaaatggaggtggacgagaagaaagcaatgatccgcgacgtggcgttacaagtcgttttcatctcgctcacgattttcagcttcctctggatgcacggcatccctcaaaacctctacgccaagctccgccaccgtcccccgaacccacgggccgtgcaagccaagcgccatttcgtcaaaggcgcgcagctcctcgcccaagccagaagatccaaaagcgcttcctccgcaacttccctcgccaaacaagccctagccgaggccgagaaggccatcgcgctcgaccccaaggacgccgcctcgcacctcctcaagtccatggcgctcgacctccagggcttccgcaccaacgcgctcgatgcgctcgacgccg

SEQ ID NO: 9369 - DNA, 372 bp, Glycine max
aattgctgaaagtggttctgatggggtttgtgaacaagacatccaatcatacagctacatgttgctgacagctgggggtcagcttgcgaatattctggagatgcaatcgctaaatgagttgggcttttctaaaagatacgtgagatgtttgcaaatatccgaggttgtcaatatcatgaaagacctaatatatatctgtgcagatcacaaaattggtgccattgacagtctgaaacattttcctcgtctagcaacaacctctaatgtccagatgcataagatgcaagaaatggaacagctagcaaatgttcaacgtctgccaactgatctaaacacactcaatagactaatggcactgaattctggattgaa

SEQ ID NO: 9370 - DNA, 361 bp, Glycine max
  modified_base (333)..(333): a, c, g, t, unknown, or other
gaatcttttgcctttttcctttggtcgattatcctaattgaatgctctctcccgttaatcaccatcaattctgcgttatcatcatcaattctgctttattagctctatttttatctctctctttttcaatttctttttaaaaattctctctcttcctgtgaactttatgtggggtgggacatttatgacttattatgagggaagaaagacatcgtcaactgagcaaaaaaagtggggatttggagataattagaaaagataacaataatgaactcggacacgtgctgctatactttacttttgataaagtttcttggtaggaaccgtggggtnttgtttttgttcatcgtgcttcttaatg

SEQ ID NO: 9371 - DNA, 375 bp, Glycine max
tgttgaaatgctactaagcagcatatagaagggaagtggagtaatttagtactaaagaaaattatttcaagtgaaattcagccagtgaaataaacaaaggtactgcaacgtttctaaatacactgttcatgtatccctcacgagttgaaaaaaagcaacattgcttctcaaatttaagacatctcaatctttatggaacaaagttaaagagcacaaatcatcgtggttccaagctcgaaaaaagaagactagtatttacaacacgcgtgtctaatccgtgatttataggacaaccaattcttcgcaaggcaacacactgtttggattatagctctaattccagtccacatgcagcaaattgggtcattcagacaa

SEQ ID NO: 9372 - DNA, 281 bp, Glycine max
cacgctccggtatgcaatattttatagagtttaaagcgatacctgttagctgcgatagccattcataagaaactggcagacaaatacacttacatccatctaagaaccattaatctgttcagaaaggttaacctggcatacacaattatatacgcaaagacagataatgtaggaactctaccattcaaatgtaatattgataaaatcacacacatatgatactactcaagtcttggaactttaatctgacctagcgcatataaagaagactctgtcatcac

SEQ ID NO: 9373 - DNA, 395 bp, Glycine max
taaagagcatggagcatctcattcgactcctgtctccaacctcttataattccaattcttcttcttctcctcttctcaataccaatcccaacaacctccactgctcccaaatcaccgacttcaccgtctccaacttcaaacaagtcatcaaccttctcaaccgcaccggccacgcccgcttccgccgctctccaccccaagcccaagcccaagcccaaacccaaacccaaacccaaacaagtcttcagcctcaaccagaaacccaacaagggttcagtttagatttcgtgaagcccaccattctaaactcaaaacccagcaacaaagacgagactttgaccctctccaacacctcctcctactccttcacgtcctacgtcaccaacgacgccagc

SEQ ID NO: 9374 - DNA, 171 bp, Glycine max
aattgcattggcaagaagacaggggggatttctttgtggttcttgggcttgaattttcagcaatgttggttactggtggagtttgtgttacaagagtgttaactgatccacttgcaccttagtcatttggggcatgggtgcagaatgttgctaacaatgacactggtgcaa

SEQ ID NO: 9375 - DNA, 290 bp, Glycine max
cgcgtccgttattcacgcctgtccttgtggtggtgctggttacaagatagggtttgcactttttaatcagaaactagccatgaccaggtacagaaaactactgtgttagttaaaaaacattcatcgattattagcaactttttcagtagtagtgtagccttgtaggtgaactgtgtgttaggattttgaagtttgattaatagccgtgtgtagaaactagaaaggttagtgattgttgtagaatcaatggtaggtgttgatctgagtaatatgaatatgaatcgatatag

SEQ ID NO: 9376 - DNA, 253 bp, Glycine max
gtccgattcccgctcgaccaccgtccgggcctcttgttctccaactacacaaggccgacacgaaaaacgaagaaaagccgtgccagaaccacgacacgcaagttatggcaaaaatcgcgattctcctggcgggatcctccgccaccacaaccaaaactgctgtcgccggagatcttgtctcttcgacatcaccacgggtagagggggagggaggaaggaggggggagggaagaatagagaccgtatgagcgac

SEQ ID NO: 9377 - DNA, 398 bp, Glycine max
aacatggacaaggaagttaccaataaagtacggagtttttggatcaaaccgaatccgacaagcagagtaagaagactaacaacaacaacaagaaacaacaacaagggcaacctagttgggtgttcgaagacgaggtggacgatgatttggtttcggagttcaaagatctaccaatgaagttccaacaaacactaatccccgacctggaacgaatctccacaacctcaaaagcctacataacaaaagccaacaaagagatcacgagagggttcaaaccctacgttggcaacaagtacgcacccaccatcaccactttactctcttgcgcattcgctttgatccctttgcttttagtctcactcctcttcaacaaaatcaaaacctatttctcactccaa

SEQ ID NO: 9378 - DNA, 382 bp, Glycine max
gtgaaatccttttccaaccacaaatagaatgtgagccacagtgagcttcaaattggtgatattcttccctggccttttacaatacaattggttttaaggtaaaaaacaacaaaaaaaaagaacaacaaaaaaaaaaaaaaaaaaaactaaaaaaaaaaaaaaaaaaaaaaaaaaaaaaaacaaaaaaaaaaggggcggcctcttaagaggacccatccttacatcccctggcttgcaacgtaataccttttttatagggtcccctaattcaaataacggggccgtatgttaacaacgccgtactgggaaaacccttggcttcccccaattaaatgccctagaagaaaatccccttttcccaaagggggtaattcccaaaaag

SEQ ID NO: 9379 - DNA, 243 bp, Glycine max
ctaagttctgaaaatgagttccaaggttttgcttgttctacttatgttcttggccactatacttctgatctcctctgaggttggcacccgatgatgcattacgagaattttgacaaaattaaatgggaagcctagtgcagaatggggtaaatgaaaccaagttttgccgtggcggctatggtggcggctatggtggtggtattggaggttggcgagaaggatatgaatgatgtcatgtattgt

SEQ ID NO: 9380 - DNA, 144 bp, Glycine max
cgcaaattcctcgtgacagatctaatctaatcaggcttttgggggtgtttcagacatgggatgcatatgggagctgtggttgtgttggatgctataaagagcctacacggagtgctactgtggatgggccatcaaaagggttgg

SEQ ID NO: 9381 - DNA, 398 bp, Glycine max
ggaatctcctacgacccaattgaagtcagaagattctgctcaaaataataatagtctggtgagatcacaaggattaccagcagcatcggtttcaatgcagtacagagggaatgaaagtgacttcaaccattacaacaaggtaggtggttctgattccatgttcctggatgttgaaaccgggaatgtacattctctgcaattgaatcatccaaacataacgactgagaaaagatggagtggtgttccagggtcaatcccatctgctatgttcggcatggcaccatccatgcaagcaatgtctccatttgctaaaatggatggcggtcggtctattgcccatacaaacgaaggaagaatgattcaacaagaccaggaatggagccggtaatgatgcaaca

SEQ ID NO: 9382 - DNA, 233 bp, Glycine max
aagtatgtgtcaggaggaagctataaacacagtcgcttacatggcacgaagaagggtgtgaaaggttgcatcaaactctcatggtctgacatgtaccaatccgccaattgacatcgcacaggcatgtgcggattctcgtaatcgctacatagacatgcgtggaatatagccacgatttcatctgaagacgttcttgctcacagctaagagatcttcaatgtatgtgataatga

SEQ ID NO: 9383 - DNA, 384 bp, Glycine max
ggctttccaaggattggaaggtttctgtgaaagaggctaagaaaacagttgacctttggtacaatgatagaaaagaggttttgcaatggcaagaggagcgtaaaaaggaagctcgcgtgttacattgtgtttacacattgctagggcgagctcgacggttccctttgatggcccaagctaacacctatcagaaaggtcacattgagcgagctgctattaatactccagtgcagggtagtgcagctgatgttgccatgtgtgctatgttgcaaatttccaagaataaacggttgaatgagcttgtgtggaagttacttctacaggttcatgatgaagtcatatcggaaggaccaacggtattcggcttaagttgcgaaatccata

SEQ ID NO: 9384 - DNA, 168 bp, Glycine max
gtcgaccacctccgccacctccgctttgaccttcagaggagctggctcacttactcagggggtcctgtgtactggagtcatattgccaggagggggaccgatttcatctgttggattattattggttgcggctcatctgaagggctctgaaatcatgctacaaggatt

SEQ ID NO: 9385 - DNA, 243 bp, Glycine max
ataatttgtaaaaactatggctagcgatggcggcgaagagtttaggctagtgtcaccggcgttcagcaacgaggggaagttacctcggaactacactgacgagggccagggtgcgaagaagaacatatcccctccgttggagtggtacaacctgccggaggggaccaagaccctcgccctcgtcgtggaggatatcgatggatccgattcagatgggcccatcatgccatggacccactgggt

SEQ ID NO: 9386 - DNA, 386 bp, Glycine max
agagcagccgtggcatgttgtctctgctacatgtatgaaaaacaatacaagaatgccaaaaattgaggcttcactgaataatactgatttacattttactcctaagaagaaagatcaggaggaattctatttttcagatagtcattttatggattgtgatatttccaatttcttggtctctgaacaaggtaaaatgacatcatctgatctagaatcacatttgatgggagcagagaaaactgggccttggtggcgcactgctggaaaagatgagttggcttccttagttgctcggaagtcacttgagcatattgtgaattgtgatctccctcatccccagactaagcatgttagtcccaaaccccccttccccgaagggggttgac

SEQ ID NO: 9387 - DNA, 176 bp, Glycine max
cacgcgtccgcattttctgcgggtacacgcactttctctatctacgtattcaaatttgaagtctagcggggacaatcgtcggcctttaggattaattaccatgtcaggggcacgggaactttttctagccgatagggattagggtgaagtcaggacgaatatgagggatttggaga

SEQ ID NO: 9388 - DNA, 209 bp, Glycine max
cgctcgaccacgctccgacagaacagcaaagaagatttagacgtttagctcttatacgtcagcaaagggaggatgctgctaaaaagcgagaagaagagaaagctacgaaagagcggaagaaggctgaagcgcgcaagtgaatttcctggaaaatgtcatgttgccgaatttactccatattagtaggaggatatgtactcttactacac

SEQ ID NO: 9389 - DNA, 296 bp, Glycine max
tgcactaactgagtcaggtccatctccgtcgtcgttcatcacactgttgcagctgttagtttccttcagtgtggcggacacttacgttttggccacaccgaaacgcatccgttccgatgacctggactgcagcgacgcgattaaactgctgatgcaccatggctacgcaatctctgcagtcgcgctacctaccacacagtcacagaacacatggctacgcgatctgtgaaattccgtaatgtggcggataccctaatgaagtattgttacgcaatccgtgagtttctgtgacttct

SEQ ID NO: 9390 - DNA, 189 bp, Glycine max
agaaaagagacacagggcaccgttttgagtaaatgagattcagtggaacacccagcagcttatacgcaacgcaacattattatctacagtttatgattcgtcacgtaagacagaagaaggtgttagggtgtcacctgagaacaaaatgttggggatgcttctctcttctcaaataaaaaccctattctt

SEQ ID NO: 9391 - DNA, 198 bp, Glycine max
  modified_base (51)..(51): a, c, g, t, unknown, or other
tcatttcttggttttgtgtactttcactttaatttcgtttactttcagttntcttttctttcggtttttaacgtgctttaaccatttatttgagccgttttctcgtctaataaatgataaaatgaatttcaaccgatcatttggggttgtaatctcgtttaatcactgttaaaacgaaatctaaccgatcattcacgc

SEQ ID NO: 9392 - DNA, 384 bp, Glycine max
taaatactaacaaataaaaacatagataatttctttgctgagaatgaacaacttgcattttgccctgccattgtgggtcctggtgtatactactcagatgataagatgcttcagaccaggatattctcttatgctgattcacaaaggcacagacttggaccaaactatctgcaacttcctgctaatgctcccaagtgtgctcaccacaataatcatcatgaaggtttcatgaatttcattcacagggatgaggaggtaagttaatgtttaatttcttatattttcttatttgttttctgtttgaaaatctggttgccttgttaactacttagtgctgttagattattcatgcacatgctgattgggtaatattgctgcctattc

SEQ ID NO: 9393 - DNA, 406 bp, Glycine max
gcgacgtcgttttcagacacggcttcgatagtgatacaacgattcaatagttgacaagtggttttggtttgatatatagatgtggtgcgcgtcgtgttgttcgaaggaagtgaagtaaagactaaagagagttgtggtgtggtggtggttgtcgtttttgaaatggcagcgtcgtcgtcagagaagcaagtggtggtgataggcatagacgacagcgagcagagcacgtacgcgttgaattgggctctggataactttttcccgagcccaattttcaagctcgttctcatccactccaggcccaccggcacctacgctgtgggcttcgccggccctgtgtttgcaggagccgctgaggtcttgcctattgtagattccgatttgagaaagattggcgccagagtcc

SEQ ID NO: 9394 - DNA, 226 bp, Glycine max
ttttccttggaaatgtcaaggctttttacatatgatgatgtggtggagagagtagcccaacaacttggtttggatgatccgtccaaaatacggcttacaccacacaactgctactatcaacagaccaaaccccagcctatcaaataccgaggggtagaacatttgtctgatatgttagttcattacaatcagacatcggatatactatactatgaagtacttgaca

SEQ ID NO: 9395 - DNA, 462 bp, Glycine max
gacccaagcgtgcgcaaaaccctaactctccctacctttgattttgaagatgaaagggaagaagaacaccatgaccaaaaacgacgttgaagacgacggagctccggttccttcaccaacagtatccgattccgactctgattacgaggactcttcagcagatgacgacgacaaatcttctgactcgctggattctcaatctgaatcggaattagaagatgcttcacctgagaatggtggctccggcgatgtagaatctgcagaagatgaggacactgtcaatgatgaagacggtggaagtgagagctctgatctccatcaggaaggagctgagagtgattcctccgaggatgaggtggctcctcgaaacaccattggagatgtgccattgaagtggtatgaggatgagcctcatattggatacgacattcaaggcaaaaaggataagaaaaagggaaagca

SEQ ID NO: 9396 - DNA, 390 bp, Glycine max
gaattggaaatctaggatgctatgcttatcacttgcagtgcttactgaggctctcagacgatctacgtgacacacacactgattgagcgttatccctaaaatgatgtgttgcaacatatttagtacggtgtggtgacacagattgctactgaggacagagttgacagagccaattagatctgcataccttaaacaccaacttcaacatcacctaaatgcggtggtgagattatcagattcatcatctctagtctatttgatcaaatgcttaaataccgagacgatggcctatgatctgaccatggatactacagatatcatgattgcattgaccctggaggatctttcaatagctttggcacatctgcagatgacaacactcataggaac

SEQ ID NO: 9397 - DNA, 244 bp, Glycine max
aaagaaagcactgtatgcaaatacttagcgagcgaaatcttctggtaacaagcttttgtgctacttttaatgacagcgtatcacagctatgatacaggaacatttcatcggaagatgctagctcattgtcgagtacaactgtgtcatacacaactacttatacgtggacactgaatcctacctcgcatcggaaacatgcacagcacagtcagacttaacgtcaggaatcccaacactgacacat

SEQ ID NO: 9398 - DNA, 322 bp, Glycine max
aaaaaaaaggggtaaaatattgggtacaaaaagaaaatgaaaaaaaaaatttggatttttatttggaggggaaaaaataattaaaaataaaaaaaaaaaaattttttataataatgtttttattttaaaaaaaataacataattggaaaaataactctttatttaaaaacttttatattaatgactaataaaatatttttgaagggagtttagggtaaaaattttttaatcaatttttggaaccctataaaaaattccatgtttggggacccaaacccgaaccttttcacattgaaaatcaagggtgacgatggattcttta

SEQ ID NO: 9399 - DNA, 286 bp, Glycine max
tccaatgaccctcacgggcttgctccgcgacgtcgccgccaaattcccttcccgccgcgccatctccgtcgccggaaaattcgacctcacccactcccgcctccatcaactggttgaatccgccgccgcccgcttagtcgccgccggaatcaaacccggcgacgtcatcgctctcaccttccccaataccgtcgagtttgttgtcttgtttctagccgtcattcgagtgcgcgccacagccgcgccgttaaacgcggcttacacagccgaagagtttgagttttac

SEQ ID NO: 9400 - DNA, 75 bp, Glycine max
ttttaaaggatccaagtttacttacgcttgcttgcaacttcatagcttttttatagtgtaacttaaattcaatta

SEQ ID NO: 9401 - DNA, 281 bp, Glycine max
acctaccgttcagatcaatatgcaaaatattctatcatgtctctggagaaaatgtacaaaccgaaggtttttgtggaaccagaactaaggatacctttggaactggttgaacttaatggttataaatcttccaaggtcaaaacaacccttggttcaaaagatgaagaaatggtgccagaagattaaactgctacttctatttaaaaagatgggatttaaagaaaggataaggcttctggttaaggggtaacatgggttgtgaaaacacaatttatttgttc

SEQ ID NO: 9402 - DNA, 396 bp, Glycine max
ccccttttcttttcctttttctatctataaaacctcgtccaaaccaccaccttagcccgaccttctttctgaaaatcactcacacccaaaagagagagagaatcgaaacaccccgtaagcagcacggcacaatcgcaacgcaagagattaataatcaatttgcatcgatcgatcgatcgttggttaggtttttgttttgggggaatatgggcgagttgactcaggcggaggtgtactcgcctcggactcagcaagtgtggagggcactgttgagttggttggccttcttctttcagatcttcttccagattataagagccttaggtcactaccctctactctctttctcttctaattcttcttcttcttcaaacgcttcttcctcttcctcttcct

SEQ ID NO: 9403 - DNA, 247 bp, Glycine max
  modified_base (75)..(75): a, c, g, t, unknown, or other
ctcactgttaattcattaataataataataccaaatttgttggttctttgattcacacttgacacatattggctntctcttcttcctacatataaaaaggaagaagcaaagcatctttttttcagctttcacgcctctgtcctcttattttcacttgtcaactctctctattctccaagccataattggcgacccaccatggcaccagatactactgccttaagttatttgttgaattggaggttct

SEQ ID NO: 9404 - DNA, 276 bp, Glycine max
gtccgaatcccggtcgcccaaccttccttgaggtatttcacttctgcttccaatatttccttcctgtgaaacgacacagttggcgtatatcggcgccttagatcctctcacgtgacataactagaatgtctccggcagttttatcgtcaataaaccctgactgtcattgacatggtaatcatctcatgagacgaccaactttgtatattcatccgtgtggatctaaacgatctttgctatcaaggccaacatcacaagttgagaattgtaaattat

SEQ ID NO: 9405 - DNA, 181 bp, Glycine max
ttacttcttccactaaattctcacatttattagtcataccaaatctaattatatcaaatactaattcttttcatactttcaacatttttttcactacatcttttaatcatatatattattctactacctctcttatctttcttctccttattcctcaacttcatctaccaacataacttat

SEQ ID NO: 9406 - DNA, 291 bp, Glycine max
tccctgtctacccactcgtcctgaataatcatgcttgggaatgacagaatgacaatatattagcatacgtgcatttgaaagataggttcaatcattcggtttgatagcattcccattctatcactaaaattaatttcacttcccttatcttaaaaacccctcttacttcctaaaacctattcttaacataacttaatctatttctattataaaacacttaacccatttaatctaatacacaatatccatatacatattatcttatcacatagattttcatcctaaatataa

SEQ ID NO: 9407 - DNA, 87 bp, Glycine max
gtaccggtctcggaatttcggagctacgcctacgcataaaaagaaaaaaaaaaaaaaagcacaaaaattaaaaaaaaaagggccgcc

SEQ ID NO: 9408 - DNA, 295 bp, Glycine max
tattcctacaatattgtatacttatctgaaattcaaaaccaatatctgtagtttctaaccaaacatgttatgagctactacatgcattattataatctgcatgtaaccattcacaatgtactatcataataaaccatggtacaatacctaactctaaatatgatatactgtatcctccagttcaacatttatgatttgaacctcatatacatatagtattcataacaacatacacaccatctcatcctttgacattatcatgcgtactaagtcacttgatcttggaatgaatcca

SEQ ID NO: 9409 - DNA, 382 bp, Glycine max
tccgaattcccggctttccaagacatccactggaactcaagttactacctcaggtagtggtggtattataagtgggagaagcagggcggtgtgcatggagctggtgctcctgttcgtcgcaaaccttggttttagtgctgagcccacacctcaaatcccttcacctgttaaagctgtttctgccataccctctgagaagccacaacctgcactgcaaaattgaatattgatgaacttcagcgtaaaactgtttctctactggaagaatatttcagtgtcaggcttttggacgagtcattacagtgtgtggaggaactaattgctccagcttattaccctgagtttgtcatggaagccattctccttgcactagattagagtc

SEQ ID NO: 9410 - DNA, 261 bp, Glycine max
gaaaagggaacccaaaccaaaaccctaaccctaacggaaagatggcggaccacttgtcatgcatattcgggacggagaaggacagggtgaactgtccgctctactacaagatcgacacgctcattcacgtctaccagttctttctttaaaatcgatgcctacgactttcccaacatctgctcctatccactctttaaagtacaacaaccctgcatatctcacgtactcactaaacttatgtctctcatgtttttccatcta

SEQ ID NO: 9411 - DNA, 78 bp, Glycine max
tccctctctacccactcttcctcccactcatcctcccactcttactaattttaaacaactaaatcaaaataaataaac

SEQ ID NO: 9412 - DNA, 384 bp, Glycine max
tgagaaggtaaaatgttggaatggctataactgtagcctcttgcactgttgcacataccaattacatccaaaaaaaaagagaaagaaatagaatatagatggcaggaatttgaaaaatggaatcaggggtggtggtcaatcttgaaagagggtaaataacccggcatgtaaagattgacggagaacaaacgacaaagggacattttagtagagctcatataatcctgtgatgactaatgggacctttggcgggccagggttatcctcgaactattattatcttatatccctttctcactctaagatacatgacacgcaagaattaggctacggttgccttttccttctggtcaccaaaaatgcgttgccggaagtcagaaacca

SEQ ID NO: 9413 - DNA, 408 bp, Glycine max
agtttcaatttgcacttaatggtaacaagttttatgacaagctgttcagtttcaaacttttaacctaaagcttgagagattataacttctttaagaaagaatagatttcaaataacttgtttcttttgtgtgtgttttgaccatcctatggaaagaccttccaaagaaaatacacattggaagttaaaattgtttaaattaatatgtgaccacaattttatttccatgttgagttgggttgcttctggtaaaaggttttgtttatcatttggcagagacaggttaaacattttgtactttaattttttttgtttttatatttcttttgagtttttggttgataatgcatgtttcactgatttgtttggactttggaatctattaatatacaggtacaaggcagagatc

SEQ ID NO: 9414 - DNA, 288 bp, Glycine max
ttaaatttcttgtcttcgtttatggtctggtttttattttccttttggcttgattttgttacccttttatttttcatcttcttccttaattcccattagaaaaagaaaaaggaaataaagcaggaaggtcagcagtggaagtgaaagaccaacctaatagttcaaagcagcagaaacccaaactctcaaaagctgaaagacgtgcactccaagaatctcaacgggctgcaaaggctgctgcaaaaggtgtacgacgtcaggcatctggaactgtggctacaatgaatg

SEQ ID NO: 9415 - DNA, 189 bp, Glycine max
ttcccggtcgacccctcgtccgcccactcgtccgcccactcgtccacccacgcgtccgcttccctcactaataaggggagtgattttccataatttcgctaaaaatctacttcatacgacttctaaatgtttaatcctatcatagaatacatattctgatcactctgaatacaatatttccttctcata

SEQ ID NO: 9416 - DNA, 303 bp, Glycine max
cccaattccacctggacccacgcatcctctgactcataagctcacaaataaactatcatacatccaaagaccatcactgactcgtcatcttacaaaccctgaatctaaccataatatccatgaaccttacgaatctaatcataacattcctcatcctaaatacaaaactaaccctactacttccaaaacaaccatactgaatcatcccaaagcctcacaatctgctctccaaagcaaggattttctttatcataccaatagtgtcaaacattcatcatctactactacttccaataattcttc

SEQ ID NO: 9417 - DNA, 406 bp, Glycine max
accgttcgcattcccactcaacccacgcgtccatatcacaatcaaacctcattaaattgacaccaaacattttcatcatcaaccaggttgtattgctcagaaattatacaatccactctaaaacccaaacttacacatccctatcaataataatctcaacccatactcgactcttatgtactagttaataccttcaaacacatcatacacatttctatatacatcatttactcatacacttcatacaaaccataccaccctctactcacatttttactaggtcatcttatatgcccaaactacagcttgcattgaaatttatcatatctctcttgctctaatttctctgcttcatattcatcatttatcaataacttatgcctcaaacacagttatacaaatcttt

SEQ ID NO: 9418 - DNA, 132 bp, Glycine max
cattcaatcacacactaatttctaacactttttatccaaaataatcattattctactaatagccatttccactatactttttaactctaattaaaattcaatccataattcataccatatttatctcataac

SEQ ID NO: 9419 - DNA, 411 bp, Glycine max
cgcgtcacgcgtgacgagaatgcgtacttgccaagcactctgtcgctcccaccacagaagacgacaacgtctgcaccaaggccgtcgccgcatcacacggtttcatatccgttatagggcggcggcgcgtgatggaggatgcagtgaacgtggttaccggtttggtggctgcggaacaacactgtggcggttactatttcttcgcggtctacgacggccactgatggaccttggtggccaacgcttgccgcgacaggctgcacttgttgctggcggaggaagtagtgagggggaccgcatcatacatagggctggattgttgccaggtgatgtgttcctgtttcatgaagatggacaagggaattggtgaggagaacgatgatggcggcggaaacaccatgggttccactg

SEQ ID NO: 9420 - DNA, 429 bp, Glycine max
gacccgcgcgtacgcatgcaaatttcaaaacaaggaaatggactcactacttcccaagtcaatctactgaggcgtcagaagttacttgagaaggcggcgctaccggcgtctccacggcggcaccaccgtcgttagaaggaagatggcgatcatccgcttgagagggccacgtaggtattggaggatcagagcagttccaaggcttagatgggtgatgagatcaccattgacgattttgacaaagctcaagaatgcttatatgaactttatgttgaaactgtcagggaacgtatgtgctatgaacagtgataacatctttgaagtgaaacgtgattccaaaggcttcgcaagtgtctaagggctattcccgtgatgaatttgatgccaggctcaattttgagattccttacaccttgcttgcttcctatg

SEQ ID NO: 9421 - DNA, 253 bp, Glycine max
  modified_base (1)..(1): a, c, g, t, unknown, or other
ntaaatcataatgcataatagagggcatttcataaataaggtttcaacaagccatttatggattccaaaggccggttccattaaaattaatggtattaaaccaaccaggggaaaaaaggaaaagagattccaaatccggttttcacagagaccagaagagacacgccacttgataagtgtcacacaagatttcacaagagaaagggacatttcttttcaactatatactaaagtgactgatgagcatatgagg

SEQ ID NO: 9422 - DNA, 256 bp, Glycine max
ctacacctatcatgtctagagaatactgtcatattgcacaaaactttaacttctcctactctactcaaatctaattattagctaactcacatcaaaaatttacctcccaatgacaatagacattatatatattcaatgcaatcacaatcttctgttcaacatttacagaatcattatatctaacttaatcaacaccaattcatatactgcctctaatcatacatcatgttaccttctcaacttacatatgtctgat

SEQ ID NO: 9423 - DNA, 398 bp, Glycine max
  modified_base (355)..(355): a, c, g, t, unknown, or other
  modified_base (363)..(363): a, c, g, t, unknown, or other
gttggtgcaaagcatccttcggttcaatttctctctctcagcgctttctgcaatcgaacctttcatctccaaagggatccacaggccgaaggagaaatggggctgacattcacaaagcttttcagtcggcttttcgcgaagaaggaaatgcgaattctgatggttggtcttgatgctgctggtaagaccactatcctgtacaagctcaagctcggagagatcgttaccacaattcctaccatcgggttcaatgttgagactgtggaatacaagaacattagcttcactgtttgggatgttggtggccaggacaagattcgtcccttgtggaggcactacttccagaacacccagngtcttatntttgttgtagacagcaatgatagggacagagttgt

SEQ ID NO: 9424 - DNA, 442 bp, Glycine max
ccggatcgaccgatgcgtccgtacagagcattttccaacacgattacacgaccgaatcaaaccctctctttctctccgaagctgcgtttaatatcttactcgccttagattgttcttctctttcattatactgttctcttttcgatttgagggaacagtacaagagtgtgaggatcggttaacccaactgcacaggtagtcactaaaataatggagtctcacgatgagactggatgccaggctcctgaacgccccattctttgcattaataattgtggcttctttggaagagcagctaccatgaacatgtgttccaagtgttacaaggacatgctgttgaagcaggagcaggacaattttgcagcatcgtcggttgaaaacattgtgaatggcagttccaatggcaatggggctgtgactactggtgctgttgatgtacaag

SEQ ID NO: 9425 - DNA, 264 bp, Glycine max
cctcatcaaatctcttccttctctgtggtgattttcaaagttcctaactttgctaacccgagatctggtaaagcgaactgaactagatgagggtgctgtacgcgctgatgctgcaactgcaaggcatgccgacggtatgaccgaaaagcgattgggtccacattcgcgacgggtggaacgactacctgaaacacgagtccgcgcggatataccaggtggttgacaactacccttacatcgacgtggacactgagctagcgggga

SEQ ID NO: 9426 - DNA, 115 bp, Glycine max
gggaaaggcctttgaagggttggaggaaaagaaggctgaacctggccaaggcaggcaccggggaatgggtttccaaggaaaaccttggtttcctaatggaacctttggctaaacc

SEQ ID NO: 9427 - DNA, 369 bp, Glycine max
  modified_base (167)..(167): a, c, g, t, unknown, or other
ttccggaggcctccaggaccacccagtccacgtccctggccgccatcgccgacgtcgaaaacgcggccgacaacgcccccttcgactcctccgaggatgacctcttcggcgaaatcgacaaagctttagctctcaagcgcaaagaattcgtctcccaaggccttctncaacccaatccccccaagcaggaccaactccccgtcgccgacgtcgacgagctccaaccggacgagctcggcgacttggagaaatcgaacgcctcagggactcaccggtgacggtaacggaagctcaacccattcttcggttggattccattttgaccggtattggaaaaggaagggtaggaatggagaaagggaatttaag

SEQ ID NO: 9428 - DNA, 469 bp, Glycine max
  modified_base (388)..(388): a, c, g, t, unknown, or other
  modified_base (453)..(453): a, c, g, t, unknown, or other
  modified_base (455)..(455): a, c, g, t, unknown, or other
tcccggttggaccaagccttccgaatttaaagtaattcaatggctaacactgcaagtcttgggtcctaagcttccactttccgaatgataaactttcctcttctggcaaacgctatcggatgcaatggaccatgcagaaccctcaacgactgcgacggccaactcatttgcatcaacggaaggtgcaacgacgaccgcgacgtcggaacccacatctgcggcggcggaatgccgccaaatccgccaccaagcggcggaagctgccagtcctcgggaaccctaaattgcggcggaaaatcgtatcctcagtaccgttgctctccgccggtaacttcctcgacgccggcgatcctgacgctgaacgacttcagcgaaagccgcgaccgangggacccgtcgcagtgcgacgagaagttccataacaacacggagcgtgtggtggcactcttcacngngtggttcaacggca

SEQ ID NO: 9429 - DNA, 343 bp, Glycine max
  modified_base (245)..(245): a, c, g, t, unknown, or other
  modified_base (287)..(288): a, c, g, t, unknown, or other
cccggtccgaccaagccttccggccaaaagttaccttttgaattttaacattgattgattgcgaactatttgctcagcttctgcatgtaatggaccaatggtattaatcttgtggcatgggtaaaaattgtaaatttcttataatatctaaatcacccgaaaagtaccaagaatttagtccattagcctttgctgctattatgcagatggatactgtttcaatgtttcacgtacaaaaacagaanaataaaaatggttaacagtgtctataacaaaaaaaaagcttnnactcaaaaataacatgcaaatctttgtcaagactttgactgacaagaccatcacc

SEQ ID NO: 9430 - DNA, 101 bp, Glycine max
tgaaccttggttaattccttaccctttaaggatggccagagccttaaattttaaggattttccatatcaaaccgtttaaaaaaaccggttcagtaaaattt

SEQ ID NO: 9431 - DNA, 254 bp, Glycine max
tttctattccaaacttgttccaaacttcaaaacatctctctttcgcactttccaacacttccccctctggccggcaacgtcgtttggcctgataacaccccaaaccccaccgtccaatacaccccaggggactccgtttcacttgtggttgctgaatccgaagctgatttcaaccacgtgttagataactcacctcacgaagcatcagagttacgttgtttagtaccccacttggattcatcggattctcatgc

SEQ ID NO: 9432 - DNA, 307 bp, Glycine max
acaacgaccaatccacctacctcgccttcatattctacaattactactagaactgctactacaccttcgactacttctaacattaccttttaatcgaaatcatcaatacttatactctcataccccaaacattctattcctaaagcattctgcatccatatcttcacattctctacaaactctttctcttcgacttacacaacctttaacctaactaccttacataattctatctaatccatctcctccaattacttatctctgacattcacgcaatctcatccctttcatatggttaattctattt

SEQ ID NO: 9433 - DNA, 329 bp, Glycine max
acactaacacaaagacatggaactaagcaccatgttgtgcttgagtgcttgcggcgatcttcattgtgctcttcatggcactcatcaaaccttattagtgctacagacgccgtgacttgccactctcacatggctccatgggctggacttacatacgagaaacctttcaaatgtattctcaagatccaaatggcgtctttgccatcaacatacaacggtgcagatctttcactttcatgaacgacttcatgatggacaaacacacgaatctcacttacacacatcatgttcagttgcgccatctacgattggctctatgttcaagtccc

SEQ ID NO: 9434 - DNA, 269 bp, Glycine max
tccatagacgatggctaatttgaacttgctggacactctacagcaagtggtacatcatcattatccaagctaaaggttagagcgtgaatctgtagcatgtgggaaagggcttgagccatatcaaagatgcatatctgatgtgacagctactgatagagatgagcaatgtatacatcgtttcttgtagcttatacctcactggattcttgcttgaaaaagtgttcactttgagatgattagctgtaatggatgccttggttgctgctgga

SEQ ID NO: 9435 - DNA, 178 bp, Glycine max
caagcttgttgagaaatatgctgaaatttttagcaagtcaagggctgttgactacagcgatgggagtattaaaacttttggggttctgaaaaactgtcgcctgaactaacaattttaaaggatcgaattgctctttctacagaacctgagaaagacttcaaaactactgcttttgaag

SEQ ID NO: 9436 - DNA, 235 bp, Glycine max
ggagaaagatttctgggaagatccacgaacacgattcctcgtctttcgtcggattccgaacacgacaaaaccagcgccactgattccttcaggtctaatgttttcaggcttttcggcagagaaaaagcccattcatcatgttcttggcggtggaaaaaccggctgatgtttttctatggagaaacaagaagatatccgcatcgacactcggagttgcgaccgctatatgggttct

SEQ ID NO: 9437 - DNA, 310 bp, Glycine max
cactgtcccaacgttaaccgatcaaaacccatctctgtctacctttatttgatccaaagttggctcacaaaacgtgaaaaatttcattcccgtgagattttcctccaccgatgcagattgaatttcaggaatcctgggtgtctgcgatacgtaatcaccctttccatgtttttattcattcgatctgtgatgatcataatgccactcatcggaaacttgttgatcgtgtgattttgttcttccttcccctgaatcccctggtttttttttccttttttccttttcctttaacctttttttttttccgggt

SEQ ID NO: 9438 - DNA, 280 bp, Glycine max
ttgggttttccttccttggaacctttaaccttcctttggaccactttttaaaaaccgttggctttttaaactagagccctttccgttgagggttcctccaggtgtggttggattaacagttcctgatgctgaagaattaaaaaagcttgaaggcttttgctcttctgggtgaaaaatgttggaaagtggtgcgaaattcccaggattaatagatctcaacaaaaattattaccaactactatgatttctctcaaggcttttaccataagcttggggaggg

SEQ ID NO: 9439 - DNA, 265 bp, Glycine max
  modified_base (138)..(138): a, c, g, t, unknown, or other
  modified_base (237)..(237): a, c, g, t, unknown, or other
ccccttctccggtgcatccattttcacgattccaatccattaaaaatagaaagccaaaaccccatcatattcctagaatcacatgcagtggaaaccaaaacaatccaacaccaaaccctaattcccagggagaacctncacatattgtaggacatatgaggaacgttctacttggcctatgagggctctgtggtgctgttactcttaacaacaacaacccttttgcctttgcagctncaatatctcctactgacctaaacacgtg

SEQ ID NO: 9440 - DNA, 375 bp, Glycine max
gtgcgccaatatgtcattagaggttacaaatttgaatgagctacattcaatggaatgacctctattgagaaagaggatccagaaaaatgagatctctgagctattttatgtaaaggtctgtctatatctgtttctctctgtatagcatttcttgcttaggctattcttctatcaccaactaaagggtgcaacaaggtcagcagtgacctgtttgatgtggaaatcccatctttggttctgcctctagtgtattatatcatcataggttttctttcccctttttccaaccctcaccatcctctccaaattttttcagatattagtagaatttgttgactatttcaattgagataaaaaagtttaatttaggttccc

SEQ ID NO: 9441 - DNA, 408 bp, Glycine max
cgctccatgtcttcactcttatctcgatttctttcacaactcaaacaattgccaaaatcggacccttgtaccctctggtcctcctccttctccttctgcctccacacactccgcaagtccacttcccctattcgcgcctcttcttctttttctccctccatggctgcttcttctccgctaaacgacgccgtcgaaggcaatcctcttctgcagaacttcgacttcccacccttcgatgtcgtcgagcccaaacacgtgcgacccggcattcgcgccctcctcggcaagctggaaagtgaattggaggagctcgaacggaacgtggaaccgtcgtggccaaagttggtggaaccgctggagaagatcgttgaccggttatctgtagtttggggcatgatcaatcatcta

SEQ ID NO: 9442 - DNA, 361 bp, Glycine max
gtctcatagctgagagtttaagatcggaattctggctccgttcttcttcatctgacctaccaccttaacctcgggattaaagaagtcatggctatatggggtggttgatggaagatattatcacaaacttggtatgcttctatgagccaaatctcgtgtttcacttctgcttcataatggtcttgaagggtctatgtgaaaagattgattcttcaaaatgctcttctaaaagctcaaccgagactgtagataatacacaagtgcccgtttattcaaaagcaggatctagtgactgtaagtttcccaaggcttacttatggtcaagcatctttacatctggtttttcagtggttgaaacata

SEQ ID NO: 9443 - DNA, 284 bp, Glycine max
gttcttctcttcgctgggaatgctaatgggcaccatgatgattgtacagactcatttgactgacgaacttcggggacatttagcttacactgcacgaatgtgaaccagatacagtggcatagccactgcggtacgatcatgaaaagcatcggcccaaactttcttgaatttcagaaaatgtaatcctcataggactaccattctaagtcactcatgaacgaattaactgaagtgttgcttaatataggctctataggagtgtgatagagatgatgcctgtgcac

SEQ ID NO: 9444 - DNA, 209 bp, Glycine max
acccagacgtacgcgtacgcttagccgttcgagaagtccttttagattttaacagatactcaacatgaagacgatctgggtcctatgataccatgaatgtgccctacagcatgagcatcattgtttacgcttatgttattgatgtatgaagccccctactgaaaacttctgcgatacttccaccattttaacttgtacttacaacttat

SEQ ID NO: 9445 - DNA, 203 bp, Glycine max
attaaaatgaagcgcactatattagatgaaaaccatctgtcacatactctcaatctaagacgacatttggataacatttctaatgtattacaagatatagtctcacttagaactacgaataatgaaatatgctagcctgattcatcgaacatttggaatcactgatggcattgaaaagtccacaaccatgatagactacttga

SEQ ID NO: 9446 - DNA, 165 bp, Glycine max
tacaaaaataaattttccccccattccttgttccaaatgatgttttttcctccttttaagggggtttactaacagtacaaaaaagaaaagaaaaaaaaactatgaaaatagggggaaaatttatttttgtaaaaaatattaaatattaatattataaaagggcgg

SEQ ID NO: 9447 - DNA, 160 bp, Glycine max
tctttccccaaatagtcaaacaaatattttgacaactactaatattcagttttttaagattttttaaaaaattatatacccaaccacactcatattacctatcttaatcattcaatccactaatccaaaataaattctattacttccattttactaatac

SEQ ID NO: 9448 - DNA, 415 bp, Glycine max
ccggtcatttggtttggactgagaccaacaggacagggtatagttaaatggcaagaagcagcccctacgggaataaaaccgacaaatcgttaaacctcggagccagatattcagagcgggtcccaccgatgatggatactggcggaggaggcggagcatcgtcaccgacagccaccatgtcgcggtggaagtttgcggcgtggcggcagttccagcacctgctggataaatcgacgccgcacgtgggacgccggtggctggggttcgcggcggttgcgcttttgtacgcgctgcgcgtgtacttggtgcaaggcttctacgtcgtttcgtacggcctcggcatatacatcctcaaccttctgatagggttcctctcccctcaggtggaccccgagaccgtgattctcgacgccga

SEQ ID NO: 9449 - DNA, 316 bp, Glycine max
agtggtgagcatccaacgcaatactacaattactgatctcatcctttcatggcctacaaacaaaggcactactcttgtcagttttgctctatcataataaacaaatgaagaaaaatacatcttgtgtctgaagttctagttcagttgaaaatgtgcaagggtagatatttccgaaaaagaatccgtctgctgaatgtgtttgcttgaattggtagaaaggtgctgatccccttaaaatggaatgcagcagcaaaggtgaacttgcactgtcacattgagagtgtgcacttaaatggtttaacatcaaatgcaacat

SEQ ID NO: 9450 - DNA, 154 bp, Glycine max
taatacataatatatcttttaacttatcctaaactaaatatatgcggtgtataaaataaatgaggtaactaaacatacatttaaaaacattaacaaacacttaataaaattatatacttaaaataccaaatatatataactatattatataaac

SEQ ID NO: 9451 - DNA, 333 bp, Glycine max
cggacgcgtgggcggacgcgtgggcggacgcgtgggtggccttttacctcggggctcgtcttaaccgcaatgaaaggaaacgtttatttagcttgatcaatgatcttccatctgtttttgaagttgtgactgacaggaaaccagttaaggacaagccaactgcagatagtggaagcaagtctaggggaagtgccaagagatctagtgatgagcaagttaaaagcaacccaaagtttgtagatgagggttatgaggaggatgaagatgagcataatgaaacactttgtggaagctgtggcggaaattacaatgctgatgagttttggatttgct

SEQ ID NO: 9452 - DNA, 221 bp, Glycine max
tatcatcagaatctgacactctacactttactatacaacctaaccttaaactgaacagaatataaccttagctggatactataatatcatatatattcataacatacttaacttaaaaatgaaattttacttaacttaactcatgtaatatctcatcaactatatcattacaattacagctcaactaatatactacacctcacattacatcaactcaaaaa

SEQ ID NO: 9453 - DNA, 332 bp, Glycine max
gttccattatcatctttgcgccaaaccatacagccaaagcataaccacagaaaataactaacataactgtgcctagaccagcgccagctgtggaaccttcatgaactcctgatttgtaagcatctacaagaaatttgctataactagatactgcttgcttttccccagtaaaggatgcaacctggaaatatacacagggaaagaaaatataattattatagcactgtcaagacgcaagcaacaagcaataaacacattctcaaccaagaaattatagaattccacagatatctacttaaggtttcaacaaataacatacagttcttattgat

SEQ ID NO: 9454 - DNA, 413 bp, Glycine max
ttccgatcgaccagctccagcttcttccttctctgagctatatctagacggccctgtataaaagctataatgactaaggctctcatgctacataggatactatcaatagactccatctatatgctatctactaagcgttgagctacagcacttgaacactgaaaacagaatcactatttaacgaaatgatcgttcaatgcagactatcttgacagtcagctgattgaatactggagagagacaggcttatcaggctatagaactatgccgcattctgaattgcgatattgactcacactatagcttggcatcaagcatacctgttatggaggattcacaccacatgaccaatacgcttaaacacatgctagtgcaagctgatcaagctgaacgtcctggctttatggaaaggt

SEQ ID NO: 9455 - DNA, 369 bp, Glycine max
gaattgccgcatgcatccacgcatgcgtccacgcattcgtccacgcggttcatgaaaaggtgctattctgctttcccaggcctatgtgttacatcggataaaattaataccaatccataatcattgctattaacaccatgtttgaacatccaaaagagatccttatccagcacaccatttacagagacactcctacttctttcaactgacattactgctctcatactgctctcactaccgctagatcaaagccaaatctgtcaccatatgtgtatatgcttaatgccaatgatgcttctcatttgctttctttgaccttcactggattgaatttggcatacatatcactactgtactaaatgtcaaaat

SEQ ID NO: 9456 - DNA, 327 bp, Glycine max
tgttttttggtttttttttttttttttttttttttttttttaaagcatcttgaattttattttaatgcccctttggtaacttaaaaaaaaaaaaaaaaaatggcccatcattaccaatgggaatcaagaaattttgaacagtttgtaaataatcgaaaccaaattgacttgatgaaattaaatgaacccaaactattgaaccaagcccctttgcttgaaaacatttagcatggcagctccaattttggcaggggactccacaaccatgaccccagcttccctgagggttttaattttgtcttgtgcagtgcccttgccacccgacac

SEQ ID NO: 9457 - DNA, 309 bp, Glycine max
ttgggtggacatttgacagtgcagaaactaacaagttaataaatgcattagggaactgcttgttgaccttcaggcagtataagcagagctgggaagggctccaacggcgagggatgacgcaggatcttagttgggacaatgctgctcagcagtatgaggaggttcttgttgctgctaagtaccaatggtaaattcttggcttctactctacctaagcagactgatcaatatggagtgctctcatgctgagtgatatcaaggtctgtgcagggaaaggacttggtcaagttgttaaaaccttcatgttgc

SEQ ID NO: 9458 - DNA, 428 bp, Glycine max
tctagacagcttttcaccaagaatccttagccaaaccgcaccagcagagcgttgaggcggttgatgagagctgcgaaggcgttggagaggatgaatgcttgatgaggagaacacttgccgctcacgttgactatatttatactcaaaagcataataatccttgaaatatagtactcgtagttagtactatagcatccacaaatccacttatggaaagatataggagcgagaatctatgtttgattgtttttataaattaggagttggtacgtaactggctcattaaatttgtttggagttgagaattatttgtattttccttttctcttctcttttgcttatatgtagtgtattatatgaagagttaatgtaatggttgtgtaaagggatttcacactctcaattaataaaaaggtaatggatttttg

SEQ ID NO: 9459 - DNA, 72 bp, Glycine max
tgagaggaggaagcttacgtacgcgggcaagcgacggcatagctgcacctatagaggcaccgaaattcaatt

SEQ ID NO: 9460 - DNA, 342 bp, Glycine max
  modified_base (329)..(329): a, c, g, t, unknown, or other
ttgggtggacatttgagagggcataaactaacaagttaataaatgcattatggaactgcttgttgaccttcaggcaatataagcagagctgggaaaggctccaacggcgaaggatgacgcaagatcttagttgggacaatgctgctcagcagtatgaggaagttcttgctggtgctaaataccaatggtaaattcttggctagtactctacctaagcagactgatcaatatggagtgctctcatgctgagtgatatcaaggtctgtgcagggaaagggacttggtcaagttgttaaaaccttcatgttgcaggtcctggaggaacattnttggccctaaact

SEQ ID NO: 9461 - DNA, 338 bp, Glycine max
cccacacgtacgaaaaaatctttctgtcaaaacccaattttaggatccatggagtgtgatgtactctaacgacttgtgcattaactaccaaagcagataacaagaacttagatagcacatgccttgaataacgataagttgctgaatactgaatcgattttaaaacgtgccaactgcaagttactgacacggctcttatcgaaatgcttcttccttgcataaatcaaagttctgacgaatcccgcaattactttgcaagctatatggtgaaacaattaaattatattgagcaacaaataactgcttttacaggttgaagtaaatcattaggaaatgct

SEQ ID NO: 9462 - DNA, 414 bp, Glycine max
ttccggtcgaccaccgtccgatgatacaaaaaagtgacttctgatatcgggtgtgcccttttggaagtatagcaattgtatgcgacaacaatggagagctcttgattttgagcatccgatctctaaatatatgatatgattcatcatctgaacataggtatcaaaatactaacttgctcaaacttaacttatgatacaagtcttacagcatttccataggatcaataaaatgggctcatgctggaggaaaggctattcaactatatattatggcaacctatgactgtgcaactaccaacttgttgcacgtaaagacgctgaatgagcatacagaaactcgcacaattaatctcgtacttcatttgtctgaatgtactattgacatggagatcacatcaacttcaactgagcaaa

SEQ ID NO: 9463 - DNA, 288 bp, Glycine max
ccgtcctattcccgtcgcccacctccgcaataattattatatggtgttgatatcatattatgtatgataaagagaaatggaagagatgcatgatatttattcttttcttctatatactcactatattcagctccactctatctttcgactctacacatccacgattccgtccgtctactctgacctccatcatcctatgccaacctacacgccctccgacctctctcatctttaagaccaatcccttacgtgcgcgcttcatttccactcaatcatatacttaccttt

SEQ ID NO: 9464 - DNA, 241 bp, Glycine max
gaatactaacagtactgatcagggctacatcggaccattgttgtcagacggtgtacccttaataattactctgtacaaaggccatgcagctgtaaaggatcatgcatcaaataaactgatctgacaaaaacatgtttcatctgatcaatttgactgcgtattactagcagtgttgcatgcgggtcatacatctggtctctcatagcagttcatagttcagacatggatcattagacattac

SEQ ID NO: 9465 - DNA, 72 bp, Glycine max
ccctcataggtctcttcctcgctgcggtggtcgccatcgccgtctccaccctccgcggccggaaattcaagc

SEQ ID NO: 9466 - DNA, 385 bp, Glycine max
tccgcccacccttccggtcgtcacaccagaaccaaccatacaatcacatacgtttaagctaatcttacgctctctctctcttcaatctctctctctctctaacactttccacagcctcggaaactaaattccggtgggctagctagcttctcttctctttaagcttatataagttcaactaactcacgtcgcctccacggttccgtgagggctcaatcattcgtcatcgagtttggacgcacgtgccaaatttgaacgcaactctcggtagtactacaatagtagaatgcaatatagaagaagaaacgaaacgaaaagaaactctatggcggttaataatattatttgagttttaagtttaagaagaagaaagacacggcaacgc

SEQ ID NO: 9467 - DNA, 346 bp, Glycine max
  modified_base (297)..(297): a, c, g, t, unknown, or other
ggattccaggtacgcgctcacgcgtacgtacacgcgttcgatcggtgcacccagagcagagacggtacccttcaccagctgagacgcataagtgcccacctgaaactgctagtgatttgtctatgccacctgctgaaatgaaaccgatatgcaagtcgattttgagaagaaagtccgggagagcttttagctttttctggaaaaacaagagctattctgtataccagtgttaagatccattggttgctgcaaatctgtgttagcatctcatatatttgctgccctgcttttatgctnctactgtacttgttggtaccatggggtgctctgcttatttctggttcaa

SEQ ID NO: 9468 - DNA, 372 bp, Glycine max
  modified_base (55)..(55): a, c, g, t, unknown, or other
acgatcttatctacgaataataaaaaattaattcctcaattgattggttggggcngtgttcgatcggtacctgcatctcttcttttccaggtttggagaatgagttctgtgcaaggaccaattgtgtgcccttctgtccgtgccaaacaagtagggttctgcagcattccaatgattggggcagtgaaaatgaacgttagacgcatccgaagtgaattttggggtctcaatggcgccaaggctaaacccggttttctttcttgccatataaacacgcgaaagtgcaagactgtgcattgtacttttaactcacccttcaatgacagtggaagtaccgctgacaatttcaatgaaaaagatgaagattatgtt

SEQ ID NO: 9469 - DNA, 339 bp, Glycine max
  modified_base (298)..(298): a, c, g, t, unknown, or other
ctgaacttaatttcaaagaatgtcgatcctgcactcaataaaatcaggtcacaaagtttcaaaaagattgatgatagttctgatttcttgctggatactgaaagtgatcttgatgagccggcacagattgaacaagaacatgaaaaatccaattatcatgccagaaagtctgtttcatggatgaattacggactcaacgaatttcacttagctatttgcagaaaaatcggtacagatgagagcaatttgaatttagaagccaagatccagatcactatggaatatcctctaacgcctnctctttgtctattgagcattagttgtatatcgtctggggaa

SEQ ID NO: 9470 - DNA, 430 bp, Glycine max
tcggagttccgggctccgacattacgcgttcgacgcaaagcgtccgcccacgcgttcggctatcgaaccgggcgagggggtgggccatcccagggcgaatccggatatggatccccagcagcgtccgttaatgtcggaccgagtcaccgttaactgctccgttacgctgcttgctcttctcgccgacggccgtctatggtggtctgagggaatccaacgttgtttgacgatcgaaatggacattctcggcatcgttgccagtgtgccctacataaaaatcaagagccttgtggagacccgacacagatgctgcatcatcagcgcccatgcaagactcgttagaaacgacgtagtctctatgcctttctgctaggaatctcactggctctggtgccataaacttcgtgaattcattgattctctcggtcgt

SEQ ID NO: 9471 - DNA, 366 bp, Glycine max
acgcgtacacctacttggtctcttgagggttcgcgtgaagcgtggcgtcaaccttgccgcgggtgatgttcgaagcaactacccttatatcgtcatcaagatgtacaaccagaaactaaagactcgtgtgattaaaaaggatgtgaatcctgtgtggaatgaacaccttactctttctgttataaattccaatcacataattaaactgactgtgtatgaccatgacacttcttgcacagatgacaaaatgctagatgcacaatttgacatctttccctttatagaggccttgaagatgaacttaactggccttacaaatggtactgtagtcaccagaatacaaccaagcaagcataattgcctggc

SEQ ID NO: 9472 - DNA, 304 bp, Glycine max
tcatctcgccatactacctaacaatgtcacatgctaagattcaagatttaaaaaatgaataagtaagttaatgattattctcctaggaacgaatttgacagtgaaaaatcttcagactatctgaaacattcggataactattaaagctatggaaaccccatgccctcatcccatcaagatgaaacagctgttaagaaaaagtattgatgtatgttaccaaagaagcctacactaatatcgaatgatcattaacgttcttacttagactctgctgactgcactttatcgaatcaatgatcacata

SEQ ID NO: 9473 - DNA, 358 bp, Glycine max
aacaaaaatatataaacgcatgaaagtaaaacatgttttaagtacaaaacatttgcaatacgagaaacgattacattaaaaagtaatcacgagtcactattaggggtggaaatgagctaagtcaagctaagctttactagatttgaactgaatatgtaaagcttgaacttgacacaaggcttggctcgacttacataaaagcctgacttggctcacaagcctatttaaaagcttgcttaaagacgtctttgattaattaattattttaaaacctagtgaaatactaactaaaaaaagaaacctataaaattttgtataagtcatgtacaaatccaaaaaattattggttaaccaaaat

SEQ ID NO: 9474 - DNA, 128 bp, Glycine max
atacataattcatgaacaattttacattagaatatttttataaattaaaactcaagaaattatatgtttactaaattctaaacttacaacatcaagtcttgtacataaaaaaaattcagatgctgggg

SEQ ID NO: 9475 - DNA, 267 bp, Glycine max
ttttttttttttttttttttttggtttatatttttttttttttttttattatttttttttttttttttttttttttttatttttttattaatttttatatttattatattattttattttttattttattatttaaaataaaaaaaaaaaaaaaaaaaaaataaaaaaaaaaaaaaaaaaaaaaaaaaaaaaaaaaaaaaaaaaaaatataccaaaaaaccctaaaaaaaaaaaataaaaaaaaaaaaaaaaaaccacataatatat

SEQ ID NO: 9476 - DNA, 462 bp, Glycine max
ccggattcccggcccgcgtccgcctatttcttcttccttccaacaagttccaactcgaaacactcactcactcctctctgtgctctcaactccacactctcactctgatcggtttcaatggcttcaccggcgtggttgccgcaggagtcgcagccaccagtgtctggtgaaacgcctcttcccatggcttcttccgctcatacaactccttctactgctcatgcaaaattatttaacgcaaccgcgtttgtagctccggcaccggcaccgccattcgcttacggcatgcttcagaatgttaacgcttccggaagttctcaacagtcatcgacgcatcctgagatgaaatccaattctgcagtgaatcccatgggtgttcaacctccaggtgtctctttacatgctgctccttcattttcatataatattccccaaagtggtgccattttttctagcaaccca

SEQ ID NO: 9477 - DNA, 80 bp, Glycine max
cccggcacgacccacgcgtccggcgaaagggatcgttgaaatcaatgtttcggtcgtagcgcgaaaagaaaagaaagtga

SEQ ID NO: 9478 - DNA, 240 bp, Glycine max
tcacccaccgtccgaagactatgctttatcattgctttggattatatgccgagacgggatatggagaatgtgtttaatgatactttctcttcccaagatttatccccccatctgtatgtactttgacccttccacaaatatctgaaaccatcaactttaaatagtctatttaaactgcaatttttatttatttgccttttttctgtaaatattttttatttaatcaatcacaagctattt

SEQ ID NO: 9479 - DNA, 203 bp, Glycine max
ccggctcgaccccgcgtccgagttttggtttttttttaaaaaaaatcgattatcaaaccgggaaaaagaaaaaggaatggttaaaattatggaagccgggccaattacatggcagagacatgacccggcatggaaacatgttcagatgtttaagaatggggacaaggagcagctgaagtgcatatattggctgaagatagttt

SEQ ID NO: 9480 - DNA, 68 bp, Glycine max
cccggcattagcttccatcaaatgtcacactctcattctaactgccaatgccatccattccatggcca

SEQ ID NO: 9481 - DNA, 127 bp, Glycine max
gcatcttcatcttcttcctctgcgccaactcctaaccctaattcccaacttggtatctgaatccctataccgtcaacccttccctactcttaccccctcacccatcaacctaccttacagatctcta

SEQ ID NO: 9482 - DNA, 320 bp, Glycine max
ctttctcttctctgaatccatttactttgtgtggaagtcaatatgagtcttaagggatttttcgagggtggtgtcgcttccatcgtcgcaggctgcaccactcacccactcgacctcatcaaagttcgaatgcaacttcaagaaacccacactctccgcccagcctttgcctttcacgcttccactccaatgcctcctccgccgccctccggccccatctccgtcggcctccgcatcgttcagtcggagggactcgccgctcttttctccggcgtctccgccaccgtcctccgccagacgctctactccaccacccgcat

SEQ ID NO: 9483 - DNA, 199 bp, Glycine max
tccattttatactcaccatatttttaaaagggtatatatattctatcacttctacatcatatttcactactaattattatactctacaaacatacagaatactataactgattatttttataattacatcattgtcatcctaaacgactatatatatactccctatatatattaattctaactaatgtgtcatacactt

SEQ ID NO: 9484 - DNA, 380 bp, Glycine max
aatttcaccttttatactctaccttagttatcttttattatatatctataacattttattccacctaaactcttacacatctatttagcatacaacttattacactaaattcacatataaagatattcctaatgcgcttgatattttttctaatatattccataattctaaattttattaataaacgattatcctctatctttacattattcttatataaatttaataaatttatttgcaaatttattaattaattttttaccatttacattcaactgcttttcaatacactccactttttataacaattatttttccttctcataatattattacaatcactataaatcatctacaaaactacattcatacacactata

SEQ ID NO: 9485 - DNA, 354 bp, Glycine max
  modified_base (38)..(38): a, c, g, t, unknown, or other
ccacgcgtccgccgtgaccgaccgcggtgacggttagngttacatgaaccgccgcttccccgaggggcaagtctccttctacagaggctggaggcctcgaccgcgtcggcgacccacagtactggaccaccatcagcgcctgcctccgcgacggccacgcctgcgccggcatgaggcgcctcgcgcgggaccccaacactggcatgctcgtgccggagacgcccaccatgtcctacggccgcaacctctcccctgatccagcctggatgctgcaagccaccgacgtcttgtgcgatcagatacatgaacgatacttactggacacaaatcctcaacgtaccgacggagaccaac

SEQ ID NO: 9486 - DNA, 72 bp, Glycine max
cccactcgttcggttggaaacacgtcgatatcgttttagataacgtgctcccgtccgtcccgtgggccatgt

SEQ ID NO: 9487 - DNA, 365 bp, Glycine max
cgtttcgaattaccggcccgacccactcgttcggtacgtacgtatatctatccatttagcttagctagctgacgaccatggcgtcggtctggtctgtctccatcaccgccagttccttcactgccgcgcccgctcgcgcagtggtcagcaggaggtccttcaccgtgcgtgcctctctccgcaaggccactgccaccgccgccgtggccgttgccgccagcgtcctgcttgccggcggcggcgccatggcccaggaggtgctgctgggcgcaggcgacggcgggctcgtcttcgagccctaccagttcaccgtcaaggccggcaacaccatcaccttcaagaacaacgcctgcttcccgcacaac

SEQ ID NO: 9488 - DNA, 139 bp, Glycine max
tgagaatgagagggatgatgattacctcttggctctcggcttcactggcccctccggctactccgggaagggttccattgaaaaattcacagacggcatctacgccggcggcctcaccgccatcatcactggggcgtcc

SEQ ID NO: 9489 - DNA, 409 bp, Glycine max
tccggccggattcccgggcgaccagcgtccggaagatgctaggtggagttcatcaatattctggtaggtataatatcttcatgaatctagtataacgttattcatagtgaaaataaatcgagccaaggaatttattaataattgtctacattgcatattagctgcctgctgcgacttccttatgcataattttactgtttatagaaattgtgaagctatactgttgtaattgacatgtaaattgttccctttttcatcttacttgatttggtaaactccggttacttgtatccaaataagatgggccatttgtattgcgggggctttatataattgtacaattatctacttgtaagaagttcaaattcgggcgacaacatttgtaatgcagaattatggcattaacatt

SEQ ID NO: 9490 - DNA, 415 bp, Glycine max
  modified_base (39)..(39): a, c, g, t, unknown, or other
cacgcgtacgtaagcgcggaattcggctcgagttgaganatactaagccatcctcataaatacgctctaaggaagtttcaagataagtgtctaaccttagtaacattgccacatattgtgttcattttggaattgtgccactaaaattctattcaattcatctatggctgcctcttcttatgctatgcaatcaatcctggcaaaccctttgatccgcatttccagcgggtctagggtgaaccaatttggcgttcctgctttgcacatgagaaggaatgttggcctgagagttaggtccatggctaaggaagaacaaccaagtgagcctgcaaccccagttacaccgccaccatcagtagaacccaagccacagccagtctctgctccttcaccaaaggtgagcactaagttttct

SEQ ID NO: 9491 - DNA, 373 bp, Glycine max
cacgcctacgtaagctgggtattcggctcgagtctgaagttcattagcaccagaaatgctaggcaaggcgagacttatcaattaggatacagcactcccatgagttcagaaccggcgtgttcccacctgcatgaacctacaactactgggcaaactcctacacactagttcgagtagagatggcactgatggtgattacatagcacataaaattccaagactgtgccaaacgcactctctatgggcaaacagtactgactacgactagacaaggggcttggaagttctggagagccagcttacccaggaggacctttctacaacccacttggctttggtaaggatgagaagtccttgaaggaattaaagctca

SEQ ID NO: 9492 - DNA, 413 bp, Glycine max
  modified_base (58)..(58): a, c, g, t, unknown, or other
cgtaagctcggaattcggctcgagttgaacataaggggcctgaaggcgctaacagagncagatactttccatatgtagcggaatttgcttactctttatcagcaacttaagttactcattgctgtcacgaaaaaaagaaaagaaaaggaaaacatcactttggaaatgtgtcaatccaatgaaggtatgatgcatggccatataagtagggagttatacgcctgcaacttgaaattgtttgttctctactttgactatgcatcaattataccacataagattgagaaggtagatattctctattgcaaatcaatctttagcttcaacacaatgtaagctacttccccaactgaaaaataatgatgatagtgttattcatgaatcgagatcaaatacctgtgctgagttcctct

SEQ ID NO: 9493 - DNA, 325 bp, Glycine max
  modified_base (49)..(49): a, c, g, t, unknown, or other
cacgcgtacgtaagctcggaattcggctcgatgtatgaagatttgaggngacgagtgaagcgtgaaaggatgaccaattacaacggactaaggtcgcacacgaggctgccactgccagtgtcggatgacgtatcggccactgccactatcactactatagcaagagcagtactaaagaagcgggattagagagttaagggtcctcggcgcatgctagtgacccttgtcttgaccttcttgactatagatcctatcaaaatcctcattgcctagactaggataacgaatgcaccctatgaggataagaaacggaagaatgacaaat

SEQ ID NO: 9494 - DNA, 352 bp, Glycine max
  modified_base (75)..(75): a, c, g, t, unknown, or other
  modified_base (92)..(92): a, c, g, t, unknown, or other
accggttccagacatcacccgcgctgcacgcgatacgtaacgctcgcaattcggctcgaggttgaaagattcgtnggcgacgagtgaagtgnggaaggaggaccaattacaacggactaaggtcgcacacaaggctgccacagccagcgacggatgacataacggccactgccactaccactactatagcaagagcagtacaaaagaagcagaattagagagttaaggaacctacgccaatgctattactccttctcgtgaccttcttgactatagatccgatcaaaatcctcatcgcctagactaggataacgactccacccaatgaggataaaaaacgaaaaaatgacaa

SEQ ID NO: 9495 - DNA, 388 bp, Glycine max
ccggctgcacccacgcgtaccggggacttcggcttgagcttccgattacgatacacgcaagacccgcggggccgggtacactttaaaggatccggaccccaagatcgtaaggcaggctctagaactcaccgaaaccgcaaccactgatatacctgctaccaaaaacgccatcctgaccgcagcaagaaacacaaaagcaaaaacccaagataacgacaacaaccataaaaagcacacagacagggacaaaaaccaggacaagcagcataacaaccacaagcacagacaacgacatcaaagcaaaaacaatggaaacgagacaaatccatacatacacacgcctcatgactctagaactcgacctttaacgaaacacaatgacaaacaa

SEQ ID NO: 9496 - DNA, 358 bp, Glycine max
gcacgcgtacgtaagctcggaattcggctcgagtcttctgactgacgatacacctcagacccgcgggtctacgaaccctatacaggactcgcacctcaagatcgtacagcaggctctagaactcacggaaaccgcacccactgatctgcctgctacccaaaactcaattctgaccgcagcacgaaactcaaaagctaaaacccaagataacgacaagaaccataaaaaacacacagacatggacaaaaaccatgacctgcagcataataagcacaatcatagacaacaagactgaagcaaaaacatggaaaacgagacaaagacagacagatacacgcatcgtgactctagagctgat

SEQ ID NO: 9497 - DNA, 289 bp, Glycine max
tacagaaagagagagtaggggcatttgaaaaattgctaattcccatcatcaaatctttcaaagccaataaaatacctgcaaactttaaagatgacaacgcgaaagaatggcaagcggacaaccagcatcttgaacagaatgattgttcatatcggagttctatcaactaatacatgaattgaaatataatacttgaataaacacaatgctcatactaaccaatacttacattgatggttcaagtacaaccactgattaataactatagcataattttaaacctattaaa

SEQ ID NO: 9498 - DNA, 315 bp, Glycine max
caacaacgcccgcacgcctacccaagcagagcactcccgctcaaggtcaacgcttaaccctcaagaacgcacgaggcgcaaaggacacatatgaaccgaaacgacacgccaccataccaggcccaccctgaagccaaagcaaaccagaccggaaaaccacgctggaaccgagctccaaaaccccatagtgaaccctaaaaaaagcctaatcatccaacagctggcacctgagcaaaatcacaatacgcccaacacgacacacaacaacccacccataagcagaaaaagaacagccgaagctaccaacgcagccaa

SEQ ID NO: 9499 - DNA, 177 bp, Glycine max
  modified_base (26)..(26): a, c, g, t, unknown, or other
  modified_base (29)..(29): a, c, g, t, unknown, or other
  modified_base (41)..(41): a, c, g, t, unknown, or other
  modified_base (92)..(92): a, c, g, t, unknown, or other
  modified_base (121)..(121): a, c, g, t, unknown, or other
  modified_base (124)..(124): a, c, g, t, unknown, or other
  modified_base (131)..(132): a, c, g, t, unknown, or other
  modified_base (152)..(152): a, c, g, t, unknown, or other
  modified_base (154)..(155): a, c, g, t, unknown, or other
  modified_base (161)..(161): a, c, g, t, unknown, or other
  modified_base (171)..(171): a, c, g, t, unknown, or other
ggctcgattatggcataggtaccaancgnccacccaagganaagagcacactataagaggccggaaaaggaaggggagaaaaggagggaagnagggaagcaccagacggaaaaggaacaanggnccaaagnnagaaggaagcagcaaaggancnngaagcncaaggcagcncaacaa

SEQ ID NO: 9500 - DNA, 67 bp, Glycine max
cacccacgcgtccgagtgcgggaaaattttcaccagcgccattaactcccccacgacccccatacct

SEQ ID NO: 9501 - DNA, 132 bp, Glycine max
cgacccacgcgtgcggagagactagagcgtagatagcaatcacatcaccctcatgtcaatggcaacgcgaggtcttttaagaacctggagcgccccattcttacggggggcccaacaagcctttaactggac

SEQ ID NO: 9502 - DNA, 360 bp, Glycine max
gaccacgcgttcggcgagtttattctatcatatcttccgttaaaatattatccctacaattacaataccgcgaatcgtagaatcttatgttcatgaccattctcaaggtcccaataacatttacttgaagacaattttgagttgaccttacagcctagttccacctatacaaacacccttgatccttcattcttttttgagttgaccttacctaactccaatactggcaacaattatacttttgggcattttaactatcttacattcttatttttccttctatcttttcattgaatttgctatgttttaatgaaattaaaatgcttttttatttactaataatcttttttattttattaa

SEQ ID NO: 9503 - DNA, 51 bp, Glycine max
gacccacgcggccgcagaatcaaagcaagccaattggctttcaaaacacca

SEQ ID NO: 9504 - DNA, 211 bp, Glycine max
gacccactcgtccgacaatttcatttcattacaactctctttcaatctctcagcaacagaaacacaataccgggggcttttaatgccaaaggacctgcactatattcagaccaaatgcatagtcaaacgctaaagcataaaaaccgttgaaaattaaacactaagttataacaaatttaaaagaaaaaaacaaaatacaaaatatttcaac

SEQ ID NO: 9505 - DNA, 68 bp, Glycine max
cccactcgtccgtagagatttggcatattacattgatgcatagctaaacaacaacactgcaatgtctg

SEQ ID NO: 9506 - DNA, 160 bp, Glycine max
  modified_base (47)..(47): a, c, g, t, unknown, or other
cccactcgtccggccttcttaccgaactatgacttgagcattcctgngcagaagaacacgcccgcaaagcgccagttttatacgctatccttcagttcctttataccaacaggctctacccttccatttacactgctatagattccaccccacgatacat

SEQ ID NO: 9507 - DNA, 237 bp, Glycine max
actcgttcgaaatacacttgtactgttctatagtataactaagttctgaaaatgagttccaaggtgtggttgttatacttatgttcttggccactatacttctgatctcctctgaggttgcacccgatgatgcatacgagaattttgacaaaatagatgggaagcctagtgcagatggggtagatgaaagcaagtattggcgtggcggctatggtggctgctatggcggtggttatg

SEQ ID NO: 9508 - DNA, 63 bp, Glycine max
gcgtccggtgaccctggacggatgtgaaacgtgtcaagtatgcacactggactgaccggagaa

SEQ ID NO: 9509 - DNA, 128 bp, Glycine max
  modified_base (62)..(62): a, c, g, t, unknown, or other
gacccactcgtccggagaaaagaaaaaataaaaaacacacgctacatacccgtcaaaaccanctcaaactctggaaggtttaaacgcaaccataacatccaccaacacacgccaaacatcacgactaa

SEQ ID NO: 9510 - DNA, 409 bp, Glycine max
  modified_base (232)..(232): a, c, g, t, unknown, or other
ccgcgtttggtggcctggaaaatccaaaaaggcttaataaatatctttctgataataatgacggtagagctgaatatgagagagtaaagtctgaaggtattaaaagctgtaacattagcgagacagatgagggagacaaagtggagaatattctttatggctatgtgggaattgcggaggacttggacaaactagatttcaatagtaagaaatggagtatggtaaagagtangaaggagattgatgacctggataaagctcctgttaaaaccgatgagaagcgatagttacagtgtcattgtcattgaagatcgattcaagagtttcatggtccctgacgcttaatattgagtgttctaattgcataatctctttttctctatgcttttgctagtagtttatgttattt

SEQ ID NO: 9511 - DNA, 304 bp, Glycine max
ctgttttttgggtaaattgtactttttttatgggaaaacaaatatacaacttggaatggatttgaggcaaattgtgccataagcagatcttctttaagtggctaaaacaaagtttaaaaagcatgttaacaataaaagaaaatgtttctggtataggaccagcagtacaaaaaaatagtgtacgagtacctggataaaacacccgttttgcaatagtgcaacttttaagtacatattgttgactgtccgtagtccacgcatagttacaactccacacttcaacaacaacatgctgacagttcct

SEQ ID NO: 9512 - DNA, 174 bp, Glycine max
ttcccgactgctacccactcctccgcccacacatcccttaaaaacttcttattcttattttttatcgaaaaatacaaagtatcctattttaacaattttcaaaccaataattttaattatttaaactttatagaataaaaatttaatcccattaaataacctaacatctttatc

SEQ ID NO: 9513 - DNA, 285 bp, Glycine max
ccacctcctattcaaatcagttctttcaacaaatcattctactactaggctgtacttcttacccatactctaatcctcccttctctatcccctcaccatcttcttcttcttcttccacttatccctcatttaaaacaacatataatctcatttctcaacaaccaaacactactacataatataccattcaaaaccttcttttcacttccctctatcctattcttcatcttatataaatcgattccatctttcaccttgcttctcactacctcaccatatctaccc

SEQ ID NO: 9514 - DNA, 355 bp, Glycine max
tgggtaaattgtaatttttttattggaaaacaaatatacaacttggaatggatttgaggcaaattgtgccataagcagattttctttaagtggctaaaacaaagtttaaaaagcaagttaacaataaaagaaaatgtttctggtataggaccagcagtacaaaaaaatagtgtacgagtacctggataaaacacccgttttgcaatagtgcaacttttaagtacatattgttgactgtccgtagtccacgcagagttacaactccacacttcaacaacaacatgctgacagttcctaaagaaaactactcaaaaaaaaaaaaaaaaggcataacccagatgttccctcatttgac

SEQ ID NO: 9515 - DNA, 66 bp, Glycine max
ttctggaggatccaagctaccgtacccgggattccaacttaaaacccctttaatggggcccctaaa

SEQ ID NO: 9516 - DNA, 371 bp, Glycine max
  modified_base (346)..(346): a, c, g, t, unknown, or other
gggcagctcaattacttaatttgttcgacaacaaaagctgacttaagtcagaatgaacttgtacacttgacagaaagaaaggagtttatctactaatttttaaaatgtaaacaaattttatatagggatgtaactatctgaatacatacattgccatttctctgctatatagtaacatttcttgacaccaatggtaacctgtttattcctccctcagtaccaaatgtgtccatatctatttaaacagtaggagcttcatttctaaagtgatctatgctaggacatatataagccagttattattaaggttaactaaagttttagaactttagaaaattctcagttntaaaataattttgactcattcatcg

SEQ ID NO: 9517 - DNA, 369 bp, Glycine max
cacccccaattcccgaacccttaaccttacctcttggcagccatggctaaaaaccgaaggcttcaatcctctgaccccgaacccaccaaacccatcaagccacagcaccaggacctagagccagttgaactcgaccaacagcaacaacaacccaaccccgaacaaaccctagtagatcctaacacgatggccgtcgacgaaccataacaggaagaagaagaagaagacgaagaaccccataacgctcaaggctgaagaaaggaagaggaagctgatgaacaacatgaggagcggccaccagaaaccctagaagagcaacaggatccataaaccctggcggctgcaaaccacgccgaagtgaacggcggc

SEQ ID NO: 9518 - DNA, 417 bp, Glycine max
tcaccattgtggcttgtctaggtcttcaatcgaactcgccaggaacggaactttctcagattgacacacaccatgaaggaaagtggtttcgagaataatgatacaaagcaagctgctgctgatgtgttgtttctatattcaaaatttgcaatggcatgcattggatgtaaggctcgtccatgtgatttgaggtttcatttgatgaaggagatttcaggtatgccctcttctctaaatagggagtcaccacagaatgcagcatctcctgatgcaatgggtgagtcatccagcacaggaacagcaagacttgatagaacagacagttttcgtgcactctagttgagagtggactgtgaccatgtttttggttggggctgtggcatagtaggtgtttgtgtcttggtaaaagcacttttt

SEQ ID NO: 9519 - DNA, 402 bp, Glycine max
tggatgagttgtgcagcaatgagagtcttggcagggaatatgtagatatgttgcgatgtgatgtaagtaagctgctcaaggaacattctgagacgaacaatgtctaattttagcttgtatgaatacatatgcttcattgcttctattgtctcgcaactcttgaccttcctgaaagtccttctagagaatgggttttggcgtgttgtgccctgaataattaattgatcattaattggtctggatcattttgacggacttccagatcatgtgagaaaattaacatacaccacatgccagacggttgtttcaaatgtagcatttaggcgtttaatggccttccattgttatatatttttatgtcctttctgattataccctcgtttgggcttaatttggacagtg

SEQ ID NO: 9520 - DNA, 234 bp, Glycine max
catatagaccctaagcactttcaatctagctctgaaagaccccaatgaactcctttcggcccatgctacctaagacttgacatgtattaccaagcccagtattgcgcctgctactgacgctgccattaatgcagttacctgctgacttatcagcgattcctacgaagaatgcctcgccagaccctacagctgctgaacatgcttgatccacagcagaccgaaatgctacttgaa

SEQ ID NO: 9521 - DNA, 315 bp, Glycine max
  modified_base (278)..(278): a, c, g, t, unknown, or other
tgtgcgacgacgtagatcgccttctcctgtgcgacgacgtagatcaccttctacagtgcgtcggcgtagatcaccttctgcagtgcgccgacgtagatcacctgtccctgggcgccgacatagatcaccttcccctgggcgtcgacacagatcaccttctcctgagcgctgtcatagatcaccatcacctcttggacaacggaggtcactctcacctagacgacgaagatcacttgttactcggcataggtcaccttcaccagtacgccgaataccgncaaccaatgtgcagaatagatcagaactccccatgca

SEQ ID NO: 9522 - DNA, 359 bp, Glycine max
cgaattcgggtcgatcacgcgtccgctcctcttttctttttattctttttgtttcttccttcatgcaggcgattccggctccatgcacgcaagttgctgaggatgagtttttaccgtaacacattgaccttagcttccttttctctgtgagtatttttcgctatggccaaagaatttgtgaatggctttgttcatcaaaatggcatcgctgtcataacccacaatccccccaaaggcgattccggctccatgcccgcaagttgctgaagacgagtttttaccgcaacacattgacctcaggtattttcttcttttttcccttttttttcttggtatctaatggtttaaagcttcttttc

SEQ ID NO: 9523 - DNA, 339 bp, Glycine max
tcttgtacctttttctaaagaacacgagatttctacttcttcgggttagttttcaaatttgaatctttcatcaggttctctgaaatgtatatagatttcatggctctcaactcaaaataacctcttgctgtggtcaatgacgacattcacctttattgcttcaaacactcttgcttcacataggatcgaattgcacaatggccattctccaacaaagtatcttcccttccacatttgatatctttcaatgcttctcatgatgatatgactaacaatattacatctgatcccttaacatctgcattgtatatgtctatcttaattcattaagcatttgac

SEQ ID NO: 9524 - DNA, 181 bp, Glycine max
tcctaattcccggacagaagaacaaacaaaacaacaaaaaaaaaaataaaaaaaaggattaaaaaaaaaaaaaaaaaaaacaaacaagaaaaatttaaaaaagctattctttcaaaaaatccaacttacatacacatacatccaacaataaatctattatataaaacttcccaaaaactaa

SEQ ID NO: 9525 - DNA, 220 bp, Glycine max
atctaatcggatcttaaagaactcatggatcttcaaacgatcctgctacctaatgcaacgccgctattttgctttgtgattttagtttttatgcaagtactctatacgatccatgattctctatcgcttaatgatcgtgtattatgatttgtgaattctgacaattttttagccgtacgtagattatactttcgtttatggttacagattcatctaagca

SEQ ID NO: 9526 - DNA, 297 bp, Glycine max
ggttactcatccaacaaaactgtagaacgatgaagaattctgtccaacctatcatgacaatatattaagtgcaatcagaaattcactgaattttaagaaccactactcaaaagacacggtacgattttcccatggtactcttcagatataggcagcgaacgttctgccaattcttttttcagcaagagacaaggaagttaacactcaagtgtacatttttggagaattggcttttcctccaagctaacattccccaaaagttacttccattgcagagaaccttcttaagctggaact

SEQ ID NO: 9527 - DNA, 278 bp, Glycine max
ttatagcaggtgggattgcagcagctgtgtctaaaaagaagtgatagaatcatttctataaaacacacatgatctgatatgtaagaggcaaacatctataatactgtgaatttgctgcatcttactgcttttatgaaaagaagggcatgaacaataatgtgtacaaagcggtggaaatgatgtctcagtactagatgagagatgtattgcgtgtcttcatgtttaaaaaaaacatatacctctgtacttttatcatttctatgatttactttcttttt

SEQ ID NO: 9528 - DNA, 327 bp, Glycine max
gcccctttcattctgtctgcatatcgtatgtctatcaccaatcaattacagtttctttccagcagacaacaaaaaatcaatctgggcaacaaaaacaaaatgctcgtcattagaggacgaactcttcccatcaaccccatgaaagttcatgatcgagcggtcccaccacatgaaccgccaactctatcggtgtttctgctacaccagcaccatgtttctgtgggccctctttttaatcgccctcaccgcttactatctcagcttccaaggctttgtctaatccggcagacgctacctcaccgtcttctggggcgggatccagtggga

SEQ ID NO: 9529 - DNA, 72 bp, Glycine max
ttttaagatccaaacttacctacccgtgcattctacgccataactattttatagtgctacctaaattcaatt

SEQ ID NO: 9530 - DNA, 398 bp, Glycine max
  modified_base (28)..(28): a, c, g, t, unknown, or other
  modified_base (31)..(31): a, c, g, t, unknown, or other
  modified_base (40)..(41): a, c, g, t, unknown, or other
  modified_base (52)..(53): a, c, g, t, unknown, or other
  modified_base (64)..(64): a, c, g, t, unknown, or other
ccggtcgagcacgcgtgcggcacgcgtncgnccacgcgtnncgccacgcgtnncgccacgcgtncggcaaagctaagttcaattatggaagccaaagaaaaagagacaagaccaaaagcaggtgtggaaagaagaagaaagctctcatcgatcggtgttcaactttaaacactcaggaagagccacaaaattcttctttctgcagggtgcaaggtacagcttcgatgggaaattgctggggttctccacctcacaacccaaccccaacaactaccggtaaccttagtacaggtacgacggggacatctcaggcgatcagcagcggtagctatactactactactacgacgactactacttcttctggaagtgggagcagctccataaatagcaagttc

SEQ ID NO: 9531 - DNA, 343 bp, Glycine max
acgcgtgggagttttcttcatcccccaaagtttcaatctttgtatgcaattcaccctttctctctcgccatggccacgtgtgttgatgccccaacccctctttctcggaagcctaacgggtcccaatccgatgatcattccttcaattacatgaaattctgccgacccactttctctgatcgcgttccctgcatacccatttgcaagaatcgtgacactgccttcacacgcgtggaggagtttgacacatgtgtggaggataatgatgatattgaggttgaggttgtggagggtgttgatctttggttgaagattcaagaggaggcaaggttagatgttgatc

SEQ ID NO: 9532 - DNA, 304 bp, Glycine max
  modified_base (56)..(56): a, c, g, t, unknown, or other
  modified_base (255)..(255): a, c, g, t, unknown, or other
ccaggaaaaaacatcactctcatggcgctttacacaacaatcgggacatccataancaccaaaaaagacattcctcctccaaagacaaatattcttacaaggggaccaatcacgatagctcctcttattattaacatcatcgctcaaggcatcatcatcataaatatgataactcctcctctgatgatgagcaccactcttccaaacaactacatatggatgataacttctcacaccattagcataaacattctncccattctaatgaacattatacttcatctcatgatgagcataagcatct

SEQ ID NO: 9533 - DNA, 309 bp, Glycine max
tggcaaacgcatcttctctgccgacggatcaactcgccggcatcaccctcgacgaggttcccaaagctaatttctccgaccgcgtccccatccgatccatcatctcccgcaccgacggcggctcgggcctcgccggcaggaaagcgcgcgttggcggctgggtgaagacgggacgcaaagccgacaaggacgctttcgcgttcctggaaatcaacgacggaagctgcgccggcaacctccaggtcatcgtcgaagccgcgctgggcgaactcggccaactcgttcccaccggaacatgcgtcgtcgtcg

SEQ ID NO: 9534 - DNA, 337 bp, Glycine max
gtatttgtaataccatttcctcgtgcggcactgctttccgcctccccccccggggtatcttcaggggcaatggcaaacccatcttctctgccgaccgatcaactcgccgccatcaccctcgacgaggttcccaaagctaatttcttcgaccgcgttcccatccgatccatcatctcccgcaccgacggcggctcgggcctctccggcaagaaagcgcgcgttggctgctgggtgaagaccggacgcaaagccgacaaggacgctttcgcgttcctggaaatcaacgacggaagctgcgcccgcaaccttcaagtcatcgtcgaaaccgcgctgggcg

SEQ ID NO: 9535 - DNA, 365 bp, Glycine max
  modified_base (97)..(97): a, c, g, t, unknown, or other
aaaaatcactgtgtgtgaatcaattgcatgggtttcttcaattccagcaccggtgcgtgcgtctgatttatataaccttgtatgctcactcttattnttatgttatggctatttcatatttgaagtcagcatcataagcagctgttgtttctgaaacacacgatgaattctggtgggtacgctgttgaggttacgggtctgtcgccaaaagccactgacaaggatgttcgtgacttctttgctttctccggtgtgattgagaatgttgaaattatcaagtctggtgattatgcttgtaccgcttatgtgacattcaaagatgcatatgctcaagaaactgcatgcttgctcagtggagccactat

SEQ ID NO: 9536 - DNA, 314 bp, Glycine max
cgggtggaggcacgcgtgcgcgcactccttctgacattctttgtgaccttttttccgaaaacacttcctaaaacaatggttaaaaaacggaggacagaacagaggtccaccaacaaaagtagaaccaaacttggctcgaagcttgacctgtacccaaacctggctgaaccgagagctgattcgacacacacaatcggcgacaccatctgcgacggcacctccgacctcacccgcgtactcggagctgtaccaagaggtcaaccaatactataacagttactataacacttccatagctactgtcatgggtcctg

SEQ ID NO: 9537 - DNA, 216 bp, Glycine max
ttttcttatccaaaaacatgataaattatgtaatttcactagttatgcccaatgtggcacacgccttgcagaataacattatatacctaataaaatttttattactgtaacatgtagcttatgtttctgcttctggtttgatttctttcacttggatcattattagattatgattttctgctggtgtaaaaaaaaagacacacaaagtaggtttta

SEQ ID NO: 9538 - DNA, 234 bp, Glycine max
ctctctttgcacttgctccacaccctgcaaacaaaacacttgcatctccaacccaccaagcccaaagcctgtttccttatagacaccttcattttaaaacaaactttcactaccactacgaccttcaaaaaacatggccctattctctcttacttggctcatccaaccgtgtgctcacaccagaatgttcagctcttctcaaacccgagcaacttcttaacacaagtcaaacct

SEQ ID NO: 9539 - DNA, 195 bp, Glycine max
gagttaaccaaaattctcatactcacaaacccactcaaaaatacataaagattgacactgaagacaactttgcttactagtttatgggcgcattaaaatatcataaaactttcaaatatcttgaacatgcacattctcaagcatagtagatatacttgagtagcacaattcaccattcatactttgcgattcatg

SEQ ID NO: 9540 - DNA, 189 bp, Glycine max
  modified_base (9)..(9): a, c, g, t, unknown, or other
acattcacntaaatcactaattcaggcattttgggtaatttataactgagattgaacctaccaaaacctattctcttttgtccttcatccattagctaccactcttattaaaaacttctagaacaaacaaaatcaaaaactttctacaaacctacttataaatacaatggttcattcttaacacacatt

SEQ ID NO: 9541 - DNA, 345 bp, Glycine max
  modified_base (166)..(166): a, c, g, t, unknown, or other
  modified_base (310)..(310): a, c, g, t, unknown, or other
gtttttactacctaagcattaattaacccatgatgtcattctaatcagagtaatcatggtgcaatttggatttcttttgtaatccctggagaagtaacatcatgatttgttaatgggagataatctaatagccactacttttgcttttttatttaatatatgtagntgatgggggatctatttttcataaatggtgctttgattgtagaacaatctagttttggagtgtcataacgagtggaagaaataattagagaaaatgttcagaattctttctacaaaaagttggatgtggatgccttgagacagngaaacggcctagttagttgatttagagtgcatgga

SEQ ID NO: 9542 - DNA, 317 bp, Glycine max
ctatcatatgtgtagagaatctctactttttgcgcgctctggaatccaccgtcactctcccttctcaacgcaaggccatcttcagcgaccttctctcaagagacgttgctcttttcttagaacgatacgggtccaaactctcgtgcagtgagcttaacgaattctattcgatgaaagacggttatgaagttaattggcacgcgaagcggttaaagagcataattagtccgacttctgaagaactgaagatgcggccagtgactgtgaaaaatcggaggcgcgcctgcttggacaaactgctgtgccaagggcattac

SEQ ID NO: 9543 - DNA, 371 bp, Glycine max
  modified_base (240)..(240): a, c, g, t, unknown, or other
  modified_base (273)..(273): a, c, g, t, unknown, or other
  modified_base (284)..(284): a, c, g, t, unknown, or other
ccggattcccggtcgaccagcgtcaagagggtggctgaccggttgtcaagatgatgttgggagtactgaacagaagagcagccaagagatgtatgataccccaggggaaccagtactgtgaaacatttggatggagagaaaggttgaagctgactagcattggacgagtaagctaatgcagagtctgtgctctcagctcctaaggaaaagaagctcagtggtagacagtggtttgaaagntgaagagcgaaaggtgtggctgctgtcgctgangaatctgaagnggaggacgaggaagatattgactttgatgaagatgattttgaagatgatgaaaaggaggatatgcttgagcattatctggctgaaaa

SEQ ID NO: 9544 - DNA, 233 bp, Glycine max
aaaaaaaaaaaaaataaaaaaaaaaaaaaaaaaaaaaaaagaaaggaaaaaaaaaaaaaaaaaaaaaaaaaaaaaaaaaaaaaaaaaaaaaaaaaaaaaaagggaaaaaattttagaggtttcaatattaccaaggcttacttacaaattattgcaatttatatattgtaatataaattaaattaaatgcaattaatttgcacaacgttttaaactggaaaaacctgtaaaaa

SEQ ID NO: 9545 - DNA, 385 bp, Glycine max
ggaagatatcaatacgtaatttattcatacaaaaatagaatatgacaaaagcatcaattttattcgtgcatgatgatgatgcttaattttccagatgaaatatcatgttctcattaattacatatcttttttcatgcatatgcattaatgaagcttcaagcagatggctggaacctaactttgtaaggctcatcagtgagagccacgcgctggttcccattactatccctaaacaccccaacattcctacacaaaggcttgcagaagttgcacactgtggggcaaaacacgagcttgtaatcatcatcatactcctcaatcttgaaccagttgtcgatggtatccttgccagggtttcccaacacaccaccagtggtcacaaacc

SEQ ID NO: 9546 - DNA, 177 bp, Glycine max
atactacaatctcaaactcttctactctcctttaacaatctctatcattacttacctttatattttcaaaatttatcctcttaatattccaatcatccttatattcttcaacttcacccatcataccctttctatttaactaatattaaatacattcccccatttttaataaaaatt

SEQ ID NO: 9547 - DNA, 310 bp, Glycine max
ggggaaacggaataaaaatgttataatgctaaatctctggatggagcccggtaggcagaaaagtttcctttaaaaatctcacatcaaataaaaggtttcattgttgatgttgacaattattaaacaaaaataatggaagttctcctatagggactagggagcatgttgaaaactgttgtcaacatgttttagacaactcgggttacagctgcatgtatcgcattcgccagaagtgggacagttttggaactcagaccagccatgctaatcctcccatcaaatgtcatgtatatatggaactctttaatca

SEQ ID NO: 9548 - DNA, 406 bp, Glycine max
  modified_base (8)..(10): a, c, g, t, unknown, or other
  modified_base (37)..(39): a, c, g, t, unknown, or other
  modified_base (62)..(62): a, c, g, t, unknown, or other
  modified_base (85)..(85): a, c, g, t, unknown, or other
  modified_base (161)..(163): a, c, g, t, unknown, or other
  modified_base (179)..(180): a, c, g, t, unknown, or other
  modified_base (234)..(236): a, c, g, t, unknown, or other
  modified_base (286)..(287): a, c, g, t, unknown, or other
  modified_base (313)..(313): a, c, g, t, unknown, or other
  modified_base (323)..(324): a, c, g, t, unknown, or other
  modified_base (338)..(340): a, c, g, t, unknown, or other
  modified_base (356)..(357): a, c, g, t, unknown, or other
  modified_base (381)..(382): a, c, g, t, unknown, or other
aatggcannngcaatgctttgtgaattgggattatcnnngttgtttaagaagggggatggtnctcaaaagtgtcaatctcatttnaatggtagaatgtcatagcatctgctcaagtaatgtatttttctctgagtatgtccagaagtaagaaaaatggatnnntcgaagtcaatcttcnnaagtttacccagcagcacgtagtcaaggggaagttgaaatgggaaaatgaatgnnngtgttggaaagactcgtgtggattctctggtgggaaggaatcgtgtcagnntggggtcttcaagaatcactgtggcnttgcaatcannaaatgtcattattnnncaattctgaccaagtnnatggcggtcaagacctgggaagtnnattgcaagagaagggatgaatcaa

SEQ ID NO: 9549 - DNA, 300 bp, Glycine max
gatgtatataggttttaattgaatgaatcaacgggcttacaagaagaagaaatccgacaaatgcacatctaggaaataacagttgcaacaagaaaacaacataaattgcccataaactaaactatgtcaacggcattatatgatcaaaacagcaaaaccccctcttcctcaagttgcagatgagattcaaggttgttgctgagcatcaatgtagccagcatcaacaagaaccttctctttcttagccatctcaatgtcccggtcaaccatcatcttcacaagctgctcaaaccccacttt

SEQ ID NO: 9550 - DNA, 315 bp, Glycine max
taacaaaaacatggcaaaaaattagcgtaaccaataacaataaatttcgtaagattgcccaggctttgcagtttggaaaatccaggcaaactaataaaactatctacagagttggctacagcaagcaaacctaaattcctacctaaaaggctaaaacactattgccattgctccctaactcactatttccgcttgttagtacattctaatttatactcaagtcactgccaattaaaaagcccaaatcctctttcacttcctcgatctgtggaatcccgattactttccaattgctcattcgaactcttgcttgga

SEQ ID NO: 9551 - DNA, 317 bp, Glycine max
ttcttctcaccgacacgacagtcttcttattcctattgtttgcggcacagcaatggagccttgtcggtgaccgacggcattcgatctgcatcggaagagtctctttccttcacagtgtattctgtgatgccgccaccatgccttcagtgcctcggggaaacttctccaatcgccaaacccaattctgcgagcggtattctcctaaacccaattagggtatcacaatcacttcaacacgaatcataatacatgactttccaatatcttcttacgcatgacgcagaagattatacatcagaggaagtctcttccgatta

SEQ ID NO: 9552 - DNA, 387 bp, Glycine max
taaaggtggtaaaatattaaagtttctggtttaatcagggtaaggggaacttctttagaaacaagtttcccagtacatgtaagatcatggtagatcctttattacatactatttattctctatatggatgatatatgtgagcaatttgcttaaccaaatggcctttgattgttacaatccaagttgtctcctgggcttattcccatcatttggcagtaccttatgtcaaagccgatccgatcttggacccgattatcctggccgtggccacattcgaggccacccttgattatgttggtgatgacaccgtaaccaggatcccgacccgatgatctgtcaacactagatggagtccatcttccagcgatcacatcatggctcgatggc

SEQ ID NO: 9553 - DNA, 387 bp, Glycine max
taaaggtggtaaaatattggagtttcggatttaatcaagataaggggaacttctttagaaacaagtttcccagtacatgtaagatcatggtagatcctttattacatactatttattctctatatggatgatatatgtgagcaatttgcttaagcaaatggcctttgattgttacaatccaagttgtctccggggcttattcccatcatctggcagtaccttcggtagaagccgatccgatcttggacccgattatcctggccgtggccgcattcgaggccaccgttgattatgttggtgatgacaccgtagccaggagcccgacccgctgagctgtcagcactagattggagtcatcttccagtgatcacatcatggcttgatggc

SEQ ID NO: 9554 - DNA, 338 bp, Glycine max
tccgggtcgacgacgcgtacggttttgcttgttctacttatgttcttggccactatacttctgatctcctctgaagttgcacccgatggggcatactataattttgacaaaatagatgggaagcctagtgcatatggggtagatgaaagcatgtattggcgtggcggctatggtggccgctatggtggtggttatggatgtcgtcttctaggctatggaagtgggcgttgaggctactgagggggacgcgtgagatatggcggcagacgatgtggctatggcttccaacgatgatgctatggacgtgtatgatctggcatgctttgcggatataggcc

SEQ ID NO: 9555 - DNA, 282 bp, Glycine max
caaagacactcatggttaatactcaagggtagataaggggaaactcggggcttactcatcattaatgccttatatgacacaactactttcataaggcttaacatttgcttactatagtctcacttagaataaatttactcgattatcaacatgagcaatacctagaacacatgactaccataatcataactcttaaaaccttcatcatttacctccacaggtatataatcctatctatcgcttcagaatggattgactagcatgaatgcttgaactaaaact

SEQ ID NO: 9556 - DNA, 407 bp, Glycine max
acttgttctcgagcgatttctgaattacggacatcatgtaccggtttgggacctttatgggggtaaagctaatactgccaagagctgcactacagattgaagaaggtcacttgtaacacgaattatacggccaacgacattcagattggtgatgagactccaactctgatgcttaagggtgtcgaagagcttgctgatgccgttaaagtaacaacgggctcctaaagcgcgtaatgtgggtattgaacaaagttttggatcacctaaagtgacgaaagatggagtaaccgatgctaatagcattgaattcaaggacaaagtcaagaatatcagagccagacttgtaaagcatgttgctaatgctactaatgacgtggctggagatggaaccacttgtgctacaattc

SEQ ID NO: 9557 - DNA, 308 bp, Glycine max
gctcgaacgactcctgcaaaaccgcgcccagtcatgtaactgtcatgcacttgcacgcatgacacggccttttcaaggggaagttcttcagaagagttgtcctcatgttactttgcttgctactgtgacctgttttatgatgaacgtcttgcagctgactctgttaggtgaactatgtatacggaggtacagccaaatagggatattgttgaacatacactggtacctttccttaagactctctctctatctatctatctcttagaatatgtctctcatttacttctatatctctgtcacacagtcac

SEQ ID NO: 9558 - DNA, 227 bp, Glycine max
actgatggaaactcagcctctcgtcaacatcctgtaccccacctatgccacgggtgcaaaggtacagttcaacgctgcgctgcagtgcttgcaaaggaatgtaccaatcctatcggcatgaattcactctccgattaagcttgctacaattagcacacggtatacgaccagtctaaccatattgcgaactacacatggcatgaccgatatgtcattacgagattgca

SEQ ID NO: 9559 - DNA, 211 bp, Glycine max
gatgtatatagcgtttagttgaatgaatcaacgggcttacaagaagaagaaatccgacaaatgcacatctaggaaataacagttgcaacaagaaaacaacataaattgcccataaactaaactatgtcaacggcattatatgatcaaaacagcaaaaccccctcttgctcaagttgcagatgagattcaaggttgttgctgagcatcaatg

SEQ ID NO: 9560 - DNA, 117 bp, Glycine max
caagactaagttttagctttatgctaagctgttaaagaatgtaacttacgtgtattgggcatgacacaacaatccttaattttctgttggtgataattaatgtattttatcctgcaa

SEQ ID NO: 9561 - DNA, 333 bp, Glycine max
tcctgaattcccttatcgacccacgcttccaaccaatcctcaatacacgattcacctacattttttaatcatccaaactaaacttccccaacaaagatcttttcacacctaatctgtcatactaacaaattaaccacaccccatatctcacctatgaactatctatcaccatacatcatttaaaacctatttactactagataaactaattacactatataactaaatataattaaaaccactcaatcttataacattctacattatacaataccatttcattaatacatcaacaaaacttactctattaatcttacacataatccaaccaca

SEQ ID NO: 9562 - DNA, 253 bp, Glycine max
aattggaattccgacgtagacgtacgcaatcagagtgagagttcactcaatctcactgacttgtgagttgtgtgcgagcaccaaccaacaatggtgtctatgactccgagacgttgctttaataccttggtgatcgctagtgcagacgcagaaagtgatccccaaacggagcgttttgacaccggcaggttgtacatagacacattttcaaaaggattattattatgaacaggcacgtgtgcttaccaagatg

SEQ ID NO: 9563 - DNA, 146 bp, Glycine max
tcccaacaactcaatggccaaacctcatacacaaacaatactcaccctcaccatttagaatacacatcttaaacatactactcttctatatgaccaaccagtttacgtacctaaaataacccattactatcaaaataccaaaatat

SEQ ID NO: 9564 - DNA, 181 bp, Glycine max
cgtacgaaacaaagtgagagttcagcggatattgctgacttgaaagaaatgtacagagaccaagtaaccttggtggttattaatacccagggcattggtttccttcattggttaccgcctagtttggccgaaaaaagtgctcccttggggaacggaatgttcactgttcattaactatttg

SEQ ID NO: 9565 - DNA, 395 bp, Glycine max
gaatttccgggccgagcgtccgctttttttttttttctttttttttttttttttttttttttttagacattggagagtgctgtgaaggtctgcctcaacggatgatttacccatcctgactcttgctcgtttcacaaggggcaagtgttcatctccatcttgttcaaagcatctttcttttgaatttccacacatattttgtgagctttgactggcattctgcacaccagtctcttcctctggcctactgattggcttataagcatcattagctgccctctttctattgggttttctttttttcttattaactacagggtttatttcaagattaaaccctttggtcaactcaacttttggacattcaatagcttcagataggtcaaggttaaaat

SEQ ID NO: 9566 - DNA, 442 bp, Glycine max
  modified_base (371)..(371): a, c, g, t, unknown, or other
ttttcggtttcgggtatcgaaaaccaagaagaagccttgaggacccggaccccacgcaattggaccttttcctcctctttcgcaacttaaaatcggttcaaccatggccggaggttaccaccgttagggttcctttttccgccaaaacttccgcggccaacaatgcttggaaaacccggcaaagaaggaggagaaagtgggatcaaccggcgaagtcattgatgccagttgggatggcagttcctgaacactccctttgagcaatgccgtgtctctggaaggggttgcatttcctgccatggttccgatgatctccggagctcttttgaggaatcctctggcagcttcttctcagcttccgcaacacacangtgcagcttgctgtgccgcacaaaaatttgatcaacaaaagatccaagatgaattaataattgctcgagaa

SEQ ID NO: 9567 - DNA, 264 bp, Glycine max
tactattcacactctaattaatatcctctatatccatccaaacatatttcattaccctacactatctcaacctcacaacaatacattacacattttcttaaatataactctatcttaatctatataacactaaccatatcttacatatacttcactataccactacttacatatatcacctattaatataacacatcatcttaaactattcattaacaactattaaatcattaccacattttttataactctttcttaactttc

SEQ ID NO: 9568 - DNA, 329 bp, Glycine max
tcaaacaatcatatccattacaatatccatcataaccctcactataactaactcaaataaaacatatacctacccatcactaacataaaccccatcataaacaatccactacctactaatcataaaatcatcaatgactccaaataaactattcattaatccttatccccatcctataacatcatcctatcatactcatatatacatattcattaattacattcacctcatccaataatacatcattttatctaccaaaaaatttttcacaatccctcattttatcccatcttatcacatctcttttaaattctataaactaatttaaa

SEQ ID NO: 9569 - DNA, 150 bp, Glycine max
atgcagtatactcatcttcttttaaactttcaactcaaaaatacttttcattaactttacttcaaacaaaaacaatccctcttcctttcataaccatttacaagactcctattaaaattgaaaatcattaatatcctcattacttacata

SEQ ID NO: 9570 - DNA, 355 bp, Glycine max
tctcaacgtaaaaatgctgcaatgttggatagcgacgatgatagtactagtgtgagttcgtcatcaacttcacgaactgatcacatctccgtctcagggaacgaagaagtgcacttcgatcaagatggtctgctcgatcaagctctcgatgctttggacgaaaaaaggggttccacaagggagagagcgttgtcagtgatcattggggcattcactagcaacatgcagcatcattttgttgacaagaaatttgctactttattacatcagtgccttgcttcaataaaaaagggatccaaaaaggcatctgcaaaggagatagctttggcatcacatgccattggtttgttgaccc

SEQ ID NO: 9571 - DNA, 139 bp, Glycine max
  modified_base (37)..(37): a, c, g, t, unknown, or other
  modified_base (54)..(54): a, c, g, t, unknown, or other
  modified_base (57)..(57): a, c, g, t, unknown, or other
  modified_base (98)..(98): a, c, g, t, unknown, or other
  modified_base (112)..(112): a, c, g, t, unknown, or other
  modified_base (125)..(126): a, c, g, t, unknown, or other
caacgcaacacaaaacccaaggagaggggaacgcagnagggcaaccagcaaaangcngcgcaccagacaaggaaagacaaagcagaagggcagaaaangggagcaccaaagncaagagcaaggcnncagacaccccaga

SEQ ID NO: 9572 - DNA, 177 bp, Glycine max
  modified_base (13)..(13): a, c, g, t, unknown, or other
  modified_base (74)..(74): a, c, g, t, unknown, or other
  modified_base (81)..(81): a, c, g, t, unknown, or other
  modified_base (120)..(120): a, c, g, t, unknown, or other
  modified_base (140)..(140): a, c, g, t, unknown, or other
gagggagagaccnccgacgcaaagaaccaagaccagaagccggggggaggcccagaacccgaaacggggcccanaagcaangaagccgagaacccggacaaaaggataggggagccccgncagaaaagcagcgaagccgngagggagagggcacggcaacggaggagaaggcgccaa

SEQ ID NO: 9573 - DNA, 111 bp, Glycine max
ccacacaaggaagaggacaaaaggaagcagcggccaccccagaaaacgcttcaagaggaagaggagaagaagagagggagcagagaacccaaaaggggaaagcaggagggg

SEQ ID NO: 9574 - DNA, 300 bp, Glycine max
gacctacacgtacgcccacccgtcctaatttctcccttttttgcttttctgcatatgtctcaataccaaggaatggatgaaacttatcttgtgcttgattcgtgaaataataactgaaagcatgaagctctccttctccgtcccatcatccaaaccccactcgaagcccatagccttcttcaacacctttgacgacaatttcacctcccaaaacgacaccggcttaaccaaatacctaattaccgaattcaacccttccaaaccccttccaacttccttccccaaaaccctatttccccc

SEQ ID NO: 9575 - DNA, 266 bp, Glycine max
accggccgaattccgctcgcgccacgcgtccgatatcatattattatgattgctaatatcttattaacttatgggttattatatcattcagtgtatcactgatcctagaccattggaaccagaaagattgaaggcacttcggaaccagtagtgcaaggtcctattagaaagtgaaaatggaaactatgatgttagacaatcttgtaattgtagcttatatctacttacttaattgacaagccatgtctcaacattaaaaacaaaaa

SEQ ID NO: 9576 - DNA, 176 bp, Glycine max
ttaatatacctcttaattcaacacgcacatgttacacatatttacggcaagataacaaaacctaatcacctctacttcctttcactttaatttcttatatatcgttccttgtcaaatattttcatcaatcttaacattcattatcaatatacataaaccctaatccaacttatatt

SEQ ID NO: 9577 - DNA, 68 bp, Glycine max
aattccgttcgacccacgcgtacgtttaatcacaacatgacatattgtgtctggtattatctctctct

SEQ ID NO: 9578 - DNA, 82 bp, Glycine max
aatttcctttcgagcaggcgtacctttaatcacaacatgacatattatatctgatattatctatctcttgataattaacaac

SEQ ID NO: 9579 - DNA, 421 bp, Glycine max
tcctcaattcgcccgacgccccacgcgtacactgagctacttgcttacttcctgttttcagaatcaatagtcaccacctctggctatggagaattgcttgcagctgctcggtgcaacaaaccttgccttccctagcagtaccaccaccacccaccctggcattcttcatgtcgcgaaattcacaacataacgtatccatttcgactaaaaggcgacccaatcggctgccgcgatcaagattacgaattagattgcgttgaaaacgtgacagtaatgactctattttcagggaaattccacgtgcatgaaataaattacaagatgtacgagatccggttgaccgatgctggtgtggtggaggacattgcttgctcaattccctcgtatttctttaatctcttacaattcacttacatcggtg

SEQ ID NO: 9580 - DNA, 137 bp, Glycine max
ctttaataattttcaaattcaaacttacaatataaaatacttccaaaacaccattttctatctctttaaaatacaatctaattaaacatcttcttcattcttaattactattaaatccttcatgctaatatattctt

SEQ ID NO: 9581 - DNA, 350 bp, Glycine max
tccttaattccggtgtgcgcctacgcgttctgctgattctaaactcaaggcctccgattttcctggaaccatttttaaaattgcgacgtgagagtataagtctagatgtgaaggatacttggtggtaaattgttactttgcaaagcataagcttgtattggaagtccttgatgggtgtcttaagaataagattgaaatcccatggtctgatatcatggctatcaaggctaactaccctgaagatggaccaagcaccctcgaagtaaatcttggcactataccctttgtttttacggagatcaattcacaaccaatgaaactaactttgtgccaagcaacatcagacttta

SEQ ID NO: 9582 - DNA, 219 bp, Glycine max
gattatcatcaaatcaagttaaccaattatacatacctccttcatctacccttttcgaccctcttcattacccttcactaactcctacctttttctcattatacatcacattcccaatataagaaggttcactacacaacacaacccttcaatgacatacattttccctatttatccccaaacctactttatctaacactttctatccaaaccttccat

SEQ ID NO: 9583 - DNA, 384 bp, Glycine max
cctgaattccgaggggcgacttcacgcgtcctgctgtgcaactgtttgaaacccggtttttgtgccacacgttcctacactgtcttatgtgcttggaccttcttcgcggagctggcgctacattttgccgtttactacgtcgtcacgggtctatttggctcctccgacgatcaccatcaccgccaccgtcacgactaggatgacgaggacatgccgtctatgcgccccccggttacagtcgacgagatcacagcatatgagctcaaggcctacgacggcaccgatcccaacaagcccttgctcatggccatcaaggcccagatctatgaagtctcccagagcaggatgttttatggacctggtggaccttatgccctatttgct

SEQ ID NO: 9584 - DNA, 281 bp, Glycine max
ccctttatctttttcttgtttcttattcaacaaaacttgtcaactatgaggaattttttccaacctatcatgacaatatattaatttcaatcataaattcactgaattttaagaaccactactcaaaatacactgttcgatttccccattttactcttcatatataggcatctaacgttcttccaaatctttttatcatatatacaatgaatattacacttatttttacattttggaagatttgctttttcttcattctaacattcccaccaaatacttcc

SEQ ID NO: 9585 - DNA, 254 bp, Glycine max
ataatcactttttactagatatcattttcctcaacaagtcaaacattcatacctaaatcatcatccatcaatcactaccgattctaaattcaatcctataccaacataattaatccacatttacaattaacacgataacacttcctactttcaacttacaaaaaaattgactaccttatcaaaaatcacactctttacaacattcactttatattctttcttaattacacaatactcatatctatctttttcaa

SEQ ID NO: 9586 - DNA, 297 bp, Glycine max
gaatttccggtcgacccactctttcgttacaaattcagaagtacccaacagtcaatccaaggtaaatggtgggagtgatatatcaactgatggggcacaatgttctggtgatgctaggaaccaatctcatttatatcaagattcgtccatattatatcattttagagacattcatagaagacaggttgagtttataaaaaagagggctcttctattggaaaaaagtctcaatgctgagttccttaaagaatactttggtgatccaaaatcaaatgaatcatctaatgaataacttaa

SEQ ID NO: 9587 - DNA, 231 bp, Glycine max
gccatacgagtctttctttgggatgttttatttggatgtaagttatcatacatgcatccttagctttatcataaaagatataatgaagaagcttccattcttgtagtgcttatggttttggtggtttaagttcattaactaaaccatgctcaacattcatttttggtatgctggaaatgtgaacaagtgtattttgctgagattaatcaaattgggttgttggctctctca

SEQ ID NO: 9588 - DNA, 197 bp, Glycine max
ttcaaaccgcttgggggatttaatcatttccaaataatcaaccttactataaataccggccatgtgcataagtcaaatgaacctttggcaacttttagaacctacaggaggttaaaagttgtccaacttgtttttaacaatatttcacttatttatttgatctattttaatgctattaaatattctaatataaatat

SEQ ID NO: 9589 - DNA, 63 bp, Glycine max
ccaaccctcccgtccgtccgaattcaacagactcaactgtgctttcacactctacaccaacca

SEQ ID NO: 9590 - DNA, 253 bp, Glycine max
atttcctgtcgacccactcttcggcaagggattcaactatacccaattaactttcattttatatctccttgttgacttcgggctcggtatccctaggttggttctacattcacctattatttaccaattaagataacacattatcctttcaccattccacctactcttccataatcagttactctaacttttctctacacttttttcaccgtttttttaccctcacttcaaaaacatactgtcacatcttttc

SEQ ID NO: 9591 - DNA, 281 bp, Glycine max
cgcgtccgaatggttactatgaagctgatattgatgcttaggagatattcaggaacttcttctttggaggaatggcccctgcagccaattggggaggatccagttattgaccagctaggttcaatgattacaatggtcataggcatgctgatgaacatggttctacttatgataaggaaaaccatttagttctttttctccaaaccctatttgcttattacatgatacactttgattgcacccttttggaatcctttcccccctaaatttactaccagctt

SEQ ID NO: 9592 - DNA, 225 bp, Glycine max
ggaaggataacttcccgcttgtctgctctccttctactcactgatctgcattttcacatctgatcattcgtcactcacctcaccatctcccaacattgacatttccatcataatgctgttagtgggatcatcaatcaatttattaagccatgcctagcttcactgaaaataggggatcaatgaaattctgtcaagtcatgccattctatttctgaaatcacttgt

SEQ ID NO: 9593 - DNA, 65 bp, Glycine max
cgtacgccacgcgttctgaactatatgttcaaacacttatgttctcatgccagaacaagtttacc

SEQ ID NO: 9594 - DNA, 61 bp, Glycine max
cgtccgcaaagcacgacttatcttaagaaataagctttactttactaacccacatccaaac

SEQ ID NO: 9595 - DNA, 362 bp, Glycine max
caggaaactccaactcatttgtttttacacctttctggctccattggctttcgccaaagtccatatccatctatatatatttgcacaattgttcaactatccttatctctctctctctctctctcaccactaagtttattagtattattatcactagctacctgctatcaaagcatcacaaatggcttctacagacaagcctgacgacgaccctgaatacagaacatcttcaactccagctcctgctggtgttgattactttaaatttgatgtcatcctaaggtttctattgtttgcagcatcactggtagctgttgtggtgatcgtcactgctaatcaaacagaggttattcgtgttccac

SEQ ID NO: 9596 - DNA, 142 bp, Glycine max
cccggtcgctgcttcaaccttgtagttattctctttcttcttttttagctatctctctcttgaaaaatctagatcttgatcttgcttgatctaacattacgcttggagtgaccgtatctgtatggatctgaaccagaatcta

SEQ ID NO: 9597 - DNA, 145 bp, Glycine max
cgcgtccggtggtggtggaggaggagggaatgaatagggttggtggaaatggtgttggaaacagtgggggctgactagggagctggagagtgaggctgtgtgtggtctgcggtcggtgctatatgtgggtgttgatggggctact

SEQ ID NO: 9598 - DNA, 399 bp, Glycine max
aatttccggtcgaccacgcgtgcgctgtgactgtacatgatgatacaacccatattatgatttaccaatatggtctctatatgagggctgagactatatcttacatgcgatatgcttgtcctcctatggatacattggcaatacgccacagtcttcatactgaatctcaagctcccgaacctgtatctgttagtcaatactctataagtgtacagtgctattatctctcatacaagcactacaatgatcaatgacaaaacaataatctattgaacttgcatccaattctacaggactacatactaatggtcaatcatctaatgacctatatgcgtcaactacctggatttgatgataacatcccaccctttgcaaacactaacagttcaaacacactta

SEQ ID NO: 9599 - DNA, 116 bp, Glycine max
catacttaatactcaacatataaaactaaaccttccaatccttccaacctccactattatatccattcctcatactatttaactaataatatttctcctttaattcataactaaca

SEQ ID NO: 9600 - DNA, 328 bp, Glycine max
tattcccggtcgacgcacctccgctaaaaaataaagaatcatctcatataatatacaactatcttaatcctaggaacgtattcataaacacgagggacaaatcttagaattccatttcatgccattttcacttctactgaaacccaattataatccttccatcttattacttcttgctacaacatgttacacactctcactgtctttaacttcttccctttcttcatttcttatcataatttatttctgcaatgctttctctgttgttgcatgaaccataaatttcaagtctttcaacttaaagcctttattttttgaattaatttaa

SEQ ID NO: 9601 - DNA, 257 bp, Glycine max
aaacatttgctatcaattaaaattgccttacgagcgaagatctaaaaatccttgccgcggtacattactaacacaggccgacattcaaataagacacaagcacagaacaacctacatatacatcgactggaatcaatctaccaccaaatcccttgtcacagctatggaacaacatgaatgatcatgattaatatgaagattaatagtaataacataaacttcctcacagcgcatctctaaaaccaccaaataatatt

SEQ ID NO: 9602 - DNA, 400 bp, Glycine max
ttcccggtcgagcacgcgtacgtcacgcgttcgcccacgcgtccgcccacgcttccgcttttatgtggttggcttcctttcaagctcttctctgcaaatgcttgattccaagatggttaggactctgtaagctgataaagacaacactcataccgttggaaagaaagatgctgctggccatgttgcttaatttagatcttgcttcctttgacttcttgagttttatcagagacgggagtgcagggatcactaactctttcattcggtcagagtggccagcagatgacatcccccttgatcatgaagcatttacaattccaaagggttataatgcaccttaacaagggcacatcacgcaaggtgactattattgaaaagcagtaatcatctcatgggtgac

SEQ ID NO: 9603 - DNA, 294 bp, Glycine max
cagtttttattccaaaaattataagcgagctttggattcacagaaacaaacattgttacatcctcgggttgataacaatattctctctatatccatctaaatgatggcatgctactctcaagtctaaaccaaattacatgctacaacaaaaggacttacccaccccatggctactacagcatgccttgtctagttattatgatcaacaaccctttttcttcactacatgatactaatactaggtgagttacaacaaacctgccccctctctctctgcctgactccaacaatatg

SEQ ID NO: 9604 - DNA, 86 bp, Glycine max
taaaagaaccaggcttacctacctcgaggatccaacgttatagcccctttatagcgacacctaaattcaattaaatggccacctaa

SEQ ID NO: 9605 - DNA, 373 bp, Glycine max
gctatgcatatgcacttttgtcttctgggtttgtggatcttgttgttgagtctggtctgaagccatacgattttcttgcattgattcctgttattgaaggcgctggaagtgtcataactgattggaaaggagataaactggtttgggaagcttcttcactttcaatcggcacaagttttaatggtgtggctgctggtgacaaacagattcatcaacaagctctagattcattgcagtggaagtgatagcttgaattaatcttcagtgcaaataatcttctctgcaaatggtcttgattcacatgttcctaacgacatgtattaccgtaccattttctggcatttaagttgaaaaccatgtactcagaatcttg

SEQ ID NO: 9606 - DNA, 70 bp, Glycine max
ccttgggtgccatttatggaccaagacccttcaaccttttgtaccccccccccccccaaagaaccgcccc

SEQ ID NO: 9607 - DNA, 308 bp, Glycine max
  modified_base (7)..(7): a, c, g, t, unknown, or other
acgcgtncgcgacacacaggttccaaattaagaaattggagaacaagtattagggtgaaagattctatgctagctctggaacaatggatgctgcagttggcagaatttcatgctactgctcaggttcccaccaaacctaagaaaccttctctgaaagaaagaaagcataagttgcttaccttcttgcaagagaagtatgaacctggtcatgctaagtggactacagaacgctgtgctgtttggagatgggttgaagactgggactacaacaaaattatcatttgcaacagatgtcaaatagcagttca

SEQ ID NO: 9608 - DNA, 171 bp, Glycine max
gacgcgtacgctctgacatgtctgcatcttaagctttcatttgctgtgatgaggaaatgttgacagggcatgatgaatctgaaactttggcagcgcaagataatggatttgtaaaatctcttgaacgtatctatgaacgatcgcaagcaattgattcatctactgcacaaa

SEQ ID NO: 9609 - DNA, 308 bp, Glycine max
cacgcgtgcgccagcgacaccttcttcttagtctccaccattaagttccagaacctcaccacttttccctgggttggggtcttcaaccccaccctgcttgccaccaacctcttcatctgccatgacaccatcttccccatcttctgcaaatgcccccccaacagccaaggaacaaattacatgatctcctacgtcgtccaacccgaggataacatgtcgtcaatagcttcaactttcggtgctgaaaaacagtccatcattgacgccaacagcggtgagacaactctacatgactatgacaccatttt

SEQ ID NO: 9610 - DNA, 252 bp, Glycine max
tccaacgacaccttcttcttagtctttcaccattcaaatttacaacctcaccacttttccctaggtaagttcctttaccccaccctgctctccaccaacctctttcatatccatcacaccatcttccccatcttctgcaaatacccccccaacatccaatgaacacattacattatcttctacatcttacaaccctatgataacaatgccgtcaatatcttctacttttagtgcttaaaaacattacatcat

SEQ ID NO: 9611 - DNA, 234 bp, Glycine max
cacttactcctaaattacattttaaaccatcaataatacttttgcgtctgggtttttctccagcgtgggtactcccatatcaaccataaccactcaaactcactagctaccaactattttataaacatctctgattgctccctatcccaacctatcatctcacaaccacactacactgattatataactccttattcgcctcttcaatattatctatctacataaatcaatcac

SEQ ID NO: 9612 - DNA, 199 bp, Glycine max
ttcctctttctacccactcttcctaaaaaaaaaaaaaaaaaaaaaaaaaaaaaaaaatttaaataaaaaaaaaaaaaaaaaatattttaagaattggttatatttcataacacttgcattccatcttaatttcttttatataatttcacctaatttcattttcttttccttcattttccaaatttttatacttttaaca

SEQ ID NO: 9613 - DNA, 296 bp, Glycine max
acccacgcatgcggtggacgagcgagcgagcagttacaaagagaggatctgggacttcaaaggcaagggatggcgcggtagtaatcacagacgtcttgcgatccttgcagagtcataagtgtgacaatacaacttcgtcatagacacactctcacttactcacagctgaactcgagtagtgcttcacacgtcttgaaagcgcattcgcagaagaataaaaggcttccttagaaacgaccaagttcgcgctgcgctggttcaagaacttaggacatctaacattggctagcaacgat

SEQ ID NO: 9614 - DNA, 371 bp, Glycine max
  modified_base (326)..(326): a, c, g, t, unknown, or other
tgaaagaacttgtaaaaaaggataagcattgataaaatggcataataatttttatataaaaaagaattgtgctgcttaatcaatggcaaatactttgaggtccacttgctagagaaaatacatccatccacccgtagagaaaaggggggaataaattatactattatacaataaaataaaataaaattcagcatccttcttcgttcaacgtttctccaagtcttccctgacctagaagttggaactctccgttcaaatctctggattaacctgaactttgttctttgcaatatcatatctcatcctatccctaactataatattgngtaatgttgtggatagtagaagcagttcaaaatgaataaaataat

SEQ ID NO: 9615 - DNA, 174 bp, Glycine max
taaatttcgactcaattcacttacatcttcttccaaaacacttattaatcatttaactcacttctattcaaaccatatactatcaattaacaatcaaaaatatattaacataattcttccaatatataatttacacacttaatatataattattaaataattcttccttttttt

SEQ ID NO: 9616 - DNA, 214 bp, Glycine max
  modified_base (126)..(126): a, c, g, t, unknown, or other
gaattaagggttacgattcacggagaagggagccatgagaaatcggctatccacattccataggaaggcatgcaggtcgcgtcaaattactccaatctctgacatcggggaggtcagtgacaatanaataatcaatactcgggcttcatgtgagtcatgcgtacattgtaatgaagtacatatcttaaatcccttaactgagtgatccattgga

SEQ ID NO: 9617 - DNA, 276 bp, Glycine max
ttcttcttaacattttctctaatacgtttttttttcattttgttctaacacaataaagtccagttaaaatttctttcatcccttgataataatatcacacatcttatcacatcatcttttatcacctttatatacacatttttctcacatctttattattttttactttattaatactatacttataatcacaaaacatataacttcatcccaatgatattcattccatactctctaatcacacaaatttcactatcaattcctatccctttaatt

SEQ ID NO: 9618 - DNA, 323 bp, Glycine max
cgacccacgcatgcgtccgcatcaagacacacatcattagcataggtattaatacgagggctgagtactcgcaggtggacgagacacgaacgctcgcacgaacgctcatctactggaccttagccttctcattatacatggccatatgctatatatggcctttccgaatgaatcacgtaacagacgctgaacatataaaccgcgcatagcttggaatgcctgctacaaagctgtggcttgcctgttactgtgtacatactcaaacaattcgacggaaccttcgactcagacgaccgttcaaatccagactctatcgccgatat

SEQ ID NO: 9619 - DNA, 131 bp, Glycine max
ctttatgcaatttatgccataggtatggacttccagcccttgaaacctgcggtcgaagaacaaggactttcaactgaggacctgccattttggcacttatcggagacgtacgataggaactccttttccca

SEQ ID NO: 9620 - DNA, 344 bp, Glycine max
tcccggctggacgcactcgtccgcttggcagcgcgaagctcggaggagcgccgcttgtcatggcggttccaccatccaaaagtgaagccgctgagaaaagaacattcctttcacaattttactctcactatctcggaaaccgaatccacgctctctatccctacttctccacaaatctcttgtccaccttcgctctccgcttcagatcaacgcatcatcggcaatgtctccctcttacgctaccttcctcttcactcgacgctcccttgttcatgaccaacagatctagagtgcatgacgttttggaggatatattagagcgtgtttcgataaatatgcatagc

SEQ ID NO: 9621 - DNA, 110 bp, Glycine max
tcacacccttttaatctcgttatcacaatttagtgaaccatagtgcatctatcttacttgatctttatatctttttagttttctttatatattgttttacttaataaaaa

SEQ ID NO: 9622 - DNA, 253 bp, Glycine max
catcaaaactcaatggaattttgcttcggttttttggaaaaacttacaaacatgatccccaaaagagaaacccagaaatgtaaaccaaagaaagggggcctataaatgggggggtattcaaacactaccagcttttgtctccatgattcacccaattttgaatttaaccaaggaaaaacatggggggatgtctgaaacctcccggtaaaaactttaacaccagtttgtgtcaccaaaagagcccgttaaaatt

SEQ ID NO: 9623 - DNA, 193 bp, Glycine max
accacgcgtgctccaactcctacgaacactcttcctcatcatacatatcatacataccgcgacagttatatctataaagcagggtagggtccacacttacagatatgtcatcctctattaatactatcatctcccagacatcacactgtatatatacacttagcctattatacacctaattttgacgcatttt

SEQ ID NO: 9624 - DNA, 234 bp, Glycine max
ttcgacccactcttgtcgaacgcgatggttgacgttgactttggaacctctttctcgcctaatcgccacatccacaacgggtttatctgaacaatctcggcgatcttgtctctgttaaaaaatctcaaatcttcaattatatctatcaaatataattaatttaataattcgtctcggcctaataagcttcttagcaacataatcatcatatcgcttttcgtgcacaataataat

SEQ ID NO: 9625 - DNA, 222 bp, Glycine max
  modified_base (104)..(104): a, c, g, t, unknown, or other
atcgcatctggagtttgcgacctcgtcttgtgatttccatggagggtgctgggatggaagagatgtatatcattaatgatgatgattataattacatgtcttangctctttggaactttgtcgctggttgtgtggattgtggaattcatgacacttgtgataatgcttgcagtatatgccttgaagctttctgtgatagtgatccttccacggtgactagct

SEQ ID NO: 9626 - DNA, 260 bp, Glycine max
cacgcgtccgataagttcacagtcaattcttaaaaatgggttccaaggttttgcttgtttgggttatttgcatagctgctatacttgtgatctctactgatttgtcacccaatgaatactaaaattttaacttaaaagattggaagcatgctccaaatgggttatatgatatcatattgtgttactgttgttgtggtgtgccttggtatggcttcttttgtgtcccttattattgtggctgctttggtggcccttattat

SEQ ID NO: 9627 - DNA, 458 bp, Glycine max
  modified_base (413)..(413): a, c, g, t, unknown, or other
cggaatgcgttaagtctccttacttgccgcactgtgttacatcatgataaagtggatagtgtgggagatacagatcttgatgatggcttgtgctgcatatgttatgcatgtgaagcaaatgctcaaattgcaccttgttcacacaggtcttgttatggctgcattaccaggcaccttttgaactgccaaagatgtttcttttgcaacgcaacagtgacagatgttagcaaaattggttagaagaccggctaaggaggagcttctattttatggttgcttggttccggttgaagtcagctagtcagtaactgattatttgcttatttatgaactacatatataaaaagtgacaagaaatgtaaaggaaaacaaagaaggaaaagatgggggagaagaaaaaaagagggggtggngtaatcgggtaggagttaatactgttccagatagtgaagtgtttc

SEQ ID NO: 9628 - DNA, 275 bp, Glycine max
tcccggtcgaccagctccgattttgcagcctgggtcaccttagcttaaccggttttttagccttggtaacctgtgccaatggtctctaacctaaatctaaaaccggttagttactcaaattacctatttggcatgaatcctgccaatatcaaattatgcaataaattaaagttggggttggatattgtctttttggaaaatctggtgcactctgttctggtgggtggcaccttggagtcctatcatggaaaaaaaaacccattttatgcgggttc

SEQ ID NO: 9629 - DNA, 358 bp, Glycine max
cattcagtgaaacactagctagggtatgtgggagctctcgttgtttcggagttagggaccttacgcagccatggccactgctacgaatgccgccgccgccccaccacgccagctctcccagaaggaagctgacatccagatgatgttggccgccgacgtccacctcggcaccaagaactgcgacttccaaatggaacgttacatcttcaagcgccgcaacgacgggatttacattattaaccttgggaagacgtgggagaagcttcagctagcagctaggggtatagttgcaatggaaaacccccaggatatcattgttcaatctgcaaggcctaatggccaaagagcggttctgaag

SEQ ID NO: 9630 - DNA, 286 bp, Glycine max
ggaattcccggcggtagctcacgcatcctgagggccatactgcttccacccatgagctggttccacagaatcatacgtacacgtgtcgtattctgtatatacattgcgagctccttaacacattgctaccttcttaaggtaggtactttttaatttggtacaagtttcagttttcggtgtgaattagtttaatcaatggaaactcacagattaatccttcttcaagtatgattaataatcatattcataattattaatctaatgaataaaattatttattaataat

SEQ ID NO: 9631 - DNA, 374 bp, Glycine max
aattcccagctgcgacgcactcatactcaaaacttgctattgtattgcatcttatcttattgtatcgtattatatctcatgtcatgcgaattaaattcgtcgagtcgatctaaatctcacccgccctaactcgttctctttcttactttcaccctttgttcttatctttcctcactcaccctttatatttcattcctatcttatccaaactctttcctccacctccattctcttctcaatatcaatatttcctctcacttgctcccattcctatatctcttttctcctctccaattacccttattattattctttcttacttttctatctcctcacatttcaatattacctccaccttatcatctcgttcttct

SEQ ID NO: 9632 - DNA, 316 bp, Glycine max
tttttcgtttcgcgagggttgtttcattcgagcaacgcaataattaagttaattatacaaaatttgactgaattatatattctgcagtaatgtatgaaaattctgatatcattaaaaaattgtttcaattcttggtttcttctaatgggatttataattttgtgtttaaaggtaccaaattttaacatatggtattgcctcagttaatgtgtgaatgatttaacttctttggcttaatgctttattgatgagaaagttctccttcattgatcaccacgaggagcaatttccctgaggggcaagaatttatattctt

SEQ ID NO: 9633 - DNA, 193 bp, Glycine max
aagcttctttacaggtttacgttttcgcaataaataaaacttcatgagaagtgtagttgcaataaaagtggaagtctctcttctgttgtgatataaaggaataatagttttatataacaaaaaaaaaccaaaaaaatcaccaaaaaacaaaaaaaaaaatctaaaacataaatatatacaaatacaacactac

SEQ ID NO: 9634 - DNA, 326 bp, Glycine max
acccactcgtccgaccactcattccctccaatcctttgatgctatcttcaactcactacaagacctctttataaagcttatacggtcccttacatcatcctaatccttcacacattaccaaatccttccacacaatagaagagctatactccatgctcaaccccaacctttaacccaatcccattccataattgaaaaaccccacttatcagataatcaacactatcatacttacccatccattccctagcaacaagtcttaataaaacatgttcatagttcacgacaagctctacagacacaaagcagacaacgagctcaccttc

SEQ ID NO: 9635 - DNA, 448 bp, Glycine max
actaccaattcaaaccttgttgtcgccccaagccttttcaatcgagttatgcgtgaccgcaaccggagcccctactcgctgcttccatttcaacaccatgaaaccttgccttctgggcctgtgccactcttcccagcccaatctttcaatctccgccctaaggaaccgcatcaacatccactgctgccgctgcatcctaaattccgaccacacatttcttacctgggattggaaccgatggctccgacatttctgccaaatcgaacacgcctgaaacttcgcctctgttctcaaggttcaactcgatgatgctatcgataatgacgattacgaagaagcggctaatgttgatagacggctctaatggaaacaacgtccacggacactgatgctgaagttacggatcagttgaagagtgctatgtacgatgaacgatatcatgatgcat

SEQ ID NO: 9636 - DNA, 428 bp, Glycine max
cccactcgtctcgctcgttgtctcgaatacaagttcatagaatcctattgcaattttacccgttgttacacttctttgcacatacgtaaacctttcaataactaacacttacacatgatcaatgccaatacatactatctcatataaacagtatctattatttaatctttgtttcttctctatctctcatttaacatttttcattactccaccaatattttttcataaaagcttgaatttttctcctaccctttacaatgatctcttcgcttaaacagcctgttatatggatcattgtttctgatcttcttttgaagcaaatacattcaactccaattaatgcaatattctttttaccctctttgtcaatataaaaagttcaaagatctcttgtttaatttaaaaaccactccacatttattcttctc

SEQ ID NO: 9637 - DNA, 262 bp, Glycine max
tattattcaatttgattgccctacaatgatcgctccgtaaacctattatatcgctagctattacaaaacgacataccaaaagtcaatagagctcttcctaactctttattctcaaatgacgcttctcccggcttataagatatttaatcagttcaacacatctagtcatatttgttaatatgatattatatacaacgtctcttcctttagtgatccattctctcaagcataatacttagtgatagaaaaatataatttcact

SEQ ID NO: 9638 - DNA, 547 bp, Glycine max
  modified_base (117)..(119): a, c, g, t, unknown, or other
  modified_base (128)..(130): a, c, g, t, unknown, or other
  modified_base (147)..(148): a, c, g, t, unknown, or other
  modified_base (171)..(172): a, c, g, t, unknown, or other
  modified_base (201)..(202): a, c, g, t, unknown, or other
  modified_base (234)..(235): a, c, g, t, unknown, or other
  modified_base (250)..(251): a, c, g, t, unknown, or other
  modified_base (269)..(270): a, c, g, t, unknown, or other
  modified_base (319)..(320): a, c, g, t, unknown, or other
  modified_base (385)..(386): a, c, g, t, unknown, or other
  modified_base (525)..(525): a, c, g, t, unknown, or other
attcccgggtgcgacaccatcgcgtctcgtcccacgtcgttcccgttcgtattaggaaccacaataaaatggtcatatatttccttcgggtgggaagctgtgggaagccaagtgccnnntggaggttnnntccaagttagtgaattnntggttgtattttgggccttaagnntggagtgtaccatactgatcctttgttcnnccgaagaagggttggcattttctcttttgatnncaaacacgcatttcnnaccaaaggggtcactttnntctttgattctgcagaatttttaaatggagcatcgtgccaattgaagtnntttggtcggaaagtgcttctcagtggacttttcctttcgagaatcaatttcagaattggccacannaagtttgggaattgtcatataatggaaaatggtaatggtgaatagtgaacccggttcccctgaatttatgttcggtccttgtttgcgagggggtagccttcaaacgccttggggtgtcagctacatttgaatctctatntattcagcaccgtgtttgacac

SEQ ID NO: 9639 - DNA, 141 bp, Glycine max
attctattttattctttttccagtggtaaatttatggggacaatacgtaaaaattacatacttaagttcatgatcctccttcaagtcccaattgcatgaacttggagactcttttgagttgaccttactacactgttccac

SEQ ID NO: 9640 - DNA, 262 bp, Glycine max
ccggctcgacccacacgttccgaaaacctttaccactgacgaattcccaggatcttcacctatattaatactgtgcaacacgcggcaagttaatcagtactccctctaccagacctggctatgttcactacctatacataaccctatgccaccgtcaatttattcacacttcactgacttcttgacacatagcttctgagtcatcgtcgtgatctaagaagaccggttgcttatacattggacgctttatgagatgctcagc

SEQ ID NO: 9641 - DNA, 313 bp, Glycine max
caattcctgaatcgacccacccgtccacacaacatggaatccacaccatcatgtagtaaccctgtctcactatacagtctacattcccgggcgaatgcactaccaacaatagggctttaaattcatgactgcatcaactctacacactatctcactacctctcatcccttataactcttctttccacccatatgccctttactctctctctccaaaacccacttatttcaaccctcatcctatcttccatcacaccatgcacgcctcgcacatccaagattccgatggacggacactagacctcgtacaatcg

SEQ ID NO: 9642 - DNA, 469 bp, Glycine max
cacgctcgagcgacgcgtccgattcgagatgcataagctcgagttcctcttcctactaatgaggttcaaacagtggggcaagcgcccaatcaattcattcagtggccgataagacttgtgaagtctatttcagttaagactattgtcgaatctagcaaagatgttcgacacaaaaggttggaacctcaacttggtccgcttgaacgcttgttgataatagttagcaaaattaggaaggatcatgtacagctaccttgggatcctgatgtactaagcaagccctctaccatgtcatttcatatctatcggaaggatatttttgaattatgtatgggtagcgagatgctaaacatctcagttatacaattgtggctgatgtatctgcataacttatgtactgataaggtgaatgcacatatctatggatttatggacccgcaatccattcaaagtgttgggaataatgcaa

SEQ ID NO: 9643 - DNA, 176 bp, Glycine max
attcccgttcgacccacgcatcctcatctaaataaaaacactaacattcaaatttcctactataacaactccaaccagatacagatacttttaatcgttcacatacttcatctataactctctatttacttaatcaaaattttattcgactaactctttacttactaaattatttc

SEQ ID NO: 9644 - DNA, 143 bp, Glycine max
aaaaaatcgtatttgtaggcgccacactcaactctactccaatcaatcagatcctagcgatgggggggaagctaaaggtaccaccgaaatctcttgtatccgccaagcccacgtttaagcatcaccaactaaaaccttaaaat

SEQ ID NO: 9645 - DNA, 295 bp, Glycine max
aacttctgctactcactactttaacttttcattcttctcctcattcctcatgggcaagttcactatctgcatcagctgatcactaacaattttccgattgatattcataatatctacttatatctacgattcaacactctttttccctaactactctattacatccaccttacacatcatctacttttcaaataacaacgatcatccttatttacctgcttctttcacaattatccacttattaccaaaacaatttctttctacaacacaagtcattcactaatatttcacaaac

SEQ ID NO: 9646 - DNA, 404 bp, Glycine max
gaaacttaatcgatcatcacttcacttcactaatacgtcatggcagacgagacccagaacaagtatgagagctctgaggttgaggtccaggatcgtggtgtttttgactttctcggtaagaaaaaggatgaagaagacaagcctcatcctcaggaggaggtcatcgccaccgagtttcaaaaagtcactgtctcagaccaaggagagaacaagcacagcctcttagaaaagcttcaccgatctgacagcagctctagctcttcaagtgaggaggaaggagaagatggagagaaaaggaagaagaagaagaaggaaaagaaagggctgaaagagaagatcgaggagaaaatagagggtgatcatcatcatcacaaggatgaggacacaagtgtccctgttgagaa

SEQ ID NO: 9647 - DNA, 379 bp, Glycine max
gtagagcgagagagaaaaaaatgttggggatcttcagcagttccgtggtgtctccgccggatgagctggtggctgccggcagcagaacgccgtcgccgaagacgacggcggggaagctgctgaaccggttcgtggagaacaaggcgtcagcggtgtcgctgcaggtgggagaacacgtgcagttggcttacacgcaccacaacgagtcaccgtggcatcccagatcatttgctgctaatgatgagatattctgcttgtttgagggggctctagacaatttgggcagcctgagacaacagtatggactggcctagtcagccaatgaagtggttttggtgattgaggcttacaaagctttacgtgatcgagcaccataccc

SEQ ID NO: 9648 - DNA, 455 bp, Glycine max
aatacccgtcccgaccgcactcgtccgcccacgcgttcgcacataattatcattattttacttgaacaaagttttagtgtatggtttggtccttatagaaacagaacatatcctgttctttctttctctgtttgcatttttgttcacttctttctttctttctttctttcttattatctagttaatcatgacaacatttatggacatgtacaacactactagtagcatcatgacaccggatttcttataccattgtattgatcaacatctgattaaatcacttgatccttttatgaaaagtgattcatctatcactacttcctcatcaataacatcatacccttcattctcttctttctcttcttcttccaactttttcttaacaacatttatcacctaattttgctcctcattctaccaccaaaatggttcaacttcatctcattctattttct

SEQ ID NO: 9649 - DNA, 411 bp, Glycine max
gacgcacgcgttctgcagcctcaatattgaacccttttgcattttacagattgatcaggaatccaaggtctaggaatgctgtgacattgttggcattatcagatttcttgtccttgacaaaaaatcagacttctatatcaggtgtcgctatcattgctgaggtgtgtgcttccatgcctattcattctttatcgtattcattctaccggctgctatttgaacatataattatttgtgatgaattagtacaaatttttgagacaatggcttatggtcgctcaagttatttaataattcctatcattgataccaccttgtaacaatatgtgaaatagttataataaatacctacactattattcattatttctatcaaattgttacaagacctgtcctatcacttgtttttct

SEQ ID NO: 9650 - DNA, 401 bp, Glycine max
ttacaaggccaactctagtcggcggatgacattaatattttgacatctattaaaccatattccccataaaacaacatttgactggctaccatactgtgaacaattgcactgcactattgcacaggacaacgtactagaactccatcgaactaatataaacgtttgctcaattcatggtatgcgccatgaagaacaacaaacaatatggctgtccaatgcagagtcctatagttaccacatatatagctttatcgacccctgatacgatgaacgatcttcgtgacaagggaacatatcttaatcacaacgaattcatagctgcaatgcttataaaaattactgatcacatccttgaacatgccatcgctggcactggtttatatgtgcttattcttgatgat

SEQ ID NO: 9651 - DNA, 410 bp, Glycine max
caaccttcggccaagcgttccgagctcttaaaatctgcaaccctttgtgagaagaatgggtctatcaaaggtggcattcttatattagtagggatgacaagccgcaaatcagaagatcttttcactgttgagaaagctgataaaacattggagaatctggagaaatgtgagagtaatgtgcggcagatggccgaaaatggcagattacaaactcttctgacccagcttcttgaaggtgcaccagaaaccaaactctccatggctacataccttggtgagctgcgttttaaacaatgatgttaaagaccttgttgctggaactgtgggttcatctctgatcaatattatgaaaagtggtgatattcaatcaagagaaacagcactgatggcactaaatcagatatcatcat

SEQ ID NO: 9652 - DNA, 145 bp, Glycine max
acccacgcgtacggatgaaattgaacttcttgttgtctttgaacttgttctatgctctttgctaaaatattaagcttgttcataataaaaaaaagcccaccaaaaaaaaaaaaaaaaataaaaaaaataaaaaaaaaaaaataaa

SEQ ID NO: 9653 - DNA, 277 bp, Glycine max
accttaaattttgtctgaaagccgagacctttaaggtcactttaatagcatttggtgatgaaaattgcgaccctatgcacttaaatatgctctggcaaaggaccgttgatatgaggattttctccaagtggagatccagatatgcatggaaaccccagaggatgagtggcagagcattccatggggttacacatccggtcccactgttaacccaaaggttgaggttttacatcaccgaggaacctatctaatgtctctgaatgaacctcttatttgg

SEQ ID NO: 9654 - DNA, 239 bp, Glycine max
ttacccctcattcactatatttctaaactcacttctaccttctccatctcgctatttttacatattcggtctctcaacctacctaactcccttctcccaacttcaacccttactcattctcccaaatcaccctaccatctccctcttcatcacaaattacttcacaccaaacatcacattcccaaccatacccctacttcataatacaacaaccactaatatcataaatcttcaccaac

SEQ ID NO: 9655 - DNA, 376 bp, Glycine max
cgggccgaccgacgcgtacggacccacggacaccgaactcaacgcacaggcttgcgcaataaataacacggcgatgatcgcgggactgatcaataaaaagcacgctcgtctgcatcacaaacacccaaataggatcaactgatataactgacacatcggaaccactaaaacaaggccttcttacatatggatcattgcctcttctatgctaccttatccaatactacatatctgctgatgcgagtcgatacgtcggaacgcgaatacgtgcccaatttggacactactcagcatgttacaatgatcacagttacctagaccgcgaacgaattggacacataatcctctgaataactacatgctctggcagttgaac

SEQ ID NO: 9656 - DNA, 351 bp, Glycine max
aaatccctcatgagcctaacccaaatccagctcaacaatctttccatgagccaacaattctggcaagagctacattcttctgactgatctgtcctcagacaaattcccgacttggtccattctgcttattgggtccctacaaagccttatcagctatgagcatccattggcttcgcgacagccatagaattcaacctctgcgatactggcatatgatcgtactcctcatcattgatggcaacatcactacctggatgaacaccgtcgttctactcacatgcatacgcatctttcgccgcaacagaggccccgttttcgacattctcaaaagctttgtcggttttagcaccc

SEQ ID NO: 9657 - DNA, 436 bp, Glycine max
acgcgtgcgtccacgcgtgcgaacgtctgaacaatgagtcccatggttgtgcttgttctacttatgttcttggggactatacttctggtctcctctgaggttgcacccgatgatgcatacgagaattttgacaaaatagatgggaagcctagtgcagatggggtagatgaaagcaagtattggcgtggcggctatggtggcggctatcgtggtggttatggaggtgggcgttgaggctattgaagacagcatggaggctatggagggggacgtggtggatatggctgatgacgaagtggctatagtcgcaggcgtggtggctatggccgcaggcgtggtggccgacgtggtggctattgtcctaatgaacataacgaggctagtgatgatgcttaccctcacaactaagaaagcaaactttctaaagcttatatat

SEQ ID NO: 9658 - DNA, 131 bp, Glycine max
acccagagcgaccctaacagtgtgtagatgacttaatgtgatggtacagctgagctgactgatacctgtcaatgagcgagtgctccctacgaggacgtacttcgtactattctacaagacatttgtgccat

SEQ ID NO: 9659 - DNA, 101 bp, Glycine max
acgctatgttcgcgaggtcgtatgatcaaactcccaaagactttgactggactgtccatcacctcgtatgctgcaagatctgatactacctataacgctaa

SEQ ID NO: 9660 - DNA, 274 bp, Glycine max
ctcattcatgcttgtctataacacataccttgcaaagcactgaggcgaaaccaatccagagccagctcaacctatcatacacacaaaccttccttcaaaaccaagcacttcattcccaataatactgtctaaaaccctcggcttcgatgagccaccccaaaccaccgatttccacaccctcttcctcatgcacctctacttaaaccagcactcctgttgcttcaccgacgacaccgacctcggcttccgtatctataactgcgaccccttactc

SEQ ID NO: 9661 - DNA, 199 bp, Glycine max
gtgggttaaatagcaccttagaaaaaataatggcccccatattattattttcgtaaaaaacaaaattcccatccttaggaaaccccacatgttacttgcccatgaaacttttacctaaaacatttaccttgcaaacacaattgtggtcacattccaaaaacactctcaacttaccaactattttacccattttacaacc

SEQ ID NO: 9662 - DNA, 193 bp, Glycine max
tcgaccacgcgtacgacacgcgtgctcaggctttgaatgagctagtaaaataccaacgatgagctgaaaagtgctgcggaataggatccatggactgacatgtccaaatagctgtacttgccatccgaaatgctccggatgctcatgtaccgtgcacacttgcgcactgacctagacccatcaatgggaggct

SEQ ID NO: 9663 - DNA, 193 bp, Glycine max
accggtctggaatgacccactcgaccgaccacacctccgcatgcttcattataactataaaatactaacactgagatcaacattaaggtgaaagagtaatacataaactcagctatccaaaataatgacacatgaccacctaaacgctatatcaatccatatcctctacagactaactaaaagattccttaac

SEQ ID NO: 9664 - DNA, 289 bp, Glycine max
acccacgcgtcctaacaaaccaactccaacctttcactctctctgtttctgcaatcacaaatttgtataatataaatgttaacgtgtcctgaaaacctaatcactctctctacttaaaccgcatcaattactctaacaaataatctctctcctccatcactgtacacctacttaatatatataacaccaaacccattcactatctcaagttaaaaatcttatcccactatcttcattccaaggaacttcccatcacaataatccaaccctaccatctatgtttcattaa

SEQ ID NO: 9665 - DNA, 261 bp, Glycine max
ctactatccatttgggagcaactgaactgcttggagagtatttttcttcttctagaaaaaattacagaccctcattccagagagttagctgtatgcattgcgagacatatcagaaattcattcaggtttctggatgcgggtggccaccttccattatacttgagggagattcttcaagggcacaagctaccttagaggctgaaattgcggctgcgtataatatgaattctggcatttgctgcatctgaatatctctgaaac

SEQ ID NO: 9666 - DNA, 457 bp, Glycine max
  modified_base (388)..(388): a, c, g, t, unknown, or other
cggtctaaaatattcctatctgaaatctattaaaaataaagaaattgtcttgctcataggggggaggtgtataacctggcggcattgaaaataacaattaatataaattgattgaccataagagtatcggtcagtgacaaatcaaaagcgtggagtgggtcttgcgttgtgtaggaatcccaaattcatttcttgttctcattctcaattcttcttttattctcattctgatttgccacacacgcataaaggtttaaaatattgggacttgattcactggaggtggataaagattgctaaaaacgtcatttgctttgtgcttgatatagcaactcaatgatattgcttcattgggttcaaacatgggcaattcaacataggacttgtngtgatattaattaatattgacccttgtgcaagccaaagatgcttttgatgattctcaaaaaaactcttt

SEQ ID NO: 9667 - DNA, 305 bp, Glycine max
ccgggcgacccagcgtcggaaaagaacagctgatctgctttggtttataccaggctcttcattgatgacctattattatcacaactttccaaaaaaaaaaaaggtggagatgcacggcattgacgatcacaaaattcaacaggatgaacccgttggttcacttgctccaaggtatgaatctgatacgattcagcatatacggaatccatggagcactggactatttgactgtcatgagaatcagacaaatgctggtatgacagcattttttccctgtgtaacatttgcgcagatagcaaaagtac

SEQ ID NO: 9668 - DNA, 181 bp, Glycine max
acccggggggacccaccgtccgaagggtttatggttcacggtctgttttgaaaaatgggttccaaggtttggcttgtggtaattatgttcataacggctatacttctgatccctgctgaggtggcacccaatgaataccaaaattttaacaaaaaagatgggaagcatgctccaaatgggt

SEQ ID NO: 9669 - DNA, 259 bp, Glycine max
ctctgtggcagagaactgctaatcgttgctttgtccaagaagatgcaaaaagagctcccaagttggcttgttgccaatcttcatgtgcaacatcaaaatcagttgatactggacctgccagtacagcagatgaatctgatcataatacagttaatgttacccattttaacaggaaatcgtcaatttctaatctatcatcagactgtaggtggtggttgcattcacaacctaattatgggtatcaaaagggtttaacata

SEQ ID NO: 9670 - DNA, 247 bp, Glycine max
atataggtgtagctgagtggtggctactggtggcttgactgttccggcatactgactgctcgtattcaccttctgacgcgcacagtaattaatgcagcatttaaaggacatagtttgggtaaaaaacgtagagcccctctgggcctggaccaaagatagagaccgaaccgtataaacaggaaaaaaacggaaaggaaaaaactatgactaaatgtactacagcagaaataatatggccttcgttttc

SEQ ID NO: 9671 - DNA, 360 bp, Glycine max
acgcgaagatcttcgatttacggttttcaatttcgtattcagcaaggtcagtgagcgcctgattcgctgaatttctttcaattcttaatcatttttttgttttctgttacagtagaataccaacccccaaaagctgtttttcatttggtagtagtactagtatatgatgatgatgatgatgatgatgatgatgacgatatttgtgtgtgagaaagaagtgtgcttgttgtgtgcaggcggcgagtgtgagatttttagagagagagaggtgaggacgctgagtgctctgctgagagattccataaccccaagaggaacatgaggaggagaacgtggatagattttttttccttttttttt

SEQ ID NO: 9672 - DNA, 286 bp, Glycine max
  modified_base (7)..(8): a, c, g, t, unknown, or other
cggaatnnccggcgggagccacgcgtccggcagggtctaatgggtaactgcctagattcttctgccaaagttgatgcagctcaaagggccaggtccactggtgcatcaggaatctcaaaaactactccttccagggtatctattccatcatacagtgaaaaaagcaatgcctcaagtcttcccacaccaaagcccgagggtgaaatcttgtcttctgccaatcttaagcccttcacattcaatgagctgaagaatgccaccagaaattttcgccccgatagtcttc

SEQ ID NO: 9673 - DNA, 252 bp, Glycine max
aacaaaaattatttgcattcttttgggcatcaaaagttaaggatgttagtatttttttaagttaatgcatggatcacaattcctaaggtggtggggggttaataattttaatatatttttgaacactgaaggaaatttttagatactcttctgcaaatctcgcataggtttttattctactgcgattggatgtttcaagttagaaaatagctagttcatcgtgcattatttagagctacttttccattcttt

SEQ ID NO: 9674 - DNA, 330 bp, Glycine max
  modified_base (82)..(82): a, c, g, t, unknown, or other
ttaattgcaatcaagaaagtcaaaatattagcatcctgtcaaatgaagcctcccagcatggtgatctgtcacaaacagactntgatataccaaacgtggaattcaaaattttcaaatttagtcatggtctatcacatggacagtcaatatttgatatgcctgaaagtaacttgtttgatcaaagttcagactcatcccatagctataacttgttcccaactatgcgtcctacaaaacgccctccggagtcagaaatgctatatgatagttttgaaagttgtacaattaatgctgccccgctatttgatcagtatgacaattatacttctg

SEQ ID NO: 9675 - DNA, 291 bp, Glycine max
aaattatacatttaattccagtgcaatgcctgatcctgttattaagatcgtaacctagccatattacgaccaccttatgaagaactaaagcaaaacatcatgcagaagcatcaacattctcaagcatgtgacgatcgagaattattatttatcagcaaaggaagaagcaaaaccactagcgagaagcctctcaacatactagccgagaatatacacctcaagattcactttttgtccgacattcttcagaggaatcaccactttcttgtgagtgtaagcgaccaacatgaa

SEQ ID NO: 9676 - DNA, 343 bp, Glycine max
tgcaacattagcccacctgatcccaacattttcatcggtgaagtacattggaatgcaactgctgaccctgaacttattctagacgtggaaacagaattagcacaggtccccaatgaggaactaaggaagaacgatcatgacattgtgatgatcggaggcgctctcttcttgaacgagcacaagctcacatgtactggatgggacgatgactatgctgccgaaggaccaaaggcttttgatccaaattctgctgtccaaggctggggggaaaatctgcaagtacacaatggagtagaatctggtaaactgaagcatgcttctgctgaacatgcaagtgaacatg

SEQ ID NO: 9677 - DNA, 372 bp, Glycine max
gctcaaagttcaaaggggaatgaatgctttttctcacaacaacaaccttgatcgtttcgttgctgtttccccggaggccgcgaatagatataaaacacaacaagaatctcgtttcggggatacaatgattgggcgcagagacagagagggacccttgatgaggaacaacatcactaactctcttcgcaaatcacgggtcctaacctcagttgcaattggtgtccttattggatgcggcttcgctttcttgttccccaatggcttcttcgtttccgactctgttgcccctaatcgccatattcctctcgctggatccaagacccagaaaaattcatcttgatgtgaatccttggatctggtcaacatttttaa

SEQ ID NO: 9678 - DNA, 277 bp, Glycine max
aaaactttccaattttggcttggccaatttttgtcctgaaggagatgacacacacgtttgtactatattcatgggcacacaatgctattctgccccataatacatcattacatgtaaataatttcacatcatgaattaaaaaacaatgacaggttgacttgaatttataatttttaactcattgctaactcaaatctcacacttgtacatttttttcttctttcctatatgacacttttacatcaattaattaatttttacattttttctaatcttc

SEQ ID NO: 9679 - DNA, 282 bp, Glycine max
  modified_base (11)..(11): a, c, g, t, unknown, or other
  modified_base (66)..(66): a, c, g, t, unknown, or other
  modified_base (262)..(262): a, c, g, t, unknown, or other
gtgattacatntctcgtggaagtgatgttggtggcagctcatattcatcagtgtattctgaaaggngtgtgggtggtggtagcagttatatgggtggtggtggttcaggatcttattattgaggatgaccgttgaagcattatgtctacaatttggagacaaaggattgctatttatagcttttatgagaatttgttacaaaaactagcttatctcaattagagatgggatgtatttatcaagttatggtggtgattacatntctggatgggatgtattatc

SEQ ID NO: 9680 - DNA, 136 bp, Glycine max
ccaataaatactatcctaccctaacactttttttctcatcggagcttccaacaaccgggtgttttcttaaaaaagactatcttcaactccccttgtctctacctaccatctacattacttattacaaccataagtt

SEQ ID NO: 9681 - DNA, 506 bp, Glycine max
  modified_base (6)..(6): a, c, g, t, unknown, or other
accggntcgaataccgggtcgacgacgcgtccgaagacacactcgttcatatatctctctgctcttctcttctgttctacctctcaaggtgctgttcttctccctcggccaaatgctagattccgtggttcaatttcggatcttgcacttctggtttgctttgccttgctttttcctcaactgggtccatctaggatccatgtgaaactctactctttctttaatatctgcggaatacgcgtttgactttcagatctagtcgaaatcatttcataattgcctttctttcttttagcttatgagaaataaaatcactttttttttatttcaaaataaaccttgggccttgtgctgactgagatggggtttggtgattacagaattttagcgaattttgtaattgtacttgtttgtctgtagttttgttttgttttcttgtttctcatacattccttaagctttcaatttattcgagtataggtcacaataggaatttcaaactttga

SEQ ID NO: 9682 - DNA, 215 bp, Glycine max
atatacttggtcttctctagaagtatatttatcagactttcgataccgcccggatatgatcggtcttgccttctcttgcactctgaacatagtgcgatcggttgcctattgcagattaagatctgcatattgacattggctgaacggagttagttcctagaatgctaacaccgatcccttatcattgggtattggttacagaggccagctcctaa

SEQ ID NO: 9683 - DNA, 124 bp, Glycine max
gcgtcctattccttcccagcctgtatttttgtatcaacatcaacttgttcctggtatgatgccaggtgcagctccctttccaaatttgtgtgtgccaatggttcaacaaggacaacactgacag

SEQ ID NO: 9684 - DNA, 441 bp, Glycine max
agatcttggaattttggttacgctagaagtggatccaactgaatctcaaggagggattctgtggtgtgactgatagaaaaatatatatttgagcgtagttatttacacatgcacttgttaaaaggctcacaagaaaatttaatgattgaatcaccattgaaatcttgagttttggctcaatagtttattcactttattgatttagagcttgctcaatcgtactctatccaaaaaaaagaatttaccttttgattttggagtgatatgactcattatgtcgatcgtattaataacaatacaccattcacctctgcatggattgaatctcttagatactgacaactttagttttgacctaagtttttgcagattggaattctttgccttctactttagttagtgtgcaccatctttagaaatatgtttataccatcagttgca

SEQ ID NO: 9685 - DNA, 462 bp, Glycine max
ttaccgggccgaccgacgcgttcgcacagattgagagggccagtctctgcatctcactcctctccttctgagccatgcctgcttcgagccgtgctttatcaggcacttcagtagcccttgcagcttctttttcagcagttttacacctttcttggacctcatcaaatcttttgaactcagtatgatacttctgttctagatggttcttttcctgctgaaatactatcgcttccctttcatatgattgagccttagcattttcagctttcaacttctcagtcaactctttaatttcaatcctcagtgatgatatttctgtatcataactccttatctttgattcagcagccttcaactctaaattcagggttgttaaacacttctcagcatgctcaatttttgcagttttctcttttatttcattttttcagccaaagttccagaaaattcttctcttaaagg

SEQ ID NO: 9686 - DNA, 380 bp, Glycine max
  modified_base (21)..(21): a, c, g, t, unknown, or other
ctaatgacataaaccctggtngggtccacaatggatctccttcatcaatactcagacggcgacgatcccgactccccctctcaaaaccctagctccccgccgcgcctactcgccggccgctccgtcgtccccaaggtcgacgacaccatgctggccctcaccgtgacctacttcttctccgcggccctctctcggcccatcgacccgacccagcacctggtgggcttcaaccccttctacgaccagctctgggcccccatccagggcccggcccaccccttcgccaaggatggcatcgcccaaggcatgcgcaaccacaaactcggctttgtctaggacgcctccatagaacctttccttatttacgagcaatacaacaa

SEQ ID NO: 9687 - DNA, 463 bp, Glycine max
cgtccgacttgttcagatcgcttcggcgtcccattcgtccgtccacgcgtccgctcaatctctgggttgtttgaggaagccacgattctttgaaaccccaatttctggtagttgatttgaaaaggctccagcaatcatatttgggatggtttttaagtaaataaatataaattccggtccaatcctccttgttgtttccctaactgagcacgttgcaactcttggccaaaatggtatccgagttaatcaatgcaaaccctatcatatatgaaaagaaagagcgtcgacctcgaactgctccatctgctccccatgatgagtatgctgtcgaactaatcgaccaacaagaaggttttgatcatataagagatataaaggaccctgagcacccatattccttggaagagcttaaagtgatcacggaagaagcagttgaagttgatgatcaacgtaattatttgag

SEQ ID NO: 9688 - DNA, 370 bp, Glycine max
  modified_base (14)..(14): a, c, g, t, unknown, or other
ctgccttcatgtangagggctcgtgcgttcatgctgcttgagctgctgatggccgcctgcttcaccttctgcctcagtcatcagaacctgaaggagtttgccctgaccaacccagagaagagcaacaccaaagaaacggatagaaaagataccaaagccgatgaggagctggatgccgaagtcctggaggtgttgcacccgacgcatgagtggcatgccctttaaccagagcaggcatgcccttgcagatcccacgtacagctgaatcttcagacttgggaaagagaggcaaaacttcaatatgaggacaagttccgaaataatttgaaaggcaaaaaggcttgatattaacaaccacacctaaacattt

SEQ ID NO: 9689 - DNA, 425 bp, Glycine max
  modified_base (37)..(37): a, c, g, t, unknown, or other
aattctgccatcaataatgatgaaagttttccgaganagttggcatcctgcacaggagctttgcagacgtcagttagtcaacacatggcaaaggaagaggagcagtattcctgtgaatatgatggccgaatttctaccatggctttcaacatctatatcacctgatgaatctcaggatatgcaaaattgcttaatcaagatagtgccacaggaaaaactccttcagaaggtcgttttctcctggatggaaggaagaagtagcattaacacaattgaaacttgtgtaaatcattctcaagttcaatgtagttctaggtcattaacccatcaggttgagaaagtaaactgtgcttgtgaatccacaacaacgggaaaaaggaaacattctgaatctatgatagatggttctgataccacttgaacac

SEQ ID NO: 9690 - DNA, 294 bp, Glycine max
gcgtccgccctcgcgttcggtttgtgacttatagcgtttgtgttctaggccggtaactgaagagtgggtgggagcagaataagaaggaagaaggaatcgtcggtgttcgactgacgatcgcatctcaaaattgggttcggatcattcctttgcttgttcgacaattttttttcgcttgcggattttcggaggcatattcttagttgaattgtatggctgttagagttgtattctcgctgctgaaattatatatgcggctgagggcacacttttcatgggaggtgtgtaagatta

SEQ ID NO: 9691 - DNA, 172 bp, Glycine max
acattcagcaaagaccggaaggtttcattgaaaggggatgctgtacagcaagccagtaagcaagatatttaagtttgtaaatagaggaaaggttttttgtctattcaaatgcaaaatggttctaaaaatggtaatttaaattaagacccgctttagaatactagaagaatgc

SEQ ID NO: 9692 - DNA, 277 bp, Glycine max
aatcaaacaggggcgaactcgcgttcaagaacacatcgccatggcaaggaacttgcttcttgtgctttttgcagtagccaccctcctccatggctcagcagcccaaaccatacacatggtcgatgatgccacgggctggatcatccttgctggcggagctgccacctacaccgactagtctttcaacaaaaccttcaccgtaaacgacactctcatgtacaactttttcactatccaacacaacatgtccaatgtaacgaaatcagctttttactca

SEQ ID NO: 9693 - DNA, 398 bp, Glycine max
  modified_base (48)..(48): a, c, g, t, unknown, or other
gcgtccgcccttgcgtccggacagttgcagctggccttctagcatggntaggagtttttcttgcaagggttggtttggtgatgttttacaggtgtagcagcaaggatcctggttatatcaggatgaatatgcatgacaatcaggatacaaaagatgacgagcctctcttgaagattgagataaataatcctgctttgctagctggaaattggtcccagctttgtgcaacatgcaaggttctttgctttcttttgattgtctgacttcttgctgtaaagctgatcaatgtcttgcatacacagattgcagatgccggtctttcctttgctttgaattgttttgcacacaattttatgttggcttttcttcagattgtcaagccttttcgagcaaaacac

SEQ ID NO: 9694 - DNA, 205 bp, Glycine max
cattctttcttcttcataatggtgtggttttcaattccactttttcctttcgtttttggttgaattttaaagctgctgatggcttccattttcattctattttttgcgattttggtttgggttctatttctttaaatggtctgattttatgaggttatattttttgaacaagttacatttacaacgactgctttggcaaagaatt

SEQ ID NO: 9695 - DNA, 330 bp, Glycine max
acccacgcgtccggggttgaagagtatcattacgctctcttttagtcatctttagaggttgaggaagctgaaggctaccttatacccatagtcactttctgaatcgccttcactgtcactttccttggaagaggaacagatacatggtgaatcgtcttttgattatgcagcaaaagcagcacatgctctcagtgatgcaaataaatcatcacctattgtagtgaatccggacggatctatatggtggaaagagacaggaattgagctaatactctattgcttgatctgcatattgacaatgaccatatgtgttagttctgacatatctat

SEQ ID NO: 9696 - DNA, 398 bp, Glycine max
  modified_base (27)..(27): a, c, g, t, unknown, or other
acccacgcgtccgaactatcccttctnctttcctcagatccatatcccgcgtcctcacctaagccggcggcagcggaagatggaggacgacgagaagacacccttggtgggagaaatcgaggaggtggacgcgagtcccgtggaggaggagggcacgagcgagcgggagaagcgcgtgcggaccaaggtcccggaggcagagatccacctgtatcggcaggggaagggccccgtggcggtgttcaagtcggcactgggcggctgggagcaggatcagctcgagatcagggaggacatcctcgagaagtacggcatgaaatcggtcttcgcgttcaatccgaccgtctgggggcgcggttttcctgtccggttcaatcccagaaatgggaggtcgattt

SEQ ID NO: 9697 - DNA, 150 bp, Glycine max
gaaattaaaaaaaaaaattaaaatttaaaattaaaaaatagggaaaaaaaaaaaaaaaaaaagaaaaaggggaaaataagaatgggaggatataagattaatatagtgtaaattaaataaaatttaatggataaaaagtaaaaaaaatta

SEQ ID NO: 9698 - DNA, 248 bp, Glycine max
  modified_base (13)..(13): a, c, g, t, unknown, or other
ttcgatctttctnttactctataatctctatgtttttaactccccgatctataaatcgttctcttactctgtaatctctctctctcgctctctctatctgtctatctctctcactcttacaaagcactgtctggcaattgtatgcatggaatgaaacttcgtcagtacttcttcttaagaactgagaaacatgtactcttatgaagaagcgcttgtttattcaaaatacaagttgttcatatgaaaac

SEQ ID NO: 9699 - DNA, 337 bp, Glycine max
  modified_base (4)..(4): a, c, g, t, unknown, or other
  modified_base (18)..(18): a, c, g, t, unknown, or other
actnaactatgggggatnttgtttcaaatttagatgaagatctaaagtgtccaccaaatgtggattcatcatgtgctgactgccaaggttaaggatgttttgttttgtttccatgattgaattctgttgactgttagactttcacattttttaataaaacacttggtatgccataagcaagtattaaacaagaaaatataatgataacgtggcatatatgctaaagactaaagagagttggcttaattggtatgatcaaccatcattgacgaaaaaggtcttgggttcaaattttctgctagtggtctttcattggtatgtaatgttgacaaccttt

SEQ ID NO: 9700 - DNA, 385 bp, Glycine max
acccacgcgtccgacttgctagtgttctattagttcacggtcttttctgcaaaatgggttccaaggttgtgcgtgttgtagttatgttcatagcggctatacttctgatctctgctgaggttgcacccaatgaatacgaaaattttaacaaaaaagatgggaagcatgctccaaatgggttatatgatagcaaatggggttacggtggttggggtggtccttggtatggcggctggggtggcccttattatggtggcggctggggtggcccttattatggcggtggttggggcggtccctgtcgtggtggtggctgtggtggcttgtgaggttggtgttgacctaatggcatccctcacaactaataagaaaactagctaaagct

SEQ ID NO: 9701 - DNA, 430 bp, Glycine max
  modified_base (15)..(15): a, c, g, t, unknown, or other
  modified_base (26)..(28): a, c, g, t, unknown, or other
  modified_base (33)..(35): a, c, g, t, unknown, or other
  modified_base (37)..(38): a, c, g, t, unknown, or other
acccacgcgtccganctcgagcggcnnnttttnnncnngggtttcaactacatgcatggttggcggaaaacagtcaacctatgccagcccaagcacggatagagtccatgcttttatttcttatttcttacatatatactagttattacatggagtacactcaagtatatgagtgtgttcagttcatatatttgtgatttttacttcagcaacatttgcagccctttcgaccgcagcatctgcatcctccgccatgtccaccaccctgactcctcctgtctgtgctttcaattagctcgattgtgtacaaaaaccgttcactagtctgccggcctatgtggatgtgctcatttgaattctatcgatgaatccatatttgtaagtcaatgtaattagtgagagaacatgaaaactccttcgtttagcattt

SEQ ID NO: 9702 - DNA, 267 bp, Glycine max
  modified_base (4)..(4): a, c, g, t, unknown, or other
aacnatttgcatatatgtataccattccctttttctcctagtgcttaggctacggactgcttctcatctgtgttgtggcaactgagccatccaaagatgcgacacaagcataagaaccaaagacactgtcagatgcctggagaagttgtggaagtggatgacatggtataagttatttacatggatcaagctgtagacacagtatatgctgtagacatataatatgctttttacattgcattttacattatttaatgattcaaaatc

SEQ ID NO: 9703 - DNA, 466 bp, Glycine max
acccacgcgtccggtgttctataagttcactgtcagttctgaataatgggttccaaggttttgcttgttgtagttatgttcatagcggctatacttctgatctctgctgaggttgcacccaatgaatacgaaaattttaacaaaaaagatgggaagcatgctccaaatgggttatatgatagcaaatggggttacggtggttggggtggtccttggtatggcggctggggtggcccttattatggtggcggctggggtggcccttattatggcggtggttggggcggtccctggcgtggtggtggccgttgttgcttggggaggttggcgtcgacctaatggcaaccctcacaactaagaagaaaacttgctaaagcttctttacgggtttaggttttcgcaataaataaaacttcatgagaagtgtagttgaataaaagtggaagtctctcttctcttgtgatat

SEQ ID NO: 9704 - DNA, 124 bp, Glycine max
  modified_base (36)..(36): a, c, g, t, unknown, or other
  modified_base (62)..(62): a, c, g, t, unknown, or other
  modified_base (104)..(104): a, c, g, t, unknown, or other
atgaatatgaaaattttaacaaaaaagatgggaagnatgatttaaatgggttatatgatagnaaatggggttacggtggttggggtggtaattggtatggttgntggggtggtttttattatgg

SEQ ID NO: 9705 - DNA, 430 bp, Glycine max
  modified_base (8)..(8): a, c, g, t, unknown, or other
  modified_base (13)..(14): a, c, g, t, unknown, or other
  modified_base (301)..(301): a, c, g, t, unknown, or other
cgtccggnatttnnctgcgttgtttcgtggttaatttttcgtgttcttgtgatctttctgttggagtatttagaacactcctttgtaagtttaactaaagaggctaattaattttcaattggaccacagcagatggctgaggagggtcacagggttactctaaatgtttatgacttgagccaaggtcttgcacggcagctttcaatgtcctttttggggaaagctattgaaggcatatggcacacaggagttgttgtttatggtaatgagtattactttggtgggggtattcaacactctnctgctggatcaactccatatggaactccactaagagtggtagacttaggtgtgacacatgttcccaaagatgtctttgaaatgtatttgcatgaaattaagtcgcaataccctgcttgaacatatagtc

SEQ ID NO: 9706 - DNA, 441 bp, Glycine max
gcgtccggggctacatggagggtctcttcaaaggcctttcccccactggagacaaaattgaagtctatgggatggccattttcacgttggatgagaattcaaaaatcgtgaaggtggagttcttttatgatcctgccgaattgcttggaggtctcctgaaaggtcccaagtttgatggcagtgctgaagatgctgttgcaagctgtcctgtactcaggaacaccggctagagcagcacaagttcaaaaagtttaacctttgaagtaaaggtttaattgcagttgttgcatcaatggcttgtttaacttttagtttttacagttatatctgtaggtaatatttactgcagactctccaaatccaagcaaattaatgttgtaatcaataacacccccaccctccttttccccatgtaataataagcttggtcaattattaaat

SEQ ID NO: 9707 - DNA, 303 bp, Glycine max
  modified_base (56)..(56): a, c, g, t, unknown, or other
  modified_base (61)..(61): a, c, g, t, unknown, or other
  modified_base (63)..(63): a, c, g, t, unknown, or other
  modified_base (71)..(71): a, c, g, t, unknown, or other
  modified_base (103)..(103): a, c, g, t, unknown, or other
  modified_base (105)..(105): a, c, g, t, unknown, or other
gtccgtgtcttaagccagagtttcaagcccccagaagaccaggaagggggagccangtctnanaggaaganaacgcctagctaacatagctaccacagagaangnatcattagatggtggaaatggcttcaaaattctaacaaagtagactcttctaatacagatagtgcatctgcacatcgtaaccaatataatcctaagaaaactgaagagagtgttggaaactgcccagtctgtcgcaagccttttcttgccaaggatttggaccatgtgcttgctctagtcggttcatattctttccaa

SEQ ID NO: 9708 - DNA, 206 bp, Glycine max
ccacgcgggcgaaattaacaattgagtttggcttctacttacaataccgagattatcatacatggttcaggattcattctgagcgcaggaacaaaacataatcagtgaatagtgaagagtgtggaattggatcagatccgttatagagagatgtcacgggggagatctgattctggagggtggttgaggggctgtttggtggtgtt

SEQ ID NO: 9709 - DNA, 273 bp, Glycine max
cgacccacgcgtcggataataacctaatgcaaagagaataccaagcccgcttctactggtgcggacaaagtgcctgctgctcagcacaggtgaggcaacagagccatccaaagatgagacacaggcagaagaaccaaagacacagccagaagcctgcggaagaggcggaagcggggggcatgaaggaagctggggacacggtggagactgagggcatggcggatgaggacacggtggaggacacggccgaagaggatacagcggaggacatgg

SEQ ID NO: 9710 - DNA, 408 bp, Glycine max
  modified_base (16)..(16): a, c, g, t, unknown, or other
  modified_base (23)..(24): a, c, g, t, unknown, or other
tcgaattgaatcccgntccaatnnccaactgcgccggttgtttttaagtcgcttctgtgtcgttacaggtcattcttaaggtgacaatttctctgcacgacatgtctgatgaacgagctgtgcatcctgattgccggaatgctagtaacccttatcatgaatgcagtgattactgttttagagtaatagctgaagctaaaattaggtcacaacaacaggaatcagaagttggacaagctagtggtggaagcaactctaagcaagctatcccagatgaatcctatctcggtgaggaaatacacgacgacagacctgatcttgaagaaaactctgatagtgatcctgaccagcccgtccttcatgaagcagagcaagaagaggttgattacacaaaaacttttgcgagac

SEQ ID NO: 9711 - DNA, 244 bp, Glycine max
  modified_base (21)..(21): a, c, g, t, unknown, or other
aaaggacacattattaaattntgagtatggttatttttagagaaggcgttggagttacgatactctcaagaatttccgtgagatctctccgctggttcagaatcacatcaaacgggtttattctacgttatgttgcgctgtggtggctgctgctgttggagcatttcttcatgtactgtgtaacattgggaggtttctcaccacatatgcttccattagaagcatggtttgattgctatttaca

SEQ ID NO: 9712 - DNA, 406 bp, Glycine max
  modified_base (12)..(12): a, c, g, t, unknown, or other
gacccacgcgtncgggacgcgtggggttcatttgtcttaattgggtgtgaaaggagtggtatgtacaagtgtgggaataaagaattcgttagaaaagacactgggagtaggaaatgtggttgtcccttcaggcttcatgggaaacctgtgcatggaagggaaggttggatggtgaagttgatctgtgggattcacaatcatgaattggccaagtccttagttggacatccatacgctgggcgattgactaatgataaaaagaaaattattgctgatatgacaaagtcgatggtgaaaccaaaaaacatcttgctaacgttgaaagaacacaatgccaacagttgcaccacgaataagcaaatttacaatgcaagaagtgcatatcgttcttcaataagaggagctg

SEQ ID NO: 9713 - DNA, 355 bp, Glycine max
  modified_base (9)..(9): a, c, g, t, unknown, or other
ggaccactngcaaatttcacggtccgttccaaacaatatggtgctttccatgctaagttctcctgtttatcctactgtccattctccaactacaccaggtcaccagtcatattcgacaggaattacaaattggtctagttcatcttatattcctagcccacgttggcaaggcccttcaagttatgcacctttaattctaccttagggaatggtttcagtgtctgtgtggagtgcatacagttgttaaatgggatcagacatttcacatcttacaatgtcatatggcctaagctattgaacttctttacaatatgaaccatcttatttaggatctcaatggtcatattctcaattt

SEQ ID NO: 9714 - DNA, 308 bp, Glycine max
gacccacgcgttcgaaatcctcttcttacactcacctttcttatcttccttctctttctatatatagtggcaaagaaaatttttgttgggtttgatttcgatggagaattattccatgttgttctctgtttccaattcctcaagctacccaattggagttggaagctctcaaattggttatagtggtcaaagctccaatgcgtttcttggtctaaggcctattaatgaattagctagtgatgatcatgagaagagacaaggtggtggtgatggcaatatgttaatgtctcaaatcagtggtggtagca

SEQ ID NO: 9715 - DNA, 250 bp, Glycine max
acttacacattcaatcccatcattgataattcaacttagggttagtgaaccccttactactaaagcatccctcccataatcccaatataaataccccccacaaaattcggtgatgcaaaaaaaaaaaaaaaaaagaagaacacttaccttaatttcaccaaatcaaccaaagacaaaaaaaaataatccatatgaacataatataaagcttaaaactattggtaacaccattttaaggagtaaaaatgcc

SEQ ID NO: 9716 - DNA, 174 bp, Glycine max
  modified_base (15)..(15): a, c, g, t, unknown, or other
cccacgcgatcgacnctttgaatttgagattggccttgaggttgatacgcacgacgacgacaaggtggaggggcatacttcgacggagagcggaaccgattcttctcagacgatggcaaacgatcagataaagatgacagacgcagctcctgcgcaggcaccaacgcagaacaa

SEQ ID NO: 9717 - DNA, 357 bp, Glycine max
acccacgcgttcgcgcacgcgtgttcaaactcagactcatgctttacagataagaagaagtcgtagggctaagttccatttagaacggataattaatcaaaaacacatcaccatttctgctctgcttggaaggcacatagacaaatccataatgtctgattctgagcgaatccaataaccctgattagcattccttcacactacccttgaagcaaacgccggaaccaagaaaagctatactattactcattactgcaactctaacaataactaaaacgatcatattaaaatcgatcacaaactttcttaaatcatcacgccccctgtctctccaacaacactgtcaatccactcaac

SEQ ID NO: 9718 - DNA, 111 bp, Glycine max
ctttcaaagtgattccaactcatactcaatgagtcaattcttaatattgactatggagttaatgctttacaagcaactgctgtttacaatgtctcatacattgcttataaa

SEQ ID NO: 9719 - DNA, 86 bp, Glycine max
  modified_base (17)..(18): a, c, g, t, unknown, or other
  modified_base (26)..(26): a, c, g, t, unknown, or other
  modified_base (29)..(30): a, c, g, t, unknown, or other
  modified_base (59)..(59): a, c, g, t, unknown, or other
  modified_base (68)..(68): a, c, g, t, unknown, or other
gctgctttcttggctcnnccttctcntgnntcccctggtgggtgggcttgtgctccttntggtccttntgcgtgggggttttgttt

SEQ ID NO: 9720 - DNA, 107 bp, Glycine max
gaatttgaaattggatttttcactttcattcgatcaatcaggataagtggaatctccaattccggctccaaattcgcaacccctaataatactccttctaataaatt

SEQ ID NO: 9721 - DNA, 328 bp, Glycine max
  modified_base (10)..(10): a, c, g, t, unknown, or other
  modified_base (47)..(47): a, c, g, t, unknown, or other
  modified_base (71)..(71): a, c, g, t, unknown, or other
cgcgtccggnctaaccagacacacttccacgtcaccattaccaccgnggaagggggagcgggaggctggtncctttaacctctcccggcggcgctgagtggtgatcaaggaaatgggtcagacgctgagttgcgtgcaacagcacgaggaccatggtgtgctcttccctgcacttgcaagtggagaattggaggttgttgaggccatggtggaggaagaccccactgtgttggaacacaccattggctgtgacaggctttctcctctgcatgtcgctgctgccaatggtcggatcgaggttctttccatgttgttggataggtctttc

SEQ ID NO: 9722 - DNA, 448 bp, Glycine max
cccacgcgtccgtatttgattcacaccttccactctcttttcaccaatcccttatatcccccctgcactgagctgttcataattcaccacttcaccatcaatttcccctccaatttcccatttatgatccatttggcatttcatcatatttcaccacttgtcctactccacttggatgatttcctaacgtattgttttcacaaatccttgttcttcatcagctaatagtttgagtccaacgaattcagcaacactatagatatatgctatatcttcctttccctatacattttccttccaaagtatctctagttctctacaaatcaacgtggcacattttttagcctaagaaaagctttagctgcaactcaaattcaaagtgtaagcctttcttgtttttattagtttatcttcaccaatggaagagaaccttaagtgtgaacaagtt

SEQ ID NO: 9723 - DNA, 251 bp, Glycine max
  modified_base (59)..(59): a, c, g, t, unknown, or other
  modified_base (70)..(70): a, c, g, t, unknown, or other
  modified_base (78)..(78): a, c, g, t, unknown, or other
  modified_base (134)..(134): a, c, g, t, unknown, or other
tgtgtatgttaggagcaaaggttgtaattattgatgtacgtgcagttaagagttttatntagactggttngatttatnttgatgttaggtaaagtattttttaattttagaggttatgaagttactaatataantatggtgtgtttgatttataggagagaaatagagtgaagagaaataaagttgagtttaatgaagtgtgagtaatattgttaatggtataaaggatattatttataatatgttatttt

SEQ ID NO: 9724 - DNA, 268 bp, Glycine max
gtccgtgatttaagggctgcggtttcaaacctgtatactagctgcaagggaatgttggatttggatgctgattggatcgattcagactcattttgactgacatatgttagagaggtggaagaattgggacagaggaaagtggatgagctctgccctggtggaaaaaaccttgtagttaatagtgagaacagggacaagaatgttgatccttttatacaggagcgttttataacattcatatttgagtaggtatcacaatatgtcaaag

SEQ ID NO: 9725 - DNA, 345 bp, Glycine max
tcctatcaacactaacctcattaactaaaatcacaatctcccaaatcaaaaacccacataccacataagcaatttcacaagatatgacgagactaccccctgcattctatcccaaacctatctatgcctccttccaccgaccactggacctttgacgccatccacaacggacccctccacagactcaacctcgactccgacaccaactgcttgaccttccatacctacgacctcttaatccttcactcccacaattatttcaccaaacaccataaatcacccaacgacgactaccacctattcccctccagcatagactagctcaaatcccaatccaaactctac

SEQ ID NO: 9726 - DNA, 343 bp, Glycine max
acccactcgtccgtttacgcataaactgttacacaagcgttctctatcacgcacgccctaacaaaaacaacgctaatttatagtacactcaagctcactacgttaagagtagcacgctagcaccaaccaacaatagcgtctctgacatcctaatgtttcttaatcaccacattgatcaccggcgcagacgcaccaccacccccttaaacggtgcgacctagacacctcaatcattgaccatacacacctttcccaaaagactcttattcatcacgaccacacctatataccaacttcaacgaatggcccacataaacctaatgtactccaaacttactgaact

SEQ ID NO: 9727 - DNA, 108 bp, Glycine max
aaaaacaaaaacaaatttttaaaacactcaagggcactacactaacaataccacactaacaccaaccaacaataacaacccacactactacatcaatcactaacacca

SEQ ID NO: 9728 - DNA, 259 bp, Glycine max
aagttctgctatatcccatttgaaaagtaatgtgtcaccttaaagtttctttcatgtttgatcatgctactatccattttgtagcaactgatctgcttggatagtatttttcttctactacaaaaaattacataccctcatcccatagagttagctgtatgcattgctagacatatcagaaattcattcatttttcttgttgccgttgtccaccttccattatactttatggaaattcttcaaaggcacaagctacctt

SEQ ID NO: 9729 - DNA, 348 bp, Glycine max
acccactcatacgctcacactatcacatgtttacctgcaatttttaacccccagaacaaattaccaatactagaaattttttaaaatttacagggcacctatacataaccttatctctcatacaaacgaataaatcaaacgacaaataaaactaactaacccacaaattacacttaaatttttacaccaattgaaaacaagcaaatcatattgaaatacatctttatacaaactctattccaaaaactacataaaacttacaatctctatgcactgtctaaaacacaactcataaaaaacacaaacctctccattacaaagggaactcaatccatacaactattccta

SEQ ID NO: 9730 - DNA, 293 bp, Glycine max
actcagacttgaaatcaaaaagagaggccataccaaaattttgaaatcaattataccaaacaccggcattccaaacactttattttgtcgcatctttttgtctgtgctgcaaataacatgaatacgcttggacaaattttcccttatagaacgcatattagctatctattaaacatatattaggagtgcccgataccacctcctttgacgagatttaaacgtcgtttctcaaattgtccaaagagactcactatgacctatctgagttaatgaataattccactgtgtcttta

SEQ ID NO: 9731 - DNA, 312 bp, Glycine max
tcttactcccactctttctattctctttttctctcccaatacctacatacattctcgtcgcttctctaaaatcgttggactctataccattattctaataatcatacctgatacatacattatttatcatttagtcaatatgctcaccaatttccatacccaaactcatatagacaatgtactaatactccacatcataataccctcaatcctctcaagtcttaacaatcacataatccaactataagattaccaaatagttactctcattaacatatcccattatcatcatactccttccacaagtatcca

SEQ ID NO: 9732 - DNA, 240 bp, Glycine max
cccactcgtccgcattctcaccctaccttttttccatatttttacatcacatcaaatttacaataaattatcgctattttccaaactaggtaggactcaaaacactcatttaccactgcaatgtaaacccttatgtacgtgttaatatatcaatattcaatgatcataagaatccaacactaacaattactaaagtgcaactataaatcacatcaattattacaaatccttatccttata

SEQ ID NO: 9733 - DNA, 438 bp, Glycine max
tccggtttcaaagtcctcagacttgaacgggtctttatatgttgctgatgcccacatgttagccgcttcttttctttctatgagtaataaagccaacaacccttttgttcttccttgtcaaacccttgtctctcatagtagtgtgagagatttgagcttcaaggtcagcatttcttggccttaccatgcttcttgtattgtgcaacgacaaaagaatagtaataacagtggttttgttgtggtaaggtgtgcaaaatggggtttggaagctgatatgaaaccacaagaagatgatgaggaaaaaggtaagaatagaatggcaaggtttaaacacaaatgtcgaaaaagaaaaggcgttttcgctctgttgtagtggttggaaaggcaagctataatgagtgaatatgtacgaaaagagcctactgattacaacctaat

SEQ ID NO: 9734 - DNA, 437 bp, Glycine max
cgcgtacggcgaggtgcacctgggttttccagccggtttctccggaccctatatttcccttttctctttgtctactattctccaattcgagcaagatggtgaccttcttctccctcgacgacgcaccgctatgttcgaagcaaacgcacaacattcatttagtgtcagaatccagcataacatcacttcgtcaattccaaatgttggtctccaggtttggagagctgaactattattatctgattttatattgcataaagcatcttcttcctctcaacttcatcaagttattgcattagaacttggcgctggaactggcttggtgggtttattacttgcacgtgttgcaaatgcagtgttcctaacagaccatgggactgaaatacttgacaactgtgcaaagaacgttcagcttaattttggattattgaattatc

SEQ ID NO: 9735 - DNA, 378 bp, Glycine max
ttttcacctatatttttcaaccagtttctacacaccctatatttcccttttatattcgatctatttataaacaatttgaccaatataattaccttcttctccctcaactactcacctctatattcaaatcaaacccacaacattcatttaatatcaaaatccatcataacatcacttcttcaattccaaatattaatctccaatattacatagcttaactattattatctcattttatattgcataaatcatcttattcctctcaacttcatcaacttatttcattataacttgtctctataactgactattttaaattattacttacacttattacaaatacaatttaacctaacataccatactactcaaatactt

SEQ ID NO: 9736 - DNA, 221 bp, Glycine max
acccactcgtccgcactttttaactccctctttaccactcttttcaacccccaaatctaaaacatataataaactgactttaataatcatcgtgcaccatccaattcctcatcaaaaatatatactccaaaaaatcacacatacacacacataaatcatacatcaatcaatcaaactctatcattcctactatacttacataacaacaaccaaccaccaat

SEQ ID NO: 9737 - DNA, 152 bp, Glycine max
aacaaccaaacacaaatatttaatcaagggcattttcataacctcatgtgctccacacatatctcactctatctcttcactacaaccctatcccattctcactaaaacaccactattcaagacatctccagaaactttaaactccaatacaa

SEQ ID NO: 9738 - DNA, 388 bp, Glycine max
acccactcgtccggccttttttagaaatttttcagataccctttttcatggacataatcactgacctctccatgttcattactccaatatggatggccattatcgacagctaaaatcctagactagatcgtgaaatcccaaattggcctaccacccaaaatactctacaatcaagtttcactctcctcgacctaccaatccccaaaactacacctcttttacctactcccacaccaaatcctccgcacatgaaaaagactcgagtggcattactgtattgacgaaacaccatttaatgcatctgtaaaaatatcatcaagaaaaacacggaaacccgtcatagattcagatgatagaccgttataccccaaccatcacctatcaaacc

SEQ ID NO: 9739 - DNA, 192 bp, Glycine max
ttaagtccactgacaactctcaaaaataggttcctttctactgcttggaggacctatcttcatagcggctatacttcctatccctgctaacgctgcacccaattaataccaaaattctcacaaaaaagatggcaatcatgctccaaatggaatatatgataccacatcgggttaccctacttgggctcctcc

SEQ ID NO: 9740 - DNA, 330 bp, Glycine max
catcacttattttttcccctatgcacaacgtatatttatccgtcttttctttaaagttgttgggccattctatcctctttctagaataatctattcatatattccattccaaattccatcgctttattttattcatcttgctttttaattataatgttaaatattctattattgcctttatttaattgttaaacctaaatgtactatttattcgtactctttaatatattcttactatcactattaattctcatcattacaattaaaaactacaatcactaaaatacaacatcaattttctccctataaacctttaaaacattccaactt

SEQ ID NO: 9741 - DNA, 317 bp, Glycine max
cctacataataaaatgatttgaaatctaaaggtgtctatggtcaatagataaaggagaaggatgagaaggttattaataagtgagacgacaattacaatgatgacaaaactgatgtatagaacgtcaacgtgaaagaaaattattgataggatgatcaatattatattgcaaatttcaaatagtataataaagacaacgatatcaaaacttatacatattagatcaatatcaaagaatatgatttgaacgatgatgaatataataacgataagaacaacaagtttcacaaaatttattcatagaaagtcaacgtgta

SEQ ID NO: 9742 - DNA, 154 bp, Glycine max
tttcaatgcataataactattacccattcaagaacctttttaaattcggggtcaacgctacctaaaaatatttcatcatctcataactcaaccccatcttctcatcctattaacattcttcccttcacaaaacttttcacaatattacttacca

SEQ ID NO: 9743 - DNA, 163 bp, Glycine max
ctgggaaatccaactccagagttaccaaacatacatttaaattacaaccccttttaaaatccctgaaaggatgattacatctataaaaataataacaacttgcttaaaacagacataattagcatacctatcccttttaaaataaaaacaattcaaatgaact

SEQ ID NO: 9744 - DNA, 220 bp, Glycine max
actaatggggaccctcacaacttataacaaaactttcttaaacttctttactaatttaagatttttcaataaaaaaaacttcattataaatatacttttaataaacaaccaactctctattatattgtgatataaaacaataatacttttatatatatattatcttatccttaaaaaacaaaaaaatatgcattccctataaaagatccaagcttactta

SEQ ID NO: 9745 - DNA, 266 bp, Glycine max
cacataacttttacacacagtttatcaacccgaaacatctacactcctttacgaactttttaaactccaagaggagaatcacaatttatcacaaaagctaacacaagcataggaaaaactccaaaaaatccaagcaaaaactatccgaacctgataaacaactcactcctctcggacaacgaataaccatctaatctaaactgctaaccaccaatgaaacctctctgcaccaaacacagactaatcccaacgctgctcaacaaaca

SEQ ID NO: 9746 - DNA, 144 bp, Glycine max
tttccaaaaggagggcgcccataacacactctccacctacaaagccgctcaacacattcctaataccgaattgcctccaactcaccctaccacgctcaatctagctctgaactattaacacaattactatcaaaatcttaaccc

SEQ ID NO: 9747 - DNA, 273 bp, Glycine max
ttatcataaattaaaggcccttgtgggggtgaatataattccttcccttaaactggactttgaagggcttacttaccccctgaaattatggggtggagctgtcattaatggaattgaattgacctcggtaaacctttccatgactttcaatgaaattgaatcaaaccaatggaggttatagctttgggcctttggagtgaatattttttttgggtggcgttccaaaaaaccggaacgacccttttccctttgggattggggttgggttttcca

SEQ ID NO: 9748 - DNA, 177 bp, Glycine max
cctttatcatccacccacccaacatactcatcctccctccattcttcaacatctccatccttaaaaatcgcagcttatccaaccttttccacatccagctaccaaaatacgatcccaactccatatacgactcctcattacacacctaacaccaatattcacaaacactctactcct

SEQ ID NO: 9749 - DNA, 340 bp, Glycine max
cttctcacccttccggagacgggtccgtttagatttgaccgaggtgcaccaacatctcgaccatttcttgttcaagactgctcctactgggatcagaaccgaagaagggtatgaaaggaattccagggtattttaaatcttctgcaaaagctagatgcctgaatcgggcgtcccactcaaggctgctttgtgtttctgccatggctatggcagcactcgcactttcttctttgaaggtattgccaaaagaatagctgcttctgggtatggtgtttatgctattgactatccactttttggtctatcttaaagtttacatggttacataccaaattttgat

SEQ ID NO: 9750 - DNA, 291 bp, Glycine max
aatctcgattattctatgggttttctttcctgtactacttaagtaacacttgaatggtttctttagagtgtggggcagcctaacattgcattaccctccacacaaaccagtactggctcaaagagacacccagagacattcatgggcaatcccaaactatttttctaatccgccgatacaccataaccacccaaagctgtaaaactagagggcacatctcaagggaacaacatcaaattctgagcatgaaacacccataacaccagatcctaacacactcataactccttc

SEQ ID NO: 9751 - DNA, 337 bp, Glycine max
tcgtactccctttcgtccgcaccgtaaatcccgggttttaattcccgatcttatgtactcgctagtggatcggttttatatggacgaggatcatctccctttaaaactcttcacatatacaaataaactgtgaggcatctttaaaatgccttcacagcaagggatttccttgctattttcaaattaatgataaatctatagaacgctttacacaacttaacaatgatcctgtttctcatcctgcacaagatcttactgaccctaactttcacttaagcaatcagtaccaaaagccttacaattaatttcacaccaaacctacttatcaccaaaatta

SEQ ID NO: 9752 - DNA, 361 bp, Glycine max
  modified_base (16)..(16): a, c, g, t, unknown, or other
aacaaccatcatggtngggttgttttgataggagggatgctttctctgagcttgtgtgttccatggagggtttgaattttgatgaggcttcttcactgttgtctgctgcttctaagcctcattatcacaacaatttgtcttcttgacttgatgtttctaaggatcacaatcaaaaacagttcaatactcttaattcgccaaccatcactgcttgtggaagtttttccaataatggaaatgggggatttttgagagcagaaaatgtggttgttgttgatgatgtcattgccccatatctcgcatgggtgaatgaattgctgatgtagattatatgcaacatctgaagaagaaaatgatgatg

SEQ ID NO: 9753 - DNA, 262 bp, Glycine max
gaagaagatgttcaatctcgagtttaattccagctctccgcgctcgttctcaagctccgtttctcggcgctgtcggcggtgacgttctctgacgaggttccgccgttggctgcgtcacggcgtcccggtctgggtcagatatcgccggcgggattcgcctacttgctgttgggaatatcgctagcattgatgctttgtggatcggagacgttcttcatcgcgatcgtgttgataccccgggttctgagattggacatgctct

SEQ ID NO: 9754 - DNA, 353 bp, Glycine max
ctcgtcctccctttcgttcggcccttgttgatgagatttatatgtccgagtattcataatgatgtatcgaaaggtcttcaaagagaatatgatgtttattttgtccctcgccgcactgttgtttgtgagaaaattcttgaagaaaaaaaattacataacatggttacaataggttttatatcccttgtataatgtacccattgattaggaattattatcatttgaacttgatctttcttacaaagaatgccaagttgattgttatacaagctcacttttgcacattgcttaagccattcaacaacttgagttttctcttggaatgataccaaattttaggtctaaatgtaaag

SEQ ID NO: 9755 - DNA, 287 bp, Glycine max
ataattgtaatttctccaacagtgatgttttcacggcatgctccttcttcagccttggacttgattccaatttatgtgaacaacttcgtgataggttggggtttgaagttccaacgctggtgcaagctcaatcaattcccgttattctctcggggcggcatgcattggtgaatgctgcaacgggcacggtgaagactgttgcgtatttggcttcgattattcatcacttgcagggttattaaaatcggattcaacgctctgatggaacatttgcgttggttcttgta

SEQ ID NO: 9756 - DNA, 214 bp, Glycine max
gtgcttaatcttaaagtttggttttctagcgaactcagccctacaaaatcgacttcatgtctaccactgtatgcaccagggcacccttgaaagctgtgatcatcaatacccaatacctagtatcctattccactagcttcaaatacgttctgcataatcttacaagtaaacattctgacatacacatatgctaaggttcagagcaacaggcatg

SEQ ID NO: 9757 - DNA, 173 bp, Glycine max
accccgttagcacctcctctgcttaatcccaaggagagccttacgcctagatatttcatccacttgaaatccattaaaatctactaatatacagtccctttaaacaccacttttttgaccataaacagcaaacgcttttcttgaaccaagataagatccgcaaacacctacac

SEQ ID NO: 9758 - DNA, 408 bp, Glycine max
cgtacgagatttcagaagaacattctgctgcgactttggaattcactggcagtcaccctgtcactggagaagtattgtatggtagtgacatgccccaaggccaaaatgaggaggttggtgacgctcaaaatgaagatggtgaaattgctgttgggaatgatgaggaatccaaagatccacagaacttggatgttactggtcaagaggaattacaaggtgacaaaactggaactttagaagagaattctgatcaacctgttgatgcaaaaatgctgtctgatgagatgcaaagggatcagacagacccagacaaccagcagtcaacattggcgcccagtggtgagagagaagagggagaattggtgccagatatcggtgatctagaaggtgctagtgatttgtctaaca

SEQ ID NO: 9759 - DNA, 278 bp, Glycine max
agccatgaccaatactaacgtcttcgtcaacactctacaccgcactcaatctcaaatctaagttactcctctcgacaccgatcatcaactcaacaccgatctagaacactctcacgaaccagatgactaacctgccacacatcaccatctacacaaccaatgcaaaaatcttaagaagtcacttaccttctacaagaaccaactagttctaaatactaatacagctattatcctctacaagactaacatcaccatcgctaaactactctactacttca

SEQ ID NO: 9760 - DNA, 95 bp, Glycine max
cactatacttctgatctcctctgagttgcacccatatcatactagaattttgacaaaatgatggaagcctatgctatttttatataaagcaagta

SEQ ID NO: 9761 - DNA, 406 bp, Glycine max
agaaaaatcaagtcgaactacgtccgggtcgcttcggtaagcggttctgtggaaattcttcatcgttcttcgtcgttcttcaccgttcttcatccgttcttcgttcttcaacgggtaagttttcgaatccgagactttcaatccatttcttgttatgcgtactttcactttaatatcgtttactttcagttctcttttcttcagtctttaacgtgctttaaccatttatctaagcccgtttctcgtctaataaatgatcaaatgaatttcaaccgatcatttgtgttgtaatctcatttaatcactgttaaaacgaaatctaaccgatcgttcacgctataacctcgggtaaaccaaaataagtaaaataataataaactaatcaaaatatcttgataaataataa

SEQ ID NO: 9762 - DNA, 258 bp, Glycine max
gagattcttctacatatggacacagctccactcgtcgtgatagaagagccatgacgaatgataaatcgcataacagttcatacctaacctatagcgaaaaactaaattcggttatagcatccactataagctccatctatccgagtgaaaaatctcataacagtccatactgaacctttagctaaatactaaattcacttttaaaaaccacaataagctccatccattcaattgaaaaacccaattcacacaaacata

SEQ ID NO: 9763 - DNA, 411 bp, Glycine max
ccactggcaaatgcagttgcacattcaacttacgcagcagcagctgcaggccacggccgggccattctcgaccgccactccgcctacaccttctacttcctccggcggctccgcatccgaagcaccgacgaagcacgtggctcaagcaatggacaagctcatacaatccgaacgaatcatcgccgacatccgaatcggcgcctaccgtctcctctaagcgctcttcctcgctgccgcgcaaccctaccaaagcaacaagccttttcaaatcttcctcaaagaaaacgcatgcatgcgtcaatatcttcaagaccttccgtcgcttggtaaggagctagaatagtctggagttctcagcgaatcacttccatccaagaaagactttggggcttgcatatgccactggtttgt

SEQ ID NO: 9764 - DNA, 399 bp, Glycine max
tctctctctctctctactgaacgaaaggttaaagtgggagttcggaatttttaaatctcacctatttaactacctcgcataaaaattcacgtaacattctcttctgtgtcctaatcggaactcgcacaaattttgttatagtgatgtgatgtcattttagggtttttgaattgcgatgggtctgggaaacgatgactatgactgagacacgcacaagtccttcggttcagtgccttgttcgatttgcctcgaggctgttaccgataacggtgatcgatcctgggccaagcttcaatgcggacatcaatttcatctcgattgcattggctcaacctttaatataaaaggggcaattcaatgccccaatgtcgtaagatttaaaaagggtcaatgctttat

SEQ ID NO: 9765 - DNA, 446 bp, Glycine max
gtacgcaaattgctagtaatgctttacaagtggtttaagaagcccttgatgctatcgatgcccaggatcgtgttgctgcgggagatgaattcacccttgaccttgttgaacaatcttcatttcagaagcaaagggtaatgcatcttgtgatggcttctcggtaaggctgctgtaaatttttcttttctgctaaaagcatatacaatttatgtttctcatttctagacttgaaatgtttaacaggatggattataatgcctttgcttttggtctgtcgcatctagagattttgctttgatacttgatccactttaacgattcataagcagcagatttttgctattgaactaagaaaggcataatttttagttttttcatgttgcttcttttttatttttttaagaggtacacaatttattagatgtacattttatttactttttcaa

SEQ ID NO: 9766 - DNA, 432 bp, Glycine max
gtccggctgtgtaatgaggagttctgatattcgttttcgtcttcatcggaaccctaaccccttcgaatgggtagatgagtcatcaatggaaggagtgctgtccgcgaacgagcaacagagcatggtctcttccttcctcgaggtcgctcagggccagaccgccgagactgctcgccagttcctccaggccacaagttggaagcttgaagaggctcttcagctgtttctgatagggagtgaaggtggggcggtgccgttgccggtgccgtcgtcgtcgttgttgcacactccgtctttggaaaatgtcgattcctggactgatcaacagcctttgagtgaaccaaagaaggacgccgcggcggctgcaagtgaaagtattgatctcaatgattcataagaaatgcgcccttccttgcctgtaataaaggaaac

SEQ ID NO: 9767 - DNA, 325 bp, Glycine max
gtccgaaatcatacatttatactttaaacaatgaatttaaaacacaaaaaaaaaaaaaaaggacaggaataatttgaaaaggaacaaggcctgtcaaatctagaagacacaagcgtcattacaccctcatacgacagaaaactatagaacatactggtaccaaaactcaatgttaatttccgtcaaatacaacatgaggcacttcaaaacgcccttaccacccacaataatggctttaacgcgaataatgcttctgtcaacgatcttaatagcgaatatgccgactccaacttcaatgatgaacatttcaacaatgttgatagct

SEQ ID NO: 9768 - DNA, 381 bp, Glycine max
cgaatgtctagcgtcacgatttttttagatcgggggcacagacattgctgcagcaggtaaagacactgcaactatgaagagagcaggcagaaagggacttccattcctgggcttccctattattatttctttatgtgctatttgaaaaatttttgttggaaacttaagactattggggagatgtgtctctccttgaatatatatatatatatatatatatatatataaatccaaagttttgctgctaggtatattttctctagaaccttccataatgattgttgtctgatatctctccccagaattaccaaacagtgctgtcctaacattttctcaatataaaaaaaaaaataaaactttgtgaatattgtaggcaatata

SEQ ID NO: 9769 - DNA, 322 bp, Glycine max
  modified_base (58)..(60): a, c, g, t, unknown, or other
actcgtccggattttacgagcaatattatggctctggtttttcaactcagacgatctnnnggggaactgacgaattttaatgaggttggggctgcacattctttcaataagctttgatcaatctagtcgaacctttctgccagaaccatcatctacatgcagggctaccaccaccactaccaccacgagaatgggttttcaaatagggtttttgttgaatcgtttctttgggttctgattctggaatttgaaaattgaagggaaaatgatcgaaaaaagagaggaagaagtaggagagcgtatgtagttgatttgggggaca

SEQ ID NO: 9770 - DNA, 317 bp, Glycine max
tatcatcaatttcatctccggttccatctgttccagtttctgtggaaactcagccacctttactggcgttgccagtaacttcacggcccaatcacaggcctggtggagctcctacccaaactcatcatcatggctatagttatagaggacgtggaagacgaagaggaactgggggtttccgctcagtcacaaaattcactgaagattttgatttcacagcaatgaatgagaagttcaaaaaggatgaagtatggggtcatcttggtaaaaagtagtctcattcaaaagacaattacggtgaagaaaatgcctttgat

SEQ ID NO: 9771 - DNA, 351 bp, Glycine max
gacccactcgtcctaaaaaacatactttaaaaaaaattttaaaaaacataataaaaaaaaaaaaaaatgtaacgtttaaaaacaaaaagatcatattcaaattctcctctatttacatttccaatcttctttcccttcctttctacctcataccactattttttttctaacttcttttaaaccaattccccatcttaaacaaccttataattttaaaatcccttcagttcccctactttatccttttgggacttaatccttttttccctaatccctttaaactttttaaaccccctcctttttccttttttaatatatttttctaccctaattttaattttcaccctccct

SEQ ID NO: 9772 - DNA, 236 bp, Glycine max
aaagactttactcgaagcgatttcgatcgcggaagtacgattcacgggcgtcttgcattgattcaacaatggcacgggcttcagcttcatcaagcccgacaacggcaattagaatctcttccatcaccagtactccatcagatccgacggataccgcacacttctcgagggctaccgcttcgagttcgccatcgtcaccgacaacaacgacaagaacaatgccgtctacttcaccg

SEQ ID NO: 9773 - DNA, 182 bp, Glycine max
cccactcatcctatctaattcatcttcattatatataatattcttactcaacattattcaatcaacactaggatttcttatttaaactaacactccatcttttatcatcactattatcaactacaacactcattacacttattaacaaattctactacacaatatatcctttcattctttca

SEQ ID NO: 9774 - DNA, 293 bp, Glycine max
aagccacgcgtgcacacaaaactctcagagaactggttttgcatactaacctccttaataaaccaacggaacgttcacacacctagctcgatcatctaattcactcaaccatcattccatcaaacttggtagactaggctagcgactctctcttaacggactgtcaactaaccatcctacagaataattgcaaactgttcatagatcaaacataaaaacacatattctcacataactaatcaatgcatacatactcttcatatcgcctttattaatatgcaacttcttacact

SEQ ID NO: 9775 - DNA, 242 bp, Glycine max
  modified_base (65)..(65): a, c, g, t, unknown, or other
gcgccctttttctataatgtatatttttgcacctaattcctatgtatacaaaacaatccagaganttgggtcaaaaggtatatgggggcactcctcatactttcatttattttcattcatctcttccaaacacaatgtataaaacgatattggatacatgaaactcaattaatgcgtattcagttgaatgcttcaaaaaaaaaaaacaatggcgaccactctagatgatccaagcttactta

SEQ ID NO: 9776 - DNA, 270 bp, Glycine max
gcgttcgccacgcgttttaccaacggatcagaaaaaattctctgcagcaaccttgggggctggggtatactgtcggggcatcgaaaacgtgtaggtgaacggagcctgccttgattcatgttctagcatgatagggaagggaagagtgctagaaataagaggcactgaacgaacagtgacaatgtcaacatcgcagctgatgatcatactgatcattgcaaatctaaaccaggtggtttcaaagacactcttgctgatgatctactggct

SEQ ID NO: 9777 - DNA, 164 bp, Glycine max
cccaacaaaagcccaaacataatttataaaaattacattcttattcacaaaaatatctcgattcatcttgttctcatatttgccccctttttactactgctctccctaatcataaaccctaatcattgtttgggatttcacaggaaagaaatttaaacacaaca

SEQ ID NO: 9778 - DNA, 426 bp, Glycine max
cgcgtgcgcgctgtttttactcaagatagacggctgtgcagtgaatcacgggacgaatgcgtttctgaagaccgtgggcttcgtcaagatggtgttccttcacacatgttgaaagaagagtagagctgatataactccagtaattattagtcatcatgcttctatgtgatttattttttgctgactttttcctatgagacttaggtgagaactctagtactggtacatgtaatttttcttcctgaccggaggtaatattagtgatcatgatcatatatacttgtaaaacccactttatctttttccacatagccccatcatgattatggctgtatagcatgatggattatgatttaatgcagggactacttctagttctagttctaaaaaaaaaaaaaatagcataaaatttttaaatataagtca

SEQ ID NO: 9779 - DNA, 258 bp, Glycine max
tcactaatgaatacacattaccatcatccgatgcaaaatgagacgtctaatatgctaaatgacacaaatataacctacgcataacttgacaaccaatatctgcatcaccataacaccttgctaaacagactttacactctatcacacaaatctcccaacattacccacaaacataaacttgcacaactcattaaccaaacaatctacagtccatcttaccaatggcatgtagtactcacaccctattcgaaccatcat

SEQ ID NO: 9780 - DNA, 445 bp, Glycine max
cgcgtccgcccacgcgtccggctgttgataatttggctgctttctatttcaacaacatcactatgggagaggctccaaattgacctgcatctgtcaatcttgctcgacatattggagagtgtcccaatctgtttccagaaattttgaagaccctatttgagatcatattgtttgaagactgtgggaaccaatggagtctgagtaggccaatgttgagcttgatactcattaatgagcagatattctcagatctgaaagctcaaatcttgtcatcacagccaatggatcagcatcagcggctctcttcatgctttgataaactcatggcagatgttactctaagcatagattcaaaaaacagggataagtttactcaaaatctcaccatatttcggcatgaattccgtgccaaataattcaaatttatgcaagtaaatatgagagt

SEQ ID NO: 9781 - DNA, 357 bp, Glycine max
tctacttactaatttatcctatatatttcagcttcacatccacaagattaatctgagtcatcgtgtacaagaactcgggagcgatcaacctaatggaatactctttgctcaacatacactatatcatatacaacaacaacttcctgtccatataaatacccttatcacattaacctgcaattttcaacttataatatgctacatggctagaatcaaaccaccgcataatgtgtaagctaatatctgcattgcaataacacatttctgataacgaactaatacttttcatttacaaatctatcacactttatcaccaacttatacacctaaacaacttaatatcccaaacatatttac

SEQ ID NO: 9782 - DNA, 441 bp, Glycine max
accgacgcgtgcgtcgtttggtgaaactggctcaaatgtgctatttggtatacaggtacccacaagtgagatgggtaaggtccacaatcatgcgagcagacttggatatgattataaagtggtgaatactgatgatgacttccagcttctaatgcactgatgatggttctaggcacttgccattattgtgtattttaggcaacaagtttgccatatttaatatttgcacggtctgttataaaagttggatggggaaaaaaggtggaaaggaagtggccttcagacatgtcattagttgattatcaggaacaactagttctttttacctaatgcggcgtcttattacattatttataatctgtaatttatgtgtcattgatggtggttacattggaatcttataatgttgttaacatggtcttttgagtctgaaatataagt

SEQ ID NO: 9783 - DNA, 367 bp, Glycine max
aggaaatatctttcatggtagaaaggtcaccttatgaggttcttgatatggacttgcttgcagaccaacgagtaaatctcttctttgcatggtctttgttgatatcacatctacagtcattaccttcatcatcatctcaaaagcagagactgatccagtacatacaagactctgctactccagttattttggattgcctttttcagcatattcctgtagagatttccacagttcagagtctaaagaaaaaagatgcagagctttctggtggcttatcaaaaactttaagtgctgcaacccgtgccaccacaactggttcacttttgttatctgtggaaatctctttggcctttttaattggggaaaa

SEQ ID NO: 9784 - DNA, 453 bp, Glycine max
cgaccgacgcgtgcgcggactcgttcgcccactcgtcctgttgcattggccatatccattggccatcgtttcagaggcattgaccacattccgtggaagcagttgtgttataacaaccgttgcgaaggccaggtccaaagtgctgggcccgtggggtctctcctcaagtcccgttcggttattcatttccgcgggcctgacacactcaaattccttcagggcttgttgaccaacgatgtacgcaatttcagttaagccgttggtgacagaactgaaaacttgcccacgctcaacgtgcctgctacgtcggttcctcctatctatgctgctctattgacccctcaagggagattcctctacgacctctttctctataagccttccacgtgccacaccaagctcgatcactccggcactggccctgattccaaaccacactaaccctttcatatg

SEQ ID NO: 9785 - DNA, 422 bp, Glycine max
gcgttcatattcctcagttcaacacatcgatctgcaagactcagactagtaacagagagaaagcatttcaaagaaggaacggagcgatgtcgtttatgcgaggggattttctttctcgaacgaggaagctcgtgaagggtttggccaaggcgcaacccgcgtggctcaaagccatggaacagttaatctctctaatttctgattcattctcttcaatctttgtcttttgcattctgattttgcatttttcctttgccatttgagaatcccccttctgggtttttatcacttttgaaaaaatggcacctttttcggtttcatgatttcactttttaaaaattcatttttttatttatgtgtgctgactccaattaagggttatgggtgtgatattcatttttcaggtattggtctagatttca

SEQ ID NO: 9786 - DNA, 365 bp, Glycine max
acaataccccgggcccagttacaaggcacatggccatcctcaaactcccaataacattctcttgaagacaatttttatattaccttacaccctacttccacctatacaaacaccctttatccttcaaaccctctcataactccaatactgtcaacaataatactcttacacatctaaactatctccatccattaaatcccccattcttaacactgtatttactacgaattaaacacaataaacccaaccttatatgctaaagaactacgtaattatataattcatctcacacatacttctttatactacctatcatctcttatattttattcctgaaatattagctgtttaactcgattaattta

SEQ ID NO: 9787 - DNA, 319 bp, Glycine max
  modified_base (56)..(56): a, c, g, t, unknown, or other
ctcctcccattttttccatggcttatatctccacgatcaagaaccacacccatgtnccttttttcatagattggggggcaccattcagaccacgacaatagcttctctataagcatatatatattcaaagtattcacattcatacctacttaaacggactttattgataatatcacatcctaaatcataccactggctttgactgctacttccatttacatgattgcactattgatctataatatctcacatctaattttaaataaagaataacctactaattcatgattcacaagggtttacctacacaaacctacct

SEQ ID NO: 9788 - DNA, 391 bp, Glycine max
ttcaggcgattttacggtcgatttgaattacgtcgaatcgacctactatactgattaggctcaatttatagggcaaacaaaaccctaactccacatcacaaccatgacgaccaaacaagatgtaaacgctaaacctataaaaaaacccaagaccgataagataaattaccacgaaatacatatgactaacattcagaagaaatagaaataagagaagacactaaagaaattgaaatccaatactcatcaaaaggtaatcattttaatccacacgactaaagacaaaattaaataaatgactctctctttatcatgataatattcatacaataatgagccctctaattacaagttataccatcataacttccactaataattatgcctacaa

SEQ ID NO: 9789 - DNA, 81 bp, Glycine max
accgactcgtccgcccacgcgtccggcttagcatatctatgattgtcttttcttgtaaaaaaaaaaagggaaaagaaaaat

SEQ ID NO: 9790 - DNA, 296 bp, Glycine max
acctaaccctaaataatctctatgaaactgggtttgaattttataatctgctccatcatttcggcattgtttataactcatgtcgattatgcaaccaattatatatcttattaaagcttttgaattaaccttcccttcaattaaaacttttatacaaacttgtctaacaccaataaattcttcgttggtgacaatctcattttcatcatagacagactccattatcttataattataacctaggctacttattatgacaattgcaacaccagcttattaactggtttcacgttcat

SEQ ID NO: 9791 - DNA, 431 bp, Glycine max
attccctgctcgaccgcactcgtcctacctttccttccttcatgtcttccactgtttctttatcactcaactataaatccatagggtaccttatctcctggtgtcatctcatatctaccaatcaattaccatatactattactttcaataaaccaaagtttatcattaattattacgactcatattgatcactactaacattcataataataattctaattttattcctctaatacactttatatctcaaacacaccataatgtaaactcttcatgctctaaactcaatataattgtaaattactaacttctctttatcataattacattcatacaatattcatccctgctactacaattctaccatgataacttctcttatcattctcacctactttattcctaatgtgtactgaactaatctatttcat

SEQ ID NO: 9792 - DNA, 151 bp, Glycine max
actcttcatcttatctctctctttatttttcaaattctaaatcaattttacaatctggtaatatctatacggtaacctataacttcctctttccccattacccttcatcatctccctattcaaaacctattcctatatatccttaaatcat

SEQ ID NO: 9793 - DNA, 401 bp, Glycine max
cttagatctacagggccatctgaggctttacatgtcggtcaataaatattcatcacccaaggtaaaatgcacaacgatatgaattttcattttaatattgagaagaaaatgactgaggaaatctaaatatgttgactcaagttggcaacaatctgagaaaatgtcaaaaagtgactaaataataatcttttaagagatgctgcatcatgatgacaatgttaaactctttaaggcatttgtaagttcacgaaacttgtcaggagctctctgcttgtaatctttctccaatactttggctgctacagattgtaactgggacccttctttgtcctgcttgcttttccctttcgtaagctgggtaatagcagacgtgcacatgcatataccaaagagtgctctgg

SEQ ID NO: 9794 - DNA, 276 bp, Glycine max
aaacccacagaaactctgatgaaaagtctcgttgctttctgcttggcttcgaagactaacaggggcccatctggtttcacaaatgctctcttcacaaaggctttcatcatcacttttgcgctttttacaatcttttttttgatccaaggccgtttcatcactctggggatgtcgtatcaatatatttttggaaagcttctccctttgaagtatatcatttccatatttttcttttcttaaaacacccaattttttgtttgcattgtatcttctata

SEQ ID NO: 9795 - DNA, 344 bp, Glycine max
  modified_base (101)..(101): a, c, g, t, unknown, or other
tgatgaaataagtagcaaagccagagattacatgccgctgtataaacttgtggagaagtgggatattgccatggctgcactgttcctagtatcagatgcangaaaattcattaatggcgacattatgattgttgacggatgactgtggctgagtcggcctcgccatttagcaaaagaggctgtgaagcaggtatctcgatcagtagaaaacagatccagatatgcatctgtcagtgttccaaaaagcaagctgtgaaccatcagattcacgtgttagcccctctacacagccaggatacacatataatgtgtagaatactatggatttggaagatatcatctgt

SEQ ID NO: 9796 - DNA, 328 bp, Glycine max
ctgagtctgtccatatattatctgaaacccttctcacagaatgggatgtgctggatgaagggactatggtgcatacacttatgagaatcttgagagagagcgctactggccattagagaagcttaagatttccatcactggtgctgggggttttatcgagtcacacattgactcgtatcctcagagacagatgggcattacatgatggcttctgaatggaagataaatgagcacatgactgaagacatgtactgtgatgaattccatgttgctgatctcaaggccatgaataacagcatattggtttcagaaggggttgatcatgcta

SEQ ID NO: 9797 - DNA, 218 bp, Glycine max
aattcccggtcgacgacgcgttcgccacgcgttcgaactcttaagaaaatattccaaactcttaagaaaggaaaagtggaattctaagtttcagaaatttcagtttccatttcaattttcggttttctcaaaacccattttcaattttttccaattaatcttattttccacgccaattaaacctaaagaaaacctcggcatttcccaattttccattt

SEQ ID NO: 9798 - DNA, 245 bp, Glycine max
ccactcgtccgcccactcgttcggcacatcgttgaaaaaattaaatatcagtctataaatggagaggatgggtcgggtcccaaagctggaggtgacaatgatgcatatgctgatgatgaggacattgaaaatgtttcttaaactagtgaagatgtctcacgcaatgaatatgctagtcataaatgcttactcgaagatcatgattaagatgaaaatatataacatgacaacttttatggtaaagc

SEQ ID NO: 9799 - DNA, 354 bp, Glycine max
cggttcgaatcccggtttttccacgcgtccgggagactacctaacataatatggtgtgaagacgcgagagtgtttatcatattgggcatattcaaaggaaaggaagatgttaccaacataaaacagtggaatcaagaagctgctgcgactaaactcaccaagctgaagaggccaaaggctaaaactgattttcatgaaagaaagctaggaaacagttccaaccttgataatagtggagaactactaacctcatgatatggaacaaatgcatggcctgacttgtctttattcacttcagctaacattgatcaacggtccctggggactgtacgttttgaaaatttaaatgaactt

SEQ ID NO: 9800 - DNA, 285 bp, Glycine max
agaaaatactttctttttataaacccataattcaatggcgcgctttctgagcggggtaccttcaacaccgtatctgcatccatctccaccaccatcaccacctttctctctcttttacaaaacccatcaatacctaaaacttagaactatcgagtgatctacttaacaatcacatcctatatcttcattattgagactcaataacagcgaaatgattattcactcctaaactcattaagtataccactgccgccacaacatgcctcagaactacaactgcaatcg

SEQ ID NO: 9801 - DNA, 203 bp, Glycine max
accgattccgaattcccgcccgcgccacgcgtccggtttgcttcaatggaagtgatttccgcttcgagcttgaatcccaacactccggagtgggtgcctctcgcctatcctacggttcaggatttctccgaccaatggtgggacctcgttcactccttcccctggatacgcgactactggcttcgcgagagctttcaagatcc

SEQ ID NO: 9802 - DNA, 172 bp, Glycine max
tggctaacattggaaaatggggatcgaataaacaaccggggtcgggcgttctacatgctccacccttacgtacacatccatcccaacgactttctctcctattacgccacctaaattcaattgactagaccaccgttatacaaccaatgatacacaagaaaatcacaccaat

SEQ ID NO: 9803 - DNA, 421 bp, Glycine max
gaattccgttcgacctcgcgtccgccacaaaccctctcaccaaaccttcatcgatctctttgtttttttataaattataatggtgatgcgaagttgtttctgtaaatagcaattcagagaccttaaaggtcgtgagtattttcctccttacttaatctattgtgtgatcaaagtcgttattattaaattagataattgataaccatgtcgatgaagctgctattagcttccctatccatttcggtgtggcttttcatggcaacattattccttgcccaatccaacaaccgctacgtctttgacacacatggcgaccctcttgaaactgacgatgaatattacatcaggccggccataacagacaacggaaggcgtttcacattgatcaacaaaaacaggtcgtgccctttgtacgtcggtc

SEQ ID NO: 9804 - DNA, 285 bp, Glycine max
  modified_base (19)..(19): a, c, g, t, unknown, or other
cattgtttacttttcattnattggggccaagctttgtattgtctgcgataattttccattgggtggaagaaagtctcaacctttattcgaaagagcaacgatctgagttgagttgagtgatcatgtgtggtggtgcgattatctccgacttcataccggcaggtcccgccagcggggcgcggcgcgtgaccgccgacatcctgtggccgagtttgaggaagcgcttctcgaatccgctgcttgacgatgatttcgacgctgggttcaaagaattcaaagattatt

SEQ ID NO: 9805 - DNA, 230 bp, Glycine max
  modified_base (37)..(38): a, c, g, t, unknown, or other
cgaatcccgctcgagccacgcgtccgcccaacgtccnnccacgcttccgtattcattgtccactttccattaatttgaccagagctatgtatggtgctgccacaattttccatctagtcgaacaaagcctcaacctttattcgaaagagccacgatctgacttgaatcgagctaacatgtatggacttgcgataatctcctacttcataccggcagctcccgtctattac

SEQ ID NO: 9806 - DNA, 104 bp, Glycine max
agatacccatccaaagaaccccaagctaccaagtgatctcctccttacttaaacaaacgtgcgatcaaagtcccattgaacaaagaaatggatcgaactccatg

SEQ ID NO: 9807 - DNA, 394 bp, Glycine max
ccggaatgcccgggcgggccccgccgtccgaaacaaccaccctaaataattcctggggctttttcattaccaaaaaaaccgtgttcgcgattgaatttgaaaaatccacttattcctccacacaaattttcccaaaccttggggggaaacttgggttcaatcctctgctttgttgcccacattcaaaactcttaaacacttaattaagggttactctttagggtcttggttctggcagcaggtgatctacaactgggaattggtgacaaggatcactttctcctacaagatttaactagattccttggactttcattttcataagaaattacattcatctattgatgggcttagctgggatgcctcacaactgtggggtactattcagcaacca

SEQ ID NO: 9808 - DNA, 342 bp, Glycine max
  modified_base (10)..(10): a, c, g, t, unknown, or other
acgaattccnaattcgagccgcgcgcccggctatccaaacacacacttacaaataactactagttctataagactgaccaaaaaagctgtctccgggtataatttggaaaaagcagcccatgctacaacacgacaatgcacaaccttagctgaacatcatatagacaatcctctcatctgttattccattggacaactctataaactataactgcatgatatccttattgtggaattgctatttctgcagcatacctacatatgaaaaatgttgacacagagtccattgccctacaggactcaaatgaatctcaagtacactcatcttcataaagaagtgca

SEQ ID NO: 9809 - DNA, 202 bp, Glycine max
attataattaaattttattataatacatgaagtaagtaaatttttataatttaaaattagcttatgtaaaaattaaaatcaactatttaaagaattcattaatatcattaaacttctataaaaaactgatgcataaaataattttatgtttatggaataacaatatttcatctaaaaaaaaaatagtgaatcaacctattta

SEQ ID NO: 9810 - DNA, 267 bp, Glycine max
gtccgccacgcctccgccacgcgtccgaagaatttgaatgaggcggccctggagggtcaccagggtgggaaatatgttaatggcatgcttttgatgtccggtgaaaataaatttggagaaagaaagcaaggttttgatctctttggttccttgaaagcgttgaccacttctcttattagatgcataaaaagggttaaatctttagcccaaaatatctgggtcaataataaccctgcatttaaagatcacaagtcataatctttatgt

SEQ ID NO: 9811 - DNA, 319 bp, Glycine max
ggaaacaaaatcctaggattctttgttccttggggatttcctaatttcccaggtttctaaattaccttttgtttcaaattgacctgaaattcaaaccacaatttttcaatgagcgacaagttgttcacacaatcatttttaaacaatttattttgaagccaaaaggctttcattaagggatttgaaaaaagcaaaaagtggttctttatgaggaaagaccttttttacaaccaggtgggttgacaaacttttggttccttttaaaagcttttgaaattttttactgggggaatatttgcacccttgttattttttgaaa

SEQ ID NO: 9812 - DNA, 153 bp, Glycine max
ggaaacaaaatcctatgattcttttttcctttgggaattcctaatatcccatgtttccaaattcccttttttttcaaattgcccttaaatttataaccccatttttcaattatccaccaatttttttccacaatttttttttaccattttttt

SEQ ID NO: 9813 - DNA, 259 bp, Glycine max
ccactcgtccatctatatcgcttatcaccgccctttttttttttcaaggaaggttttcaattttaggttgcgagacttaacttttttttttatttttatacaaacaaaatcctataattattttttacctccgtaaaccctaattttccacgcttctcaaatacattttatctctaatttccatcaaatttctcccccctttactcaatttcccattttttttttccccattcattttttaaaaatttttttttaaatc

SEQ ID NO: 9814 - DNA, 245 bp, Glycine max
cccctactgctctctctattcctctacctctatctccaaattctccctaattctcacgctccggggtaggttccgacggccgctactccctatccaccgatcatccatactactaccctcatctcccttttctcacaatacagacaagatcaaatatttatcctaaacactcactattatcgttctcaatcactgcatcatgcagcgctgttcatactaagattctattgcgaccaatcacaata

SEQ ID NO: 9815 - DNA, 233 bp, Glycine max
acccacgcgtcctcccacacttgctcccactctttcaacttaatactttaaaataatttatatacaatacgataactgtaacttttaaacccccttatccaaacaacctaaatacacaacactcaccgcccattttcacatatcttaacacactattactttacaatgtacaatacctacatttacaaatcatttacctacataaatcatcgttaatatcaacccaactatat

SEQ ID NO: 9816 - DNA, 433 bp, Glycine max
  modified_base (22)..(23): a, c, g, t, unknown, or other
  modified_base (143)..(143): a, c, g, t, unknown, or other
  modified_base (188)..(188): a, c, g, t, unknown, or other
  modified_base (265)..(265): a, c, g, t, unknown, or other
  modified_base (314)..(315): a, c, g, t, unknown, or other
ggatagtctaatactggtctgnngtggatgttgcagtcaatcaaagggttgggtgctgggactagagatctgagtcttgagggaatcggaagtctccgtaatagtaggatgctcaagaatgcaacattttgcatgccattganggaaggtattgtacactggggtgtggcaactgcacttggttcatnctctccacttcatgtccgcagcatatcaaggacaatgcttgagtgatgcgagatgaagaggcttaggagtctgacanttgtgcaataaggcatctgtatagctcctggcagcattgattgctcaannaatgctgagaatagaagggttgaagttgttggtggaagaaaaatataagaagtggtgaaatgggaagggtcggttacaaattgccatggcaagacaaggtattgagaaatttaagtgg

SEQ ID NO: 9817 - DNA, 443 bp, Glycine max
gtgttctaactctgaaactctactatggtttctcctccggagaaccttaacaaccaaaagcaatcattacaattgccaatttcacataaacaccataattgatcaaaacacataacaaaaaaaaagtgaaaatggcgagcgctgtataaaaagaaggtggcgcgagagaggaaactttctctttggagcttcctgcttcacctggttggaaaaagcagttcatcccaaagaaagctggcacccccaataaaaatgatattgtgttcactgcatcaacaagaaaggagatccataacaagaatcatcttgaaaaatattttaaagcacacccttgtggtccaactgtatcaaaatttgactggggcactgtttataccccaagaagatctacaagaattattgagaatgcaaatgcaattccttcatttttaagttagccccca

SEQ ID NO: 9818 - DNA, 400 bp, Glycine max
tcctgcttcttaacatccttactgtccgtcatacaattgtactcacatagtgtcggttaaatgctgagccctaccactgtcaatatacttctcactctccaaacgcctcaactgctgcttacgtacatttaaactcagtatactactactatcaccagactaactaacacacaattcttccattccaactcactattccagcatccacttctatgtattgatccccacctggtaattctaagtgcatctaagtattataccaattctaatcctcaagttaggactatctacagacacatccacatgtactaacgctatcgtaggaatataagaccacatcacttgaatatctcagttgctggagacaacagatctcttagaagaagcctatcatcatgtg

SEQ ID NO: 9819 - DNA, 357 bp, Glycine max
atttccgaatcgaccgcacgcatccacgcacgcgtcgtttcagattaaacgcgaaatggtcaatggaaaaatgagaactgatctaggggtcaggggataaataatggactgaatatagaaaacttgcatcaaatgaaatctgagcaaagaattgcaccaatgcaatattatcactggacgcaataactagctgaatatttatagatgtaccaggacaagatgctcgtacatgcttcttctatacaccatcatgggtaccttagatcctactgaagagaatattatggatagcatacacagacagtaactggtatgatgctggctacacatttgatggatttagtctgcatgatagca

SEQ ID NO: 9820 - DNA, 419 bp, Glycine max
  modified_base (349)..(349): a, c, g, t, unknown, or other
aatagacggacgcatccacgcgctactttcacgcttcctactagcctagggcccaatttctgaacatgaattcataggaggtgagatgggcggttaaagtggccatgatggtccgcatatctgctatactgctgcaagtatattgaggctatacctactgataaaggagaatgctatcaatgtacatctgaagcatgcatgatataaattatatgatagcgccatgttatcaagatatggtgtggctgtaaagaacatgccacctgatgcactgacaagacctgcaaaggtcatgaatgtgacattatgcacttttcgataggaagtgctattccaggacgactgtacngtggcaatcccatagacaatagagatgggaatggtggctataggcttggacacttggttgatctatatgc

SEQ ID NO: 9821 - DNA, 298 bp, Glycine max
caatttccagattcgacccacgcatcccacatacaaactcacttaccactaactagtctttcattatcccacatctaaaactgaaatgaggtcctgttatatttatcgtgttgagataccatacatctcgttatctatttttacacatttgctgaagtcactcacaatgaatacgaatattttaacaaaaaacatatcaagtattcttcacatgcgatatctaataacaaccctcattactatgactgctgtactcctggatatcaatcaatacaatgaacactactactctcccata

SEQ ID NO: 9822 - DNA, 166 bp, Glycine max
taccaattcccaattcgagccacgcgtcacacatacgcctatcaacatcacaacatatattataaattaaacaaactaattaggcctatccggtatggagaatctaagttacagtacccttccttgcaactaatacgatatttataatggaacctaaatgtaattg

SEQ ID NO: 9823 - DNA, 328 bp, Glycine max
cacgcgtacgattacaaatagctctacagagtgcagtgcataatcgggaagaagtgcgtatgaaggcgatacctctggtggcaaataagctttatcctttgacatccatttctaagcaaatagaagattttgcaaaggaaatgcttttctcaatgatgagtggggatgcatctgaagctactgatattgaatgttccattgctgattcagaaaagggacctgatgttgacaaggttccaaacgaacaatcatcattgagtggcatcactaaagatgtcacctcagatgatcgggaatcatgcacatcttagagtgtctcaccggattc

SEQ ID NO: 9824 - DNA, 443 bp, Glycine max
actcggttcggaataccacggctgcgagccacgcgtcgcgtcgcacgcgtacgatccaaagtatgctctcttcatcattagacaatcactataggagcatggggttgtaagaccatggaattgtggtaacactcggagagggaaatctgattctatgacggatcagagtataactattagttttggaactttgaagagacttgctatagaaactattacttttaagctctttctctgatatgttgacagctactttgactcaatgtaccataatgtcctcaactgaatactgctcactaccatgcactccaaggcacagtatattacggactgaaagtacatatattaatcacctttttgatcagtgacattggaattcggattgactattaaaaggatatattaaaattagatattgccacattggtttatacttcattatg

SEQ ID NO: 9825 - DNA, 106 bp, Glycine max
accttcaatcccttccaataccatttatcataacattaacattaatctaaattacttatctaacttatcattttcaaccccctcttatccctcccaaaacaatccc

SEQ ID NO: 9826 - DNA, 265 bp, Glycine max
caagagcctaatcccatatgcatcactgttagttatttaaggcacaaagttcacaaaaagtatcgctctaaattttgtgcatccgcccacacttcatagcatatgaaatactgcaaattttccctcatctgtaacgctaattaaaaatctacctatattcattatattgttgaatatattgtacatatcccttccactctgtctaaaacacatatacctaaattttaaatacattatgcccatcacatgttaaatctcaattttt

SEQ ID NO: 9827 - DNA, 115 bp, Glycine max
atacccgagccgacccactcaaacgaaaaaacctacaaacacacacccattcaatttaaaaacaaacctaacaatacaatgcactgttaaatacaaaactcacactacccaaaaa

SEQ ID NO: 9828 - DNA, 198 bp, Glycine max
tcgaccacgcgtacgagcacatgactcatcacctttacaccttcactggcaatcaattcaccaactgaatacggtctcatttctcactttcacatttctcctaacaaacttgtcttcgacgaggacgtctacaccatagatctcaataattgtcatgtcaccaaccgttcatctaaacttggaaagcctgatacatct

SEQ ID NO: 9829 - DNA, 297 bp, Glycine max
ctatcaagattaacttttactccctcttctacataaatacgggaatgttctttatcatttgacatttactgtcatagcacttctaatattaactcaaactttatatactgcgatgaactgcatttccatgtttcagtgaaacatcttttatttaactgctacactctgcctgtactccatgataaatatgaagatcatctagactcttttggctcgaagtcaattgccaacattaacaaccaatattcaaatgatgatgctaatgtgttgatcaagatacccatacgacctttaaaa

SEQ ID NO: 9830 - DNA, 229 bp, Glycine max
attcattcaaaactacaaccttatcttcttcaacatattctactatctaaccttcctattaccccttttttctcatcaataacaccttaacttctcttgttctcatacatacttctccatacccactttcttcataatatttcatcactatacaatcataacatacctttccctttactacaatacaacttttacaatcttctcttcaatacttacaccaacttttttt

SEQ ID NO: 9831 - DNA, 316 bp, Glycine max
aattcccgtcgacccacctccggacctcgcacctcgagttatttatatatctgtaaatagtcttaatcaatccccatccaactatgcatgactctaagtcaatacattgtgaaaatttgatgaccttacgtattcactatcaacaccctgacttaagcttatagctcatctgcacatatcttggcattgactattcatcttttcccttttgatggattgcagttaagaataagcgttatgctaaactagtatatgatcattaactctttttatacttattttaatatctgatatgtgttacgatattattgtgagg

SEQ ID NO: 9832 - DNA, 189 bp, Glycine max
ttaaaccttttttaaaccaaggccttggtctttctggcacccaaaaaggttctggggtaagttcttaagattgttcaccggtccaaccaaggaacccaatttgggccagtgaaactaacaagtgatcttggggggggctacttttgggtgaactgggaaaaaggctttgtctaatcaaccttaaaacca

SEQ ID NO: 9833 - DNA, 225 bp, Glycine max
  modified_base (27)..(27): a, c, g, t, unknown, or other
  modified_base (29)..(30): a, c, g, t, unknown, or other
  modified_base (53)..(54): a, c, g, t, unknown, or other
  modified_base (70)..(71): a, c, g, t, unknown, or other
cggtgaccggctgaatggtgaaatatngnngttatggacccattgatgatggnntagaggtgagtggggnngtgagtggttcatctagtggttgaactttgtaaccaagtggatgcaaccaagggtgagggttacaaacgcaagggaggtacctttaggtttcaggggtataacaaggggtgatcccagatttgagaagaaaatggtttccgcttttgacacatg

SEQ ID NO: 9834 - DNA, 450 bp, Glycine max
cacgcgtccgccagccctttctcctttcttcgattatcttcttttctattcactctctgatgatcacccgttccggtgttcgttttcatttgtcctcccaacattctatttctctctttttgcatttcattttcgatcatccgcagatcgcttgcgtatttgctctaccactctgatcgtatctttattttttattatatttttctttccttctgctacttcggttctttcttttagaaatatatatatttcttattcatttattttcgttgaactcctgctattatgcatatggaatttgtaagaatttgattcattaatgagttttgcaagtctagtttggagtcattagactgaactactgaataaccagctagtttgagtatttgcgaatatacatgataatctcgtgttacttacagtcaacatcatcggtaacttctcctattt

SEQ ID NO: 9835 - DNA, 366 bp, Glycine max
  modified_base (148)..(148): a, c, g, t, unknown, or other
caaaatggtctaaccatggcctacaattgggcagccatgtgagttgtctgatgctgcaaaatggtctatgtactgcagaaactagtgttttgtgagggaatccaagctacagagtctggtactaagatgtatccgatccaaggaacanattgatggattatgcaaacttcttgctcaacattgtagaatgttaacgtctctggaatttgttcactgcacactctcaacagattttattaatgcaatatttggttctttagtcatagagagagtacaaaaacatgggatccaacatttgtcaatcatcgccacaagttttctttgaccatgtgcagtttctttacctaatggactcatgtcattttt

SEQ ID NO: 9836 - DNA, 266 bp, Glycine max
cggacgcgtgggtgataagaggagataccaacaagagaggagaaaaaaaagagttgagattccctttgaagaaaagatggcatcccataggcaaagctatgaagctggtcaaactaagggccgaactgaggaaaagacgaaccagacgatgggcaatattggagagaaggctcaagctgcaaaggagaagacccaggaaatggcccaagctgcaaaggagaagacccaacaaacagcccaagctgccaaggacaagacttgcgaca

SEQ ID NO: 9837 - DNA, 277 bp, Glycine max
tcatttcaagcacgactaaaaacacctttttcctgtcacaccgacagtttcaagaagcaaggaggagaattcacataaatcatggtggagattcacgaagaaatcgacccctttgatcaagaagaacatgaagaggaagaaaccgactatgatcagctaaagaagcggatgcagaaggatcggatcctgctgcagcagatgaaggagaaacgccccaaagaagaggcaggccaacaagaaaaacaagaagcatctatgcggaagaagatgtcaagag

SEQ ID NO: 9838 - DNA, 390 bp, Glycine max
tttgttgttcgtttcagcaacaaagacattgttgcacaaataatatctgctagcattgctggcgatattgttcttgctgcagcatatgcacatgagctgccacgatatggtcttgaagtagggcttacaaattatgctgcagcttattgcactggtctcctgttggcccgaagagtcctcaaaacacttgaaatggatgaggagtacgaaggaaatgttgaggctactggagaggactattcagtggaacctgctgagagcaggaggccattccgtgctctccttgatgttggtcttattaggactacaactggcaaccgtgtctttggtgcccttaagggagctctggatgggggtttggatattcctcatagtgacaagaggtttgct

SEQ ID NO: 9839 - DNA, 406 bp, Glycine max
  modified_base (190)..(190): a, c, g, t, unknown, or other
  modified_base (257)..(257): a, c, g, t, unknown, or other
agctgaaacacattatcaagtctacaaatatgaagtgcctgactccaccatcggcattggaaggggattgtggattccttgctgcaaacctttatgctaagagtgtttttggggaagatgctttggtgaatgtgagcattgaaaagcaatcagatggtaagttgagtggatacatcagaataagaagtanaactcacggaattgccctcagtcttggggataagataactttgaaacagaagggagccgcctaatangagtaaatgcccgtttttctctgatggttcttcgcttatatcaactttgtgtaacttcctgtggcgggtaacttcaagcttggttattgcttcaaattctgcggcttttggtggcaacccggctgttagtattaaattttttttcccct

SEQ ID NO: 9840 - DNA, 165 bp, Glycine max
agaaaaaaaatcaagaaaaaaaaaaaaaccgtcaaaactctcatctcaaaacgtcgatatatcaaaacgtatacctactgacatcctttcgccgcttgtcctcaggttcttgtcgaacttgtcttaaatgcaatataatggttctgcatttagataacacacatt

SEQ ID NO: 9841 - DNA, 395 bp, Glycine max
aggtggagtgtgagtgagtgagtccttggtccgaagcaatgcaagaagaagaagcatagcagagaagcagcaatgacaagagcaatgctcctggtgttattccctcaagacaacaaagccaagttcaacttcccttctccttctaagtctcttgtctccaaagcacaatccactatctcaatctgcctccttctctttttcacaactctcctcctttttactctctccaccctcccaaacacccctcacacacctcccactcagcctcctaaacccaccccccaccacctggctctccagcgcatgggcactctccaccgcagaggcaccaaatccatgtccgacctcctcatctgccacgtgcctgacgaaactcccctccaagacttccgcat

SEQ ID NO: 9842 - DNA, 267 bp, Glycine max
aggccctagactacactacacactttgcaatggcggttgttgcgcaaacccctgacatcgccggcgagcgacagtccggccaagacgttcgcacccaaaacgttgtggcatgccaagccgttgccaacatcgtcaaaagctctttaggccccgttggcctcgacaagatgctcgtcgacgacattggcgacgtcactatccacagcgacggtgccacgattctcaagaagcttgaagtggagcaccctgctgccaacgttctggtgg

SEQ ID NO: 9843 - DNA, 413 bp, Glycine max
aaagtaatggcaatggcaacgatggaagagattccacaaagcccagaagcgaagttggggatgcgagtggaggatctttgggacgttcaggaggcacagttgagtcccaccgagaagctcaacgcttgttttgaaagcatccctgtctctgcttttcctttggatccttcaaacacagaaattgagattaaatcagacgccaccctagcagatgctgttaagatattggcaggacacaacgttttcagcgcgcctgtggtggatgttgaggcgcctgaagacgctagttggattgacagatacatcggaattgttgagtttgctggaattgttgtatggattttgcatcagtctgaacctacgtctccgaggactccgtccactccatccagtgcaagggctattgcagctgc

SEQ ID NO: 9844 - DNA, 411 bp, Glycine max
cccacgcgtccgtgttagaccattattttcaaaattcactatgagagcacacaaactcttgttgttttttatacaattctgcttaataaactatagtgccaacatctttccagcaaatggttattttcttggccatcagtgttccattgtcctccatttgaaaaataacctaatattcaactctacaaaatccaaaaagcttaccctttggaaccaaactgaagattgttgccaatggcatggggtgacatgcaacgaggggcgtgttatagcccttgatctcagtgaggagtctatctcgggaggactcgttaattcaagctctcttttcagccttcaatatctacagagcttgaatttggctttcaataacttaagttcggtgattccttcggagttgtacaagctgaa

SEQ ID NO: 9845 - DNA, 398 bp, Glycine max
agcagactttctctctctctctctagtttccatagcacacacacacgctaatcattcgacgaggccgcaagtgagtgagagagaagaatcactcactgatccacacacaaaccagaacaaaaccaagcacagacagcgtgcgctcttcttgtgatttgtgttacaagcaaccaaccacactcacacacacccctccataataaaaatcacttccatgctctcttcttcaccccaaccaaaacaaacaggtttgcatttgcttaactggagccagattctgtagctgatttcatcccaataaatctaatgatgcttaagtaactaacactcttcgattggtttctgggttctcttgaagatttggtctttaatcgagtcgaattggatcttgtgattta

SEQ ID NO: 9846 - DNA, 397 bp, Glycine max
agattggacatcaggctttcaagcagttcccattgggataaaaaaaaaaaaagatgtaagagagagaagaaggaaaccccaacccaataatcatactcgtacttgggatgatattggatcatctcaacctcaattttctacaatattaaataaacaatcaccttcattttttttttctcctcttcatttctgatctcatccccatggatccctttgatttaatacgcgaagggtttggttgaggctgactggacatgcgctgttactacttttaaagtctgtttatgctgtagttattttgtccatattttagttaataatgaacttatccaagaaaggacccctaagggatgcaaagctattaagcccaaacaaggcaacaactctgaatccaaat

SEQ ID NO: 9847 - DNA, 349 bp, Glycine max
  modified_base (305)..(305): a, c, g, t, unknown, or other
atttcattcaacaaaaccatttttttctctctcactcactcacttcacacaatgaagcacccaaggggctgaccctgtcgtccgcaacgcttgccgcgacaccgtgggtgccctcgctgcacagtatttgaagggctgactctgccgtccgcaacgcttgccgcgacatcgtgggtgccctcgccgcaatttttgaagggaaacgatagagggggtggcgggggaggtgtagggacggtggtggggctgttcgtgaagccactgattgaggcaatgggggagcagaataagggggtgcaagcggnggcggcggtgtgcatggccaagatggtggagtgtggcggtggcg

SEQ ID NO: 9848 - DNA, 383 bp, Glycine max
gttccgatgaatcggaggtttctgatgtgactactgtgggatccaatgttcggaaggatctaaacgagtttcaggaaaagcatgccactctcgttttaactactgttaaggaaatttcaagattgagatatgaactatgtccacgtgctatgaaagaaagacacttttggaagatatatttcacacttgtcaacactcatgttgctccgtatgagaaagaatatatggaggaggttcagcttagagcgggggcagagcagaatgtggatactaaggtagagcaacctgctgttactggaggaactggaaaggcagaagcaacagggaacaatttgaagggtagaccttctaattcatcctctactgaacaagacttggacaca

SEQ ID NO: 9849 - DNA, 403 bp, Glycine max
gataggcaccgtgctttacaggagcttcttgagcttgttgagtcgattgataatgcaaatgatttaagcaaacttggaggacttctcgcggttagagaagaactttattgctctgatcctggtataaggacaattgctgcatgggttcttggaaaagctagtcaaaataatgcaattgttcagcagcagatcttggaacttggagtgctctcaaggctgatgaaaatggtaaactctaattcgatggaagaagccaataaagcattatatgctgtttcagctttgattaggaatgatttggctagtcaggggttgttctatgctgaagctggaggttggatgcttcaggatattttgagtaatacaagtcttgatgtcagactacggaggaaagctgtacgtc

SEQ ID NO: 9850 - DNA, 411 bp, Glycine max
agcccacgcgtccgctctttcattatttaataacaattattattctcaatgggcaagactcctttctcctttcgtcgctccgcctctcgccgccgccccaagaagaccgccgccccgccccctcctccctctccgccgcaacatccctacgcggccggattcgccgcctcacccgacgacaacaaccgtctcatcgccgccgccgccggcagcagcgccttgacgaaggcgaagaagaagaccggcaacgtccgcttgtggatgaggtttgaccggtccggccggtcagaactggtggagttggagaagaacgccatcgtccgccacgcagcgattcccgctagagacttgcgaattttgggccccgtcttctcccactcctccaacatcctcggtattccaatccccccc

SEQ ID NO: 9851 - DNA, 285 bp, Glycine max
aggtcacacggccgtaaaagttctgtcacatgcatatgcgtctgttttgatacaagctgcatatcgcggtcatcaagttagaacatgggaagcattgacgacgttgacgcagatacatgaagtcaggaacgaggtgactgatgttcgagaccgtgttcaagcctttgagagatcgtctgatcttcaaaatgatgacaagcaagaaattgcaattggtgagaccaatatgacacccctagcgaagttggatactaataatggtttgcatccaagtaacaaggagat

SEQ ID NO: 9852 - DNA, 398 bp, Glycine max
agattttcctttttcttctatctttctgttccatcgatcacctccaaatccaattatatatttatatttttcactccgcaacccaacactacctgaaccaacttcttcatcaatttattctccctaaagcttcgccaacggccaccccaactctctgctttccagcttcttcctttcttttgctatttcgaggcacagatgactggaatttcaaaggaagaagggtcagctagtccaagttggggtgcttcattttttatgcagacaagagaggaagtggctagagctgttgcagctgctgttaaccctccaatgtcgtcaaaagatgataatagtggtagccaacttcaaaggctgcagtatcaagttgcaaaaatgttaaaaggcttttctcaccc

SEQ ID NO: 9853 - DNA, 410 bp, Glycine max
agtgctcctctgattcattcacccaatttttttctgtcctcttttcctctcagaagagcctctgagtctgctcaggtgttccttgtcaagagatccttttgtttttgaggtgtgaagggaaagagaaaaaagatgaatcagtgtggttatcagcagaagaaggccttgacaagctgtgaggagatgaggatggaatctgtggtgtgtcctaaacctcgaagattgggcctgttgaaccactcaacctttgataaccacatcagacccttgaggccaccctttatcaactaccaatcagaaattgaagattcaggagttggggctgagcttatggacattattctccccaagagatctggggggcaagtggcttcatcaccgccatttttctgtggatctccacctagcag

SEQ ID NO: 9854 - DNA, 400 bp, Glycine max
agtggcatatcagcgccaactggccttgagtcacgctgctgtatctggtctttcaggtcaaactcttctgcaaatgactggacaacatggcctagctccagcttcgatgggcgtaaactctggggcatctcaagccatgtatgatggatataccggtaattcatcgagacagcagcttatgtactatcgttgacacactggccagcgcagattcacagttgcattgttatcttctgggggctttgatgtgcatcacatttctctttgcttccccacagcatgtccttttcatactgggctttttttattgaggtattatcgtggcttgatatttaattaatttttacgtcgtgttgtaattttgtattgtttgatctaatgaagatttgatggctctaaa

SEQ ID NO: 9855 - DNA, 384 bp, Glycine max
gggtaaggtcgcgttgtgttgcgtcgtgtcgtgcgctgttcctctgtgtctcggttttgtgttcagaccgaaccctaactccgcatcgcaaccatgtcgacgaagcaaggtggcaaagctaagcctttgaggaagcccaagtctgataagaaggattacacgagattgatgtggctaacattcataagattaacgcagatgataaggcgctaaaggagttgaaagccaatgcgcaacagaagggaagctttggaggttctgggctcaagaaaagtggaaagatataagggctccttaacatgagtgtatgcattcaatattgagccctgtaattacagttgcgagcatgacaacttctcttattactgtggcctactttattgc

SEQ ID NO: 9856 - DNA, 394 bp, Glycine max
gcgacgcatccgctgtacttcatctctggtctctggcatccgtggtagcggaagaattcaatcctgtcgaataccctttagcttttgcatctgcaatctcatcgaattcgtttctaccagtctcattaacattgctgattttcatagctagatgcctctcagtagagggttactctagatatggtttgaattacaatgtctgaagctgaaaagatatcaaaacttgagagcttgtgcccctcagtatgataaatgtgtggaagtggagcgaaagtctcactataaatagatacaacaaatcataattcaactaatatgaattatcacaaagcttttaccataaacgtgattatgatacgaatatgtcaattgacagtgttggaagcttacacac

SEQ ID NO: 9857 - DNA, 406 bp, Glycine max
agggtgactctcgggttttacaacgcagcttttcatcgttcagtctaaggcacacgcacaccatcaagtcatcttctggtctgctgatatctatggcatattacagagatgatcgatttgcaacatttgaacagttttatcgttgttaccctgtctccttcattgagaaggtacgatcactgatttagccttatgtcaataataacttcctttgctagtttctttcagaggaaataaaagaagaggtgagaaaattttgaaatttgaattgaggagaaaaattttctcttctatcctcctattttctttcctctcatccaaacatgtcataaactatttctattcacaaagtcaacatattccttgggatttatatttgggcctgtgattgatcaaaggggtctga

SEQ ID NO: 9858 - DNA, 403 bp, Glycine max
agcaacaatgctcctccgtttccttttcacgtgtcaagggtagacaaatctccagcagcatatagtcatagtcacaggcaacaacaaccaggtggctggcagatgaatcagaacattcctcttgttcctcccaacttttcttgtttttccaattccaattccaattccaattccaatgtcctccaaaacgccttcaataagaatgttgttcagccttcagcctcatatcctcaatgcttggctattgagtttgatcaacagagggagattgatcaccatatcagatcacataacgaaaaattgaggattttgttgcaagagcaaatgaaacagcatgtggcagagttattgaagaacgtggaatcgaatgctcttcatttgttgagacagaaagatgaagaaa

SEQ ID NO: 9859 - DNA, 407 bp, Glycine max
ccgtcaccgtcgccatcaccggtgaaaaagggcggtgaattggggaggagtgaggaagattcgcgtttgaagagtgtgaatttgagtaaggagctttctgcggaagaagctaatcaattgtttggtatggtgtttgggaatgaagtttctaagggcattcttgcacagtggagcaaccagggaattcggtttagctctgatcctgtaacatcaatgggcctagtgcagcatgaaggcggtccctgtggcgttttggcagctatacaagcatttgtgcttaaatacattcttttcttcagtgatgagttgaaagatgtgtcatgcatgtcaccggagggtctgggtgcgtcatttaaaagtcagtctattccatcatataatttttcttcactcactgaaggtgaaaa

SEQ ID NO: 9860 - DNA, 416 bp, Glycine max
agaaaaaaaaaaaacaaaaaaaaaaaaaaaaaaaaaaaaaaaaaaaaaaaaaaaaaaaaaaaacaaaaaaaaaaaaaaacacaaaaaacaaaaaaaaaaaaaaaaaaaaaaggggcggccccccaacaggttcaaaccttacttacccttgcatgcaacgtcacaccccttcaacactgtcacctaatttcaattcacgggccttccttttacaacttcttcaccggaaaatccctggctttacccaccttaaccgccttccaccaaaaccccctttcgccacctgcccttttcccaactaggccttcatcgatccccttccccaacatttgcccacccccgaatggacaacgggacccccccttttgcggcccattaacccccctggctatcccgctcatgcctcttcctccccc

SEQ ID NO: 9861 - DNA, 407 bp, Glycine max
ctcaagtaccaatatttgtttttattataaaagcatgtaccttttgttcttcctaccaatacaaggttctccacaacaaacacgctgatgaatcaatactgggacttcttcaatggcagatgaagctatctctccacattgaatttgaaaaagccagttagtgctacagccagattgtgcaaaaccttggtgtaaaatctgtgttcaatcctctgttttgttgctgacattgaagactcttaaacaattaatcaagaattgttctagtgttttggttctggcaccagttgatctactattgggaattggtaacaaggatcactttctactacaacattcaactagatttcttgtactttcattttcatcaaaaattacattcttctatggatggtcttagttgggat

SEQ ID NO: 9862 - DNA, 401 bp, Glycine max
agctcaagaggtggagttttcaagtggcggtgtaaatttgggttgatttgcgagttcttttcatgcccagcttgtcttggagggaatttaagtaaacaaggattgggattcaagcttggtggttaacattatgttctaatggttgtgatggcccacgacgtgaagcataactggtttctgatttcgaaaaatgttatcaatgattgcagtcatcaaaattggactgggtttgtagtattagattcagggtgctccgaataatttagagttttctatttttttaggattcttatatttgcacgttacaattttcctatattttttatcgggtttgatataaaggataatgatgtacaagaatttcccttgtatttatgaagcattagctattaatttccttt

SEQ ID NO: 9863 - DNA, 402 bp, Glycine max
agtaagttcacggtcagttctgaaaaatgggttccaaggttttgcttgttgtagttatgttcatagcggctatacttctgatctctgctgaggttgcacccaatgaatacgaaaattttaacaaaaaagatgggaagcatgctccaaatgggttatatgatagcaaatggggttacggtggttggggtggtccttggtatggcggctggggtggcccttattatggtggcggctggggtggcccttattatggcggtggttggggcggtccctggcgtggtggtggcggtggtggctggggaggttggcgtcgacctaatggcaaccctcacaactaagaagaaaacttgctaaagcttctttacgggtttaggttttcgcaataaataaaacttcatgaga

SEQ ID NO: 9864 - DNA, 399 bp, Glycine max
agcccacgcgtccgcccacgcgtccgcggacgcgtgggccaacatctatctcacttcttagttctttgtggctctttccatgatggcctctcctacatctccaagagttctcttcttgagtctctttgtaactctttccatgattttacatttgagttcagccaggaagttgtctgagtcagacccccaattgcagttccaataccacagaggccctctcctcacaggcaaaatctccgtaaacctaatttggtacggtaagttcaaaccttctcagaaagccattgttgctgatttcatcacctctctctcctcttccaaacccctcaccgcccaaccatccgttgccacgtggtggaaagccaccgacaaatactacaaaaactcgttccccaaact

SEQ ID NO: 9865 - DNA, 273 bp, Glycine max
agattaaagaaaacctcccagaccatgagaaaatggtggcttttgctaagtttattagagaaaaacgtttggcatgtacctaagaaagtaatcttatatgagatcaagtatgaatcactttgtatctgtctgaatcgttttgttatgcgtgtttctttagtttccactccattattaggatgtcttgacatatctgtgaaagcaataaaagtttaatgggaaaaaaaataaataaaaaacaaaaaaaagtaaaaaaagagaaaactacgagaa

SEQ ID NO: 9866 - DNA, 408 bp, Glycine max
gtttaatttactctcctcgccaaggcagaaaggtgggctagtccagtcgtctcaattctcttcaggtaattctgctggacaatcactgcaaggaatgcaagcaatgggtatgatggggtcgccaaatctcacctcgcaactacgagcaaatggagccatggcttatgcacagcagctgcgtatgagtcagggtcaaatcaggcagcaactatcccagcaaggttcacttaacactgcacaggttcaaggtttaccaaggtcatcatcccttgcttttatgagttctcagttgtctgggttgtctcagaatggacaacctgcaatgattaactctttaacacagcaacagtggcttaagcaaatgccagcaatgtctggccctgccgcaccattgcgtcttcaacacca

SEQ ID NO: 9867 - DNA, 417 bp, Glycine max
gcgtgggcgagaccgtgggcggacgcgtgggccgtcatgaagagcttgcatgaggagatttccggcgtgacgtcagattactgcgagtctcacgcgcagatcggatacctcctggaggcctccgacgacgatcttgggcttcctcccgccggaaactcgtccgggccacaggagaaaaacgtggaagccgagttggttcgagtcgcgtctgactcgtccgggatcggcgagttgtgggaatttgaagaccagattccgagatacgactcgttcgatttgggaatggggttcggttatgactgcgatgctaccgaatacgctgcgtttggtgaacttttcgatcattctgatgtgtagtatgactcgtggcggcaatagacatttaaggaaaactaaatggaaaaaaaggttttagag

SEQ ID NO: 9868 - DNA, 392 bp, Glycine max
caattttgggacgattgggaaggagaagacgaagaaggagagcagcgagactctgaattcgtgtgtctcttctgtgaatcccggtacagctcgtgcggttccttgttcgaccactgcgcctcccttcaccgctttgatttccacgcgattagaacaactcttagcttggatttctatgcctccttcaagctcattaacttcatccgctctctggtggcagagaacagatgttggagttgtggattaacatgccagtccaaccgtgatcttcagaatcatttgcatgatttagttgactttaatgagataaagactttgtggaatgatgataggtatctgatacctttcatggaagatgattcactgttgttcagttttggtgattgtgacca

SEQ ID NO: 9869 - DNA, 395 bp, Glycine max
agctctctcccaaattgctttctctcatttctctctcccgaattgttatctcccccttctttgttccttctttccatttttttcattcttcccgtttttctgtattttcttacatctaaagctgtgattttttacatcaaaattgtgatttttatctcagattccatgacaacgatatcatatttgcgttcctctctaagtttgtatttttatttgaccgtgactaactattgttcttcctttgcaacacaaaagcttcaatttttttgtgttttctgtttttttgtgttataatgacttttcgcaggacaagaggttaaattttttggtgtttctgagccttctccgacgtacccaaaggctggagcttttttgctgggtttgctagttctttg

SEQ ID NO: 9870 - DNA, 382 bp, Glycine max
aggggcaaagcaaaggcaaatctttctcacaacctacaagttatcttctttgaatagtaacacttttggggagccgacacaaaagcctaagctgaagctgaagaaggttgctgttaaggttaagaagattgtggcctcggttttgatgttcatgcgagttggttcttttaggtcatgcagttctaggtctcagatttctgccacctcaccaaataggaagaactcttgaggatgttgttctgacgtgggtttaggatggtttataattctctctataatctttggttctttcacactcaggagttttagtgtgtgtttgtgaaagcgaacgcaggcgtttttgtattggaacgcggaatttttccgttttcaaacacatcct

SEQ ID NO: 9871 - DNA, 387 bp, Glycine max
tgaccatttcccttgcttttggttagggtttccagagttttccaacttatcaatccacacaacttcattcattcagagaaagaacaaaaatgatcgagctgttcctgtcggaaccgaattggaacgacgtcgtaaacgacgacgattcaactcgttcgagaatctccattctcaacgacttggaaaccgttatttggtctacggtgggtcgctccgaggcgcggttgtggctctgcaacactgtcgcgggattgaactgcgtaacttccctcgatcagcgtgacctgtttcggaatttgctcagaaccagtggggtgaagcgggatttggcctctcagctcctgcatttgatgttcgacacggcgccgcacaaaccaagttccgttt

SEQ ID NO: 9872 - DNA, 347 bp, Glycine max
cagaaatatcattttccgagacaatcccatcttccaattccatcttcaatatttcgtcgcatcgacaatcttcgcgaacgaaaacacagaaccctatacagatccattccatatccatgtcaggtgttggccctctatctcatgattgggaacccgtcgtcctccgcaagaatgctcccaccgccgccgccaagaaagacgagaaagccgtcaatgccgcccggcgctccggcgcggaaattgaaaccctaaaaaagtataatgctgggacaaatatagcagcatctagcagcacttcattgaacactaagatgctggatgatgatactgagaatctagctcatgat

SEQ ID NO: 9873 - DNA, 416 bp, Glycine max
gaaatattttacttgcaaaaattgcagagggtgtttcccttcttccaatgtggaaagagtggggcttttatgtctatcttgcgtggaatcaaggaaatctgaaaaaagttctattcatgctgttggcaaaagaatcaggtcccctcggccagtattattctcccgttcatgttcatgttgtgcttctgaatctgaactatgtatcactcctcaaactaagaaacagtggaagacaagaacaaagtcatcaaaactgtcggtaaaattgaagactgcaccaattacttcaaagtgtttatctccacaaaataaaagtcagtggaggatctctaaaaagtatcaacgattaaattaattaaattttgaagacgatggattgcctaatggagctgaagtaacttattatgcacgtggac

SEQ ID NO: 9874 - DNA, 373 bp, Glycine max
  modified_base (365)..(365): a, c, g, t, unknown, or other
ttttcaactttgctattctcaggctacttcaataaccatatagtataagatttctcattggtaatagaattccaatggtcttgaaaactacttatttagacatggttttatatctgcttctatgagaatatgagattctgaagtttggtaatgtaggataatgtgtcaactttttacttattttggcaaacctcaatttaacaaccagctaaggcatcttttagccaacttttttctgtttgcaacttgtggattacgcagagatgctacctgtatacgggtcctttttttttatcttgccaaataaacttcttttctaattatgcaagctgcaaccctgtttaaagttataaaggagacccttntatacctg

SEQ ID NO: 9875 - DNA, 408 bp, Glycine max
atttctgtttacattcaagagagagaagaagaagcagagcattggcagcaaagacagagagcgtggctcgtcgcttcaaactcctctgcggtttccccttcttgttcatcttcacagaaatggaggtagcagtggccacagcgttgcaaccgcattgaacgttacagttgatagttgatcgactactccgtaattgacagtctagactgcatcacctacacccatctccgacggcgaatatttctccgtcgacgacctatttgacttctctaacggctctcttcacaacgaacaacaacaagaatacgacgaacggaaacaaagtttatcggcttcaaaggaccgcggagaagacaattggaactccaattccaccggcggtttcctatgattcacttttctccaccg

SEQ ID NO: 9876 - DNA, 261 bp, Glycine max
ttgcacattgcactttgcactctgcacagcgcaatggcgtgtttgttgagagcgagaaacccctgttactctctgatgaggcgcattcgaatccggtgcatgagcaacgttcccgacaacacggtgtattcggggcccacctcgcagagctcgaccaagcgcgtcacgctgagccagtttcgccaaaaacaccggtctcccaagccatcaacatggtcaacgcctacaactaccccgccgcggtgcacctcgacaccgccg

SEQ ID NO: 9877 - DNA, 390 bp, Glycine max
atttctgtttacattcaagagagagaagaagaagaagagcaatggcagcaacaacagagagcgagaagaagaagcaagaagaagaagaggtacaagaacaagtggtgaacccatgggaagtctccgccaaaggcaaaatcgattacgacaaactcattgaccgtttcgggttgccagaagctcgacgaagccctaatttcgcgtctcgagcgcatcacctctcgcactccccacgtctttctacgacgcggcgttttcttcgcccaccggtacctccatccatttcctcccttctctccttcccttattttcttaaactataatttgatgatgtcgtttctttgtgtcgcagcgatttcgcggagattctggacgcgtatgagaggggag

SEQ ID NO: 9878 - DNA, 227 bp, Glycine max
agattggttgttctctcaagtctcaactcccaccccccctctttgacttttctatcagaagagcttgttggagttgaaaactgagaagaaaacatggcagcacaagggcctgtggtagtagcatcacttctaattttctgtttagctggaagttgctatgggaagggtcacttctcttccttgaaaagaacccttgatgtcactgcttcccccaagcaggaaccaat

SEQ ID NO: 9879 - DNA, 273 bp, Glycine max
cggacgcgtgggcggacgcgtggggatttgggtctgattctgctatctgtgatagtccgggaagacaaacgagccttggctctaaaagacaaaattcatctgtcgtatccgctttgcttggcatgagagaaagtgcaagccatgaattggaagaactgaataagaccattggggatctttgcattaaagcttacaacttgtggattttacggatctcaaatgaactttctgccaatgtctctcaggatgttaaccaagaatgtgcatgaactt

SEQ ID NO: 9880 - DNA, 319 bp, Glycine max
accacgcgtccggtggattaagagatcttctgagggcttgggttcctctaggaattatgttagcagtaggtatagtatctaagaatacatccctggtaagggtgtggtcttcttattctgcaaatggtaaattattctaaaatttcaaccaatctgtactcaagttcaagtgcttccatctgctgttagctgaatatttagttgagcatagcaatgattaacatcatgccttttggccttttggtttcaaacaagagagaaaaagagactgaccctgttgtgttccttttctgcactgggtaaaatacactgggagtat

SEQ ID NO: 9881 - DNA, 289 bp, Glycine max
cacccaaacccagaaacttatgttcatgaccatcctcaatgtcccaataacatttgcttgaagacaattttgagttgaccttacagcctagttccacctatacaaacacccttgatccttcaaagcctctcatagctccaatactggcaacaataatactcttgggcatctgaactatctccagtccttttttccccctttctttgcagtggatttgcgacgttttaaagacattaaatgcgtctttatgtgctaaagactaggtaattatagaattcatctcacacat

SEQ ID NO: 9882 - DNA, 406 bp, Glycine max
cagctgcctgcatggacagtactaatgttccttcaagaaacacacaccctttgagaagcaactcttcaaaagaatttagacgtaacgacagggttagcttctttgattggttttaccaattcagaattcttctccagagaagcctcaaggaaagaaaacacgaatccttcaacactctgagagtctgtcaagttattgctgcagcactgttagctggtttaatgtggtggcactcagactacaggaacattcaagataggcttggcctactcttcttcatttccatcttctggggagtcttcccgtctttcaactcggtttttcgcattccctcaagaacgtgccatcttcatgaaagagcgagcttctggtatgtacacactgttcctcctatttcattggctcg

SEQ ID NO: 9883 - DNA, 421 bp, Glycine max
aaaaaagtaaattttaataaaaagatgtgtagaagagataaagtaggatttatttactatcctctaacaaaacaattgatttagattggattagacttaaatttagaatcaaactaattgatgttattgaataagatgattttgtccttcaaaaccatttcatttcaatctatgaacactcctatgagtggctattcacatatagtcgatgacaatatgtcacatcagacacaacttgtgcaatgtgtacagtataggcctctggtgtgtgcattaggtgtcttttatgttatcattttgtcttttatttttctctgctctcgcttcgtatgtatgtgtgtgcgtgtgtgtgaaaaacctactattctcctttgaaaaatttttaatttggcaaataaggcaattccaattgagcctggat

SEQ ID NO: 9884 - DNA, 403 bp, Glycine max
accacgcgtccgcccacgcgtccgcaaagtccaaccaatacaaatctctagctctccctccctctctcttgtatccctttatatgaatcttctcagacacgttttcgagagcccctttttccttatcatagcctcgcagcagctgatatctcatgttgttcttgttcctaacaaagtagcattaagaaccatggcatcttcaccggacaccagcacaaccataaagctgatgcgttacaacagctacctccgcagactcaacagcttcagactccttaagacatccttcatcctcctcctcctcctctacaccctctccacccagcacctcctcctctcctccgccttccagggccccgcatgggagaatcaggtccgcgactccgccctcgccggccgcccc

SEQ ID NO: 9885 - DNA, 376 bp, Glycine max
acagtttttgtcatcactctctcagctgatcggtgcttatagatccagcgtcagcagattcaatttgacactggaagcaatttctcatttcaaagattaagtgaaaacatggttgtccttgctgcatccattgtgagcaaatctggcaaagttctagtttctagacagtttgtggacatgtctcgtatcagaattgagggtcatctagcagcatttcccaagtttataagcactggcaagcatcacacatatgttgatacggagaatgtgcgctatgtttaccagccaatggaagcactatacctgcttcttgtaacaaacagacatagcaacatactgggagatttgacaactctgagacttctctccaaacttg

SEQ ID NO: 9886 - DNA, 417 bp, Glycine max
tgacggtggattttgtgttttttgacagttaaaggaagaaatcgctgtctctgtcgcgcgcaacgatatctgcagattagagtgtgaagtccaaactctgaaaccctcaactcaaatccaatcctttggttggtttcgaattcgactccaaccaaattcccaacacatggactcggttctcttgcacttgcatctccacactctccctcctctctcctccgccactcaccgccctctctgccaccctctcgccgcctcctccgcttctttccaccgctcttctcctcctctcccacgcttccgcttctcgccgcttctcgccgctaacaccctcaccgctaataacatctcgccaagaagtggactatacacggttggtgactttatgacaacagaaagaggatttacatgtggtga

SEQ ID NO: 9887 - DNA, 140 bp, Glycine max
cacgacccctccggcttggaatgcactggaaagagggtggaaaagagtggtaaaggggacggcggcgccccttgaaaaaaaatccacaacaacaaatataacaacaacccccaataaccaatccctaaaaaacgggccgc

SEQ ID NO: 9888 - DNA, 342 bp, Glycine max
aggaaacctttggactttaagttaggagagaggaatttcgactcgggacgcgcttgaattgtgccctaggtttgcattttcgcgctcagattctttggtagatgaaaagtgacactcttagatattaagagtgggatgcatggatgtaactcaggatctgctctccttgtaaatgctgaggttgattctatgggaggtgttgttgatggcggagttggtattggtttgaaaacctctccacgccgagcagcaattgagaaggctcaggcagtgctcagactggagtatgatgcgcgtgaagaaagaagaagggaactagaattctctgaaaaaggagggaat

SEQ ID NO: 9889 - DNA, 374 bp, Glycine max
attgtactgttctattagttcatactaagttctgaaaatgagttccaaggttttgcttgttctacttatgttcttggccactatacttctgatctcctctgaggttgcacccgatgatgcatacgagaattttgacaaaatagatgggaagcctagtgcagatggggtagatgaaagcaagtattggcgtggcggctatggtggcggctatggtggtggttatggacgtgggcgtggaggctatggacgtgggcgtggaggctatggacggggacgtggtggatatggccggggacgaagttgctaatgttggcggcctggtggctatggccgccggcgttgtggccggcgtggtggctatggtcctaatgaac

SEQ ID NO: 9890 - DNA, 418 bp, Glycine max
accacgcgtccgaacaaactcatttttcttttccccatttttctctttctttttatttattttttttcattttcttttccccttcgcttcgtctccacagttcacaccattctcgtctccctctccaacaaaccgtttcctcgggaattgagaattccaattctgcccctcgcggctccgcgaatttacctatccgagccatggctactgccaccaccaattcttcgccctcggctcagcgccacgtcggcttcagccgccgcacgcaggcgccgcgccagctggacgacgactcgccgccggtgaacaagtaccggctgctgtcggagataatggcgcgcgcgccgtacgcggtgctggagagagaaacatacagcgacctcttgtgcgaccaatgcggctccggcgagctggcgga

SEQ ID NO: 9891 - DNA, 418 bp, Glycine max
accacgcgtccgcccacgcgtccggtgaaaccagcaggagctggagccagttggggagaaactttaacatcccaatcatacccatccctatcagtcaatagacctcacagtatgaacctgattagcaactacatgccagatttctacatggcccaccaacaacagcagcagcaacaacaacaacaacaacttcagtcttttgactgcttgatttcagctagcaacagcaacacagacatcacttctgttgaagatgatgatgggatctcaatgattttatctgactgtggaaacctgtggaacaacttcagttatggcagtgctgcgtccacaggtgagtctgagagcaatgcttccaatggtagaaacatagacaatgcagtgtagtccagtcaatattgaagtttgatgaaacagt

SEQ ID NO: 9892 - DNA, 431 bp, Glycine max
atgaacttgactcccaaaatgatactgatatttgtacataatgatccaattgatattgaggttctaattatttggtactatttatcttctgtgtatggcccaaggagtgtcatcacagttgtcggcatgttgaagtgaaatatggtgattttgctacaggcgtacactttactggcggttctttcagtggaatgtactgtttctattgagacatatcactggtttgaggcatcccttccatgcttagatgcttaaaagcaacccaggagaaggcaattccactggatgtgtttcgctgtgttcttgaagcgaattcatttcatggtcgtgcatcttgggcctgcaatttgtatggggtttaagtcatcatttttgtggtagggttctgtgccagtgttgtttcttctgattaaacatgctgttcctgggct

SEQ ID NO: 9893 - DNA, 308 bp, Glycine max
aattgctactctcaacaacctaaaccccaacctattaagtatcgtggtgtggaccatttgtctgatatgctggttcactacaatcagacttcggatatattgtactatgaagtacttgacatccctctgccagaattacaaggattgaaaactctgaaagttgcatttcaccatgcaaccaaggatgaagtggttattcataccatcagactcccaaagcagagcactgtgggagatgtccttgatgatctgaaaacacaggtggaattgtctgatcctgaagccgagcttaggttgcctgaagtttt

SEQ ID NO: 9894 - DNA, 428 bp, Glycine max
agtttattcatctaccgtcgggagggaggggatgaccacggcgccccgtgcgcccggcctcctcgtcctcgcgacaaacacaaaccccggcgcttcgtgcgccaaggaactcaaatctgttaagtgcgactcccgggggcccggagacggtgtcccgcgggagtcgtcacgacacaacatttacatacaatgactctcggcaacggatatctcggctcttgcatcgatgaagaacgtagcgaaatgcgatacttggtgtgaattgcagaatcccgtgaaccatcgagtctttgaacgcaagttgcgcccgaagccattaggccgagggcacgcctgcctgggtgtcacacatcgtttccccaacgcaaacatgtaacaatgttgctgccccgggtgtatgctgaactcccgcgagcaaccgcctcgtg

SEQ ID NO: 9895 - DNA, 251 bp, Glycine max
accacgcgtccggtggaatacccaataccccaaatcactcttacagcaacagacaatgacagtgaacaatatctggtgacatttccacggactaattcccttactcagcttttggtaatggattacttgggtccaatatcagatacattatctgatgccacatacaattcaccctttgattttcacattaacactgccaatggtgtaatacacacgttcgtagaagcagagccggttgaaatcccttaagg

SEQ ID NO: 9896 - DNA, 445 bp, Glycine max
ggtttttgaacttgtattgatctcattaattatgatttcaattggaataagttagctcacctaccatagggatgctgctaggaattgatatttgttgtatcttgatgcactgttgcatgcctatttctcctaaatgtcatgttatttcagttaacctatagacacatggatagatttacaatgcatgttttttgtatctttgttctttgatggaaagaaatttaacatgattgcaattgaaacatggtatataataaataaaatttccattggctcaaactcacaggaagtacaataccatgtactgaaatgctctgatattgtttcctgtagaagcagtttgtactgtcaccagtctttgttgctgcatatttggtacttatgatgtctatctaatgcttgcaaacctgcagaaagaacaagtcaaggttatcagcttgaattt

SEQ ID NO: 9897 - DNA, 343 bp, Glycine max
atatttgcaggccgttgagtgaagatgaaacgaggctgcacacgccggttgtgatttcgtgtaacgaagatagaagagaggttttagctgttcagaatatcgccaacaaacagatcgatagaaccttcgcatttgacaaggttttatccagcttcagatacctgaaaagagaagagcgagatggcgtcggtggtgaagaacgaactcaaatccgtcagagaaaagggtttcggcgctttcctcagagagctcaaggatggaggctacctgagatgccttccggatggaaatctctttgttagaggaactatcgataggtacaagaaagcatgtgctgcctcac

SEQ ID NO: 9898 - DNA, 334 bp, Glycine max
gggaatccttatcgtggactggaatattgggggccttttccataatccctaggcaccactttttgcagcaccaaatcgggatgattggtgggaaacgaaacattaggtggaattgttggtgggtagctctaaggtggacaatttggcaccataggaataagatcatcttctcgaataaatcattcaacgctactaagctgatggattatgcactgtttttgctatggacttgggttcaagcaatcgggaaagacttttcaatgcactttaactattggtctaccaaactaacaataagtttttccgtacattaagagggctcactaactgtggg

SEQ ID NO: 9899 - DNA, 442 bp, Glycine max
aacgctcagaagctctcttctctctctaaccacacatcgccggaagctgtttaccggcgcagtggctggccggccatgggtggcggcgccgccgcgtcggaaaaagaaactcctccctttttttaaaaaacaacatgttttgattcccttttttcccctagttccaaaaccaacggtaattttttgaaaaccaacactgataaagccaaaatcaacccttgaaccttagaaaaaaggtgaactacctttgttcttaggttatcgtttaagcttcagaaaacggttacagcttgggttgtgtgggtgtgggtgtttgacgcagtgcttgtggttggtggtgtttggtgtgggcttgggcgttggtggtggttttgatgtaggttttaggccgcgttagtgagtgggttaccgtgtttgccgtgtccgtggttcacggaggaag

SEQ ID NO: 9900 - DNA, 379 bp, Glycine max
  modified_base (342)..(342): a, c, g, t, unknown, or other
  modified_base (351)..(351): a, c, g, t, unknown, or other
cccacgcgtccgcccacgcgtccggggttcatgaggccaatcgcgttttctattaaggagtcttacgttgaagacaacattgatttcgacgatgtggagaacaaccaggaggaggaggttacaatgaggaaacctgccaggccgttttacaacgcgttcgagataatatcgtccttgtcgcacggctttgatcttaggagtttgtttgagacgaggaagcggtcgccgtcgatgttcatatgcaagttttcggcttcggcggtgttggcgaaggtggaggcggtggcgaagaagctgaactttagggtgacggggaagaaggagtttgtggtgaggatgcangggacggangaagggaagaaggggaagctggcgatga

SEQ ID NO: 9901 - DNA, 448 bp, Glycine max
gacaaaagttagacacatatacttttgtcattttactttttgtcttcctggtctctccggacatgtgtgatgtattttctgcaggtcgtaatcttgtgaaattggttgtgaggaacgcgtggttatccgtggatggtttgtgtttgatgccaacgctgacatatttgacccttgagtttgtgagactagatgatgaggacttaagcaggattaatgcctgtttccctaacttgacacaactcaatcttattggggttggtggactaaaggagcctaagattaatctcttacacctcaccacttgtcaatggtcagtctcaaatgctccactttctttgattatatgtgcaccttgccttgttgattttgatctcagatgcatcaaaccaaggttggttgtccttgaagccccttccctgtccaattttagtctatcccttgagaatac

SEQ ID NO: 9902 - DNA, 350 bp, Glycine max
tattttggtgaagagaagactgagttagtaaacacgctcgctcggtcttcttttccaatggcgatttccgatgagcctgaaactgtagccactgctctcaaccactcttccctgcgccgccgtcccaccgccgctggcctcttcaattcgcccgagacgaccaccgacagttccggtgatgacttggccaaggattccggttccgacgactccatcagcagcgacgccgccaattcgcaaccgcaacaaaaacaagacactgatttctccgtcctcaaattcgcctaccgtccttccgtccccgctcatcgcaaagtgaagagtcacgcgggcctcttcaacctctgtat

SEQ ID NO: 9903 - DNA, 416 bp, Glycine max
  modified_base (403)..(403): a, c, g, t, unknown, or other
gatctataaatcattctctctctctctctctctctcttacttacaaagtaaagagtagagtttgttctgtgaagaactgagggaggttcaggtccatgatattttgaaatctctctgtagtaggaagaccatgggacgagcttcatcattacttataatttttttggttcttggttcttcctttgccacctataatgtggtaacgatgataaggcactacggatcttcagaaggtgtggctgttaatgatggtgcattgttttttgaccctattactgagatgcctgatcatgtaaagaatcggaagacatctaaagtgccctttcatgtcgcgttaacggcgacggatgctccatataacaaatggcagtgccgcgtcatgtattactggtataaacaacanaagaagttacctg

SEQ ID NO: 9904 - DNA, 259 bp, Glycine max
ctgcaagaagatgaagttgaggatcacaacggccaatggctaaattgctgtcatgatagctgcacatcacctgattctcctaattttgcatgccttaggcgacatgttagttagggagcactagagaccatttgtggacagatctccaaaactgagcagtttatgagctgtaaccatcggtgcccgtagatgcactgcagctgataatgacgcgaccaactcaactatctgaattgggtattggatcacttgtccatga

SEQ ID NO: 9905 - DNA, 426 bp, Glycine max
  modified_base (281)..(281): a, c, g, t, unknown, or other
  modified_base (362)..(362): a, c, g, t, unknown, or other
ggaaaattgtaaactaacctttgtcaattgtccattatctgcaaagttttaaaaatcggtgtttaattggacaaactgtgaacctgttcgatcatatttcaactcctgttggatcatcaatttaactagtttcaaactatgatccaaacccctgttcaatctctgcttcagtttttgaaacattggattgttgtgcattgtgataagaaaccaagccaagagtaaggcagaatgtagtttgcggttaaagtaataagatagttggaaacttggatggatangaatgatctatataggtctctgagagaaaattttaggagacttgatcggttttggttctacgtaaaagaagtctcttgcangaaaatgcaatttgcatcccaaagggaacaaccaatttcaaaaaactcctgctgcattgatact

SEQ ID NO: 9906 - DNA, 304 bp, Glycine max
gttctataagttcacggtcagttctgaaaaatgggttccaaggttttgcttgttgtagttatgttcatagcggctatacttctgatctctgctgaggttgcacccaatgaatacgaaaattttaacaaaaaagatgggaagcatgctccaaatgggttatatgatagcaaatggggttacggtggttggggtggtccttggtatggcggctggggtggcccttattatggtggcggctggggtggcccttattatggcggtggttggggcggtccctggcgtggtggtggccgtggtggctggg

SEQ ID NO: 9907 - DNA, 449 bp, Glycine max
cccacgcgtccgattttttttctctcacacactcaaccaaagacgaaggaagaagaagaattacaaagtaccaccaaacaggctgcgacgacgtcgttctttgcaacttccagttcttgttcttgatgaatatgacaccagtttgcccctttgtcaaagctgctcgccccgatgataacaatgcctctaagaaatctggcgaaaactctatgaaacatcaggctgagtctgagagtaaggtgaagaaagaggttaatgactcagctagtacctcaccaaagtgcccttttggatatgattcacagtcgtttaagattggtcctcttagctgtacggtgtgccaagcacttttatttgacaccagcaaatgtgtaccttgttctcatgttttctgcaaagcatgcatatcgcgctttaaggactgcccgttatgtggggctgatattgtg

SEQ ID NO: 9908 - DNA, 442 bp, Glycine max
aggacgcgtgggagaagattattcgttaattgattttgtctattcgatttcaaaagctttgttctttattgaaaaatctatgactcgctatttttctgaaatatatgttttaaagcattgaagaaattctagaacgatatgttaatctttcggagggtgaacacggaaggtaagagcttgtgtatttttaacttctgatacctgatactagttaatcagtttatcctaatgttgccacctttgatttatcgaccatgtgggcttaatttaaactcttgttgccgtgaaactctaaaagatgcataataaagagcaaaatcaaaagttgcttagtaagttgaaagatgaagctggtcaaatatgtcaagcccctagctcaatgacttcagattcccaaattgaggatcttcgaagagaaattttcacttgcaagtctcaattg

SEQ ID NO: 9909 - DNA, 319 bp, Glycine max
gaggtcaatggaccagtaccctacaccaatcctgaagcataggctgatgctcaccgatagtcagcttcatgttctgtgtaataccgttaatggtgattccatccgctaacacttgacgcatcattggatatccatagaactcggattgcaatctaagcaccttttaatttcatttcataaccgtcgcactggcaggtataccaatcataccacatgtgactatcattcctccatgcttagtacatagatatcacagctaactaatagatccttctcaaggaaaaggagctgctcttagcataggtagcacagctcacat

SEQ ID NO: 9910 - DNA, 399 bp, Glycine max
cccacgcgtccggcttgtaaccgctttcatgatggtgtggtgtcaatggttgttgataagccagtgacaaataattttggacatctggggcgaaattctactatcatttgtctaaattaaattgcatcgtctttcttgcaaatttcttcttgatatgctcactatcaaatcaaatgagtttgctttaattcaataatgctgtcatttcctgcaatattctctctaaatcaagttaatctgtttatgtagataggatccactgagtgggttgaacaaaaccttattaatctaagttccaaagctgtagcataccttaatgtggactgtgctgtgcaaggtcctgaattctttgttggttcaactcctcagctagacaatcttattcttgaggtcacaaac

SEQ ID NO: 9911 - DNA, 354 bp, Glycine max
aatgactacgaaaattttaacacaacatatgggaagcatgctccaaatgggttatatgatagcaaatggggttacggtggttgcggtggtccttggtatggcggctggggtggaccttattatggtggcggctggggtggcccttattatggcggtggttggggcggtccctggcgtggtggtggcggtggtggctggtgatgttggcgtcgacctaatggcaaccctcacacctaataataaaacttgctaaagcttctttactggtttaggttttcgcaataaatagaacttcatgagaagtgtagttgtaataaaagtggaagtctctcttctcttgtgatatagaggaat

SEQ ID NO: 9912 - DNA, 103 bp, Glycine max
gacccttctgccctccccagccattaactgaaaaataataaacaaagaaaaaaaaaaaaaaaaaaaaaaaaagaaaaaaataaaaaaaaaaaagaaagcaaaa

SEQ ID NO: 9913 - DNA, 379 bp, Glycine max
ggctaccttaattccacatgctaaaattttgcacccctttattatataaccgtttcattctctatagcatctcaaagggtgtccaaagaaggaatcacacaagagaaattttgggtggatcttggtaatttaaatttggtccaaaaatagtaagaaaaaaaaaccatagttcatttaattttcatgtccttgctaacggtggcgcaccaaagggggtcaggtgagtttatccggttcacggaaagtcatggcggtggtggcgatgacgtcagtggtgacggtgaacatggttgtggacatgatgatggaagtggtgctggaggttcactagggttgaattttaacaaagtgatgcaacaaggtgaggtgacaatgcaag

SEQ ID NO: 9914 - DNA, 446 bp, Glycine max
  modified_base (442)..(442): a, c, g, t, unknown, or other
attttcatccatgcgtgaacgacgcagttattgtagggttccggtcacgggagggaccgattacacggccggtgaagaacgccgacaaagccggcacctgaattctggagttggttgttttttgtttcgtttcgtttcttttctctcttcaaggaagagaaaaattgtgcataagaaaaaaacataaacaagaaggaagggggtagtgatcacgtgcggaggggtatacgataagcgaaagagaggtatacctttacagttatgtgtttgacatttgattaattagttcttaggtgactataagcaattacgcataataatatatagacgatcttgccctaaggggaagaaggggcttttaattattgagcttttgtagagagggttgttttggaaatttcacttatcagttggattgctttggtccaacgtcaaaattggngtgc

SEQ ID NO: 9915 - DNA, 440 bp, Glycine max
gtcaagctctaattacgggtctctgtcagttctacggagtacctgtcacctccagcaagggcatcaggccccctactaatcgagctttcatcaagaagtactgcgcccccaggcaggcgcagggcgaaacaccacagcagcattgggatggccggtagcgggcaatagacacaccgccaccacctctagagttcacctcagctcatccgcaaaaaggttagagcgttgcctacgacacatggccgaccagcaggcgaccaagtccaaagccaaaggtaagcaaagtactaggtccgtgacctacaagccatcatgcgtccagctcaagacgttaaagaagcgctactaggaggcaacctagtaacttttaaatttctgcttactattttatcaccttttgtttctcaagtcatagtaggacacacctagttgctcatgat

SEQ ID NO: 9916 - DNA, 442 bp, Glycine max
tttcttttcaattacaataccccaatcccagaaacttatgttcatgaccatcctcaaggtcccaataacatttacttgaagacaattttgagttgaccttacagcctagttccacctacaaacacccttgatccttcaaagcctctcatagttccaatactggcaacaataatactcttgggcatctaaactatctccattcttttttccccctttcgttgcagtggatttgcgaggttttaaagaaattaaatgcgtttttatgtgctaaagagctaggtaattatagaattcatctcacacatacttctttttactaccttttatcgtttagattttatttttgaattatccttgtttaatggagtaatttaattcgttgacgggttgtggaatttgtgtagaagattttcctataagaatttttaattcgctaaagaaa

SEQ ID NO: 9917 - DNA, 406 bp, Glycine max
ggcgaacccaagcagcaacaggggatctttgccatccacggttcatgcgaattgcaaaaggacaaaaccataaaagaaaaattcgcaaaagttggtatcttcattcttccttctttaaacgcaacgaagtttctttccactttcaaaattcccaacccctcctttgttcgctctgtacatctgggtcatttaatccccgaatttcttcgcatcttgcctcatattccatccaattctcgctgtttcaacgatcacggtgttgatccttgatgggtttttctcgtcgatcataaacatacccgggtttgtgaaaaaggtttttcctttccacgcgtcgcttcacttgtcatcgatcctgagttccatagcttgaaacgctgtgggaaggtgaactttgtttgcccgt

SEQ ID NO: 9918 - DNA, 429 bp, Glycine max
  modified_base (403)..(403): a, c, g, t, unknown, or other
ctgctgcagaagaattcaccagattcagtggagacgcactttctctcttttgaattatatatgagaaaacagaggattttgcttgcattccaggctgtgaagcagttactgaggttggatgctgaacaccctgattctcatcgttgcttgattaaattcttcaataaagtgggatccatgaatgctcctgtgaccgacagtgagaaactcatttgtaatgtcttagaagctgagcgccaaactattagtcagctgcatgggaaatctctgtttgagacaaataactctttcctagaaaaacatgaagattctttgacacacagagctgcttttggagaaatgttgtatattttggatcccagcagaaggtccgaggctgtctagttgattgaggggtcagcanataatcttgtgccaagaaatggagcg

SEQ ID NO: 9919 - DNA, 414 bp, Glycine max
aaagcagcaattatacattttggtaaaaagtggtataggcgcatctcattcatttggaggcacaccatgcagatcatcggaagttttcagaagctatggaatattgctggtgtacacttaaatcttgatattcccaaatggatgcatatccttcgtttggacaggcttaacaccaatgcagtgcaatggcttaacaagaaaggaaagttatttgaacccacatatctttatactatggaaaaggggtatttcttgttacctgaaagtgctaaatctcatcataatatacgtactgtgaatgttagcatatcagcttggcactcctgctttggaaacaggtggcagcaactactcataaacagatttgtcggatatgatacgattttaatcaatagtttattgagttctcctggt

SEQ ID NO: 9920 - DNA, 119 bp, Glycine max
gctagaaatgctatctggcagcattgaatctaaagaactgtcactgtcatccctggttaaactagcaaaattgcagtccaataatgtgattattgcaacatctggaggtgtgcctcttg

SEQ ID NO: 9921 - DNA, 414 bp, Glycine max
aaaaaagtaaattttaataaaaagatgtgtagaagagataaagtaggatttatttactatcctctaacaaaacaattgatttagattggattagacttaaatttagaatcaaactaattgatgttattgaataagatgattttgtccttcaaaaccatttcatttcaatctatgaacactcctatgagtggctattcacatatagtcgatgacaatatgtcacatcagacacaacttgtgcaatgtgtacagtataggcctctggtgtgtgcattaggtgtcttttatgttatcattttgtcttttatttttctctgctctcccttcgtatgtatgtgtgtgcgtgtgtgtgaaaaacctactagtctcttttgataattttttactttgtcaattatgctaattcgatttgag

SEQ ID NO: 9922 - DNA, 436 bp, Glycine max
ggagactagtttaaaaaagttacagatggagtttatcaatcagatgatcatttccacccaaaaccaatgaagtgctctgctacaagcaaacaagaatagatttacaagacaaagaccattggaaaagagaacaataggagttccaaacttttggaagtcatcaatggcaaacataatgcctaatcactagctaacaataagaaattgtaattatcattgaccatacattctaacatgagatgattatgttagaatatatgttagaagtcaacaatggtctttgataaatatagatattatttaagcataaatcattgtctttctttgcatttttttttctccagggaaaagttttaggattaaggagactagtttaaaaaagttacagatggggtttatcaatcagatgatcatttccacccacaagccaatgaag

SEQ ID NO: 9923 - DNA, 165 bp, Glycine max
cacacacgtccgctacgtttactcttttgagttttacgtgggtagacctactgtagagaaattttgatgattggatatattgtggcgaaagccatcacaattggaggctttgctctggaggtcaccgtgttattttgcaaacccgcaaatgtttgggaacgcttt

SEQ ID NO: 9924 - DNA, 400 bp, Glycine max
accacgcgtccgggactataaagagtttaaaggctaagtaggaaatcctaacactacagggtgtcaagaattgaggcaagaacatttatgatactgtacagatacggtagagacacactattcaaagatgaaaaaaaaaaaaaaagggcgggcatgctttatttctaaaaggaatagtgtttctctgggagttatgatggaatttcttcttaacttgcaagtgaagcaatattgacattggggtacatgacaggtcagaagaaagatgaagcaacttattgtgttttgtacacagatgagttgtgaacaacattgtggtgcgtaagaagcatatagtttaagtggttgagtacagggtatgagttatggtaaacccttagttcagttttatggataaaaa

SEQ ID NO: 9925 - DNA, 411 bp, Glycine max
cagccatgttcttaaccagaagcgcgctttttcgcttttcaaagtctctcccttatgccccttcactctcccttaaaccctccatggtcaccttctcctctactcccaattcaggctggagaaatgcagcagaaggaggaagaagagacggaagaaccaattggacgtatgattctgccgaggcaagacgcgaggcagatgaaatgtctgagagtgccaaagaaacgatgaatgaaggctatgacagggccaaggatcaagcgcgggaagccaaagacagaacaaaggatttcgcacacgacgcaaaggagaagacgaaggacgctgcggggtcgatgagggacagggcggagagtgcggcggagaagacgaaagagtatgcttacgacacaaaagagagtgccaaggacg

SEQ ID NO: 9926 - DNA, 243 bp, Glycine max
gttttctttctccttttcacgggctttctcttcttttcgtctggcttcatcatcatctctctatctgcaccccttttgagaacttcaacttgttacttagttatgcgactctcccctttctagcttctgtgttcttcttcttcggttctctcttcatggcgtgctgcttaagtgccaggatcaaatctgagagacctccacgcaatggtttgagttcagatgatggtaacatggaagaagatg

SEQ ID NO: 9927 - DNA, 333 bp, Glycine max
ggaaagtgggtcatcatcttcttggggaagtaaagggagcgtgttgagagtgagagaccctttgttggtgaataaaaatggttgtggtatctatccccttaaaggtgctttgtagcatttgcatgaacatttaatacctttgtatgattaagtaaaagtacagacttggtatgcaatcaaagagactactgtttgtactgctaaaacatgaatctgttgaaccaagaaaaaaattgaagtcaaaagcttaaaaaaaaaaaaaaaaaaaaaaaaacacaactcacaaacacacaaaaatctcccgaagcaacacagacaagaaacccaaacgca

SEQ ID NO: 9928 - DNA, 296 bp, Glycine max
ggcaaagaaagaagggttgtggaacttatggattcctattgatagtgctgtgagagcaagaaatcttctctttgatgggagcaataattatcgctctagtgatgcggatgacttgttattgggagctggtctcacaaatcttgggtatggatacctttgtgagatcatgggtcattctctttgggctccacaagtgtttaattgtggtgcacctgacacagggtaatatggaggtattactgcgctatggtagtgaaggacaagtacaagaatggctaattcctttgcttgatggg

SEQ ID NO: 9929 - DNA, 439 bp, Glycine max
gcggaatcaaatattcctgaaaacaacgcattcctttcactgccccttcccaattcccttccctgattgtcaattggatcttcatgagttcaacaaccactggagcatacttcgtttcctgtgttgcgggaaacaagaacaacgatctcttctgctgggttttgctctgcttgctgccaaaatttttgggaactccatttgccttcatcaactttctcttgattcaggccattgacaggagtccatcggcggtgggagttttgggaaacttcggggtggttaacctatagtctttattagtttggtcatcatcagcagcagcatatttagatcccttattgttgagtggtgtgagaaatggtgtcctctcagttttctggtttgactatggctggctacaaacctgcacagactcagttactctttcctgcaaaccttc

SEQ ID NO: 9930 - DNA, 212 bp, Glycine max
aagacgcgtgggtgcagttgtgaacaatattgtccgtcaactgttgcgtgcttgcctctcaaaatgttgtcagatatagaacatgttatccccatcagtggtgcaaagctaacaatcaactgctaaggttcctggtcatcaagagcagttacgcgtattcacagattaggtcgttaaaataatcgaagcaaactggttttgaattctttaaa

SEQ ID NO: 9931 - DNA, 293 bp, Glycine max
accacgcgtccgcccacgcgtccgcccacgcgtccgctcttttcttctcctcctcctccctcaccaagttaaccaaagcaatgaagagactaaaacacgaggattcacaccaccaggacaactcctccgaacaacagcagggaaagtgtaggttcccattaatagccattatctctcttttctctctcttcgtcggcctcctctttgctctcacgcggagcgcctctctccgccacacgcgtcgtcgacgtgccgatctcgaccggcactcctcctcccacctccagcttcgg

SEQ ID NO: 9932 - DNA, 338 bp, Glycine max
cccacgcgtccgagcaaatggggttacggtggttggggtggtccttggtatggcggctggggtggcccttattatggtggcggctggggtggcccttattatggcggtggttggggcggtccctggcgtggtggtggcggtggtggctggggaggttggcgtcgacctaatggcaaccctcacaactaagaagaaaacttgctaaagcttctttacgggtttaggttttcgcaataaataaaacttcatgagaagtgtagttgtaataaaagtggaagtctctcttctcttgtgatataaaggaataatagttttatatatgtattttcttatcttta

SEQ ID NO: 9933 - DNA, 116 bp, Glycine max
ggaaaggacttaaatcactagaggctgttgacccacatgttaggatgattgctgaacgacaacatattgattaccaattcagtggcctgcaggatgatggcggtgcaaatgataat

SEQ ID NO: 9934 - DNA, 99 bp, Glycine max
cacacgcgtccggttacgccactgactcattcagatactccatgatagtcaccactcgaattatgttcactgatgatcccaaagcacaatccgttgatc

SEQ ID NO: 9935 - DNA, 342 bp, Glycine max
  modified_base (317)..(317): a, c, g, t, unknown, or other
ggagctgaagaaaaagttgccagagtatttgaagccccattatcatttttgaagacattaagtaatgccactttgcagaagtcctgttcttccgatgatatcatgggagatgttcagattttgggtgcaaatatgtcagctcttggactatcacagaaacctatttatgttcaagctgtgcacgaggcccctgaaagaagtggggtcaatggcctcgacacccttgaaactattcctgacgcagttccaactgtgttcactgaaccaccaattgaagatcaactagcttggcatacactttggcctgaatcacacanactctatggtcatggaaatgaacta

SEQ ID NO: 9936 - DNA, 437 bp, Glycine max
  modified_base (397)..(397): a, c, g, t, unknown, or other
ctttttgagcaggctaatgatccttgcgaaccctccctcagtacagaatttcgaacgcaaactcaaacggagtttttactggaagcatttcggcttcaactgggagcatctgaaactggacagaagctaatggcactgcaaactgaaattgggaagagccattatatttatagggatgagttaagcgagactacactgaccacaagacggtctttcgactctattaggaacaacttcaaagaaatccagcgaaatctggagatatggttggccagaattattggcgatcttgaggggattcttgcgagggaaggtgcatctcgtgtaagagaatattacatttccaaataacctttttgtcaatagaatatgagagactggtggtagctagctgtangaaaagcctcacctctcaagctaacaagttatctcttgtg

SEQ ID NO: 9937 - DNA, 441 bp, Glycine max
gcaacagcaagcacaaacatcaaacagagtcattgttattgtaacgtaaaatcacatggagaaggaagctttgaaggaccaaattgaaactccaaagcactgaacgaactcaattgaaaccctagcacagagtcatacatagatagtagcgtggatagcagtgtgtgatgcggtgatcgcgatcacgatgaaaaatgcaaacggcttgatttcgacgacgtcgtctaatacggcacagtcacaatccactggcctcaagacgtatttcaagactcacgaaggccggtacaagctttattacgataagacttacccttccactcttcttcactacgctcatggcaaaaccgtttctcaggttactctggcacatctcaaggacaagccggtgccttcgacgccgactgggcagtcttcaactttcagtgccaccagtggggt

SEQ ID NO: 9938 - DNA, 238 bp, Glycine max
accacgcgtccgcctctccccatttgcgtatcctttcattagaatatccctcccttcaaatatttttgaaatcctacggtttcacattccggatcccaatccgcggttctagctgcacttgtatttcatattttctcaatttaatcagattattatgtatctcgatttttttttgggggttacgatgccgccatttttgtcgacctcgaaagccctttgctccctaacatcgcgcaaa

SEQ ID NO: 9939 - DNA, 442 bp, Glycine max
aaccactcggaaatttctctgcgtctctcctattttttctgaatctaacattaacaacaagaatggcatccaacaggggtcaaggtggaattcagcagctgttggctgctgaacaagaggcacaacggattgtgaatgctgcgaaaaatgaaaaattggctaggttgaagcaagccaaggaagaggctgaaaaggagattgctcaataccgagctcaactagaggctgagtttcaaaagaaagtgtcagacagtactggagattctggagctaatgtcaagcggcttgagcaagagactgatgaaaaaatccagcacctgaaaacggaggctgcaagaatatcggatgatgttgttgccatgcttctcaagcatgtaacaagtgtgaaaaattaagaccctttgatatatattggtgctgaggacttctaaattatgatgat

SEQ ID NO: 9940 - DNA, 440 bp, Glycine max
atcttgatcaatcagatcctggaacaacagacagctcagaaggtaacaatgatgacgttggaggagggcctcctgtgcgaggtgtttggcgaaaagggggaggtcataaactttttccctagttttgcttcaccgtgactttgaaaacgtgaagcatcaaacgcagttgaacttgctggctaaagccatggttgaactgcaatataaacatgaatttggttttcggcttagggagtggtattggattatatcggatttaagttagatttaaagtatatcaagctgggatgtgactttgacgttttgttgaaggccaaacgccattgcctgaatgggcttatattttatttttggtttggggtatacttcgattttgatcaaagacagaagtgttcatatgccaagtgtactgtttgctttttacgaaagtggcactgttt

SEQ ID NO: 9941 - DNA, 419 bp, Glycine max
aaacgatcaacattcccaacgaggtccttcttttctttgtgttggtgaggtcccatgttggcacgcagtctctgcacgtgtcacatggtgttctccgtcgaccggatcactcccaccttcgtgtctgtgttttctggcaacgccagagtgttggctttccgcttccaattgcggaggaacacacacctcgtcaccgcccaactttccaactctttctccttcaatttcggtttggattctcagagtttgaattccattcagtcccatgctccatcacggttgccatggactggtccagttccaggtgatattgctgaagtggaggcatattgtaggatctttaggagttctgagaggcttcattctgcgttaatggatgccttgtgttaccctctcactggtgaatgcaatgtttccta

SEQ ID NO: 9942 - DNA, 447 bp, Glycine max
ttatttatcaaaaaccttctcttttctcaattgggtttccatctttgatttgatttcattgccatggctccaaaggatcccaagcaagttgctgatgctgcttcttctggtggtgggggtggcttttttgcttctattgcttccagcttgtccaatttcggtagtgccatgtccaaatccgttaatggtttggtgggctacgacgggctggaggttgttaatccagatggaggaactgaagatgctgaagaggaagcaagaaagggacgatggaaacaagaggagcgagatagttactggaaaatgatgcaaaagtatgttggctctgatatcacatcaatggtgacacttccagttatcatttttgaaccaatgacaatgcttcagaaaatggctgagcttatggagtactcttacctgttagatatggcggacaacactgatgat

SEQ ID NO: 9943 - DNA, 244 bp, Glycine max
aaatagagaacagaaacacacaagtttgctaccaattacatcaactagctatttttgtggtgatggaaataaagttgtaatacctaagaaactttaaacactatatatatctttctatccaaaaaaaaaaaaaaaaaaaaaaaaaaaaaaaaaaaaaaaggaagaagaacaaaaaagataaaagaaaaaataaacgtgcatgcaacatcaaaacatcatctatagtgtcaactaaattcaatta

SEQ ID NO: 9944 - DNA, 424 bp, Glycine max
aaaaaatagctgaaactctaaacctcccattgctactctcagtctgcatcatcttcacaaccctctctcttacaacctctcgcacgatcacaaccccatcacacaccaatgttctcgatgtctcttcttctctccaccaagcccaccaaatcctctccttcaacccacaacttctagaagagcaatcttcagaaacagaaactcccacttcaccatcttcttcttcttcttcattctctctccaactccacccaagagaaaccctcctcaacgagcaacaccccaactacaaaaccctagttctctcccgactcgcccgcgacacagcccgagttaactctctcaacaccaaactccagcttgccctctccagcctcaaccggtcggatctttacccgaccgaaacggaactgctccgacccga

SEQ ID NO: 9945 - DNA, 370 bp, Glycine max
gaagaggtgcctcttactccgttacgagttcgagccctcctctcgctcttcgcttctcttctcttcgcttcatagcaaagcaataatcctattagaatatggaagagagcttcgttttccagtggagcgttatcagatctctcttgtccatccttcagtggtgggccttcaatgtcactgtcatcatcgtcaacaagtggatctttcagagattggatttcaagtttcccttatcagtttcctgtgtccactttatctgttcatccattggagcatatgtggtaattaagttgctgaagcttaaaccactgagaactgttgaccctgaagatcgctggagaagaatctttccaatgtcatttgtgttctg

SEQ ID NO: 9946 - DNA, 299 bp, Glycine max
ggaatagcgctaatatgccatgaggccgagatgcatatgaatcaatcgtggtgacgaagaccttccttactcgaattcaaagggtgactctttacacgctttccagccctatctgaatgtatgaaaaactacctataggtcttagtggacgagaacctgggagaaagcattgaatagatattacaccagttgatgttgaagtacgctggaacgtttacctaacgacactgggtaaatctcggtgatgagctgaccttagcgaatatagatattcaataccaaactggtctgaatgaagt

SEQ ID NO: 9947 - DNA, 436 bp, Glycine max
cgtaactgtacgcgatacactcctagaaatctgtctctttttcgggtctagtgaggattttgttttttcccatcattttcaatgcttttcaaattctactttcctaattccgaaacatttttttatttgtgaattgcagaatcaaaatttgatcaaagagaatgggaaaaacatcaagcagagagtggacacggatctacctcatctacggaatggatcagtggcaaaccttcgtcttccttctatgtcaagcggttctcttctcagttctctcaatactttaccttctctacttcaatgacatctctcacactttccaaagccttctctccatcgcctccgtgccctgcagcgccgcccgcttcgccgccgggtttatgggctccgtcacggcgctctccgcgctgtgcctcttctacgcggcggcgaatttctt

SEQ ID NO: 9948 - DNA, 410 bp, Glycine max
ggaatagcgctaagaggccatggggccgggaggcatagtaatcaatcgtggtgacgaatagcttccttacgcgaattcaaagggtgactctttactcgctttccagccctacctgaatgtaggaaaaactacctataggtcttagtggacgaaaacctgggagaaagcaatgattagatattagaccagttgatgttgaagtaggcgggaaggcttccctatcgccaatgggtatatctcggtgatgacctgaacttaacgaaaatagaaattcaataccaaactggtctgaatgaagtccctattatattcaagttgagttggaacttctctcgcttaaggtcgcattactaattcttttttttactccagactttccgttacacgaataaaaattctctttggtttgt

SEQ ID NO: 9949 - DNA, 412 bp, Glycine max
aagaagatggcgtccgagtgcaaaggtaagagctcatggcctgagttggttggagtggaaggaacggtggcggtggctacaattgagagggagaatcctttggtggatgctaacactgtgcttaaaggatccatcgtcaccgctgattttcgatgtgatagggttcgggtttgggtcaccaaacatggaattgtttatcaggctccaagaattggataagaagtgtttacactaaagcacttcatatatatgttatgagtcatgaatataatagtatttaaataaggagttattcttccaattatgttatttgattgaaaataaaaacatgactataagaaatttgttttttcttatttttaattatgttatgcactgcatataaatatacaaattgtgtgtttcattttct

SEQ ID NO: 9950 - DNA, 402 bp, Glycine max
atctctctctcaggcgttctactgtggaaaaaaggtgattttgaagatgaactgttatggtcttcagcagaacgcctttgcagcctgtgaagagatgagaggctctgtgaatttcgttgatcagaaggagcctgtcatttgccctaagccgcgccgagttggggttgcatctaacatgcctacgaggcatttcagatggcatttcaatccacaggctgagggttctgacacaaaagctggggcagaactattagagataatgtttaagaaggagagtcatgggcaggaatatgcaaatcaggtagcttcatctcctccatttttttgcgggtctcctccagtccgggctgcaaatcccttggtccaggatgctcattttggtgatgaaaaacattgtccgtc

SEQ ID NO: 9951 - DNA, 403 bp, Glycine max
accacgcgtccgtcataacataaataaatccttgtgttgtggtcatagtcctcaattcaacttttcagctatatctcttgaaagaagaagaagaagaagaagaagaatgagaaatgggatccaacggaacatcttgggctgaccagtgggataacgggcctgacccagtgactgtctccaacgaatcgaagaaaaagaataacgccctcggcaagaccaaggcagtggcttccactggcgtcaagaagttgaaggagggtacctccgttggcttccaatggatcaagaccaagtaccacaaaactacccagaaacattaaactaacctatctttggttccttcatgtacatatttatcatatctatagtctccccttttgattattatgtgtgttttttcaat

SEQ ID NO: 9952 - DNA, 424 bp, Glycine max
cccacgcgtccgctgagtttgttttttataatctgagagataatagaatagaccgaattcaagattttgattcctacaagttttcatttctctctcatgattatgttccaagcttggttttgccatataaaaattaaggggatcattgctggcctgggatttggggttccaagaagtggtctgcatttctgtttccgactccagcaatgacatctccctcatcacacaaccttttgtgtgttttcaccgttatgctgctattatcgcttgtgttaagtaactagcaagtaggccttggaacctgcaggttggtcgttttctctgggagggaaatcagtgcgtggacaagatggctaaacttgggctgaactctggggtgggttttcagctggttgagtctccccacaggatttgaagcctctct

SEQ ID NO: 9953 - DNA, 399 bp, Glycine max
cccacgcgtccgcgattccgattccgatcccgatggcttctacagagggtctagtgcccataactagggcctttctggcctcttattacgacaaacacccttttactcctctttctgctcatgtctccacgctttcttctcagattcgttcaatggctaatgattttctcactcagcatcctcctatccaaggagagagcatcttaataaatgaagctgaccagcaacctccgcacaaaatggatgagaacatgtggaagaatcgagagtacattgaagaaacaatttttttacttcagagttctaattggccagaggcgctgaagcagcagtccacagctgacagtgttgaatttgccattacgcttgggaaactgaaagataaacttcatattacat

SEQ ID NO: 9954 - DNA, 232 bp, Glycine max
cccacgcgtccgatacacttgtactgttctattagttcatactaagttctgaaaatgagttccaaggttttgcttgttctacttatgttcttggccactatacttctgatctcctctgaggttgcacccgatgatgcatacgagaattttgacaaaatagatgggaagcctagtgcagatggggtagatgaaagcaagtattggcgtggcggctatggtggcggctatggtg

SEQ ID NO: 9955 - DNA, 397 bp, Glycine max
  modified_base (324)..(324): a, c, g, t, unknown, or other
agctattccgcttactattgatggagttgagttggatttacgtatgcgtgggtttgaattcttcagtttggtttctgcatacgctatggattccccaaggcctttgcatttgaaagcatctggaaggatcaagtttcagggaaaggttttaaaacctaatggcaatattagcgaacaaaattttgaaatgacaaggcagcatgtgcaaatgttggagaaaggaattgcagatagtctcattggcgaggtttcaatctctggtctcaaactgaatcaactgatgcttgcacctcagttgtctgggttgctgaggctttctcctgngggtatcaagctggatgcctctggtagaactgatgaaagtcttgcagtggagtttgttgggccactacagccc

SEQ ID NO: 9956 - DNA, 444 bp, Glycine max
cataaataaatccttgtgttgtggtcatagtcctcaattcaacttttcagctatatctcttgaaagaagaagaagaagaagaagaagaaggagaaatgggatccaacggaacatcttgggctgaccagtgggataacgggcctgacccagtgactgtctccaacgaatcgaagaaaaagaataacgccctcggcaagaccaaggcagtggcttccactggcgtcaagaagttgaaggagggtacctccgttggcttccaatggatcaagaccaagtaccacaaaactacccagaaacattaaactaacctatctttggttccttcttgtacatatttataatatctatagtctccccttttgattattatgtgtgttttttcaattcatttattgttcaagtgttatataggtttactttgtactattgagtattgatggatat

SEQ ID NO: 9957 - DNA, 424 bp, Glycine max
  modified_base (346)..(346): a, c, g, t, unknown, or other
  modified_base (350)..(350): a, c, g, t, unknown, or other
  modified_base (416)..(417): a, c, g, t, unknown, or other
accacgcgtccgctggatgatatcatttgtaaagaggggaactgttatgtacttatgtaagatctagtctttgaaaccttatattagtggaatttagaaaatgaattgtctgtctattaacacattctaatatgaattatggaaatttgtttcaagactcaatttttattatgctcccgataatttattgtgtgtactggattcaccttgtttaattcattgtcagttttttttgggttatattctgaggtggtggtgagagcataggttgagttaatgacagtgggatgacgttttgtttttaactatgagtggtacatgaatggatggctgtgtgtaggctcangtangattgttttgtggacaagatgttgggactatttcaagctttgctccttcaaagggtccctcagaannatacact

SEQ ID NO: 9958 - DNA, 381 bp, Glycine max
aaaaatttaaaattttatgtggtttccatcattttttttctatcaaatatttttttacatttttttttatttttttctttcacacaattaaattcaccttaaccgtgtgtttggtagtgaaaaaaaaaagaaaatttgaaaattttgtataagccccacgtctattgtttttttattttaattcaaatatctcttggataattgttttttctattttttctcttccatctaatcaaattcatcttaaaagatccgttcttaatcttaggttcgggagtcccgaagctggaggctgctgtcccttttcctttatccacttttttttttccattgcgttatttatttgcccgtgtccctcactcagtcactcactcattctct

SEQ ID NO: 9959 - DNA, 393 bp, Glycine max
cgcatctcggaatcccctttcttcatcgcatagatactttcgctagcccaccaagtaacccttattccaattcaccctcgccactccttagatcgaaatcattttttttcgcccggcacagtgagttaatcttattttcatccactctctaacctgtttcacctttcataactcgattttaattagccactgattgcattattgtttcatcttctgtttccagtggatcgagatcctctcttgtttctctgtttcaatttggattcgaatttgaatttcagttaatctcgttttcactgccagggttgtgttttatttttatttttttgatttgatatttctgcagagttgggtttttttttatataactgataatgggtgatagcagtgttc

SEQ ID NO: 9960 - DNA, 439 bp, Glycine max
caaagttgatggacaggatctaaatctgagttttgacgaactgggaagttacggcggaagaaaacctcttgcagttgttgacttgttggtgcacgtagttgaatatagtacattttgtcacacgaaagtttctgtgttacaatggacgagctgaaatctgctatggaggagcacatagaccttatggcagatcttgttcagaagctctcttcagatcttcgcgctggctttcgccccgcttacgataactttatcggttttttccatgccattgactggaaggaaccttggctaatgggattattaagattccatgttgtgttgctgcttgtagctatcatctctaggaagaagacaaactttcaaatgttcttgttccttttgacattggctggtgtatattttgcggagagtctgaacagatttttgggtaaaaact

SEQ ID NO: 9961 - DNA, 195 bp, Glycine max
aatccgagcaaggcctgcttctaatatggatccatatgtaatcacctccatgatcgcatagactaccatcctctggacaccatgagagacaatcatatagtctctagacttggagcactaaacagtgtgttcaatagtcatttgatcgagacatttatacctgcaaggtgatgtctagataagcacttctaagtg

SEQ ID NO: 9962 - DNA, 443 bp, Glycine max
gtttgtccgtgtacgcaactttttactctcaatttatttcttccaatcccaatgatcccgccgaacagaaaaagagaaggtgagagaattgttgctctaataaagtttcgttaaactgcctgtaattctcttcctctttcaatcccctttctcaacacaatcaaaatttcttctggtttcttcgaatccgagatccgcttccaatctcgttaatgggtccattttattttggaacattttaatgggttctttcgcattgcaaacaatttagtcctcaaaagggtgttgtttcagatcctaggtttttctacatttcttcacatcccaacaatttattaaccaggtgaagcataagaatggatgatgcgatgggtcctgacttgatcagtgatcttcctcaaagcattatagagagcattctggtacagcttccaattagagat

SEQ ID NO: 9963 - DNA, 388 bp, Glycine max
  modified_base (378)..(378): a, c, g, t, unknown, or other
cccacgcgtccgctctgacctctgatatttctatattttggttctctgtgtctctacgatcaggatccaacggtccaaaatgttcggggcttgtgctgtttgttttcccaggttttagagctccaaaccttcagatccacctcattcgtctccagatcttccttcctggataacgttttcgggttcgagaaggcacttgtgttgtttttcgtacgaaatggagactaaacagagttcggtgacggttacgctcagttacggcgcgttgacgtgcgccgcggaatttctcgcgactttgctagcttctgctgtcgtcaaagcctcgcttttggccccggatctctaccggctgctattgatcaacacgcctactgccanaggagagagc

SEQ ID NO: 9964 - DNA, 301 bp, Glycine max
cgaatgccaacaattatttgctcgagtctggtgggttggaggaggagtcttcatatccctacactggggagagaggtgaatgcaagtttgatccagagaaaatagcagttaagatcacaaatttcaccaatatccctgctgatgagaaccaaattgccgcatatttagtaaaaaatggtccacttgctatgggcgtgaatgcaattttcatgcaaacatacattggtggtgtctcatgccctctcatatgtagcaagaaaaggctgaaccatggtgtgttacttgtgggatatggtgcaaa

SEQ ID NO: 9965 - DNA, 362 bp, Glycine max
gttgctcgcagctctatttttcatgtgattgggacctgttagaactatggttgaatgatatgtttggagaaaacattatggaaatatgcatctgataaaatgatttctgctgccttacatgttgattctgttgtctttattcctgttttcaggtccttgagcgggacgatattatgaataagttctacgaggtgacagctcagttggaacagtcattgggtggtatttcccatgataaacttgatatatcagatgaagttaaagagcaggtataaatatttcaattatatataaactattgtatgcatgcaagacagtgatattagtctgccaaatctgattcgttgaacgttccttcctct

SEQ ID NO: 9966 - DNA, 334 bp, Glycine max
cacacgcgtccgcccacgcgtccgcacagcatcatcatgattttctgcacactttttttgctgacaaagcagtttttattcagaacctctggagattgcgagcaattttttttggaatgggaatcattccaatccatcctggccataaactaacataattgaataggaaaatgaccggcataggacacacttaggttttatgagctgtttgttattattaatgttttttctttttgctgcttttgacaagcagaaattttgttacacttgggatgctcccctgaactataactgaataaataaaaatatgaataaattgagttccttacctccc

SEQ ID NO: 9967 - DNA, 256 bp, Glycine max
aaaagatgtaaataaagaaaaaaaaaggaaagaaaaaaaaagaaaaataaaaaaattaagagcaaaaaagaaaacgttaaaaaattgcaacactgaaatcaaaagttcataaagcctgtggaatgaatcgtaaaataaggggtggaggcatggcaggcattttgcatagtgttggttacttgagagtaataagtcactccaagtaagctcactagatattcgttaatcggcagttccttttcaattccgttacagg

SEQ ID NO: 9968 - DNA, 405 bp, Glycine max
atcgtcttcaatcctttcgttattctcttattcatccttctcttctgaataatccagatctctttctgcccttttctccgtcacgcttttcgtgaccggatctgtatggatttgatccagatctacacgccgatggtggttttggccgggtctttcatagatctggtgcgtagaggctcagatctacggtaccgaggtgtgtgattcatgttcgtcttgcttttggaatctgtttcgtagaaagtcgtttggtcttgcatatggcatggctcttgaggtatttttttgcaggtacaacagagaatcgatgacaagaacgcagatccgacggtagatccagccgattccgcttgttcgatcgctacagacccctgtatcggatcaataagcaacgtgtctcgcgcg

SEQ ID NO: 9969 - DNA, 411 bp, Glycine max
  modified_base (16)..(16): a, c, g, t, unknown, or other
agaaagaaagaaaganagcactctttctcgctcgcggcgagtgtgaacaccaaacggcggcgttcgcagcaaacagagtctcgaaaccctagttccctattcctcccatgtcctccgaagacatcactctcggtaccgaccagaggatcgagaacggtctcaattcccctctcgtcttccaagacgaccctctccgcttcaattgccccaccccgcaccagcgtcgggtcggggacccgcctccgaagaaccgcgaacttggcgccttcatcgacgacaacaagatgttcatcgaccgcgaccgcttcttcgccgccgcccagaaccccgaattccgccgctacgccgactgctccgcccgccgcgacccgctccacgcacgcaattggagcgccacagacgatgacgaag

SEQ ID NO: 9970 - DNA, 400 bp, Glycine max
accacgcgtccgcccacgcgtccgcccacgcgtccgcagccattggcatgtcaaattgcaagtggataggaactggagagaacattttggaggatttggatatcaattcttgtcatggtctcaaatcaaaattgtccgagcattggatggatgtctacaggacagctggaggcaaagatattagttcacctaaacagaagatatttttctccctttgcagcagttaccgggatatactttactgtaacaagaggcctttctatctcaaaggtcttgaagacacaagcatcatggatgcatacataatgcattctctcaatcatgtcttcagaactagagactgcgtgaaaaaaaatgattccaaactgaccaagcttaaagagaatgctgatagtgataa

SEQ ID NO: 9971 - DNA, 424 bp, Glycine max
attccaaatctcttcctctttagtctttataccgaaatggaatgcgttgaatcacgattcattaccttctcgactgttgctaggttatgttaactgttaccttttattcttcgtttacttcacactgcgcgttacttcatcaccaatcgtgccacacttagaactccggggtcaattcggatatgtcttctgatagtgcaaaggaaaatgcatcagtagttgattcatcagtcactgaagggaggaatgacattggaaattcagatgatccaggttttgataatatttctcttgtcacatgcatatcatgtgaattaaggagcttaaattgtgggggcaagaaatggaattagaaaagttataaaggcagaattacagaacatttcatataaaataaagttgttggaaaattaaagtaaagtca

SEQ ID NO: 9972 - DNA, 334 bp, Glycine max
  modified_base (318)..(318): a, c, g, t, unknown, or other
atttgtcacgacattcactcttcagcaaccaatgagtcactcacatgccgaaaataagcccgcggagaaaaagcccgcacagaatgctccggcggagaagaagcccaaggacgagaataagatatcgaaggaaggacgaagcgagaataagaagaagagaacaaagaagagcgtggagacctacaagatttacatcttcaaggtgctgaagcaggttcaccccgacatcggaatctcaagcaatgccatggggatcatgaacactttcataatcgacatcttctagaagctcgcccacgagtcgtccccattggctangtataacaagaaccct

SEQ ID NO: 9973 - DNA, 345 bp, Glycine max
aggacgcgtgtgcggacacgtgcgcggccgcgtgggctgagctgcgtacctacctgcacggaaagaacattctgcactcagggctgtgattaaatgcattgcagaactacattcttgaagatgagttccctccacaaaatcataagaagcgacttgaccagttacagaatgtgaagaacggataaaacgaaaccacatggcagttcctgccagtaaccagaactacagcaagcaacggcaatggatgtccaatgccaccatccaaagctgggcgtttgactaatgcgtatgtatcatcattccctgcatgactcagatctgtcaagtctccatcacaccggcaat

SEQ ID NO: 9974 - DNA, 433 bp, Glycine max
  modified_base (167)..(167): a, c, g, t, unknown, or other
aaattctgtaggcgtgttgtgattatcagaagaccaaatcgaggaatccggaaagggaagaagaagaagaagaagagagtgggttgggttgcgtgccccgttccgttcgttcttcccctttcctttcaattctttcttttcaattctttttcttctgaacacagaanaaacagaagatgggaatgaaacaagtcattaaaaacctcgacgcctttcctcgcgccgaggatcacttgttgcagaaaacccaatctggggctctcgtatccgtaattggtctcattataatggccacattgttcgttcacgagctcggttattatcttacaacttacaccgttcaccagatgtcagtggacttgaagcgaggggaaactcttccaattcatattaacatgacgtttccttctttaccttgtgatgttttgagtgt

SEQ ID NO: 9975 - DNA, 380 bp, Glycine max
aggatccttgcacttcagagatcttaccatggtgacacattgggtgctatggaagcacaggcaccgtcttcttatacaggcttcttgcagcaaccatggtacactgggagaggtctttttctggatcctccttctgtctttatgcacaacagtacatggaatgtttccatacctgaagggtatcatttggaaagtctgaaagggaaaagtatcacctttgcctcacctgatgaaatatttcacaagggcagagataagtctgagcttgctacagtttattcatcttacatatcaaaagtattatctggatttagagggtcgaataatgttggagcattaattatggaaccagttatccaacgtgctggtggaatgcatat

SEQ ID NO: 9976 - DNA, 275 bp, Glycine max
agtccaagcgtccggtcggtatccatctattcccagaatcaccaggtgcaatcaacttctgtccctgactcaacatcggtaccgtatccacccgcgacattgacctcgagaattaaaggaacacatctcataaagatccggctcaaacttccgaatgccatggctcgctcttctcaccatgcgcactcaatcatatctcgtcataatacgcctgtgatgaactccgactacacatgtgaatagacacggcgtccaagtaaagtatattctccccg

SEQ ID NO: 9977 - DNA, 323 bp, Glycine max
acggcagaggccaatgaggaagctgcctctgtatctgggagtagtaatcttgagatggggaaaggttcccattgaaaggcttctcatcaaatttcccacgatactgtacatttatgtatctaaaatttgtgttaggactacatgtaccatagtgtttttctccctcccacttgggccatttattgattattggaatgagtatgtagggtagaacagtctgcaaatgcaccaatcgggtaaacataataaacggctgtttgtaataaattggaaagagcttttactaacgtgttttattttttataaaatgagaaattaacgat

SEQ ID NO: 9978 - DNA, 79 bp, Glycine max
aaaaaaaaaaaaaaaaaaaaaaaaaaaaaaaaaaaaaaaaaaaaaaaaaaaaaaaaaaaaaaaaaaaaaaaaaaaaaaa

SEQ ID NO: 9979 - DNA, 302 bp, Glycine max
accacgcgtccggagtttctgtgtgctcttggactggttgttaaaatggacggtcacactaagggtagttgcaatgtgattcaaaggagtgacggcaatagaatggatttagtggtggataagtctgcatcaccaacaatggtaacttgtgaattggttccaaagattttgagccgtctcactaaaccttgctacgctgctgttacttcctgggacagataatcaaactgccactgttacgttcacgcttgtggatacgatgccaactttgtaccttcctgttgcacctaagtgtcactaca

SEQ ID NO: 9980 - DNA, 431 bp, Glycine max
acaagaatttagaatcaattggagttccttttccgaagaggcaaccgatgaggatatactcaagcctatggaacgctgatgattgggccacaaggggtggacgcatcaaaaccgattggtccaaagctcctttcactgcatcctacagaaacttcaacgctaacgcttgtgtttggaacagaggaaaatccacatgcaaatcaaattcaccatcctctaatgcatggctatcacaagagctggattccactgctcagcaaaggctgagctgggtgcagaagaattacatgatttacaattattgctccgacaaaaacagatttgctcaaggccttccactcgaatgcacacattcgtagaggacttcatcttccactagcacaagtgttacattaaaatttcatttaccattcttttaatttaattttttt

SEQ ID NO: 9981 - DNA, 396 bp, Glycine max
agcacacgcgtccgcccacgcgtccgtggagttcagagactgcaggatggagaatttattgttcaagcaactaaagattgtgttgccaaaacattgaaaagattagaggagaagattcatggccgtgtgctgaaccatttgttatatctcatgcgagtttcagaaaagggttgtcaaagacgagttgctttggctcttgcacatctttgctcttcagatgatcagagaataatttttattgatcactatggtcttgagttgcttattgggcttcttggctcatctagctctaagcagcaacttgatggtgctgtggctttatgcaagttggcggataaagcctcgaccttgtctcctgtggatgctgctcctccttctccaacaccacaggtctat

SEQ ID NO: 9982 - DNA, 394 bp, Glycine max
agttatattttcaaaaaccttctcttttctcaattgggtttccatctttgatttgatttcattgccatggctccaaaggatcccaagcaagttgctgatgctgcttcttctggtggtgggggtggcttttttgcttctattgcttccagcttgtccaatttcggtagtgccatgtccaaatccgttaatggtttggtgggctacgaggggctggaggttgttaatccagaaggaggaactgaagatgctgaagaggaagcaagaaagggacgatggaaacaaaaggagcgagatagttactggaaaatgatgcaaaagtatgttggctctgatatcacatcaatggtgacacttccagttatcatttttgaaccaatgacaatgcttcagaaaa

SEQ ID NO: 9983 - DNA, 397 bp, Glycine max
agcagacgcgtgggtctttccacacacactgagaattgtgttagaatgatcgaggccggggcagtgacagctcttgttagtgctttggggaatgaaggagtttcagaagaagcagctggtgcactggccttgatcgtccggcagccaattggggccaaagcagtggtgaatgaggaatcagcagtggctggattaattggaatgatgcgttgtggaacaccgagaggtaaagagaatgcggttgcagcgatgctcgagttgtgccggagtggaggtgcagctgcaacagaaagggttgtgaaggcaccagctttggccggattacttcaaacccttctttttacggggacaaaacgcgcaagaagaaaagcagcttcacttgcaagagtttttcaga

SEQ ID NO: 9984 - DNA, 419 bp, Glycine max
acgtacgttcgttgtgaatttttcagaaagccagtgaaaaaggtcggagcatattgttggctctctcttgccatttgcattgtggaacttctgatttgcattaagtttggacacggcttgtatccaaaatcaatgcctatatggctggtaatattctggtcaggtgttggagtgaccatttttacatttttgcttttgtggtcttggcaactccatcgcactttagggaacaaaaagagacgataatttcacaattgcagcagttgcaatgctgcattattctttgattgattccttcctcatttttatgggtaccaatccatagccatacacatggtgtaaatacatcaacctcataattaattgtaaatgaatattaatttctcctagcttagtatagtggaacagatcacagtttc

SEQ ID NO: 9985 - DNA, 374 bp, Glycine max
agcccatacgtccgcccaagcgtcaggtgataaataatgaagcaataataattgtcatggtggtgcactgtgttttgccaaataatcgtcttgccataatcacaataccatccttcttttttgggtttgatgaacactatgccatcacttggttaccaatgggaatctaattcttcagctgctgatgttattgttcaattgcaaaaccatggattttttaatcaagcagatgtacacagcatcgatgtcgttccatctccgtcaacactagctctatcaactgggaatagtactaatactaccatcatctctcaaatttaggtgtgtcctcctgctccgggatcaacatcacagccatactttccttcgtcaca

SEQ ID NO: 9986 - DNA, 418 bp, Glycine max
acgtacgtgaatgattatgacaccatccctgatgggatggatcatcgtggtctcaagcgtttatagtgtgtgtgggtggtggtttaagtcaagcttccccgttttttgatttcataattatggcttaaattatcatcctgaaggatcatactgtcaattgagcttattgatcatgcatgcagaagagataccggccgaaccagataacttgaaggagcagggtacaacaactataggtcattcaagggagaccacaagtcaatcaggatctttaggttcagttggagattgtcctctgtatcctcctaatgtgtatgctccccaagcccaggctttctactatagaggttttgacaatggcaatggtgaatgggatgaatattcttcatatgtcaattccgaaggtttagacattgga

SEQ ID NO: 9987 - DNA, 425 bp, Glycine max
accacgcgtccgatgctttctctttttagttgcataaatttctggagtttagagcccccacagcacagttgggtctggaagtctgataaattctctagatgagtataaaatattgctatagtttggtactcttatcagcaatcctgcacagattcttggaattgtattcttcctgagttgctgcttttctagttgatgacatgatctgtcatggtgggaacatatgctaagttggtgcctcggatggcttcggagttctctgtggcttcaatttaaaccccatcatattgctgctggagctgcatatcttgctgccaagtttctgaacatggatctcgcagcttatcagaacatctggcaagagttccagacaacaccatccatacttcaagctgttccgcagcaattaatggagctcttttaaa

SEQ ID NO: 9988 - DNA, 417 bp, Glycine max
aagcaaaaatactccgtttcaccaaaaaagaaaaagaaaaacccttcttagcttagcttagcttagcttcatcttctccgatcaacagtcacctcctctcctccttattttgcgtcgcctcgccggaaagacagaaaacagagagagagagagagagattcgtgtaaattagggtttctttcgccaaagagaggcttcaaacctgacctcttttttcttatcttttttccctttcgcagagcgagcgactcgcgaaaagaagatcctgctcctgatctagttcgcaaaatcgtagaatcattcgaatttgcgattcagatctccattttttactaccttgcttctcaggaaggatgttcggttcaaacccttttgggcagtcatcgtcgagccctttcggctctcaatcggtttttg

SEQ ID NO: 9989 - DNA, 395 bp, Glycine max
agtacggtttgtaccgcgaaagagaaggcaagcaaaaaacgtcatcctcggcggaacaggcgcggaggctaatcgttaaccaaaccaacacagatcccataacgcttcgtctagggtttcgctgaatccccaattttcctaaccccgaccggacatgctccttccccgatggccgtcgtaaccagcaacggcaagcgccgccaacattggccatccgcgaattaccactttccatctcccaattccaaaagacccagagtttcaacaatgtcccaaaaccacgcgcaatccttgttatcctcgactagtatcatttcaagaatctctaagtaccccgaaaccaagccaccactgcatagggaggttcacgccccgtgtagaccaagtaagtttga

SEQ ID NO: 9990 - DNA, 417 bp, Glycine max
  modified_base (380)..(380): a, c, g, t, unknown, or other
aagtacgcccacgcgtccgagcatcgctattctcttcattccatggctttgcccaaccagcaaaccgtggattaccctagtttcaaactcgttatcgtcggcgatggtggcacaggaaagacaacctttgtgaaaaggcatctcaccggagaattcgagaagaaatatgagccaaccatcggtgtggaggttcacccattggattttttcacaaactgtggaaagattcgattttactgctgggatactgctggacaggagaaatttggtggcctcagagatggatactatatccatggacaatgtgctattatcatgtttgatgttactgcccggctaacatacaaaaatgttcccacctggcaccgtgatctttgcanggtctgtgagaacatcccaattgttctttgcggtaac

SEQ ID NO: 9991 - DNA, 220 bp, Glycine max
  modified_base (85)..(85): a, c, g, t, unknown, or other
  modified_base (164)..(164): a, c, g, t, unknown, or other
  modified_base (203)..(203): a, c, g, t, unknown, or other
ctttattcttgagcattagatggctctggagaaagacttttaggcttagttcaagggaagactgttcgtctgatgctgaacatanggcactcttagcaaaacggggtgagagtgggccaaacctcaatgaaagtagaggggaaagagcacgcaggaaagctgangagaaaagacaggctaggctagaaaaagaacttttggangaagaagagagaaaaca

SEQ ID NO: 9992 - DNA, 426 bp, Glycine max
  modified_base (397)..(397): a, c, g, t, unknown, or other
agaaaaaagggccctataaaactaaacgctccccttctcgaagaggccgctcgctctctagggtttttctttttctcttctcactgcatcgcttcaggttcttctgaaaagatgtctcgcgtgtatgttggtaacttggattcacgagtcactgagagagatctcgaagacgaattccgcgttttcggagttattcggagtgtttgggttgcacgtagaccacctggttatgcttttattgactttgatgaccgcagagacgcacaggatgctatccgtgaattggatggcaagaatggttggagggttgagctttctcacaactctagaggtggaggtggtggtcgtggtggtcgctctggtggttctgatttgaaatgttacgagtgtggtgaanctggtcattttgcccgtgaatgccccatg

SEQ ID NO: 9993 - DNA, 424 bp, Glycine max
cggacgcgtgggtttacaaacccatccccgacctcgtatttgtttttccaagcatggacctttccatcaacacacgcaccccttacacgctgcatcatcatcgctccgccggttgagatgttcccgccgccgccgcagacgaccctcccctccctgccggatctactcctcacggccctctccgtctgcttcctagtctcgtcctcgaagccccacatcggcggctccacccgctgccccttcccgcgtcgcttcctcaaaatccccgccatgtccctcacaaacacaacaacgtcgaaatcctcgaaaaacaacaatctcaacaacaccctcctccctccgcgccgccacagcttcgcgtccccgcagtcgctctcggagtggctgaagccgcggctcccttccgagtcgttcgcctcgtggg

SEQ ID NO: 9994 - DNA, 369 bp, Glycine max
aaaaggtgaagttggaggttcaagatgaaatcccccctcttcacacccacaagcgacccaaattggaatctccacccaagtgtggttcaagcgatgaatccctttcaatcccaccagcttcgtataaccccttggatgagccaagccctttgggtttgcgtctcaggaagagtccttcccttttggatttgattcagatgaggctctcccaacaagaggaatccaaaaagaaagatcaaaaggcttcttcttcttcttcttctgctgctgctgctgctgctgctgctgctgcggattctaaactcaaggcctccaattttcctggaaccattttgaaaattgggacttgggagtataagtctagatatg

SEQ ID NO: 9995 - DNA, 419 bp, Glycine max
ggcagttcctccgctttgggcgacggaggctgcaacagtctcattctcaactacactacacgacgccgctttactttttccaaacctgtcaagctgtactattactatagtttcatttcatggagacggaatcacatgaagatttacagcacccgtcggtttcttcgaatgacacgcacagtgatgatgcgtcgaaccacagagacgctgagcaaaagcaagatgtttcgagggaagaagttgtgcagattctacaagttattgcatctacggggaggttctggcatgactgggataagttgaagagtatgctatcatttcagctgaagcaggtactgtcagaatatcctgaggcaagaatgacaagtgagcagcagtacgcgtcatttggtgaatcctacattgagttggtcaacaaa

SEQ ID NO: 9996 - DNA, 305 bp, Glycine max
ggctcttatttcaagagttttgttattggttcattgtgttgtgcaatggaacttcaggatgtagttgcttgctgctgcactttatttgacatggttttcagtgatggaatgttgatgcttcatgctgccatggatgatacatggagcatgcaggatttagtttgaactttgaagtcaggtttcaaggtagcttctttcttggcctgacttcaaggcttgcttgttggaagaggtagcaatgtacagtcagtatactgtttgttaacattgtgcttcatgatgagttgatgactgatgaggcattt

SEQ ID NO: 9997 - DNA, 331 bp, Glycine max
gtggtgctgggtattctatggcgacacccaacaacagcaacattaacaacgcgacggcgaaaccaggaaccctaggcgttggcgtaggtgcagctcctactccgcccaagtcccagcgcggccacaacaagcccaagtgcaaacagtgtggcaatgtcgctcgttcaaggtgcccctatgaatgttgcaagagttgctgttctagaaatcaaaacccctgtcatatccacgtgttaaaagctaattcaacttttcctgacaaggcatcctcttctggtgcgtctccccttgaccagcaatccttagattcacatccacctcaatcaactgc

SEQ ID NO: 9998 - DNA, 364 bp, Glycine max
atcaaattactgaattaaagtttatgtttttttcaataattgtattaaactgagtgcactttaaagaaggaatccaagcataattttcaacataaatggttaaaggacaaaattggttccaatttacctgaacaaaattaattgcccttgggttgagataaataataatccattttccggggtgggtggtaaaggcctcgtgtatttgacacatgacgggaacacacagatgtaaaaaaaccccagagaattgaagggaaattacagtcgccggtgtgacttgcctcatatctaggaaacctcccttattcccttggcctgttctttcttttttttttcccttttcaaacgacccatttccccc

SEQ ID NO: 9999 - DNA, 403 bp, Glycine max
aagcattctctctcttcagcgagaagaaaccgccagaaaataaagtgtgtgtgtgtaagtgtttgtgtggtgttgttgacctttggaattgaatgtgggaatggccatgaataatggcgatggaaccgacggaggggcattgcagagggtgctttacatgtggggttaccttcccggagctctgccgcaaaggacgccgctcttgacgccggttgccgttagggttccgccgtgtgattattcttggaatgatgtttgcggcggtggctgtggattcgctattgctatatcagaatcagggaagctcatcacatggggctcaacagatgatctaggccaaagctatgtgacttctggcaagcatggggaaactccagagccttttccctcttccaaccgaaac

SEQ ID NO: 10000 - DNA, 401 bp, Glycine max
aggaaaagagaaagaaggaaggcgaagcccacaaagaaagaaaacaatagtttcagaagcagaaagaggttttccgttccgaaacgatgtcctccatggccatcaccaccagagacagagatcgagagcttctcatccccgtcgccgacacccccgccggcgatgccgccgtctccccttcccccaagccatcgtcgtcggcgtcgtccccgcatcattccggacgcgaggtgatctcttcccccaattagggttttcaattctccaccgcaattcgtttttgattcctctttttttctccaattcgctcaatctggactctgttgaatttgttgggtttggggatttactcgaaagtttctcccttcacttggattgaggtttttttggggatgaaccag

SEQ ID NO: 10001 - DNA, 418 bp, Glycine max
acggtgaaagtaaaacattgtgcaattaatcatcaactgcaagtagccagtgcataagatcaatggcgtcaagacagcaattcaaggaagacagagccgaggcagctgcaaaactcgcagcgaaagacatcggcgacatcaacagaacaaacgagcgcgacgaggggtacgacttgcacgacgaagccaacttcaagcaagcacgagctgaagcagctgcaaagctggcggccaaggatctggaggacgctaacagattaagagacaacactttcaacacatggaaagagcaacatcagcatgatgagaacaaacccggtgtgatagggtccatgtttagagccgccaaggaagccgtggttgggaagcctcaccacgaggaagtttatgcaaaggaaacaaagatgggtgaatattc

SEQ ID NO: 10002 - DNA, 372 bp, Glycine max
  modified_base (346)..(346): a, c, g, t, unknown, or other
  modified_base (352)..(352): a, c, g, t, unknown, or other
ctgaggatcttaggatcccatttgagcgctatggtcctgtgaaggatgtttatctacctaaaaattactacactggtgagcctcgaggctttggatttgtgaaatatcggtatggtgaagatgcagctgaggaaaagcaacatctcaatcatactatcattggtggacgtgaaataaggattgtttttgctgaggaaaataggaaaacttctcaagaaatgcgtgttaatactcgaggaagtggtcgacatggaggtggtagaaggaggaatcgtactagatccccacgaccccgatcctattctcggtctccatcaccagctagggatgattcaagggatggcangggtanggatgattattattctcctg

SEQ ID NO: 10003 - DNA, 368 bp, Glycine max
agcacacgcgtccgcttggattggttgttagaatggagggtcagagtaagggtagttttaatgtgatggaagggagtgagggcaaaggaagggagtttgtggtggaaaagtctgcatcatcaatagtgggaacttgtgatttggttctaaggattttggcctttttactaacccttgtggctgctgtagttattgggacagataagcaaactgccattgttccaatcaagcttgtggattctatgccaactttgtacgttcctgttgcagctaagtggcattacttgtctgcctttgtctattatgtgggggcaaatgcaatagcatgtgcatatgcaatactgtctctcttgctcactcttgcaaat

SEQ ID NO: 10004 - DNA, 404 bp, Glycine max
agcccacgcgtccgaggcacttcactccatataaacttggatgagagaaattttgaactgacaaagtcccctgaaggtaagaatcactacagtgataaatatggaaatagaggtgaaaaatcagagcatcaaaagaaaaccccatctaaatcaaaatcaggacaatttgatgggagtgggcccttacgaggaaattacaaggaggatgattcaaaaggaaaatcaccttctgattctggatctgctgaagttaagcatcatttgaatgatggagaaagtgctaccagtgaagaaaattctaaactctttggagatgtgtttcaggaaccaattataaatgcgaaagactcagcaatcctgaatgataatgggacactgacttcagtgaatggtaactacaaatc

SEQ ID NO: 10005 - DNA, 380 bp, Glycine max
acgcccacgcgtccgcaaacactcagaagctgtttccactggcacccttactttgggtttagctacaactgttctatctgtcgtttattctgctgtgcgtgctggatcttctgctgcagtgctttccccaacaagctcacctcgtgctggtaagcctctgcatccattggatgcaaaggaggatgaagagaaggagaaggcaaatccagttacatattcatatgccttcttccacttgattttctcacttgctatcatgtattctgcaatgcttctgactggttggtctacatctgttggagagagcgggaagttggttgacgtggggtggccttctgtgtggattcgaatcatcagttcctgcgcaactgctctgctgt

SEQ ID NO: 10006 - DNA, 390 bp, Glycine max
acacacgtccgaacagagagagcaaaaccctagagcatccatcacaagcagaggaagaagatggtgaagttcctgaagcctaacaaggcagtgatcgtcctgcagggccgctacgccgggcgcaaggcggtgatcgtgaggaccttcgacgagggaaccagggagcgcccctacggccactgcctcgtcgccggaataaagaagtacccaagcaaggtcatcaagaaggactccgcgaagaagaccgcgaagaaatctagggttaaggccttcgtgaagctcgtgaactaccagcacctcatgcccacgcgctacacgctcgacgtggatctaaaggacgctgttacccccgatgttctagccaccaatgacaagaaggttaccgctctc

SEQ ID NO: 10007 - DNA, 366 bp, Glycine max
acacaactacgcaaactaacaacaaccacaacaacgtttgtgtcaggtcgtgttgtgttgttggggatttcatgacaacaataaacccttgattcctctccccattctcccaagagaagggccattctgttacaatgttggatactctcaaatggatttagaagacaagttccttgccaaggggagggttctgggctctagtgcaggtggtctagctactgctgattgatgcatacatgataacaagtttctggtgttcaaagcctttcattcagtgctcaaagtactccagaaaaaaatggccattcagatgatgcttcaaaaagttcagaacttctttaggagttcctaaaatctggtcctaag

SEQ ID NO: 10008 - DNA, 369 bp, Glycine max
agcaggtggacgcggcgtggaggcgtgccccgctgcggacgcggaccacatgccgtgcgaggatccgaggctgaacagccagctgagcagggagatgaactactacagggagaggcactgccccaggccggaggactcgcccctatgcttgattccgccgccccatgggtaccgggtgccggtgccgtggccggagagcttgcacaagatatggcacagcaacatgccatacaacaagattgctgacaggaaaggtcaccagggatggatgaaactagaaggtcaacactttatattccctggtggtggtacgatgtttccagatggagcagagcaatatattgaaaaacttggtcaatacattcctat

SEQ ID NO: 10009 - DNA, 422 bp, Glycine max
acggtttggtgaactctggattaccatgactattgtcaagttaaatgcaatcttttcaaaatgatgctggtagactcagtctaaagaagaacaagaacgacagcttcttgaaatgatatagaagtttcagcaatcgtacaagcataatttttcagcttcaagtaaggcaagctcgaaggaatcaaaacgaattgatagtctattctattcatatgccaatgggtctaccgggttgattgagtaagtgtgcttcatccaagactgtttgttttctttcctccattcaatatgcatatatcaaattgcattatcctgttgttgttttcttaattcaagtttcaaaccttggacatggatccagtggcagatctaggacaatctatttaaagaataaaaattaacaagtattatcatgaaaagag

SEQ ID NO: 10010 - DNA, 392 bp, Glycine max
  modified_base (307)..(307): a, c, g, t, unknown, or other
accaagcgtccgaaggggtggtggctgcttcgaaagcttaataatttgtttatttccagaacatcatagttttcgcagcagcaaactaacaaattactcatatcatataataagatggcccgttctctctcgcaagccaaacgtattggtgtccttgttgctcaatctatctccctaattcccgttcatcggcgaggttacgcagtggcatccgatgtatcggtaagagttggattgggtaatattgggcgaacgaatggaatcgtgggaggtgtagaagagaagcctgatacaagagatggttcanaagcctactcaactgattgggccccagaaccagtaacaggttactataggcccattaaccacacccctgaaattgacccggtgga

SEQ ID NO: 10011 - DNA, 426 bp, Glycine max
accacgcgtccgagcatgtttggactagctccttctaggcttcaagttctatacagcttgcgtgactatagaactgaaggggcatcagaaccagagtggaaagaagtaaccgtcagatcaagtactgagatagtctttcagcctgaaaatgcttcaaaagttcgaaagtttaagctctcttcagtgagctctatgcttcttagcgcttgaagttgcccaaactaaggaaagttattctagggcgctgatttttgcagatggcatccatcgctcgtctatttatattcctcttcaagcatatgtatattcttcgttaagctacatgaaatggatacattactagccttagaaaatatcaatacagtcagatgtctttttccgcgagcttgtattatgtatattttaatataattaacagttttattt

SEQ ID NO: 10012 - DNA, 323 bp, Glycine max
cccacgcgtccgcccacgcgtccggaagaatgagaaatatgtgcctttgtttaccggcggtgatgattcggagatagttgaccggagaaacgggctgcgcaaacagattgaagataggttggttgcagctgctgcaagtggcaaggatttagaagagactggcagtgaggatgatggtcttttggatctgagtgatgatgatttttttcttgccgggagttctagtgacgaagcagatgcggatgatgaatggacagacaaaagttcaagagaacaagcttccaatgcctccgggaaaagtttgttcggcatgtccagtgacg

SEQ ID NO: 10013 - DNA, 412 bp, Glycine max
agcccacgcgtccgctggtttctctctctctctctctctctctcagaaatccaccttgtgatggtgccctagatccatggcttctctgtccaacctttgcatgtgtttcactgttgctgagtttcaaggctaccgtttatcctctcttccctctctgggtcctgggaaaccctttggtgggtcccacattcacaactttgcaaactcacttccacccaaaagcttgtaacttgtgaacacccttccagttagtatttcacgctctcttaattccaaatttggaatctttgatgcttccccgttcataaataactggtatttcattggataaatcattccactgagttaaaagtgttttttttgttggtttaattttaccattttgaagatttccgaggtttggtttgtggaa

SEQ ID NO: 10014 - DNA, 424 bp, Glycine max
  modified_base (3)..(3): a, c, g, t, unknown, or other
agntaacaacaagaaaagaaaaaaagaagagttgagattccctttgaagaaaagatggcatcccataggcaaagctatgaagctggtcaaactaagggccgaactgaggaaaagacgaaccagacgatgggcaatattggagagaaggctcaagctgcaaaggagaagacccaggaaatggcccaagctgcaaaggagaagacccaacatacagcccaagctgccaaggacaagacttgcgacacttcccaagcggcaaaggagaagacccaacagaatacaggagctgctcaacaaaagacctcagacatgggccagtccacgaaggaatcggcccagtcagggaacgacaacacccaagggttcctgcagcatacaagggacaaggttaagggcgcaacccaaggtgctacagaagctgtta

SEQ ID NO: 10015 - DNA, 297 bp, Glycine max
actggaattaagcacgttatttcattagggttggttttgttgaacagaaaaaaagagaaaaaaaaattatgggaagcgatggcgtgaggaaaccaagattcctatgccttcatgggttccgaacaagcggagaaatattgaaaacacagttacataagtggcctcaatcggttctagacaacctcgatctagtatttgtggatgctccttttccttgccttcgcaaatccgatgtagaaggcatttttgatcgcccttactacgagtggtttcagttcaacaaggaatttacagagt

SEQ ID NO: 10016 - DNA, 426 bp, Glycine max
atccactttgattcccattactcatttccaccatttcaccttctcaatctgtttctctgctttactaatttgtcccaaatcagaaccagattgagcttctgcacaaccagaccagagattcaacgcagaaactgtgcttatccctggtccataggatctgatttggttcataagagagtagtacacgtttcattgctcgaaatagagttgaaaaatctggagtttccatgtctgagaaaccatcttcatcgttgacatctaccgtagctgctcgagaagttgatcccttgttgcaggatttgaatgaaaaaaagcagagctttaagcgcaacgtggtgtcgttagcggtggagttgaaggagccacgttgtcgcccagcttcccaagaacaatcctatgccaaggaaactcaaaacagacaggaag

SEQ ID NO: 10017 - DNA, 427 bp, Glycine max
atccgagttagagctgcatcctcatctccggagtgggatgatgccaagatcgctcctcttcagctggagtccccaattgggcagtttctttctcagattttgaaagatcacccgcatcttgtgcctgctgccgtcgaccagcaactccaccagctccaaactgaccgcgatgctcatctacaaaaccaacaacagccttcttcacccactgatttagttttgtacaggagaattgctgaggttaaggctaatgaaaggaggaaagctctggaagagatcttgtatgcattggtggtgcagaagttcatggatgctaatatttctttgataccctctgtaaccccagatctgtctggtaaggttgatttgtggccaaatgaagatggtaaacttgagcagcttcactcagatgaagcatatgagatga

SEQ ID NO: 10018 - DNA, 407 bp, Glycine max
atttcatagatctgatgcatggaggctcagatctactgtacagaggtgtgcgattcatgttcgtctctcttttggaatctgtttcgtagaaagtcgtttggtcttccatgtcgcatggctcttgaggtatttttttttgcagatactgtagataatcgatgagaagaacgcagatccagccgcttccgcttgttcgatcgctacagacgcttgtatcggattattcatgattgattcataagcagcatgtcttcctccggctatagttgttgcagatctcggatgttgtaaaattagtgtatgatgtgaagctatgggctgggaaatgtggatgtaggagatttcgggacgagagggctcaaaacgcttcgtcgtttgtggttacggagtcctgaatgatcttgtca

SEQ ID NO: 10019 - DNA, 309 bp, Glycine max
agcgatttgcagatacttacaagatggagtgccctgcagcgattaaccgtctcgtggtttctggtgtgcctgccaccgtggagcatcgtgcaactgcggctgcctctgcttccacctctgccgctactgtggccgagtgtgttcagaattttattacttcaatggattccttgaaacttaacatggtggctgtggatcaggtgcacccattgctctcggacctttatgcttcgcttaataagttgacgatcctgccgcctgattttgaggggaaaaccagaatgaaggagtggagtgcaaggttatcta

SEQ ID NO: 10020 - DNA, 379 bp, Glycine max
atgcaaactgtttttctctcttagcttaaaagttctctcttgctatccctcctccattaaccccattaataataagcaccatcaatttccttaattgcttcatatataggagaatacaatgaccaagatctttgtgctgttatgtctgctcttcttagcttcttctgggtttgtccatggctcttctaagaaggatcatattaggttatttgagctcaagagaggtgatttttctataaaggtcaccaattggggtgcaacacttgtgtccgtaatacttcccgataaaaaggggaagttgggtgatattgttcttggatgaggattctcccagggcatacacaggtgataaatcatactttggagctactgtgggccg

SEQ ID NO: 10021 - DNA, 312 bp, Glycine max
acggcggacgaggtggctatggtggcgggcgtggtggctatggcggcgggcgtggtggcgggcgtggtggctatggtcctaatgaacataacgaggctggggttgatgctaaccctcataactaagaaggcaactttcgaaaccttatacatgggtttaagttatcgcaataaataaaacttcatgagaaggttagttgtaatagaagtggaaaactttgtaaaggaataatacctttcacgaacttccttatctttgtgttgtctctggttctgttttgctaaactcaactttataaaattgtatactatt

SEQ ID NO: 10022 - DNA, 429 bp, Glycine max
aatatatatatatatataaataaataaatgataaaattattaatttttataacaattactttaatttatcttatccaataacgaggtcgcgtaaattattttatgtcttgaaacctctcacctccgatccctctaattctcacccaaactgtagtcccattcttccgcaggtgaattgttccctttccttttgctcctttccacatgtgctgaacttatttccataaatcataattccacgcttccacctacatcttcagcaaccaattattttatttgctgaacttttcttttgtttccttttcttcactacccaacctttcataagggattaatgccaaacaataaacaacgttttaacatatgcgtaagtgaatcagaatggaagaggcaacggagcaagtacaaaccagagaacgtggtgtaaca

SEQ ID NO: 10023 - DNA, 432 bp, Glycine max
agcgatagctgataagagagataccaacaagaaaagaaaaaaagaagagttgagattccctttgaagaaaagatggcatcccataggcaaagctatgaagctggtcaaactaagggccgaactgaggaaaagacgaaccagacgatgggcaatattggagagaaggctcaagctgcaaaggagaagacccaggaaatggcccaagctgcaaaggagaagacccaacaaacagcccaagctgccaaggacaagacttgcgacacttcccaagcggcaaaggagaagacccaacagaatacaggagctgctcaacaaaagacctcagagatgggccagtccacgaaggaatcggcccagtcagggaaggacaacacccaagggttcctgcagcagacaggggagaaggtgaagggcgcagcccaaggtgctaca

SEQ ID NO: 10024 - DNA, 277 bp, Glycine max
acccacgcgtccgcgctcccacccttcgttgacctcctattctcccctcatcggagctcaaatctccgatcccttcatccatatcgcttcaccgcaactttctcttcagcgatcgcaagatctagttgaatctcaaccgcgctcctccgattcgaagctcgagtcagtgggatcctcgtcagatctggggggtttgattgcgattctcactctgctgctcggatttgtgcgtctgagatgtcgatttgaccgagatgcgattcggttcagatcaggg

SEQ ID NO: 10025 - DNA, 396 bp, Glycine max
atatcctttcctgaaccttcttgtgatctcaaagcttaacgaatcaatcaaccgctgacatggcagaagaagaagaagaacgcaggatcctggtggccgtggatgaaggcgaggagagcatgtatgctctctcatggtgcctcaagaacctttcttttcaaaattcgaaagacacccttattctcctatacgtcaagccccctcgagtcacttattcagccttcgatggcacaggatatttttttgcctctgacataacggctaccatggagaggtatagccaacaagttgccgattgcgtcttggagaaagccaagaggttgtgtcgagatattgaacatgtggagacgagggtagagaatggcgatacaacggatgtgatgtgtcggagggttc

SEQ ID NO: 10026 - DNA, 241 bp, Glycine max
aagcactcttccgctcaacgtcagtgttgcatttacatgcaccaatcacaagcgaggaattcaatctagtagctaacaaaaaaaggcctcttgattgcgtctacacgtgtttgtgaccagttgcaaaacctatatagaagaacggaaacgatgtttaccagagattactccactaagggaggaggataaaccatgcagaattctcaaagcgatctctcggtatccaaagggagatggagat

SEQ ID NO: 10027 - DNA, 419 bp, Glycine max
atgattatgtgctcatgacaaatagctgatattgcatgttttttatgctataactatatgagcaatatagtatggaaagactgttaatttgtattgtccttattttatatgccctacgtccgatgaggtgtcattttgttctttatcgggattgaaatttcgacactttgtagtagggagttccctttaaattgtaatctctaactaactttcgtgtgttgactgtattgtatagcctcctaaactttttatacctattttctgcaacttcttaatgcataggaaatagatgactgcaccttgaagtattttacttttacttatatgccacttaaatttcactgtgtggctaaaattggtacttacctgagttggcactgcgaattctctgggttcactgcattatagtggcacaattc

SEQ ID NO: 10028 - DNA, 372 bp, Glycine max
  modified_base (365)..(365): a, c, g, t, unknown, or other
atctattttaagtaattcaatggcttacactgcaagtcttgtgttcttagcttccactttccttatcataaactttcctcttctggcaaacgctatcggatgcaatggaccatgcagaaccctcaacgactgcgacggccaactcatttgcatcaacggaaggtgcaacgacgaccgcgacgtcggaacccacatctgcggcggcggaatgccgccaaatccgccaccaagcggcggaagctgccagtcctcgggaaccctaaattgcggcggaaaatcgtatcctcagtaccgttgctctccgccggtaacttcctcgacgccggcgatcctgacgctgaacgacttcagcgaaggcggcgacngagggga

SEQ ID NO: 10029 - DNA, 435 bp, Glycine max
cccacgcgtccgcccacgcgtccgcccacgcgtccggtctgcaccaataacccctagaacagcttcagtagtaggaacacctgttgtggcatctccacctgtgtcatgtccaccctctcagcttcactcaccatctctaacaaggtcacctctacttcaccctgaggatggagatgcaccacgtcgtaaaacatctaagactccaaagactccaagaacccctagaacccctagaaccccacttagaatctctaatttgactccaaagttcatcacccctttgggaagccctatgagaaaagctctgaggttcaccaagcttgatcctcaggatgcttggcttccaatcactgagtcaaggaatggtaacaagtactatgctgcttttcacaccctttgttctggtattggaattcaggcccttgttctccctgt

SEQ ID NO: 10030 - DNA, 410 bp, Glycine max
atccacttccaattttcaataattcacgactccttccgagatctctctctctcgcccacaatccaaccatggcgaatacggggaatttagacgcggcgatagagcaattgctgaacgtggagaagcagatgaggctcgccggtgacgtggcgggtaccagaaaagcagccaccgatattttgcagctctgcttcgatgcacgagcctggaaaacactcaatgaccagattgtcgttttgtcaaaacgacgtggccagctcaagcaggctgtaacagctatggtgcaacaggctatgcaatatattgacgagacaccagatatcgaaactcgcatagaactcatcaaaacgttgaacagtgtgtctgcagggaagatatacgtggaaattgagagagctcgattgatcaaa

SEQ ID NO: 10031 - DNA, 441 bp, Glycine max
aatccactggaaggggtcttgtgactggtgcttttgttggtgccacagcttcacacagcaaaagtctccatgtgtttccaatgggtgttttagaggggctccggttcatgtgttgtttccggttcaagttatggtggatgactcagagaatgggaacttgtgggagggatgttcctctggagactcaattcatgcttattgagagcaaagagagtgaaactgatggggagaattctccaatcatctacactgtcttgcttcctctcctcgaaggtcaattccgagctgttcttcaaggcaatgacaagaacgagatagagatttgcctcgagagtggggataatgcagttgagactgaccaaggccttcacatggtttacatgcatgctgggaccaatccctttgaagtcatcaatcaagctgtcaaggctgttgaaaaac

SEQ ID NO: 10032 - DNA, 360 bp, Glycine max
aggcaatagcaactgctgctgcaacttccatctttcctgctattgagccagggactgtatgtctcattattgagggtttattgtttacatggtggatgtgtggcattcacactggtcaagtgcgccaatctttacagaagaaatatcacttgaagaattcaccgtgtaatgcatgttgtgtgcactgctgctttcactggtgcgccctgtgtcaagaacacagggagatgaatggacggctctcggacaacattttttcagaaatgaccgttgtaaaccctcctcgcgttcaagagatgagatctaccgatgacaaggaaactcctgaaacgtcttcacctaacaacatcgagcatactg

SEQ ID NO: 10033 - DNA, 268 bp, Glycine max
acccacgcgtccggtcccagttaaaaaagacgcttccaccctccaatatattactcaaatcaagcgaagaagagcactcgtcgcagaaaacctagtacttgacatcggtggccagttcctgtgggtcgagtgcgagagcagcgacgtctcctccacgtaccgcgccgcagcggtctggcgccgcgcagtgctctctcgggacatccgacagctggggaaactgcgtctccgcgcgaaaagccggcggcagggacaggcgtgcggcctc

SEQ ID NO: 10034 - DNA, 351 bp, Glycine max
atcagatagaaggccagctgacatctgtaaagaaggcactcattgctgtctctcatcggcttcaagattgtcctcctcctgatagaacaaagatgacaggaagcagacattatgaagtggttcagtctgagacattttcagttccacttgagtctttaactaatctgcatatagatcatcatctgcaaaggagctctacattatccactttatccaataggtctaatggcaatgcctctggagctcataaattatcagctgaagttaatagagtctcagccctggatccaaaagcatatcagcaggaagttacctttagaattatttgttccaatgatagggttggtgccc

SEQ ID NO: 10035 - DNA, 372 bp, Glycine max
atcaaacaccaatactgccattgccagtaacttcacggcccaatcacaggcctggtggagctcctacccaaactcatcatcatggctatagttatagaggacgtggaagaggaagaggaactgggggtttccgctcagtcacaaaattcactgaagattttgatttcacagcaatgaatgagaagttcaaaaaggatgaagtatggggtcatcttggtaaaagtaagtctcattcaaaagacaataacggggaagaaaatgcctttgatgaagattaccaagatgaagacaatgacgatttatcaaacattgaggttaaagtaatgttatctaatgtgcaactttatatgcatccagtttttaccgacatgt

SEQ ID NO: 10036 - DNA, 395 bp, Glycine max
agttcactcttcctcccttgccgcaacggttttagcgcatcttcatctagatttaccgaatatgggtacggaaaaggttcacatcattattgtggtcattggccatgtcgactctgggaaatccactaccatctgatcaccttgatttataagcctggaggcactgacaaacgtgttactgataggtttaaaaaggaagctgcttacatgaacaagaggtccttcaactctgccttggtgctcgacaatcctacggctgagcgtgacagatgaatcaccattgatattgctttgtggaactctgaatcaacatcgtagcattgcacagttattgatgcgcctgcacatacggatctcattaagaatatgactactgggacatcccaatctgactg

SEQ ID NO: 10037 - DNA, 440 bp, Glycine max
atccacttctctgtcctttgagtttttctatactctagttcgcgtcgcccaatgctcaacagcatgacaaacgattgacaactcggcaaggtacatagtgctgaacgcacgctttaatttattttaatttcgttgtttatacttaccgtattcaattttacaatatataaattaacatgatgactcgcatgtaataagtttatagtctggtaattaaagcaaaaggcaatcgatacaatttacttcatatttaggtatttgttcatagtatatttttattttatggttttagtaaacaaatggtttatttgctcgtatgtatattgtcatgttgtttaatatttttgtgattagaattgaattgacagtcttacaattaattgactatacaatcaatttccttcagaagagatcaatgtagattactactagctgtataa

SEQ ID NO: 10038 - DNA, 281 bp, Glycine max
aggacgcgtgggtagccagtgagaaactcctcattctccttcttcttctgctacccatggctttgtcttcttctgagcctcctccaccttcagttcctgctcccgttcaatctaaccctcctccacacttgatgtacaaaaatcgtttacaagagtttacttcaaagtcaggcattaactttcctgtgtatcagaccattaatgagggacaggatcatagtccaaaatttaggtcgactgtgtgggtcgctgatatgggttacacttcccaatccacattt

SEQ ID NO: 10039 - DNA, 279 bp, Glycine max
atctatctccctctctctctctccctctctctctcatacttattctccctcgcgcgaaagataaacacatttttagttgcaactaatgggaactgttgaagctgcaaacaaggatgcaaatggaagcctcctagagaaaaatcctacagttgtttttgtgttaagtggcccaggcagtggaaacggtacccagtgtgcaaatattgtcgaaaattttgggtatactcacctcagtgctggtgatcttctgggagcagaaatcaaatctggttctgaaaa

SEQ ID NO: 10040 - DNA, 266 bp, Glycine max
atatcctttcctgaaccttcttgtgatctcaaagcttaacgaatcaatcaaccgctgacatggcagaagaagaagaagaacgcaggatcctggtggccgtggatgaaggcgaggagagcatgtatgccctctcatggtgcctcaaaaaccttccttttcaaaattccaaaaacaccctaatcccccaatacttcaacccccctcaagtcacttattcagccttcaatggcacaggatatttttttgcccctgacataacggctacc

SEQ ID NO: 10041 - DNA, 349 bp, Glycine max
agtgaaggacactggcggaaatagcagcggtggtggtggttcggaacgagtcagtgctaaagtcgcgcttgagaaggttgttcgtcttcgattggcagttaccgaaaaacaaccacacaaattttgcagaatttgaatcgagctaggtctgcttggtgaaaacggtgcagaatttcatggaggagcagccactggcgcgatgctcgtcatggaagaggatgaggatgaggagactcttctggtgagggttgtcgcgcgcggtgatgaggatggtggtggctgtcacgtgcacaccgagctgggtaggtagagggtcgtgagtggtcgcagaggaggggtggcggtgcaa

SEQ ID NO: 10042 - DNA, 282 bp, Glycine max
accacgcgtccgcccacgcgtccgcaaaaccctagctcgcgttctgctttcgtcttttacatcagcaggatggagtctcaggtgaagcacgcacttgttgtcaaagttatgggtcgtactggattcagaggacaagtaacccaggttagagtgaaattttgggatgatcagaatcgtcacagcatgaggaatgtgaaaggacctgtgcgataaggagacattctcaccctagtcgagtctgaaagggaagcaggaagattgcgctagacggtttcttttggc

SEQ ID NO: 10043 - DNA, 290 bp, Glycine max
aagcagaccgagctagctagctagcaagcaagcacagagatggaggcaaagcgaggccatgccctcatgtgcttggcacgtgtttcactcttcctctgcgctctaaccctatccgctgctcacggaagcaccacggttcaagacatcgcgagaaagttgaaactcggggacgacgagcttctgcgcacggagaagaagttcaaggttttcatggagaattacgggaggagcgacgccacagaggaggagtggttgcgccgtttggggattttcgcccagaacatggtcag

SEQ ID NO: 10044 - DNA, 340 bp, Glycine max
agtttgtaagggagaggtgacacttaaaagtgttaccccaatatatggccgtgcgaacaatgtccgtggtcctgaggaggattctgcacttaagatccctcccaggccccaagcgaagagagttgagagtctgagacaaaccattcagagaaatgcatttgcactccctgtggaagagatgattcggcgtcttggaagcagaattgagcttacacgcgatttggttcagccacctgaaccggatgctgcccgtgaaacagctgagagaaccacttccttgctaaggttcttgactgcgccagggatacgtgcagagcatcagaatccagtgggcaccccc

SEQ ID NO: 10045 - DNA, 373 bp, Glycine max
accacgcgtccgcgagttggctggggacttcaaaatccattttcatgatcgccaaggagatttttactgttggttgaacaactatgacagaaaataggaaagtattgaacaccagtgatctggatggctttgacaagagaaaattgccttctccgggatttatggttgaggttgtgctggtggattataatggcaatgatgtaacttctaaaactgaaactactacaaagaaatcagatgagagttcaagtaacaatcctgccagttccgccccagtggaaaggagcaccacccctgcagagaatgcagacaaagaatcaaatagtcatgaataagatgacgtgttttcagatggccaggcagagcaatctgc

SEQ ID NO: 10046 - DNA, 320 bp, Glycine max
agcgactctgatggatacgtacacggtggcatacggggttcctcgctcgaagtggttggatttggcgggtcatcagaaggacctgaatgcacccgctgacgaaattgataaactagtcattgactggctggacgagcaccttcagaacaaacctttgggtgaatacgttgaaagtgatatcacactttatgcacgtgatgatatcagcacctactagttcacaggtcgattggtctgatgctgacaccatatcctcagcgacaaccttgaagtcgatcctgtcaggaactgatactgctactgcgattctcacacgggca

SEQ ID NO: 10047 - DNA, 163 bp, Glycine max
agctgcttctcggctaattactggtgcattgttttggttacagtgtttgtctctcccacatcaaagaataataggagagatgtaaacttttgagttgtctcgttttcccaatgtaacatgttttcaatgagaataagtcaggattaatttattgacaaaggtg

SEQ ID NO: 10048 - DNA, 425 bp, Glycine max
gaaacattttcacccccttgataccgcttcaattcaccaatggcaagtcgaggaaaaacccagggatctggcacaaccaaaaagggcatctcccgaagcaacaaagctggtctccaattcccagttggtcgtattgctcgatacctcaagattggcaagtatgctgaccgtatcggttctggcgctcccgtgtatctcgcctctgttcttgaatatcttgctgctgaggttttggagttagcggggaatgccgcaatggacaacaagaagactcgtattatgcctcgccatatccaattggctgttaggaatgatgaagagttcagcaggcttctcggagatgtgactatcgccagtggtggtgtgacacctaacattcacaacaatgttgctgcctaaaaaagtttggacctcgaactcaacct

SEQ ID NO: 10049 - DNA, 223 bp, Glycine max
acgaaacatgtaatgacttgatggcatattcgttaattttgtcctggtgttggcaaaacttccgccttaggaagaaacctccgaaaaattttaacaacccaaggggaattaatcaagaattcctcccccaatttaacttctgccgccgttccccttttccaaaaataaaaacaatttaaaatccttggcctaaatggtcctaaaaccaaacaaaccctccaac

SEQ ID NO: 10050 - DNA, 110 bp, Glycine max
aatccgaccacgcgtccgcccacgcgtccgtttttttttttttttgcgttttttttttggtttattcggttctgcgggtctctttctttctttttttttgatcccgggcg

SEQ ID NO: 10051 - DNA, 268 bp, Glycine max
agtttcatctgctgaggaagtgtcagcacctgatgcccaatctgatattccatctggcgtgtcgctatcagaacttcattcaaaaatatcatcagtcctttaattcaagggcaaaggatgctgatctaaaacagatttctaaagaatataaaacccttccttgaaaaggctatatccacttcaagccatacatctgtatctgccattcaccatgagatcaatccttctaatactacttgtgataaccatggtattactgaaaatcctg

SEQ ID NO: 10052 - DNA, 419 bp, Glycine max
agcaaagatgctgctggacaagttcgtggttctccaaatgaatttgctggaataggctccacatcagcccttctttggctggctagaaggtttgcaattctatctgggcctaccattcctattattggcgagggtgatgaagaggcaaatgataggtatgtagaacaattagttgcaagtgcagaggctgctgtggaggaagttatccagcgtggggtaagctttatttttactgtatggagaatatgaagtttttagtcagaaatatgatgactcgtgatattttgggttgtcacttgtcacatctaggtggctgatccgaagaaaatagctgttggtggacattcctatggtgcgttcatgactgctaacctgctggcacacgcacctcatcttttttgttgtggaattgctccttc

SEQ ID NO: 10053 - DNA, 312 bp, Glycine max
agaaaaactcacacaccagatagagagaatctaatcagaacagagttctgttccttttcatctgattcgcgaagaacgcaacgatccaagcgcaaccggaagcaatcgatgagtgagtcaattgcatccggcaaggagaacaagagtaacctcggagttagaaatttctccggcggacactcgcaaggctcccggcaaggagcatcaagccgccggcgtcggaatcctcctgcagatcatgaggctggtcatgtccttcgtcctcggccacgtcctccgccgcacgaaagtttacatgagcgccgaagccag

SEQ ID NO: 10054 - DNA, 204 bp, Glycine max
aaaattagttcattctctttgcgcagttccctacctctcctttcaagatgcagatcttcgtcaagaccctcaccggaaagaccatcacccttgaggtggaaagctctgacaccatcgacaacgtcaaggccaagatccaggacaaggaaggaattcccccggatcagcaacctctcatcgtcgccggaaagcagctggaggact

SEQ ID NO: 10055 - DNA, 426 bp, Glycine max
agcgcgatggaaaaggtagctttgtaaggcttgaagttgtcacagcttcactgggcttcctaactaattttgaggatgtgtataaattgtgggcttttgtggccaagtttctcaacccgacatttatcagagaagggggtcttcctactgttcaagaaggctccgagacatgagatggcagagttgcccgtgactttattcaattttggaaactgaacatgaaatgaaagattatgtgacaggttgccaaaaggggccgcagccgaagctgcaggaagaatggattggttcatgatgatctgtaagacccctagatagacacaaacttattttctgcatcaaaagaagaataagcaagccgggttgatttgttaattcatgtttcctgttgcctacaattttaataattttccccttttggttttt

SEQ ID NO: 10056 - DNA, 110 bp, Glycine max
accacacgtccgcccacgcgtccgcccacgcgtccgtacacttgtactgttctattagttcatactaagttctgaaaatgagttccaaggttttgcttgttctacttatg

SEQ ID NO: 10057 - DNA, 366 bp, Glycine max
aatacacctcccaacccaatcaaatcaaatcttcgttcgaatccttttctctttatcgttcaccgcatcgcaaactcaccagatccgtcgtcgattcggttttcccgctttctatttttcgtttcccattttctcccggaacgtgaagttctcgctctgatctcacgtgagagttttggaacctgatgagtgcgtatatgtgggtgtatcgtagtgaaggcgtgttttgagttatcgtcggttttgaaggaatgatgttctggagggaccgtgagagagagaacagagagttgaccggtggggtcctatgtggcctggtcagagtcttcggtgttggtgattccggtgttgggaagacttctttag

SEQ ID NO: 10058 - DNA, 346 bp, Glycine max
tgatgctagcgtcgcatccaactcagtacatatcttctattgaatcagacgagcgaagatggattttgaaaaatatgtgctgcacaataacagcactgaggcacactttactgctgagacttatcaaggaatttctgccatagcacgtaaaaatgagctcacgacagcactccaccatcatatgttagttgattctgtcgaggtccatcgtgaggggaattgcaatgcagtccagaagcacaactgactgttacgttgccgagtaaattatctgcgtgccatgtagcctaacatcgaaagccacagttacatacatggacgtgtgcattacaatacgagcggctga

SEQ ID NO: 10059 - DNA, 424 bp, Glycine max
acttaatgggaagaaagttgatgataaggagtggtatgttggaaaagcccagaaaaaatctgagcgtgaacaagaactgaaaggacggtttgagcagagtataaaggaatctgctgacaaatatcaaggtgtgaacctgtatctcaagaacttggatgatactatcagtgatgaaaaacttaaggaaatgtttgctgaatatggtacaataacttcatgcaaggttatgcgagaccccactggaatcggtagaggatcaggatttgttgcattttcaactcctgaggaagcatctcgtgctctcggtgagatgaatggtaaaatgattgctggaaaacctctgtacgttgcccttgcacagagaaaagaagacagaagagcaaggttacaggctcagttttcacagatgaagcctgttgcaata

SEQ ID NO: 10060 - DNA, 432 bp, Glycine max
cccacgcgtccgataaggaagacctaaaacataattctttaaggttctggtcgaattttcttttgtggagaaaataaagggttcaaaagtatgttaagtttgggtattgcggaaagaaaggatagaaaatcgagttaagagcccccacctctgccacagcagcgtaatagcaaatgagggagattttttttactcagtttttcctatttgttttggcccagatctgaatttttgggttcctcagctggattaatttatatagttcttttacttttatatgttccccaggtagcaaagtaacgaaagccattttgtcacgttgagtttgatatcattctcttgatactgttttgtattgtatattgtcaagtaagcgtataagactcatctcggtgcaatggatacttttgaatgctcgctgtttttgtcctt

SEQ ID NO: 10061 - DNA, 323 bp, Glycine max
accacacgtccggtgggacatgtgcacgactattcaaatctgaagtacaatttggtcatgcaggagccaaaagtggtggtgagttggagtctgctcaagcaaagaatcaggcactaagggatgctggagctgttgttcccacatcatatgaagcttttgaagtttcaattaacgaaacatttgataaattggttgaagatgggaagatcacaccaatcaaggaaatcacacctccaccaatccctgaggaccttagtactgcaattaagagtggaaaagtccgtgctccaactcatattatttccaccatttctgatgacaga

SEQ ID NO: 10062 - DNA, 238 bp, Glycine max
cacaaattcagtgaggataaaacggaagttcaatttggcagacccatgctagtggttgtgtctctgtccaacagttttttagatgagttgcccaacgcttgctctgacacggaatggatgctgcctgagctttgtatccttctaaaaatgtcttataattacatagccaagcaaaatataatgttctcaacatgaaatggagcatctcttcctctctctgtcggtgtgtgtgtgtgtg

SEQ ID NO: 10063 - DNA, 417 bp, Glycine max
  modified_base (56)..(56): a, c, g, t, unknown, or other
accacgcgtccgcccacgcgtccgcccacgcgtccgggatagaggaggagacgtangaaactattgttatacaaattcattcaaatatattttataacttgtgattttttccaacagcatctcttgtaattttaattgaaatttctccttaagttgaaattttctgtattcatctagaatttatttttgaataggccgactaaggttgagaatttgtatcaaagtggaaatgctgtacgaactactttgggtccaaaaagagacattagagcagagaaagggaaagagtcttcaaaacaaatagaagaaaaatctaacacaaaatgggtggaaagaacacgtcttcaatcaaaagtgaaggacgaaaaagaggcagagatgaaaacgctaaaacataatgtcaaaggcacatcctca

SEQ ID NO: 10064 - DNA, 383 bp, Glycine max
aatccgatcaaaagcatataagagatggggttagaagggaaggaaacgccgtcgtttatgagggattttctcgataagtgtggtggctgcgccgttattgacggtggttttgccactgaacttgaaaggcatggggcggacctcaatgacgaactctggagtgccaaatgccttattagctccccagatcttgtccgaagggttcacctagattacctcgatgcaggagcagacataatattaacagcatcttatcaggccactattcaaggttttgaggccaaagggttctctagagaagaaggtgaaactatgcttagaagaagtgtggagattgcacgtgaggcacgagaaatttattaggataggtgcaccagagattc

SEQ ID NO: 10065 - DNA, 378 bp, Glycine max
cccacgcgtccgcccacgcgtccgcccacgcgtccgtgacagagtaaatttggagaagctcaagcaaaagagcacaaggccaaacaagcacagttggcaaaggcaaaggctgctcctgatataaatcctaacttaatagaaataacagagagagttgtaattaaagaaaagcccaaggaccaaattccagagattgagtggtgggatgtgcctcttctgcattctggaaattatggtgatgttgataatggaatcataggcgaagataaactgaaaatagaaaaaatcaatttttatgtcgagcatcctcgtccaattgagccacctgctgagcctgctcccccacctcctcaaccactcaagctaactaagcaagag

SEQ ID NO: 10066 - DNA, 359 bp, Glycine max
aggcaaattggatgccgagaagctgcgagataagatcgccgagagaaccaagaagaaggttgacatcatctcagctccgcccaaaaaagaagccgccgccacggaaaatccaccggagaagaaggttgaagagaagaaacctgaagagaaaaaaccagaagaaaaacctaaagagagtatggtggttttgaagatcaaactgcactgtgacggttgcattgcgaaaattcgaagaatcattatgaggttcaaaggtgtacaatcggtgagccttgacggaagcaaggacttggtgacagtgaatggaacaatggacgttaaggagatggtgtcgtacctgaacgagaagctgaaacgaa

SEQ ID NO: 10067 - DNA, 329 bp, Glycine max
ctttgattcccattactcatttccaccatttcaccttctcaatctgtttctctgctttgctaatttgtcccaaatgagaaccagattgagcttctgcacaaccagaccagagattcaacgcagaaactgtgcttatccctggtccataggatctgatttggttcataagagagtagtacacgtttcattgctcgaaatagagttgaaaaatctggagtttccatgtctgagaaaccatcttcatcgttgacatctaccgtagctgctcgagaagttgatcccttgttgcatgatttgaatgagaagaagctgagctttatgcgcaacgt

SEQ ID NO: 10068 - DNA, 420 bp, Glycine max
caacaacatcgccttcacggttcatatcacaactaacagtcgtggatgctgatcattctcttctgttcactggcacttgatagatccctctctcgcagcttccattcgtaatccagattctctttgatcggatgcatcttctgggttttgaacctgttactcctcatcaacattatttgtagagggaaaggaggtgtcctttcagtttgaacagctttagattctcaaacaattaaggaaatcagttatggctccttctaggaaatctagaagtgtaaataagaggttttctactgttcgtgaagctgcatctagtaaagacaaaattacagagaatgctagcaaaaataggctgaagaagagaaaattggctgacatgttagggccacaatggaataaggaggagcttgagcctttcta

SEQ ID NO: 10069 - DNA, 367 bp, Glycine max
gttagagctgcatcctcatctccggagtgggatgatgccaagatcgctcctcttcagctggagtccccaattgggcagtttctttctcagattttgaaagatcacccgcatcttgtgcctgctgccgtcgaccagcaactccaccagctccaaactgaccgcgatgctcatctacaaaaccaacaacagccttcttcacccactgatttagttttgtacaggagaattgctgaggttaaggctaatgaaaggaggaaagctctggaagagatcttgtatgcattggtggtgcataaattcatggatgctaatatttctttgataccctctgtaaccccatatcttgtctggttagggttgatttgtg

SEQ ID NO: 10070 - DNA, 402 bp, Glycine max
ctttcatagatctgatgcatggaggctcagatctactgtacagaggtgtgcgattcgtgtgcgtctctcttttggaatctgtttcgtagaaagtcgtttggtcttccatgtcgcatggctcttgaggtatttttttttgcagatactgtagataatcgatgagaagaacgcagatccagccgcttccgcttgttcgatcgctacagacgcttgtatcggattattcatgattgattcataagcagcatgtcttcctccggctatagttgttgcagatctcggatgttgtaaaattagtgtatgatgtgaagctatgggctggaaaatgtggatgtatgaaatttcgggacgaaaggcctcaaaacgctttctcgtttgtggtttctgggtcctgagtgatct

SEQ ID NO: 10071 - DNA, 397 bp, Glycine max
gccccttctgccctccccagccattaactgaaaaaaaaaaccaaaaaaccaaaaatactacaaatttttttcagtttctccgccgccgcacaaccaccacctcctccgttcggatctccggcggacctactatccctactactactctactctatttacacggaagaacaaaaaactatccccctcccccaaaaaaaaccccaaagcggctcggttagggtttagttttgtaccatttcgtgtaatctaatttttcatccgtaaaaatctaattttgaggcggcgagatggcggagattcaggtgcagcatcagagtccggtgtcggcggcttcttctccaaacggctgcttggctaacgcccattatctactgcttaccaattagtgacttctttt

SEQ ID NO: 10072 - DNA, 406 bp, Glycine max
gaaagtgaaaggcccttgttgtcctctcccctccccaccagcaccacgagacacagccgtgtcccccgtccactacgcccgcttcctggacttcctgaaatcccactgggccccacctttcaccccggacaccctcctccactttttgaaatccaagctccatcaccacccttccttctcccacttcgacttccacctcttcacatgggcctcctcctccctcgactctttccgccacacccacctcaccttccactggatggcccgctccctcgcctccacccaccgcctcccccaactccgcaccctcctccacctcatctcctccaacccctgcccctgctccccctccatcttctcctgcccccaaacccaacccatcttctccctctccatccacgccttc

SEQ ID NO: 10073 - DNA, 437 bp, Glycine max
atatatatatatatataaataaataaatgataaaattattaatttttataacaattactttaatgtatcttatccaataacgaggtcgcgtaaattattttatgtcttgaaacctctcacctccgatccctctaattctcacccaaactgtagtcccattcttccgcaggtgaattgttccctttccttttgctcctttccacatgtgctgaacttatttccataaatcataattccacgcttccacctacatcttcagcaaccaattattttatttgctgaacttttcttttgtttccttttcttcactacccaacctttcataagggattaatgccaaacaataaacaacgttttaacatatgcgtaagtgaatcagaatggaagaggcaacggagcaagtacaaaccaaaaaacgtggtgtaaccaaacgtgtg

SEQ ID NO: 10074 - DNA, 396 bp, Glycine max
cccacgcgtccggcagtttattctatcatatccttgttcaaataattttcttttcagttagcggtaccccaatcccagaaacttatgttcatgaccatcctcaaggtcccaataacatttacttgaagacaattttgagttgaccttacagcctagttccacctacaaacacccttgatccttcaaagcctctcatagttccaatactggcaacaataatactcttgggcatctaaactatctccattcttttttccccctttctttgcagtggatttgcgaggttttaaagaaattaaatgcgtttttatgtgctaaagagctaggtaattatagaattcatctcacacatacttctttttactaccttttatcttttagatattatttttgaat

SEQ ID NO: 10075 - DNA, 428 bp, Glycine max
cacaagagcctctttaatttccccatcccctctagattttctctctaaatggttttcgaaagatctctcacaatggcctttaatctcgtgcttttgttctgtttggttgcggtgatcaacaatgttgtcattccaactagtgctagacaactcatgatgactgcatcaccaaatgagaaagaagtgatgaatattggcactgaaaatagaggacatgatgaacatgatcatcaagcacaagtactagacgatccaacaagcaagaataacgtggaaaagaaagaagaaagatttgacaagaaccaactcttccctccctttttcccacttccgccatttactcttccatttccacgtgctgcttttccatttccacgttttccacttccagggcttccatggccaataggcccaactggggcttcttt

SEQ ID NO: 10076 - DNA, 82 bp, Glycine max
tcccacacttcctctctcacacccttctttgacctcctattctccccacatcagatcgcaaatctccaaacctttcatccat

SEQ ID NO: 10077 - DNA, 239 bp, Glycine max
ttatcctttcctgaaccttcttgtgatctcaaagcttaacgaatcaatcaacgggctggcatggcagaagatgaagaagaacgcaggatcctggtggccgtggatgaaggcgaggagagcatgtatgctctctcatggtgcctcaagaacctatctttttaatattccaaagacacccttattcttctatacgttttgccatctctagtctcttattcattcttctatagctctggata

SEQ ID NO: 10078 - DNA, 340 bp, Glycine max
tgattatgtgctcatgacaaatagctgatattgcatgttttttatgctataactataggagcaaggtagtatggaaagactgttaatttgtattgtccttattttatatgccctacgtccgatgaggtgtcattttgttctttatcgggattgaaatttcgacactttgtagtatggagttcccttttaattgtaatctctaactaactttcgtgtgttgactgtattgtatttccttctaaactttttattcctattttctgcatcttcttaattcctttgaattatatgactgcaccttgtagttttttatttttacttatattctatttttaatttt

SEQ ID NO: 10079 - DNA, 425 bp, Glycine max
ctctattttaagtaattcaatggcttacactgcaagtcttgtgttcttagcttccactgtgcttatcataaactttcctcttctggcaaacgctatcggatgcaatggaccatgcagaaccctcaacgactgcgacggccaactcatttgcatcaacggaaggtgcaacgacgaccgcgacgtcggaacccacatctgcggcggcggaatgccgccaaatccgccaccaagcggcggaagctgccagtcctcgggaaccctaaattgcggcggaaaatcgtatcctcagtaccgttgctctccgccggtaacttcctcgacgccggcgatcctgacgctgaacgacttcagcgaaggcggcgacggatgggacccgtcgcagtgcgacgagaaattccataacaacacggaacgtgtggtggcac

SEQ ID NO: 10080 - DNA, 138 bp, Glycine max
ctggagagatcttgtgactggtgcttatgttggtgccacagcttcacacagcaaaaggctccatgtgtttccaatgggtgtattatagaggctccgattcatctgttgcttaacgtctatattctgattaagctctcc

SEQ ID NO: 10081 - DNA, 144 bp, Glycine max
cccactcgtccggtcccagttaaaaattacgcttccaccctccaatatattactcaggtcaaacaaagaactccactcgtcccataaaacctattacttgacatcggtggctaattcctgtttggtctattgttacttctactt

SEQ ID NO: 10082 - DNA, 100 bp, Glycine max
agttgctgttcatagtgatacatgtttacttgcccttgccttttattttatagccgggattttatataatttatgctctcaagaatcttactattcatta

SEQ ID NO: 10083 - DNA, 355 bp, Glycine max
atcagatagaaggccagctgacatctgtaaagaaggcactcattgctgtctctcatcggcttcgagattgtcctcctcctgatagaacaaagatgacaggaagcagacattatgaagtggttcagtctgagacattttcagttccacttgagtctttaactaatctgcatatagatcatcatctgcaaaggagctctacattatccactttatccaataggtctaatggcaatgcctctggagctcataaattatcatctgaagttaatagagtctcaaccctggatccaaaagcatatcagcgggaagttacctttagaattatttgttccattgatagggttggtgccatttt

SEQ ID NO: 10084 - DNA, 434 bp, Glycine max
ctcaaccaccaatactgccattgccagtaacttcacggcccaatcacaggcctggtggagctcctacccaaactcatcatcatggctatagttatagaggacgtggaagaggaagaggaactgggggtttccgctcagtcacaaaattcactgaagattttgatttcacagcaatgaatgagaagttcaaaaaggatgaagtatggggtcatcttggtaaaagtaagtctcattcaaaagacaataacggggaagaaaatgcctttgatgaagattaccaagatgaagacaatgacgatgtatcaaacattgaggttaaggtaatgttatctaatgtgcagctttatatgcatccagtttttaccgacatgtatttctgtaatttgggttcttgtcttcctatcgtgtttgggtctctggtattcatgggtttt

SEQ ID NO: 10085 - DNA, 420 bp, Glycine max
cttctctgtcctttgagtttttctatactctagttcgcgtcgcccaaggctcaacagcgtgacaaacgattgacaactcggcaaggtacatagtgctgaacgcacgctttaatttattttaatttcgttgtttatacttaccgtattcaattttacaatatataaattaacatgatgactcgcatgtaataagtttatagtctggtaattaaagcaaaaggcaatcgatacaatttacttcatatttaggtatttgttcatagtatatttctattttatggttttagtaaacaaatggtttatttgctcgtatgtatattgtcatgttgtttaatatttttgggattagaattgaattgaaagtcttacaattaattgactatacaatcaatttccttcagaagagatcaatgtagatta

SEQ ID NO: 10086 - DNA, 409 bp, Glycine max
cggacgcgtgggtagccagtgagaaactcctcattctccttcttcttctgctacccgtggcgtttgtcttcttctgagcctcctccaccttcagttcctgctcccgttcaatctaaccctcctccacacttgatgtacaaaaatcgtttacaagagtttacttcaaagtcaggcattaactttcctgtgtatcagaccattaatgagggacaagatcatagtccaaaatttaagtcgactgtgtgggtcgctgatatgggttacacttcccaatccacattttcccataaaaaagctgctgagcaagatgcaactagacttgctttggaaagtatccttaataggaccagagatgaatgactctctcttgtcaatcagatttctccattttccaagtctatcatgaatg

SEQ ID NO: 10087 - DNA, 254 bp, Glycine max
ctctctctccctctctctctcacactctctctatcatacttattctacctctagcgaggggtttacacatttttaattgcaactaatctgaactgtctaatctgcatacaaggatgcaaatggaatacttttagaaaaaaatcctacaattatatttgtgttaagtgtcccacactatctaaactgtacttaataagcaaatatagtttcaaaatcttggtatactcatcttattgcctgtgatcttcttttat

SEQ ID NO: 10088 - DNA, 224 bp, Glycine max
gtgaaggacactggcggaaatagcagcggtggtggtggttcggaacgagtcagggcgaaagtcgcgcttgagagggttgttcgtcttcgattggcagttaccgaaaaacaaccacacaaattttgcataatttgaatctagctaggtctacttggtgaaaacggtgcacaatttcatggatgagcatccactgtcgctatgctcgtcatggaatatgatgatga

SEQ ID NO: 10089 - DNA, 291 bp, Glycine max
gtttgtaagggagaggtgacacttaaaagtgttaccccaatatatggccgtgcgaacggtgtccgtggtcttgttgaggaatctatcactttttattttttttaatcttctatctgatttttgtttttaattattaatcttttttatattttataatattttgttttttttatatttatattttatatttatttattattatataatatattattatattattttttattatatattattttattattttaatttattttttttttatattattatttatttattattttt

SEQ ID NO: 10090 - DNA, 407 bp, Glycine max
tcgcccacgcgtccgcgagttggctggggacttcaaaatccattttcatgatcgccaaggagagttttactgttggttgaacaactatgacagaaaataggaaagtattgaacaccagtgatctggatggctttgacaagagaaaattgccttctccgggatttatggttgaggttgtgctggtggattataatggcaatgatgtaacttctaaaactgaaactactacaaagaaatcagatgagagttcaagtaacaatcctgccagttccgccccagtggaaaggagcaccacccctgcacagaatgcagacaaagaatcagatagtcatgataaagatgacgtgttttcagatggcgaggcatagcaatctgcttcttcaagaagcaagcaaacaaaagcacct

SEQ ID NO: 10091 - DNA, 143 bp, Glycine max
atgaatttgatggatactttcacggactcatatgggcttcctcgtttgaagctgatgggtgaatggaatcattcgccggagcttattccacacgatgacagagtggtgaaacacttcatggacattctgttaccgctcatcac

SEQ ID NO: 10092 - DNA, 163 bp, Glycine max
gctgcttctcggctaattactggtgcattgttttggttacagtgtttgtctctcccacgatcaaagaataataggagagatgtaaacttttgagttgtctcgttttcccaatgtaacatgttttcaatgagaataagtcaggattaatttattgacaaaggtg

SEQ ID NO: 10093 - DNA, 337 bp, Glycine max
ccgattcgttgcaacgcattccaacatgtctctaccttttcatcttcagactttcatgatgtatgctcaatgtctcggatttaagggcatatctcactatgagggacctgattcagataatcacacagccttgccatgccctggggaactactagttgaagagcaccatagcaactatggtgaaccttgggccgggggaagagatgtgtttgagtttcttgctgaagccagtcaacttagatcagactcacaggtgctagagataggctgtggcactcttcgagttggtttgcatttcaatcgataccttaatcctgaacactttcaatgtcttgaa

SEQ ID NO: 10094 - DNA, 432 bp, Glycine max
caacaacaacataatcatgagccaattcttgttgctaccaacaacaacaaccctgagtcctctgcagttccggctccaaagccaatcctcaaaagtgccctcaagcgccccaaccctactcaacccgacacccaagctgcagcacctaagaaaagcttgaagttcaaaaccacaacggatgcttctgaagcacaagttattgaggccatgcagaagataacttcacacatcaagaaccctgcaaagttcagcaaggctgcaaagcttgctatacagctgattcagatccttcagttcgggcagattatcattctctgttctccgtagctcaaaacaccaaagagcacctcaataagaaacaaaagaatcaactggaaacttggacaattaatgctgtggtggcgaatgatttatatacagatgaccagcttt

SEQ ID NO: 10095 - DNA, 94 bp, Glycine max
cccacgcgtccgcccactcgtccgtttttttttttttttatttttttttttttgtttgtttttttatatttttttttttttattttttttttta

SEQ ID NO: 10096 - DNA, 355 bp, Glycine max
gaaaaactcacaaaccagatagagagaatctaatcagaacagagttctgttcctttgcttctgattcccgaagaactcaacgatccaatcgcaaccggaagcaatcgatcagtgagtcaattgcttccggcaaggagaacaataatgacctcggagttagaaatttctccggcggacactcgcaaggctcccggcaaggagcagcaagccgccggcgtcggaatcctcctgcagatcatgatgctggtcttgtccttcgtcctcggccacgtcctccgccgcaagaaagtttacatcatccccgaagccagtgcttctcttctcatagggttaattgttggcatactagcaaaca

SEQ ID NO: 10097 - DNA, 165 bp, Glycine max
cccacgcgtccgcccacgcgtccgtttttaagaatttattaaacataagctttctagcgaaaaagagaaaatataaaaagaaaaaaaaaaaaaaataaaaaaaaaaataaaaatgaagataaaataataagaaattaatataaaataaataagaaataaaaatta

SEQ ID NO: 10098 - DNA, 421 bp, Glycine max
caccaatgaagtctcccatgcatgacttgggataagtcgtaaaagcatgtaagatagggtgtataaaaagtctctgttccctttccctccttttagaagactcccaatcaaggggaaggctaaccagaagttttaccttccctttccctcccaaatccctcatccaaacatgcccctggtgttctgacatcttcaatatgaagtttacttctctaattcacaatttatacaacatcagatgttcttggaaaggggtattgtgccattatggttgttgggcaattttaaatggagtgtgtcttattaatttatatatatttgagacaaatatttataaaaaggacggatgtaatttcaaattttatgcattcattgggctgaaattataaaaagtaaattttataataaagatgtctatttg

SEQ ID NO: 10099 - DNA, 353 bp, Glycine max
gttgcatctgctgaggaattgacagcacctgatccccaatctgatgttccagctggcgggtcgctagcagagcttgaatcaagaatatcatcagtctttgagtccacggctaagggtgctgacatagagaagatcctgaaggatattaaacacgttcttgaagaggcatgctgcacttccatccagaactctgtatctgccattccccatgatgtcaagccttctgatactacgtgtgatgagcagggtaatactgaagatgctgctggctcaaatgcagaaaaagaaattatttcgtcccagcgacctatataatatgtgcagatgacttctgatttagaagtcgcaacttc

SEQ ID NO: 10100 - DNA, 365 bp, Glycine max
ctccagagaccgtggccaatgaccctgttgtgtccttcaagacagccttgtggtactggatggaacatgtgcgtgctgtgatcaaccagggttttggtgcaaccattagagctatcaatggccgacttgaatgtgatggtgcaaaccctagtactgttcaggctcgtgttaattactacacccagtattgttcacaacttggtgtttcccctggtgacaatcttacttgctaatttatcagtatagatggttccatatgatgacatcatacattcatacagtatatcttaacatatatcagagaataaaccattcaaggcttacagccttattttgattattaatgtaattaactcttttgggaa

SEQ ID NO: 10101 - DNA, 433 bp, Glycine max
ggagaatgaagatctttcagtgaaagcaaggtcaaagtttagcacatctttacgcaggttatcacaacctatgtcacttggggagatagcaaggacttgggatgtttgtgctcgcagtgttatttctgagcatgcacagcagagtgggggaggaagcttcagctctaagtatggaacttgggagaattgtttgaccaccaactaatgttccatgcaggcctttttgtttcgacccaaacattctgcttctattaatataagtaatttattggatgtagataaaagcctagttatgaagtagcataccatggagtttgtcaatctgtatatactggttttgctattggcaagggaattatcatgattaggaagttatacttaaattatataaagcataatcccatattaagtggaatattgtttcaaataaaaa

SEQ ID NO: 10102 - DNA, 283 bp, Glycine max
ggatagagtacctaggataaccgagaaactcacttgggcttcttcccttattgcaagagcggctcggattggctatcattattagccagttttttgggtttcatctgtattaagtattaaaacatttttaatcagactttttttggtatttagaaaaagtagagacgttggacagaaatttgggttgtttagaggaagtacaatccaggaaacatgtgaaattgattgttgattatttactttgcacttgaatgtgtgtaggtatatgtaagttccatgattc

SEQ ID NO: 10103 - DNA, 312 bp, Glycine max
cccacgcgtccgcaactggtttggtgagatgaagggtgttctttccatcagcggctggttttgttgcttgctgctacttttggattcttcagtttcacttcctctatgcgttgattcaagggcaccctttaccttgaacaagacacttgggttttgtccttacaatggaagcacgtgttgcaactccacacaagatgcacagattgataagcaattccgagcaagcaacgtttcagatcctggctgtgccttggttttgaaatcaatactttgtgctaagtgctacccattttcatgggagctatttactat

SEQ ID NO: 10104 - DNA, 283 bp, Glycine max
cccacgcgtccgcccacgcgtccgcccacgcttccgtacacttgtactgttctattagttcatactaagttctgaaaatgagttccaaggttttgcttgttctacttatgttcttggccactatacttctgatctcctctgaggttgcacccgatgatgcatacgagaattttgacaaaatagatgggaagcctagtgcagatggggtagatgaaagcaagtattggcgtggcggctatggtggcggctatggtggtggttatggaggttggcgtggaggcta

SEQ ID NO: 10105 - DNA, 370 bp, Glycine max
catacccctcccaacccaatcaaatcaaatcttcgttcgaatccttttctctttatcgttgaccgcatcccaaactcaccagatccgtcgtcgattcggttttcccgctttctatttttcgtttcccattttctcccggaacgtgaagttctcgctctgatctcacgtgagagttttggaacctgatgagtgcgtatatgtgggtgtatcgtagtgaaggcgtgttttgagttatcgtcggttttgaaggaatcatgttctggagggaccgtgagagagagaacaaagagttgaacgggggggtcctatgtggcctggtcagagtcctcgttgttggtgattcttggggttgggaatacttctttagttt

SEQ ID NO: 10106 - DNA, 236 bp, Glycine max
ggatgccgtcgatgcatattactcagaacctatatactatagaatcagacgagtgaggaaagatattgaagatgaggtgctgcctaataatttcactggtgcacactttactgctgaaagttatcaaggaagtgctggcatatgacttaaaatggagccatgtgacttcaattgaacatcatatgttagtggattctttcaaggtccatgtggatggaacttggtaatgatgcata

SEQ ID NO: 10107 - DNA, 186 bp, Glycine max
tcgcccacgcgttcgatcagaacatcgaggaaatagcagcattggatgccattgatgcagggaagttgtaccattggtgcaaggctgttgacattcctgctgcagcaaatactattcgttactatgccggtgctgccgattaaattcattgggagggtttaaaaaccttttagggagttcaatgct

SEQ ID NO: 10108 - DNA, 429 bp, Glycine max
cccacgcgtccgataaggaagacctaaaacataattctttaaggttctggtcgaattttcttttgtggagaaaataaagggttcaaaagtatgttaagtttgggtattgcggaaagaaaggatagaaaatcgagttaagagcccccacctctgccacagcagcgtaatagcaaatgagggagattttttttactcagtttttcctatttgttttggcccagatctgaatttttgggttcctcagctggattaatttatatagttcttttacttttatatgttccccaggtagcaaagtaacgaaagccattttggcacgttgagtttgatatcattctcttgatactgttttgtattgtatattgtcaagtaagcgtataggactcatctcggtgccatggaatactttgaatgctccctgtttttgtc

SEQ ID NO: 10109 - DNA, 243 bp, Glycine max
ctactttgggacctgtagttgtgatctcttggatgaaaagggaactacttgagttgtgggaaggagacaccccaaatctcaatgataaagatcgcgaaatagaagtttagtctagtgacaggtggtttatagccaaacagaaagctgtaaatttactgagaatctttaatcgtcagactcatcaagaaaatttacattaaaaaaaaaaaaaataaaaaaaaaatagaatatgtgtgaaaaata

SEQ ID NO: 10110 - DNA, 417 bp, Glycine max
ctcaatttcagtgaggataaaacggaagttcaatttggcagacccatgctagtggtggtgtctctgtccaacagttttttagatgagttgcccaaggcttgctctgacacggaatggatgctgcctgagctttgtatccttctaaaaatgtcttataattacatagccaagcaaaatataatgttctcaccatgagatggagcatctcttcctctctctgtctgtgtgtgtgtgtgtgtattaatcttgatattagtttccttaatccaacaaagtattcagttttagtgttgttggtgatcttagtggagctgggatgtgcagcctttatattttttgacaaaagctggaaagaagttagttgtcactggcattttatgatatgaaattcaagaagttatttttgtatatttataa

SEQ ID NO: 10111 - DNA, 252 bp, Glycine max
gattttcgatcaatttgaaagaacttatccatttcttgcaattttagttgtgtacgggtaagtccatgcatgcaactcgttgagctatctcaataaatgccgtttgtatgtgttagtatttatatttatataccttttcggcatgtttcgctgctattgttgtggactatgtgttccttgtaatccaattaattaagaaagaaagtattaaattataaagtaacgagaatttgaaaaaaaaaaacatataat

SEQ ID NO: 10112 - DNA, 395 bp, Glycine max
cccacgcgtccgcccacgcgtccgcccacgcgtccgggatagaggaggagacgtaggaaactattgttatacaaattcattcaaatatattttataacttgtgattttttccaacagcatctcttgtaattttaattgaaatttctccttaagttgaaattttctgtattcatctagaatttatttttgaataggccgactaaggttgagaatttgtatcaaagtggaaatgctgtacgaactactttgggtccaaaaagagacattagagcatagaaagggaaagagtcttcaagaaaaatagaagaaaaatctaacacaaaatgggtggaaagaacacgtcttcaatcataagtgaaggatgaaaaagaggcagaaatgaaaaggcttaaaca

SEQ ID NO: 10113 - DNA, 421 bp, Glycine max
cccacgcgtccgcccacgcgtccgcccacgcgtccgtgacagagtaaatttggagaagctcaagcaaaagagcacaaggccaaacaagcacagttggcaaaggcaaaggctgctcctgatataaatcctaacttaatagaaataacagagagagttgtaattaaagaaaagcccaaggaccaaattccagagattgagtggtgggatgtgcctcttctgcattctggaaattatggtgatgttgataatggaatcataggcgaagataaactgaaaatagaaaaaatcaatttttatgtggagcatcctcgtccaattgagccacctgctgagcctgctcccccacctcctcaaccactcaagctaactaagcaagagcagaagaaactccggacgcaaagacgtatagctaaggagaaag

SEQ ID NO: 10114 - DNA, 417 bp, Glycine max
ggcaaattggatgccgagaagctgcgagataagatcgccgagagaaccaagaggaaggttgacatcatctcagctccgcccaaaaaagaagccgccgccacggaaaatccaccggagaagaaggttgaagagaagaaacctgaagagaaaaaaccagaagaaaaacctaaagagagtatggtggttttgaagatcaaactgcactgtgacggttgcattgcgaaaattcgaagaatcattatgaggttcaaaggtgtacaatcggtgagccttgacggaagcaaggacttggtgacagtgaagggaacaatggacgtgaaggagatggtgtcgtacctgaacgagaagctgaagcgaaacgtggaagtggtggcctcttcgaagatagacgacaatatgaaagagaaagaaggtgac

SEQ ID NO: 10115 - DNA, 393 bp, Glycine max
aagcgtgtaacattagattctttggtggttcaatatttgaagcatcagcatcgccaatggccagctcctattaccactcttcctccactgtctcttctgcatccacatgtctgtcctgaaccaaagcgaagcctagatgccccttctaatgtgacagctcggcttggtacacgtgaatttaaatatatgtatgggggagtgcatgggaatcgcagggatcgtcaatttgtttacagtcggtttaggccgtggcgtacttgtcgggatgatgctggtgccttgttaacatgcattacatttgttggggactcttctcatattgctgttggaagccataatggggagctcaaattttttgactccaacaacagcaatgttgtggagagcttcaca

SEQ ID NO: 10116 - DNA, 423 bp, Glycine max
aatataattaaactaattgcaaagatgaataccaagccctttttctccttgtgcttactctgcgcactgcttctcatctgtgttgtggcaactgagccatccaaagatgcgacacaagcagaagaaccaaagacacggccagatgcctggagaagtggtggaagtggaggacatggtggaagtgggggacatggtggaagcgggggacacggtggaggctggggacatggtggaggctggggacatggcggtggacatggcggaggatgcaaatgctgcggtcgaaagggctgcaaatgttgctgaagtaaaaaaacacaaacatgaactgaagacacacatacgtgtgtactccatgtaataagtatagtatgtagacataagacatacaagcatggaatctatatccgtgctagggctgtc

SEQ ID NO: 10117 - DNA, 200 bp, Glycine max
agtaagcgtcggcgtctttgggaattaaagctgcaaatggagttgtcattgctatggagaggaaattgcgatctatagtggttgatgaggcatcagtctagatgattcagttattaagagcaaatataggtgtcgtatatagtggcatgggtcctgagtttcgagttttggttggggaaagcaggaaagaagccgaggag

SEQ ID NO: 10118 - DNA, 272 bp, Glycine max
aagtcagggaagtacttgaaaaatcaaaagatagtctcggtggaccatggcaatttgttggtctgctaccattgtttgatcctcccaggcatgatagtgctgaaagcattcgaagagctcttaaccttggtgtcaatgttaagatgattactgtggatcagcttgccattggaagggagacaggcctaaggcttggaatgggaacaaagatgtacccttcatcggcattgcttggccaagacaaggatgcttctatttcagcgcttccagtt

SEQ ID NO: 10119 - DNA, 270 bp, Glycine max
acggacgcgtgggcggacgcgtgggttcgaattcttcaatttactccagagccgattgacctttcatttgtgtttcatacacatttccaatacatccaatcccaccaccataatgctggatgagctcggaaataagtccttccaatgtcaattctggtgttttcttctgtgagaatggtaaacagtgtgctacccttcagactgatgaagtccatctgaatctttgaaggcttgaccttgcagagctgttgcacttaaaaagctgagagt

SEQ ID NO: 10120 - DNA, 309 bp, Glycine max
agacacgcgtccgcccacgcgtccgcccacgcgtcagaaacatacttgcgatgcaggagtttatggttcttcccgtgggagcttcctctttgaaggaagccatgaagatgggtgtagaagtatatcagaatttgaagtctgtggattagatgaaatatggtcaagatgcagtagatgttggtgacgaatgtggctttgccgctaacatccagggataaggaggaacgtttggaagtgctgaatactgctattgccgtagctggttacacaggcaaagttgtcattggaagtgatgttgcagcttctgaa

SEQ ID NO: 10121 - DNA, 349 bp, Glycine max
agcttaacctctctcaatccccatttcctcacctccttcaaccgctgctaaattctagggttccgaaatggacgctggcggaaagatcaagaagggcgccggatgtacaaagggcggcggcccaaagaagaagccggtttcaaggtccgtcaaagccggtctccaattccccgtcggaagaattggccgttatttgaagaaaggaaggtacgctcagcgtgtcggtaccggtgctcccgtatacttggctgcagttctcgaatacctagctgccgacgtgcttgagttggctgggaatgccgcacgtgacaacaagaagaacacgactattcgacgacacctgcttttg

SEQ ID NO: 10122 - DNA, 399 bp, Glycine max
  modified_base (148)..(148): a, c, g, t, unknown, or other
  modified_base (222)..(222): a, c, g, t, unknown, or other
  modified_base (379)..(379): a, c, g, t, unknown, or other
agcataatgtttccggcgaagaagccttgaagaagcgcgctgcgatgaaccgggccgggttcgggtcgggggccgtgtttggtgcgacgtccccgtcgccacccccggggaatgtggacgggtttacaatcgggaagtcggagacggngggattgggggttggggctggcgggcagatgacggccgcgcagcggatgatggcgaagatggggtggaaggaanggcaggggctggggaaacaggagcaggggatcaccacgcctttgatggcgaagaagaccgatagacgagccggggttattgtgaatgccagtgacaacaacaatagcagcagcagcaagaaagttaagagtgttaacttcaatggtgtgcctaccanggtgctgctgctcaagaaca

SEQ ID NO: 10123 - DNA, 103 bp, Glycine max
aatatcttcttagatcttcaacacaaatagctcttttacttctaaatttgattccttagttcagcattctaatagtagttacgggcgtcatcaccattcctca

SEQ ID NO: 10124 - DNA, 238 bp, Glycine max
agtaaaacctcccacgatgtcttcaaatttgcagtcgaagatgttaattagtctgatttgtaaggaattcccatctcgtttccatgatatccattgtctgacgaatttgcgaggtgctggactccgatttagatccttcaggtgttgacctgttggcagttcttgatgtcgctatacattacgttggcgcttcgtggaaaaattcaacccattcactatcaggtttcttttcctgcac

SEQ ID NO: 10125 - DNA, 437 bp, Glycine max
  modified_base (423)..(423): a, c, g, t, unknown, or other
agtatgcttggaccagtgaaggcctatgcctctgaactttttcgagaagaacaccaagctataggactctcaactgtcagtgcagcttggggcataggtttgatcattggcccagcattggggggctatttggctcagcctgtagagaagtacccacatatatttacaaaggattctttttgggataagtttccatacttcttgcccaaccttataatttctgcattcgcatttgtagtagctattggctgtatctggattccggaaacacttcacaaccacaattgtagcaatgaatccacagacgatgccaaagctttagaaagtggaaacagtggagctggcaatgaaaagataatccaaaagaatgataacctcctcctgaattggcccttaatgtcatctatcattgtttattgtgtnttctcacttcatga

SEQ ID NO: 10126 - DNA, 235 bp, Glycine max
aaattaggttcttacttcttacccgcagacagaggaaggaagggaaatagatggaagctgtgtgtggaagtggaagcagtgtttgggtcagatcctcccttacacgctcacccaagatcagactccctctattccgcgccagttaccagcacctaacagcatttccttcacaatcccgtcttttctcctatgacccttcgcgctatgctaatgctagaaccctgcgggccagaac

SEQ ID NO: 10127 - DNA, 177 bp, Glycine max
actttatcttcgctctctctagctctttctcttctcttgatttgcgatgttgcctcaattctcagtagacggagttcgttggtaggatacatacagacgaaacatccttctctttcttttggcttcgatttctctctcctcttccgcgtcatgtcgatggcaattcggctaggggat

SEQ ID NO: 10128 - DNA, 338 bp, Glycine max
  modified_base (83)..(83): a, c, g, t, unknown, or other
accacgcgtccgcgctgacgtcatcctcaagtacatgcccgacgaagccaggctcctcaaagcctacggcgagctccccgacnacactcgcctcaacgagggcatcggcgccggcttggacgaagaggacgacgccaccgccaacgactacatcgagttcgaggatgaggatattgataaaatctaatcaccctcgcaatcgcaattatcattcatatctgtctctgtctgtctctagtagtatttcgctctctgcttgtttgcaactccccgtgttggatttcattttataattgtgcactattattcaataactcagatatttccgattctcgtct

SEQ ID NO: 10129 - DNA, 350 bp, Glycine max
aagaattcagagagaggcttttgtgttaacctttctgtcgatgctccgtgttggtgctaccaaggctcagtcggagaggacggtttcattgttaaatgctctctctcttcactctctgctcacccttttcccctttcatgtcttcaatcaccgcctctccttcagggtctccaaaaagcctactttttaatttccatcggaagccttttctttttttccatactgggaatttaatattcaattttagcctcctgggtttccaacctccatctcctgacgagaaggagtgattcaaagatgtttctatttgggtcatttagtgaagatgaaactcaatcattgctggtcaa

SEQ ID NO: 10130 - DNA, 375 bp, Glycine max
acgatcacgtgtcattgatcttcttgtattcgttgccaagaagtctctttaaggtgttacatcaaagtagcttgtcttcacattattaccgtatgttgaggtgtagcggcgatttactgtcctgctcgagcgagacatgagaggtctgaataaatcggtttctgaaaccagtggtgttacttgttggaggagcattagctcttttttggacttttgatgttttctcttgtggagggggatcgagtttttggatttttatatactcgctgatgtacttggcttgaatacttgctaatgtacttgttattgattgttatagtagatatttgtccgtcctttttttcaaaaaaaaaaaccaaaaaaaaacaccccaac

SEQ ID NO: 10131 - DNA, 437 bp, Glycine max
acggacgcgtgggaaagagaaagacgttgctgcagcggcggaggttattaacaaaatggaatatatgcaccagatggcacctccgtcgttctggtacgacggaggacactttccaggtcaaacaaattacgctatggaggttcacccaggatatggtgctagtgctaataatcattacgtggagccagggtacgtgaaccagggttatcctctgcagccacctctaccgtactacatgcacccgcacgcacctccgccacagatgttcagcgatgagaaccccaatgcttgttccatcatgtgataatcagtgattaattttcgttttcggtgtactcttacacacggacggaatacgggatacggaatatgcacgcacgttgtaatttgtaaataaaaaaactggaaaaaaaaatcgacctgcgtgtaaaaaatga

SEQ ID NO: 10132 - DNA, 336 bp, Glycine max
aatgttcaacaactgctgcacgacttccttaatggaaaacagctttgccaggggagtaatcccgatgaggctgttgcatatggtgcggctgttcaggctgcaatcttaagtggtgagggcaatgacaacgttcaggatcttctcctcctgtatgtcacccctctgtctcttggtttggagactgccggtggtgtgatgactgtcctgatccctaggaacactacaattccaacaaagaacgaacaacttttctcaacatactctgacaaccagcctggtgtgcttatccaggtctttgacgggtaacagacacggaccagagataacagtttgttg

SEQ ID NO: 10133 - DNA, 164 bp, Glycine max
agccaaatcagagcgcgtgagaaaagcagaaatggcggcggctacggcgatttctcagcgagggtgtttttccgccgtcgagcggagctgagacctccggcgccgctcgtttctggtggcttcgcctcgctcgaagttatcggttgttatgagtctggagaggc

SEQ ID NO: 10134 - DNA, 156 bp, Glycine max
agagaaactagattaaataattcatcagcaccagcaacatactcatatggctatagtagcaagaatccaagctacgttgcacgttagcccatgtcaaggaatttaaaccctatggtggattcatcagcctcaaactccatgtctatgattgttaac

SEQ ID NO: 10135 - DNA, 250 bp, Glycine max
agggtagaaggtcctctgtggtggatgtaagaagtgttgaactacatgaacccaaagagactagtgagaagaaatctaagaagcaaaaatcttctaaatctcagtcttctgataaggttaagggattgctaaaaaatgtgattttgcagcagtcaaagaagtgagaatcttgggagtggaagtagagtgagaggaacaaaggtgaaggagcgcatgagacatgtctgcgagagacaatggataagggtaa

SEQ ID NO: 10136 - DNA, 353 bp, Glycine max
acttccgcaccagggaacaacttcccctttctttcttcttcttctctcttgcctgaatcgaagtcgaaaaacacagattcaattccaccatcacttcttgttcttcttctgttcgtctttcgttttataaattctaaaaattccaaaacacagtttttccacgcgtgacacttcaccaacctctctcactctgcgtcttcgagctacatatgcctcctctcccaccctacgtattcttcctccttgctaacctcacctgcctctccgtcacggtccaatccaaaagagagcctgatccttaccgcgatcgcgtgctcggttgttagtctccacacgcccccgggtcgcgtcgc

SEQ ID NO: 10137 - DNA, 270 bp, Glycine max
acttcttccataattctcatgtttctgatccaaggtttaagatgttatagtttccgtgaattctcgtctgggttcaacctgtttgatgtttagactgaatcagtttgaattagtggagaatatctgataccgaaaaaaagattcagctctttttcttgtttctttgtcagagtacttggatttttgagaatctggatacatgggttgttgtgtaagtaaagagtcagagccagaagacaatggttagagacatggtcgaactggtggagt

SEQ ID NO: 10138 - DNA, 368 bp, Glycine max
agtaaatgatatagatgtatacatacaacattgtcacaagtcctgagttaagcatttttagtggtgaaaacatttttattttgtataaattgttgcagtttcgttattagatatattaaatgataaaaggctagtctttattcctaattttggccatttgtttggttttcaggtgtgatatttttttctgctgaaaaagttcacttcagagagattgttcaaagttcaaacgtgtacgagtggaagaatgacttccaaaacactatggtcgaactactctttagaaaagtacaatgttaatgtaaacatcttgcttgattctgtgaagtaactatgaaatgccttgcatgggactgttgatatgtctt

SEQ ID NO: 10139 - DNA, 421 bp, Glycine max
  modified_base (62)..(62): a, c, g, t, unknown, or other
accaacgcgtccgattttcctggtaaatatcaagattgggcagccacagatccgttagatcnttttcaagctcaagttataaagaatgaatcaaacccaaaggcacatatatgtagacatttaagtcaagaagctcgtggatgtcgttatttggtattgtggttagattgtgatcgtgaaggagaaaatatatgttttgaggttataaagtctactggtttccatataaatgatacttaccgtgcacggttctcttctgttactgagaaagatgttgtgaaggctctagacaaccttgtcagacccaacagagatgaggcgctggctgtagatgctatgcaagagatagatttgaaagttggagttgcctttactcgatttcaaacgagttatttccagggaaaatatgggaacctagatt

SEQ ID NO: 10140 - DNA, 76 bp, Glycine max
atggagtgttgcgtcttgcggcaaactgagtgaggtacaagagggagagggaggaggaggagagaaagagaaatta

SEQ ID NO: 10141 - DNA, 423 bp, Glycine max
  modified_base (337)..(337): a, c, g, t, unknown, or other
aattatcatttcattcagtgagaaactttcccaaacaacaataattgcattcccaaacggttcaaactcaaacctcaacaacctcctcctcaaaaccatgatgggcaggctccagctgcgagctccgataaacaaccccttggtcacacagtccctcgaggacttcctattaaccgatctcggcgacgacgacgacgacaacgatggcgaggaaaccttcgagggacagtctgagctcgcgagagaggaggccaagctagaaagggaagtcatcaagatcatcctcagcggaaacggagagtctgttctcatgcccaattcggggcaagccgtgtcngttcgcgaccaccacatatgcgtggggtttcaagacgaagagggttctgggtatcgcatgtgggagtggcatggccacatcatggc

SEQ ID NO: 10142 - DNA, 423 bp, Glycine max
atttacaatgcaccgagtccctcgtcattctcactagtagccagacaaaacccaaaaccacacgcaataacaaaaaaacaacatgcggtgttgcattccgacgttgttgctcgtaaccaccgtactattgtcggcggtgcacggagttttcctccctctggagcggagcattcctccgacgggccaccgcgtggaggtggcggcgctgaaagcccgcgacagggcccgccacgcccgcatgttgcgcggcgtcgccggcggcgtcgtcgacttctccgtccaaggcacctccgatccaaactccgttggattgtattatacgaaagtgaagatgggaactcctcctaaggagtttaacgttcagattgatacgggaagtgacatattgtgggtgaattgcaatacttgcagtaattgccctca

SEQ ID NO: 10143 - DNA, 432 bp, Glycine max
aaacagttagcctcgcagtccatgttacccgtgatcaggtctcaagagcacgtgaacgcgaatggcagtttttatcatcataatcatgtcagctagcggtgtagcagacacgatacatagtgatcaatcgcgtcgaaaaccagataattgttctgacaaatttgatacatgaacttccatcagatcttagcactatcgtgtgttgctacattaatcatgattcacacttgtagtgaacggcaataccctccagctgatgtggctcatatattagattctgccgttaccagtcagcatccatgctgttcacagaaccttcctatttatagagaagttcaaatgtgcatgggatgaatcattccgcatatgttagctcttaacactacgtgacttacatcttttcttctgcatatctccctctaatgtagctgc

SEQ ID NO: 10144 - DNA, 369 bp, Glycine max
atgagcttctttcttattgtcatagagctggaagcatgcttttatggttctcacatttttttgttttacttcagaaggattttctgcagctgcaagcctgctagcaatgttttttgaagttactctcctttatattgaagtttttttttgctgcaaatttgttaattgacaataaaatatgaatgtcttttcctttggcctgcatctaatctttagatgtaatgtccttatcaatacctgatatcatgaaacctttcaactagaaacttacttttcttgtttatgattttcaactgaatttattgttaatgtctttggaatacatgtaatgcttaagtgacaattgttagtatttataattcttaattt

SEQ ID NO: 10145 - DNA, 311 bp, Glycine max
accacacgtccgcataaatcctgaaaatcaggcacttttggttagtatgaagtagttaatcttgcataccaatgattctatgctaattgacagggatcttaaatacaattttattctatattcctcttctatataaataattagctacagtacatcattatgccataaacaatttattgacgaagaattcattctgtactttgcattttatagattaacttaactttcagttccagtaggacaaaaccgtgtgtcgtttgtaatctgtgatctaacttcgtgtgctttctagggtcatgagtcagggcttt

SEQ ID NO: 10146 - DNA, 237 bp, Glycine max
accaaacgtccgctttaccaggatacacatagtcagcgcaatattgcaaaattgaatgatgaagtctatgaagttcacgagataatgactcggaatgtgcaggaagttcttggtgttggtgaacagttggacgaggtcagccaaatgtcgagtcgcttatcagcagaatctcggatgtgtgctgagagggcgagagatttggatcgggaggcgttgattcggaggtgggcgagtgtt

SEQ ID NO: 10147 - DNA, 96 bp, Glycine max
actcaagcgtccggttcagacctctctttctgtcgtgttttcgacctctgattccaggacaacccttcgtttggtcgtccgcgtgttcaccttttc

SEQ ID NO: 10148 - DNA, 395 bp, Glycine max
agtatcactttctgttctgttttggatatttctcaacataaccaagctaaagcgttttactattttgttttctaatttcctccatctctctctcatagtcaccttctctctgggtcactgcaatctaagtccaagcttgactgcttcctctggcgtatgacacctgttgtgccgtctcagtttcttcccaatcacgagattcgaaaacttaaccgattgtagcatccgtgggagagagaagctgttgagtacttcactttgggttatctatggaatcgtttccatgaatggagtgcttacggagctggagttcccatcacgttgtccaatggggagacacttgttcagtactatgttccttatctctccgcatttcagatattcaccaacaacac

SEQ ID NO: 10149 - DNA, 397 bp, Glycine max
acgaaattttacaaattgaggaggccaatgaagaagtaaaagacattccaaataaggaagttgacatgagtgttctaagggggaaaaggagtacatatatcagatcagaggtagaacatgctctagaaacattagacaaagccatttcaatggttcgtgaacagcgacttcattctcgggtggcatcttctagcgttgccgatgaagagtcccattttctgaaaaatgatgacagagttgatacatattccttaaaactcactcaaccaagttccaaaaatgaggttagtgttgaggtaccaaatggagatattccggagggagcttcacaagaagcgcttgggaataaccctggcatccaaaactcacagtgtacaggaacaaatccaaactcaaa

SEQ ID NO: 10150 - DNA, 425 bp, Glycine max
acaaacattataatttctattacatacattttgtagctaggatgagcaagttactactcattcgtgttgctgggttcgtggcaacctttgtcaccatggtgatgatgatggtgcccaaaaacgtgagtgcccaaaacataggtgatgacatcgtcacacaagacttcttcaacagcataatcagtcaggctgatgatggttgtgcagggaagaacttctactcacgagatgctttccttaatgctcacaattcctacaatgagtttggtaggcttggtaatcaggatgactccaagcgtgaggttatttttgctacatagaagagattaacggtgcatcaggggactactgtgacgagagcaacaccgagtacccatgtgcccctaacaaagcgtactatgggcgtggaccaatccaactatcat

SEQ ID NO: 10151 - DNA, 344 bp, Glycine max
  modified_base (323)..(323): a, c, g, t, unknown, or other
actagcattgtgtctaaaactaaaacaatgattctctactttggttcttaatttgatttttaaatagtaccaagtaatctgattgtggaaagtagaaattcggcaaggttaaaaaatgggacgaaatcatcgaacatgctgaaaaatgtgcagttgacgatgatgggttctacatgtatcgctatgatgcaaccgtttcccttgtcttgaactgcatctataaggttgaggcgattttttatgggcaacactatcggtctctgcaatctctgaatttggaggagcagcgtttggtggaaagagttaagcaggaagcaatacanaatttgcagaatctggtgcca

SEQ ID NO: 10152 - DNA, 255 bp, Glycine max
acgatgatgtcgatgctttgcaaggaagatttagagactgtagcaacataagccatgcttaacacgtagcatgcctctctgctcgcatcaaactagtgtggttctagcgttgtgcactcagtatatgcagccttacctctcgtatggtccctcataaagcgctttgagtatccacagtggctcaagctcgcttgtgatgaactgtatccttcatgatggcggatggtggcattggaagcgtgcgtgaggtcatga

SEQ ID NO: 10153 - DNA, 312 bp, Glycine max
acccacgcgtccgcccacgcgtccgatctctcacatcatttcccactctcgcgtttcctttatcatatttatattctttggttattcaattcatattacgccatgtcccagttgaacggagcctactacggcccctccatcccgccgccgaaaacttcctaccaccgtcctgggcgcggcggaggcctcggctgctgccgcgggtgcctcttcagcctcatcttcaagctcatcctaaccgtgatcatcatcattggcatcgccgtgttccgtttctggctcagagtccgtcccaacgtggtgaaattccac

SEQ ID NO: 10154 - DNA, 378 bp, Glycine max
aaaaaagctcattcacatagtcctattcctccttctggtgtctcgttaatctcatcgctgtcgcgcatgcggaatctcagcccgatgacttctccgatgcatatctcagcgagttcagcccctctatatccagtctcatagtcacacttgtcggcgcgcttttcctcatggcttttttctccatctacgtacgctactgcgccgattccgcttcgaacaccgttagccctctcactaccgcacgctcccggacggtcgcgcgtgggcttgacctacctgtgatctacacattcgcaatcctcaaatacaccgacgttaagattcacaaaatcggataacaagtgttggaatgagcggtgtgtttgtgcgagtacgagg

SEQ ID NO: 10155 - DNA, 406 bp, Glycine max
aggggattctctcgctaaccaagaaggaactagggttttacagaatacaagctctctctctctctcgtcggttttcgtcaatcagatccaatccaatatcaaatatgagtcgtcatcgcgaggttaagtgggctcagaggcttgacaaggtctatatcacggtgcaattggctgattcaaaaaatgcaaaagtggatcttacgccagatggtatttttaccttctccggtagtgctggtgctgaagaccatcagtatgagctaaaactggagctctttgataaggttaacgttgaggagagcaaaattaatgtacgagagcgaagcatattcattgtagtgcagaagggagaggatggatggtggaaaaagttactgcgtggagaaggaagactccacattatgtg

SEQ ID NO: 10156 - DNA, 378 bp, Glycine max
agaaagagtgaacgttaatgagacacgtgaatcaagtaaatcattaggatgatactcgcggtgttcaaatggctgatatgataatccagataacggtatacaaaccaatgattggaacgacttataacgcgttactcttaaacgaacatctcgtgaaacacctgaaaaggaaccgtctctgcacattcgtcaagatacacaggcaaagtcatgttattagcagaatgttatgtcagctgcatgccagatgaatggtggagaatacgtccatgaaactcaggagaattgagtgcaggtgcttgagtgaaaatactctcaagattgcagagtaacatatgctgacgatgaaatgtatcagtctcatatatctatctgaca

SEQ ID NO: 10157 - DNA, 432 bp, Glycine max
acccacgcgtccggccaccctttaatcttcgtcaacgttacttttccacctcgtacgagggattcaattgagagggaaagggactgatggcagacaacacacagtcttactgggaaggctacaaagcgttttggtcagagaggttttcctttttgagcaactattcgaggttcatcaaccgtgataaacccatcccttcctggtcaagctctgatgtcgaggagttcattgcttctgatcctgttcatggacccgtcctgaaaagtgctagagaagcagtgcaatttggcctcacaggaagtgctttgggagcattatttactgcaggctatgcctggaaatattcaaagagtttacatggcgctggactgtcatttttagctggaggtatatttgggtggacttttgggcatgaaatcgcaaatcacacac

SEQ ID NO: 10158 - DNA, 88 bp, Glycine max
accacacgtccgtacacagacgttatccccagaagcaccctttgcaatactttttggtccttatgaacgttcttcaacatctcagagg

SEQ ID NO: 10159 - DNA, 361 bp, Glycine max
aattttcaggtgatcttgctctgcaggctcgtctattaaaggctatatctccccattaattgccgaaaatattcaaaaatgccttgtcttctaccatactaattgagatcatcaagtgtcttgcatctcttttcactgaagacatggatctggttgtcagttatttggagcatttgaccaaggtaccaagatttgatgtgattgtaatgtgcctttcatcaacaaataaggatggtttgtcaatctgattgataagttggttacattttgtgcggacatacgcaagatctgggatgaagtgttcagcggagaggcaacaccaattgagtatgcagagattctggacaaccttcaatcaaag

SEQ ID NO: 10160 - DNA, 83 bp, Glycine max
aaaaaaaaaaaaaaaaaaaaaaaaaaaaaaaaaaaaaaaaaaaaaaaaaaaaaaaaaaaaaaaaaaaaaaaaaaaaaaaaaaa

SEQ ID NO: 10161 - DNA, 400 bp, Glycine max
acaaacggttcgattcctacatgcttcggattgactacagacgatgtgcatatgattgttgtgtttatgtgagaagccttgatgatgctcgggaagattcacacttcagagtatgcaatcacaactgacaagttcaagcattgcttggacttgtcgaatgttgctgagtgttagatgtgataggaccctcaacccaagaaatcaaggtggagattgttgtgcatggctcatattttatgggttggacaaatgttagagcacagcgtaaaggccacctattgttgggttatgaagcacgttgggggtgcgggtaaagcccgtagtacgcttaatattatatatcgtgatgtaactctattatttatgaataagatatagaaacagtcacagtactcattag

SEQ ID NO: 10162 - DNA, 393 bp, Glycine max
  modified_base (357)..(357): a, c, g, t, unknown, or other
agtctctccccacaccagaaatcccaaatgaacccaaaacagctcctcctcctcttcttttctctctttctcacaatcactttctcgttgaacgaaagatttgaagcctgcgatgccaagacatgtgggaacgggcagaacataagctacccattctacatccaaggcaagcaaaaacccttttgcgggcagccaggcttcgagctaacgtgcagccacaagggtttcccaattctgactctcatgtacaccccatacacaatccaccaaattttctacgacaaccaatctctccgagtgtccaatcccgtcttttcacaaccaaacctttcttcctgtattgccccgactcagaanctcacggtcggaaggtacagattccgagtcgctccg

SEQ ID NO: 10163 - DNA, 405 bp, Glycine max
  modified_base (393)..(393): a, c, g, t, unknown, or other
accacacgtccgcccacgcgtccgcagaaacgctctgctggtgaaccccagaagtctttcaatcatgatgggcaaggtgaccttcatttttcgctgacttcatatcctgtacaacatgatgtgaatcatcctcatgatgtgaagatgttttcagttccaaatcaagcaatttcagtttccttggggaatccattcctgaagaatcattttgcagctgctggtcagaagccgttacttgggggaatacctgttaccacatctcattcagttcttccctctgctgttgctgttgctggaatgaccgaatcatgtgtgaaaccatctgctcaacttaccatcttctatgctggtactgtcaatatctttgatgatatctccactgagaaagcacangctatcatgttg

SEQ ID NO: 10164 - DNA, 379 bp, Glycine max
aaaaatacatagcacaagatataaaaaattaaaatttataaaaaagaaagaagagagattatagaaagcgaaagagagagggttcaagttcaacaagcctctcttctttgtgttcttgcgaagaagaaaaatccctccgagtcaactcggacgagttgcctcatcgtacggttccttcctcggactctttcctcttcttccccttccgaatcaccgttcgcagggttttgctctctctctctctctgtctctcgcttcgtttctagttcagatctcgcattggcttcagctgaaaccacgcggtttaatttcattcccttaaattagggatttatcttatgtcgaaacacttgaagtgatgatggtgtggctgttgtga

SEQ ID NO: 10165 - DNA, 368 bp, Glycine max
accacacgtccgaaaaaaaataaaaaaataaaatagaaaaaaaataaagttataattaaaaaaaaaaatttctactcagagttttatcggaaaaaattctgtcatatataaaagtaaatcttcgatttgttataaaaattttaaattcaaaagattatcgtgatataatcaaatgatcctagtgtgggaattgttagttgatacagttatagtgctgtttcatttccaattgatgttccccgcataagtgatcttggtgtcagtgtggtcatcacatttaaatattcatctgatgataaaagtcctaacgtaccttatattatgctcatgtaattgataatcatgttagtcatatgagatattaatgt

SEQ ID NO: 10166 - DNA, 420 bp, Glycine max
accacacgtccgcccacgcgtccgcccacgcgtccgaaagaaacatggttttattttcccgggaaaattctcctcccagttttctcggccaaccttctgtcctatatatcattccttcttcgatttgttgtagaattccaatttcctaggttttctcgatcgatctattgatccgccaatttcaatttgggttcatattgttaggtgctgttccatttcctattgatgttccacgcttaaaggagcttggtgtccgtggggtcatcacattgaatgaatcatatgagactttggttccaacgacattatattatgctcatggaattgatcatctggtgattcctactagagattactgttttgctccttcattgaatgacattttccgtgctgtggatttcatacatgaaaatgcattgt

SEQ ID NO: 10167 - DNA, 421 bp, Glycine max
aggaagcgtgggggcggggaagagttagtttcttctctcttcgatggaaggcgggaaagaggttctcccttcggccactgccacctccgccgccaccggcaatcccaccgcttcgcctcctccgctcgctgatcttgtcggtgctcccgatctcgctgctgcctcggacgacgtcgttacccaacctgaaattcacgcgctgatttcagacgaagagcacgatcacgagcatgaacatgacgatgacctcgagcacgagcacgatcagcatgagcatgaccaccaccacgaggaccgcgatgatcacgccgctgtggccgctgtctccttggaagatctcaaactcaagatcattaagcaggcggagtattatttcagcgatgaaaacctgcctactgataagtatctgttgggtttcgtc

SEQ ID NO: 10168 - DNA, 366 bp, Glycine max
acatacttctccgatacgatctcataaacttaagctattaatatcggttgaatgagacattaaaatgattgtcggtggttcaattaatcctcagaacatctcacaattctcagctgctttattaggaggtgttgtacaggatcaagcggttatcggaggtaacaatggcgatgatccgctcataataaacaatttgctatccgatctatcaagggaatagtactacatttatacacaattaccttggctgcagttccaggccattaagctctggagataacatgacgattggtcggataagctatacgacctgaatatcatagttatctatgtgattaactcactgcatcaatctgggtctactaa

SEQ ID NO: 10169 - DNA, 378 bp, Glycine max
  modified_base (303)..(303): a, c, g, t, unknown, or other
accacgcgtccgcaaacattcgtgttctggtgggccatattctacagagaatcctatgtcattaagagcaaatcttgatgtatagagagcagtcaaataccttacattttgcgtataacatgatgatgaccttgatgacatttagagagcatacgcagaagggcggatgccaggtgcagcggtaatgcaacggtcatgtcaggtcttgacagacctcctcgagatgcacctcagagcccgggcttccgtgactgacgacatggtggacgcattcatggctatcagatcacttccccagatgtntcgactgaactcatcataccttcatcatcccaattaatgcgctgatattactggatatctggattcatcttgctt

SEQ ID NO: 10170 - DNA, 431 bp, Glycine max
  modified_base (272)..(272): a, c, g, t, unknown, or other
agtttaatccttttcacttcaattcatcattgccttttcgtttaagcacaaaagctatgccgaactgggagctcaggaactgttgtgaccacgaccagaaggtcttcattgcttgtgttgctgccttcaccgttgtaatcctcgtgctatggaggacctttctacttacaccttttaagctcatcaccgtgtttctgcatgaagcaagtcatgccattgcttgctggctcacttgtggcaaggtggagggaattcaggttcatgcaaatganggtggggtaacccagactcgtggtggcatatactgggtgatcctgcctgctggatatctcggttcatcattttggggaatggctttgatacttgcgttcacaaatcttctcactgcaaaaattgctgctggttgctttaatgctgctttaattgttgtg

SEQ ID NO: 10171 - DNA, 375 bp, Glycine max
cccacgcgtccgcccacgcgtccgtatagacaagatcgagatagttgataaatgtaaaacataatatactgctccagagcatatatagcgacaaacatacagtgttaaatgtgtctctttatgtgctatggatcagtatcctagttgttacattgatatacaagatcgagatagttgatcatctgtgttcttgggagatatttgcggtcggatcctgtactagcaggctgacgtctcgtgaagtgctttggatgtggaagtacaatacttataggaatgaggtaaacatgtgtaatataataatagttgcttcgttcgatatttgagataggatcgtgtaagattaatcgtgaagagtttcgacgtattcctgaa

SEQ ID NO: 10172 - DNA, 430 bp, Glycine max
atcttacacttcacaaaaatgaaaaacatgaaattgtgttcggtgatgctatgcttatcactagcgttccttcttggggccacagcagaacaatgtggcacacaagctggtggagcgttatgcccaaatagattatgttgcagcaaatttgggtggtgtggtgacacagattcctactgtggagaaggttgccagagccaatgcaaatctgcaacaccctcaacaccaactccaacaacacctagtagtggtggagatattagcagactcattagctcttctctctttgatcaaatgcttaaataccgaaacgatggccgctgttctggccatggattctacagatatgatgctttcattgccgctgctggctctttcaatggctttggcacaaccggtgatgacaacactcgcaagaaggagattgctg

SEQ ID NO: 10173 - DNA, 412 bp, Glycine max
aggaaatgcttgatatcacgccaggagaggccttggctgtgaattttcccttgcaactccatcacacagctgatgagagtgttcatgtgagcaacccaacggatggacttctgagattggtaaggtcactttctcccaaagtgaccacactggtggagcaggaatcaaacacaaacacaacccctttcttcaacaggttcattgaaaccttggattactacttggcaatctttgagtccattgatgtcaccctcccatgagatagcaaggagaggattaatgtggagcaacattgtctggccagggatattgtgaatatcattgcttgtgaaggcaaggaaagggttgagagacatgaactgttcggcaagtggaagtcgaggttaacgatggccggcttccgtcagtgtcc

SEQ ID NO: 10174 - DNA, 411 bp, Glycine max
accaagcgtccgactgtctccctcttcctcctccgacggcgtcggcttcgagacggaggagccgcggacgccgctgggcgtgcgccgcgcgctgcagctcctcaactccggcgatcccgacctgcgcctccaagctgctcgcgacatccggcgcctcacgaagacgtcacaacgttgtcggcgccagttatcccaggctgtcggtccactcgtttccatgctccgagtcgactcgcccgagtcacacgaacccgctctcctcgccttgctcaacctcgccgtcaaagacgaaaagaataaaatcaatattgtggaggccggtgcattagaaccgataattagtttccttaagtctcagaatctaaatctgcaggagtctgcaactgcatctttgctcactctatctgcctc

SEQ ID NO: 10175 - DNA, 298 bp, Glycine max
agctatcatcatggcacgttaacgtttatggaactcatcactcacagtatccatcctgtcataattcttagtactgaggagcatcaaactcatgtcaattttgagaatcttggtcagacatcgcatggccatcaaccattcacaggcaaccttcctactaacaagtactgttatgctttccatgcctctcagtatccgacagaatggaatgttcctactctcaaagcatatagcattacatctgcacatgacatatctgagatgaggatctctattatctatttgagcgccattgtca

SEQ ID NO: 10176 - DNA, 424 bp, Glycine max
aggaatttcaattcaaaaatcatatgtagatccctccatcaactatccaaggaattttcgaagagcactaatggtctcatggtcccatcttatgctttgtagaatcaaaaaaaaaaataaaaaaaaaaaaaaaaaataaaaaataaaaaaaaaaaaaaaaaaaaaaaataaaaaaaaaaaataaaaaaaaaaaaattataaaaaaaaaaaaaataattcaaaaaaaaaaaagattatcaagtaaaaaaaaaaaaaggtcagaaatatgggtgcaattcgtaattaggcttagcacatttgacagagcatcttttcattattatgtgcagtcacacattcaattttaatgaatatcgtgaacgtataatcatgccttctgcatcaaacaagcaggggagacctattatcacttgtataaaagttt

SEQ ID NO: 10177 - DNA, 426 bp, Glycine max
atatcagtatcttcatcccaatcctgagttatctgcatgttgctatcatctttttgtttttgaaaagtaagaagcatggttatactgaaattacctttgaaaaagaagactttagctgattgacatataaaataatgaaatcgtctttcatatgacatttttttcatttaagaaagaatataaaaataaagtcatctttacaacaacgatgattccttcacatatgaaatcgtgttcctaaacacaaatcactcatttctcgtaactcatttgaaatttacatacttatgtgattaattagaaaaattgcacaaatgtggtaaaaaaaagactcattaatttcaattttgaccaaactaacaagaaggaacacaaaacaaccttaaattactagagacaaaaaaattaaattaaaatttgaaggac

SEQ ID NO: 10178 - DNA, 430 bp, Glycine max
accaaacgtccgctcaatggaaggatcaggatccggtgtggttacagtctacggcaacggcgccatcaccgagacgaagaagtcccccttctccgtcaaagtcggcctagcccagatgctccgcggcggcgtcatcatggacgtcgtcgacgccgagcaggcccgcatcgcggatgaggccggtgcctgcgcggtgatggccctggagcgtgtccccgccgacatccgggcccatggcggcgtggcccgcatgagcgattcgcagctcatcaaggatatcaagcgggccgtcaccatccccgtgatggcctaggcccgcatcggccacttcgtcgaagcgcagatcctcgaagccatcggcatcgactacgtcgacgagagcgaggtcctcaccctcgccgacgacgccatacacatcaacatacacaac

SEQ ID NO: 10179 - DNA, 439 bp, Glycine max
  modified_base (316)..(316): a, c, g, t, unknown, or other
atccaatcttctcttctcacacaatctctgttcaacaacgctagagaataatatctcaagtatcatgtgatgagatgaaccaagcacaacaacttcaagaagcttgaagtttgaactgtctcaaacatgttctcaaagcttcagccacaacaccagcaacagcatcaaccttttcaattctctcgtgaatgtcaaacgtccgaggacgatgacagccgaagcagcggtggccctaacaccgccgtcgcccaaaaatcagttttaggcggcggaggatgcagcgatggggccacaattgaagtggtggggcgcccangggccgcccgcccgggtccaagaacaggcccaagccgcctctcataataacgcgcgagcccgagcccgccatgagtccgttcattctagaaatcccgggcggaagcgacgtcgtcgaagccct

SEQ ID NO: 10180 - DNA, 431 bp, Glycine max
  modified_base (11)..(11): a, c, g, t, unknown, or other
  modified_base (344)..(344): a, c, g, t, unknown, or other
aagaaacagangtcatggatggtttgcaaagatccgaaggggccttcaaggaaacaggttccaacaggccttgtttggaacacagttaatggcaagggaaattgaacaaagtgaacaacaacgaagaccaaaagggtggtggttctggtggtgaccttaaccttaaagttagaactacaccacccaacaccaccatccagagaagccgctccaacggcggctaccgcaccggaaaagtctcgccggcgatcgagcctccctctcccaagctctctgcttgcggcttctgcagcgctttcgggaaaacaagggaaaagggccgtgctaagcatcgatcaaggtangttttttctcgtcgccggagacggtggttcatgcagctcttcaacacgttctgtttatgtccacttaagatttaaggtttgagtttg

SEQ ID NO: 10181 - DNA, 413 bp, Glycine max
aacacacgtccgggcaataataggtctgatgatgcgttacacgttctgggccgcaccgcgcaaactgatgtaacaacgagtccatatccatggccgacaagtccgggtaatctttgaaatttcatcgtgatcgggatagatcattgcagagttttctagctaatgtagataacgaataactgtgcccattaaagcagagtttatgctatgtatctcaacgagctagacattactagtcctaagtgttatccctattttctaaaacactgacatgttgtgcatccgaagttcaagttttttagtgctacatacgatcagtgagtgcctattagtctgtacgttgactgtctaaattgttctccgaatgaggttgcctttcagtacaatactttcttgggaagcaagtcatcttc

SEQ ID NO: 10182 - DNA, 429 bp, Glycine max
atctattaaaccctcctggaaaagctacaatccatgttgaaaacgttgatgattataagtggttgaactcatcctactgccctgtcttgcggcagcttgaatctgctacattgaaagagttttatttcaaggcaggccatccaaactcactttcttccggggcttccaatctgaagtatagaaatccgaaatatctctcaatgctcaaccatctgagattctatcttccacaggtttatccaaaattggataaaatcttatttcttgatgatgacattgttgttcagaaggatttgactggattatgggctgtggatcttaatgggaaagtaaatggtgctgttgaaacttgtggtcaaagctttcaccgatttgacaagtaccttaacttttcaaatcctcacatcgcaagaaattttgattcaaatg

SEQ ID NO: 10183 - DNA, 428 bp, Glycine max
cccacgcgtccgctgggttcggtgtttcaggctcattctctcttactaggcccacaatcttttctcgatcttccaataatatctctctctttcgctctcaatctcatttccctgctgctgcattcggttccttgacacgttccaacccacacgtgcacgccgctgtcacttccgactccaaggccgctacttcgcttgacctaactcaacccgatctcgataatagcggcggcggtgccaacggtaacggaggcggcggtggaggtggaggtggaggtggaggtggaggagaaggaggaggtgataatagcaagggcgaggaaggatctgacggtgacaagaggaaaatggctctgttaatgtctcagaaattcactctagcttatgctgcactcgtcggagtgggtggtgtaatgggttatctcaag

SEQ ID NO: 10184 - DNA, 154 bp, Glycine max
agcacgcatcagcttatgttagtgtttctggatcctatcatcttcagtagtgttcatgtcaatactaatagtacttaggatcctcagatccttgtaatagtccacatgctcgttgagacattctacagctattgaacactcacagcccgacatc

SEQ ID NO: 10185 - DNA, 336 bp, Glycine max
aggagatcgtgggaacaagataaagtaagcaggtcaaagcgtcagcctcatcaaggaagttcgtcctacgtgtaaacattcagagacgactccttcaagcgtacaacctcacatcgccccaccaatttacataatagtgtcacactctaacaacatgcatacattcactagatctctattggactgtatcacgcctactgccaacatcatgtcacgattcatttcaacaattcagtagtaatcatagtactataggagaattgtaatcagaacttcgtagcgtaaaattcacttgccttggatcagatctgactcagaatcaagtgccgcagtaca

SEQ ID NO: 10186 - DNA, 324 bp, Glycine max
accacaacgtccgaccacgcgtcagaccacacgtccgctgacatgatcgacgtttatcacagctaacgttcacactcatttcaacgaacaccatcctaacattgcatctgacgataatcacatggtgcacatttcaagagaccttgatattgctaaagatgctctaatgcatgtacttacgcaggtgaaaaccaatcttggtgaaatggaaggtgctctctctacaatccttccagttctgtcatagaccactgtctcagcagatggattaaatcgacgaaactattctggtagaaatggtcagagaaattgacttcgacattc

SEQ ID NO: 10187 - DNA, 419 bp, Glycine max
  modified_base (322)..(322): a, c, g, t, unknown, or other
aaaaaaatggccaaaagcaaaaactctcatgctttgcctcttctccttcccactctcttcttcactcttcttggaacctctcacgccggtggcatagccatctactggggccaaaaccggaacgagggcaccctctcagaagcatgtgcaacaggcaaatactcacacataaacatagcctttctcaacaaattcggcaatggcaaaaccccagaaatgaaccttgctggtcactgcaaccccacaaccaattcctgcacaaagttcagctctgaaatcaaggactgccaaagcaaaggtatcaaggtgttgctttcaatangtggtggcattggaagctacactttggcttcagtagaagacgcaagaaacgtttcaacgtttctgtggaacactttcttgggaagcaagtcatcttc

SEQ ID NO: 10188 - DNA, 420 bp, Glycine max
  modified_base (156)..(156): a, c, g, t, unknown, or other
aagaagcgtgggcggacgcgtgggttgtgagagtgccacgttacatcttcatgcagtctctaatacgtgtctttccttgctgtcaccgctacacgctctaatccgtggcatgtttgtttctgtttttgattatttcattgctcccagattcagcanaatatatacatttattaaagttagaaccgaaaacaacaacctttgagttcgtgattctctgacctttgattttaatcaacaaagttatcttgatagcttttattgatattgttataaatataaggtagtgaggaatttggtggtatgaacgtaaccattattactataatttgattaatatatgggtatggtgccagtgaatttgattcctgaggtattgaggaatttggttcatgagcacgcactagtggtgcccatatcact

SEQ ID NO: 10189 - DNA, 440 bp, Glycine max
  modified_base (392)..(392): a, c, g, t, unknown, or other
acagaggtgaagcttcatggattttggtatagtccctacactttgagggtggtatggaccttaaagttaaaggatataccatatcaaaacatagaagaagaccgctacaataagagtcttcaacttcttgaatacaacccagtatacaagaaaactccagtgcttgtccataatggaaaacccttatgtgagtccatgcttattgttgaatacattgatgagatttggtcacataattcattacttcctgctgatccctacgagagagctctggcaaggttttgggttaaatatgctgatgatgacatgttttctgcagttattgcattcttccttagcaataatgatgaagagcgagaaaagagcatagagaagatatgggagcatctcanggttgttgagaatcattgttttggtgattagaagaaattttttggggg

SEQ ID NO: 10190 - DNA, 440 bp, Glycine max
atccaggagcgggttttcttcttccaccccttctaatttctctcttctctgaagctatcagaggctagagttctcctattcagtatctcatgtgcttcaaagaatggctgttagctttactgggcttgacatagaaggcagagaccagacagaagagaacatgacaatatgacatctatctagtggagtaataatttatttgtgatggatgaaactgaagtggaaaatcccatattcatggaaattaattctgaagataagagaaatgaaaatcaagagtttgcatcagagaaaggagaaggtagcagtgttgttttctcaagagaagcaccacttatgaggaaagagtcaagaatgtccactccttattgttgcaatgctaagaagctcaaatccggggctgttacaatagattgtgatcttggaagtaatgagaaaaa

SEQ ID NO: 10191 - DNA, 398 bp, Glycine max
atccgaccacgcgtccgccaaatttacttacgtgggtgcataaattatttttccattataagaaccgggcagcctgccatttccttgcagacgaggatggggatatcatcatattatgcgtagcattgatcgacatgtgtggctctcagtcagtggatttctcttttacggaatatgtcatgagcatttgtacaatgaagagtttttgacccaacacatgctatacatggtatattgagattgggcaatcattgtgtaaagtgccaagaatttcatcatttacctgtgtctagtttagcacatgtgactgagtaaataggagtttgttcacttcatggtttctccaagaaaggaacctccggatccggttcgggcgtgttcctgccaacggtgccgct

SEQ ID NO: 10192 - DNA, 448 bp, Glycine max
atccactcgattccgctcccatgtcactgcttcccataacagagcaaaacgacgtccccgtcgtcgacattgacagcgacgaagacggcgtcgccgccgtagctcctgcaagaaacgacgcgtcgtctcacaagactccgtcgccacaagttgagcttgtgcagcaagaaacccctgcgtcgggttccgctctgtctgccgccgacggcctgtcacgaagcttctggaaagccggggactacgttgttggtccctcctcaaagcccagtcccttccaaggtcacttggaacatgctcgggtgcatcccaagtttttgcagtctaatgcaccgtcacatagatgggcttttggagcaattgctgagcttgtggataatgctgttgacgagattcataatggtgcaacattcgtgaagattgagcagtttgatgtccagaaggataattc

SEQ ID NO: 10193 - DNA, 426 bp, Glycine max
agcagtttagtttggcatttagcgaaggcaatggagaagaaaccgctgttggcggagagcgattactactacagggtggagttcagagcgtgcaaggacgacgcgtggtacgcgacgcgcgtttcgctggagggagaaacactgaaagtgaagtacttcaacttccccgacgaatacgacaacgcgtttcgagcctccgagtttggggacttggaaaagcttcaggagtttggggaacgcttcagaaccctctccaaacaggctcaggacagcgattgtcgttcactcgctgagggtgtctgggtctgcgcgtgtcagtgtttcggcgatgatgatcttcgctactacgacgctgtcgtcgacggggtgcaacatggaaagcattattggaaagcaggaaaggaaacatgcttttgcaccttcata

SEQ ID NO: 10194 - DNA, 424 bp, Glycine max
accgcatctatcgcgacgatgtcgggggaaatatggtggatgcttttaggacccatattatgcaaacgaaggaccttggtacttgcccattgaggcagattggtggatgctctttcttttacatgaggatcagtaatgtctacattgtcattgttgtcagcaacaacgccaatgtcgcttgcgctttcaagtttgttgttgaggctgttgcattgttccgatcatactttggtggagcttttgacgaggatgcaattcgcaataattttgtactcatttatgagctcctagatgaaattatggactttggttacccacaaaatctttcaccagagatcttaaagctttatatcactcacgaaggagtgcgttccccattttcatcaaagcccacagatagacctgttccaaatgcaactttaca

SEQ ID NO: 10195 - DNA, 372 bp, Glycine max
attaaaccctaatttctgtccgttgcattagctaaggagctttgccgcatgggttgttaagttttggcctgtggccattgcaatatgcagagcgagttctccgatgcgaagaagcgcagagaggaggacaaccctcaaacactcgtttccctcgtacacgacagtgagaagaagaagagaaagagaaagagaaagaagaaaatcgaggaatcaaacgagcagccccaggttgaggtatgccctaaatccttagtagactcggttatcccaattgttgcacaaaaggaaaatgctgaaaccaccacagagaattctaacccaacccccaagaaaaagaagaagaagaagaataagaatgtgcaagatgcagag

SEQ ID NO: 10196 - DNA, 448 bp, Glycine max
atgcatgtgagtcaacctgcaaatacatcacctggctctggtctttcaagtcctttatctgtttcttcacataccggtgtacagtcagggagtggcttaactagcactgatgaatttctggctgctaaaacaactggagttcccaacactcctatttgcaatgtggagcctccaaaggtagtcagtgcaaccactatgttgacatcagctgtacctcaggcccggaaagcatccttggctcgatttttagaaaaacgcaaagaaagggtgatgagtgcagcaccatacaacctcaacaagaagtctgaagagtgtgccactgcagaatacgctggtgttaacttttctgccactaacactgtttttggccaagcaaagatagtagcccgcccgcacctttaggaaacaaactatttcggagaaaaatattgttgtaaccttaaaaatg

SEQ ID NO: 10197 - DNA, 369 bp, Glycine max
cagaaggttcgttaaagtcgaagataaattaatgcaaagtagttagttggcagatagaagaagatcatcatcataatcgatccgttacaattagggtttctgattggagcataatagcgtattatcatctcatctctcagcagcagcagcatggcggagcaccttgcatcgatcttcggcacggagaaggaccgcgtgaactgcccgttctacttcaagatcggcgcgtgccgccatggcgatcggtgctcgcgcctccacaaccgccccagcatctcgcccaccctcctcctctccaacatgtaccagcgccccgacatgatcacccccggcgtcgacccacagggccagaacctcgaaccccgcaag

SEQ ID NO: 10198 - DNA, 416 bp, Glycine max
acccacgcgtccgcccacgcgtccgaaaacagtgaaaaccataacacaatacctcacgtacctctccataacttccatcttcgccgaatcacaactttcaccaccgtcaccggcaccgatcaccgccctacgacaaccgtgaaggcaagacacttggacatctgaatcattggtataaaatggtttcgtttgaaatgaatgatcggaagaagattggattaggcttaacgggatttggtatatttttctcattccttggccttatcttcttctttgacaagggattgctagcaatgggaaatatactctttgtttctggagtatccctgaccattggacctgaaatcaactatgcaattcttcatgaaacgtattaatttcaagggaacaattccatttggaattgggtccttaat

SEQ ID NO: 10199 - DNA, 321 bp, Glycine max
atctcagagatgacttaatttttgtgcatgcatgtgttcaattgttttaagtgagatatgatttttatcatagtttggctccatgttgatgtttgcatgacattggtgaatcgaatttcttcatggcagcctgaagaggtctagaaagtttcaacctgaagataggctcttctcattatcttcagtgacctcgccagcggcagaagatcttgcagctggacgagatgatggtagaccagattatggtcctggtcgttcaaaaggtggaggaatttatgctaatggacaaggtaaaccaaagaaaagtaaaagtggggcaag

SEQ ID NO: 10200 - DNA, 416 bp, Glycine max
ataaattgggaggtgcagctacagaattgatttctgctccaaatacaagggaaccatgccagagtaattccattgctgaggatagaatggtggtttctgaggtatcttctggcggtcttggaaatgaattggagaggcatagagtgtcttctaccctatgtgttgatgatagagataataagcatgaagctgattcaggtgttatagttgatatgaaaagctctgtgcatgatttaagcactatgataaattcttcaatctcatctttgggcaattcttgttcaggattgagttttagttctgaaaataagcatgtgccccttggaaatcctcgtgtctctgcattgtctatggacaaccttcatgcacttttgcaaaatacagttgctgttgatgttcaatgtgagaaaactgct

SEQ ID NO: 10201 - DNA, 436 bp, Glycine max
  modified_base (389)..(389): a, c, g, t, unknown, or other
aagctagtgtggcttagtcgctaaatttgttacgataaagaaattaattcagcaacaaatataatgggttctcttatggcaggatgggactctctgatcttggatcctgaatcagctacaatagagaggaatcgatcactcaccaaagaagaaattaatgcttactggagagtaaagaaggagacagagttagaacacctcagagctatgtccaaactatctgagactattcaggcccgaaaatttgaggattcagagaattctcataagtcaagtaccgtgaccttggccagcataaaggagtccttaagcatggacgttgaccagaaaagtttagagcaacttatcaagaaaaatggctggtggaccaaaagcagctgggcatttcntgaatgaacgccagtgatagaagcggcttccaataagtatgcatcac

SEQ ID NO: 10202 - DNA, 365 bp, Glycine max
acccacgcgtccggtgacaatctatacggttcttcttccggttcggttccctccgtccggttcggttcaattaccccgaactcttccatctccgtcgcgggtgccggcaggcatagccaccaccagaagcggacctgcatgtgctcgccgacgtcgcatcccggttcgttccggtgcagccttcacaagagcttcggctcgcgctcggcagtggcggcggcgtcgcctaaccggctgaacgcgcggcggtcggcgatgacgaactcgctcgtgagaatccgcggcgtcgaaagcgaattggtgaagcgagccttggcggcgctgattcggccgtcgtcgcaccatcagcgccgccgccgcgattt

SEQ ID NO: 10203 - DNA, 252 bp, Glycine max
atttttgtattagccatgtatgaatatgtactaacatttgccttggttaacatgttttcttaagaaaaaaaaaaaaaaaaaaaaaaaaaaaaaaaaaagaaaaaaaaaaagaaaaaaaaaaaaaaaaaaaaagaaagggaggaggacgaagaggaatgaagccaggtcggcgtggaggagacgtcataagacctcgagagcgcgatcgaaattgaatgcagcggcggccaatcgggagagtcacgaggggga

SEQ ID NO: 10204 - DNA, 420 bp, Glycine max
accacgcgtccgcagttatgcgtttctctctatagccagctatcatcaattcatcatgtcatcgccaaactccgcccgtcagccccacgcgccgctccttctcccgcgccccgatgccgccgcccgcctccccgtcctggcgctcctcctcggccgccgcggccactccgtcatggtccgggagacggcggcgcgtgagctggaggagcggcgcgccgactggacctactcgaagccggtggtggcgctggacatgacgtggaacatggccttcgtcgtggtctcggcggtcatgctcgcctgcaccgtcaaggagaaccccaacacgccgatccgctggtggatctgcggctacgcgctgcagtgcctcctccacgtggccctcgtgtggctcgagtaccgtaggaggaacgacgcgcc

SEQ ID NO: 10205 - DNA, 331 bp, Glycine max
aggaaggccaccttgaatgttccccctcttcctccttcaccgagagacgatgccatacaactttacgctgctttcaaaggatttggatgcgatactagcgttgtgatcaatatacttgctcatcgagatgctacccagcgtgcctacatccaacaagaatacaaagcaatgtattctggggatcttctcaaacgcttatcttcagagctttctggcaagttggagactgcactactgctttggatgcacgaccctgccggacgtgatgcaatcatccttaagcagtctctaaacctgcccaaaaatcttgaaagctgcactcaacttatat

SEQ ID NO: 10206 - DNA, 427 bp, Glycine max
accaagcgtccgaaaaggagttgtgtaatctaggttttggttgattgcgggatggaagtggaggcagtgcaacaacagcgcaaaggagcgcacctgaagaagaaggctctgaagaacaaagctttgggcatcactttcaacgagaaagatctcactgactacgtcaccggctttcacaagcgcaagaagaagagaagaaaggaagcccagaagcaacagaacgaggctctgcgccgcaaacgcaccgaggaacgcaaaaggaggaagttggaaagagaacatgttcttaatggaggcgtgccaccacctgatgaaattgatggggaccaagaagaaaccgaggagcaagttgaatctattgctgaaacaaagacatacgagaatgatgatctgaaagtcactgttgtaacaagtgagatcaaccctg

SEQ ID NO: 10207 - DNA, 437 bp, Glycine max
atctgacttgctacgccctataccctgccgtgaaaaacttggaaaaggaaaactaatttcaattttttcacaccctgggaacattcaaactttcaagcaagataataatcccatcaagaaggtggtactgaaaggaaattaaaggggggaaaaggtcaaggtcgatcattttgaagctataggttggctttggtgtgaaagattggtgcttaagtttatggcattcaagcacagtggtatccaaataattctgcttctccgttttgcaacaatggtttttgtgctggtgggcttattgactctcatatcaatttccaaccgaaaaatcatcttcaacaacagcagttgcagctatcagaacagcatttgaaagagttatataatgcgagtcatggaactgttgatccaaatcttcatgtttataattcaaaagccgt

SEQ ID NO: 10208 - DNA, 300 bp, Glycine max
cggacgcctgggttcgtggtggtcctcagcgtgaacgtatgatgaagtaattaacggattatcggaagagttatattcacacgaagccatataaatctcttgttgagtgatcggacaatccttggcacctactgtcatcggatccggtgctgtgcgccatagctagaaccggtttcaggtacggatatagcatgcttatgctgcagatgaatctgaattctgtggttggcttgttcacgattgtgggttatagatggtgtgttcatgtacgttactcaattgtgtttatcgttaacgtct

SEQ ID NO: 10209 - DNA, 395 bp, Glycine max
  modified_base (73)..(73): a, c, g, t, unknown, or other
aaacgaagcaaaaccgcaaccgccgctgctccgaagaaaaccgaggcggttaaaagggcagcgaagaaggtanggccgaagaagacgaagaaagtgtcgacgcctgcgaagcccaagcagcccaagtccattaggtctccaaccaagagggcccggaaagcagccgttgctgcggcttgatacttgtcttgtttagttaaaactatgacatatatatgtagatatgaaaaggtgtgggtgtgggtgtatgtgtgtgccttgctgcacaatcttgaagaaagttgtgtagtgtaggatggtagatagtttagtgttctgcaatgttcgctctaataagtgatctaatggagatgagttttactgttttaaatcatccttttttgctgttgcttgtt

SEQ ID NO: 10210 - DNA, 371 bp, Glycine max
acaagcacaagagcaatggactcgtaagagtagtaactaagaaaataaaggtttctaatttatttcgttcaattctccggcggcaccgcaaccgattccgccaccgcatatggcaaaaggtcgaaaactaacgaccagccggagcgagcgcttcttgggaacctatgcttacagccaaggctccgccgccgtgaacccgtcggagcttcgggaagaggatgtatggggcgccggagatgacgccggcgaacgcgagtgggatccacacttcgccgccatgagcaacggcggcggaagccggcgccggattccgcgtgacacggatgtgcaccggcgcttgggtgggctgtctctggcttttgaagctccgg

SEQ ID NO: 10211 - DNA, 317 bp, Glycine max
accacttcatggtttttgaccaattggtcttgtttttgtgtagtagtaatttcaagttgttcttgagtttgtgagttttgaaagtttggattgtatttctgtttgacgagtggtgttggaacaagttaggtttggtacggcctggttgggccatccaatatctcattcattggatttcatcgacggcataagtcataatcaagagtcgcgaacgcacgttgtatttaccatctcagaagtccgttctcagaacttacgagctgatccctgagtaccagaaatctgtcggccatacgagcgcatcatagctgccatct

SEQ ID NO: 10212 - DNA, 339 bp, Glycine max
agaaaaaacaaaaaaacaaaaacagactgatccaaaaaaaaccaaagcggttaaaaaggcaacaaggtagggtgcggccgaagatgatgaacgaaagtgtcgacgcctgctaagccgtaagcagcccaactccattatgtctccaaatagtcatggctcggcaagcatccattgctgcagcttgggaggctgtcctgttgagttcaaactatgccagatctgtagttcatatcataacgtctaggtgtgggtgtatgtctgtgccttgctgtacattcttgatcaaagttgtgtggtgtaagatggtagataggccactgttctgcagtgtgcgatcaa

SEQ ID NO: 10213 - DNA, 399 bp, Glycine max
atccgaggggatgcttctcagtcagggttcaactttggtagcagtgacgctcctgctgtgccgtccggtggattcaactttaattagaagatattcatgctctactggggagttttggttggtctatctgtgaagtcctcctttatgacacgacagcagttgggggacaagtcaacgtcttgtcattgtcctaatgtccttgggttgtacgaggtccagcaagtaaatacatggttgctggactgccttgggtttttgcaatgcctgatatttcatatctcatggtgtaaaatgctttgtggctatatttttttgccaccgtagagaatactagagtcttctttctgccaagtgatcatttcatagaattaatgaatgctcagtctcgtgatttttttt

SEQ ID NO: 10214 - DNA, 418 bp, Glycine max
aagaaaacgttactagcacagttaatttagattcttctgattatccaaagcatagtaatttcaagttacacggtgatacaagtaaaggaaaggatgagttgcataagtttgagaaggtgccaattggtagtgggattgacatgtgtagttttgaggaccctttggatgaaaatcctcctgcattgatcagtttacgtggcaatgccaaattgtctgggtataatgataggattccctgtagcttgttgtccaaaagtcgtgacaatgtaccagtagttagtagagatgatgatgaaaactcttatgggtgtactcaccctattaatactaaaaccaagtcctttaggctaaagactggtaaaaggtgataatagaataattaaaaaactggcttcaaacttccagaaagttgctgaaa

SEQ ID NO: 10215 - DNA, 389 bp, Glycine max
atccagctaaagatatttcactcactggtcacactaccaacagagcattctggacatggcatcatctgtctcttacgtgcttctacttcccgatctgatgattgtcgcctttgctggggagttaaactgatactttggacatcacatgtggagatttgacggaccaatatactaaaccacggactagttacgctctctttcagtggaaataccatcttgcccaggttttcagacaagaaacgattaaccctgtgggaagattgacatgccgctcaagcatgtccctggaaacactgctggcaccgtccctgccgatgaactcactccaaaaggatcaacttgggatcatttagactatgaacttcttggagttctgagtggtgatctat

SEQ ID NO: 10216 - DNA, 408 bp, Glycine max
accaccgctgttccataatccggcccttcaaatcgccatttcttcctttctcaccaacaaattacaaaggcaaaaaatatgggaaccagggaacaagtttgtccgaccaatggggaaattgaaggtttggcaattattactaagaagaagaagaaaagattaagattaagaagaattggaacaacaagaagatagcagatgcaaaagctgttgcatcaactggaatggacaaggccaaaactgcaccaattgtgggtgcccacaaagtgaagagtgtaacctctgctggcctcaaatgggtcacgaatcactatcacaaaaggacttccaagtgtaactcacacactcacatgcgtcttggacagtttcacatccacagctttggtaaataatacatgatgctctact

SEQ ID NO: 10217 - DNA, 256 bp, Glycine max
aacaaaagctgtttccactggcagacatacattgggtttaagctacaaaggtccaaccggtagttaactactgtgcgtgctggatcgtcagcagcagtgctatcggcaacaagctcacctcgtgctggtaagcctctgcttccaatggatgcaaatgaagatgaagagaacgagaaagcacagccagttacatagtcacatgccatcttccacatgagattctctcttgctagcatgtactctgcaatgcttctga

SEQ ID NO: 10218 - DNA, 170 bp, Glycine max
aacaagcgtccgcaaacatagtgactaccagaagagacaagacacgggtgagcctagaggaagaaagagacatcgatcatcatcaagacaactgcagtttcaatgccccagtaggctttccaaacgtaatacttttagtgatggtaaaacttgcagagcaacttccagtt

SEQ ID NO: 10219 - DNA, 227 bp, Glycine max
  modified_base (39)..(39): a, c, g, t, unknown, or other
  modified_base (109)..(109): a, c, g, t, unknown, or other
agcacgccctgcggtgcgaccgcaagtccacgagcgtanacgacgaccctttggtcctgatctcgctgcggtgcaggaatctggtgcggctgaagctgcgcgggtgcanggaagtcaccgagcacggaatggccgacgtggcgaagaactgcacgaatctgaagaagctctcgtgcggttcgtgcgcgttcggcgcaaacggcgtttacgctttcgttaacaactcc

SEQ ID NO: 10220 - DNA, 386 bp, Glycine max
ctcttagaaccatcatgtcacaatctgatcattcctctgcttttaccacacccagattagttctcaagaaggttttggccaaatctcaacatgaaggggatggagctgttgttagaagaggcattggaaggagcgagttgaagaacttggatcccttcctaatgttggatcacttctcagtatctcccccagcaggatttccggatcatccacaccgaggttttgaaaccgtcacctacatgctagagggaggcatcactcaccaagattttgctgggcacaagggtacaataagaaagggtgatgttcagtggatgaccgcaggcaggggaatcattcactctgaaatgctcgcagaagcagacaacaacaacggattgcaacta

SEQ ID NO: 10221 - DNA, 425 bp, Glycine max
accagaaagatccaattgggagttaaatgttattggataaatttctctcaggtgtagagagagttgaagaaaacatttcattgataattgagcaaacacaatgaatgctccacctcatcatgacgatgaggacgacaacgaacaagttttccttgatgagtctgacatcatccatgaagttgccatggataatgaagatctgcctgacgctgatgatgattctgaactcggtatgaacttgccaggaggaggatagtaattttgtgcacaaattcagtgctcataccggtgagttgtactcagtttcctgcagccccacagatgcagccttggtggttactgggagcggtgatgacagaggatttctctggaagattggccaaggagaatgggcttttgagcgtcaaggtcatgaagaatccgta

SEQ ID NO: 10222 - DNA, 350 bp, Glycine max
atgtttaatttactacgtccgcgtggcccacacaagttgcaaccatagtcactactcactcacaagcatgcacgtcattttaaaatgcattcattgatggaactccaccaccttacaatacaacacaagtgttttgtttttgtcctggacccctcaaaaagcagaatccgatgttaaaagctatggctattgtggctcattggtgaagactgaagagtgaacatccccccaaattaaacaacatactatatggaggaaaggtggtagggctattaaatgatttctttccttgtaattttcttgtttatatagtatagaattctgtgttatgggcgaaaaaaaacagtaat

SEQ ID NO: 10223 - DNA, 423 bp, Glycine max
accacttggtagttggtggcctatactgcatttgccattttgggaagcattctcttttttcagaaatagaattggaagcatcttggtgaaaacaacataacaagggagttgggcctctgttggttttgtcccttttggagcttcaactaaatcatgttattcattgaagataccatcccaaaagtgttatgcatagaagaagaaaataaggggcaggaaatgagacaggactgattattacttgcaaataaagtagcatttcaaatactaactgcctaggctataaggttatccctctcttgtttgatgagtcaaatatgcaaacatttatatctttgtaaaaatgtgacatctcaacattctgtcacagcccctattcttcctctgccactttttgatattttaaattaatcgttagtattg

SEQ ID NO: 10224 - DNA, 323 bp, Glycine max
aatcaggccaagcaagctaaggcaaaccctcgttggcaagtttgttattgccggctcctcttcctcctccccctggcttcgaacgaacccttctttcccgttccaaggcccaacaaccgcaattccccaggccccaataaggactctctcaagatcgaaagatgagcaagtcccaatcccaatcccgcggaaaacgacgccgtaggcattaccaccactcttccgattcctattcttcatcctccctctctgattactccagaagtgaaagttcttctgatagtgaacatgaaacatctcatcgttcaaagatgcacaaaaag

SEQ ID NO: 10225 - DNA, 352 bp, Glycine max
agaagattctggtgaatgcgtagaacaggaaaataaagaaattagcgtgaaaaatgttgggtgtgttcagcagctccatagtgtcgccgccggaggagctcgttgccgccggcagccgtacaccgtcgccgaagatgacggcggcggcgctgctgaagtggttcgaggagaagaacccctccgcagtgtcggtggaggtcggagagcatgtctagctcgcttacagccaccacaacgagtcgccgtttcagcctagatcctttgctgtgaacgatgaggtactctgcatgattgagggagcccttgacagtttgggcaacgtgagacgatattatggattggccaagtcaac

SEQ ID NO: 10226 - DNA, 390 bp, Glycine max
ggctgaaacaaagaagtgaaaataacagcaaaaagtagcagctgctgcagctcccccgaagcttatctcagcagcagatactcaaccctgtttgagtagccgagaataacaccaatgggagaggtgttatctcaatacacgctttctctacctttctttctcaaatcactattatatcatagcatagatatttttgttgttgttattattcttattactattattcctggttctgattttcaggttattgttttgtgtttcaggaggaaaagaaaccagaggaacaacccaaggcagaggagaaaaaaccagaggaagagaagaagaaagaagaagcagcagcagcggaaaaaccaagcgaagagaaaaaaccggaacaagagtcgaaag

SEQ ID NO: 10227 - DNA, 411 bp, Glycine max
accacggacgcgtctatttcatgtgataaaccctttgtacaaacgtttctcccattgctgcctgtctagaagcctgcgtatatgaagctttttgccagcctcataatgcttgcggggcttgatgctgagctatttcgtctataaaaatgaaatataggtttttgaagtaccttttttttttctctcttttttaaaccctaacctgtgggatgttgggttttgaaaggagtggagccttacagaattttggccaggctctgctgcatgtattttgttcctcatcccctggctgccacctctaaaagatgtgtgtgttgaaagtgtcgcactagaaaaaagaagagtcatatgaccatgtgaaagtatttattggccctccgctaaaacaatacgcatttagatcatccctgc

SEQ ID NO: 10228 - DNA, 422 bp, Glycine max
  modified_base (383)..(383): a, c, g, t, unknown, or other
aacgaaggtgctttcttagttgtgctgctaacgacaatccatggaaatgataagctccaaattcttcttcttcttcttttcaactctctgtcttctctacggattttccaacgccaccgatattcactattgcgataagaaagctgactatgatgttgaggtcaaaggggttgaaatatctcctgatcccatcgcacgaggccagcctgctacattcagcattgctgcaactacaggtaaagctttatctggagggaagctagtgattgatgtgtcatatttcggatggcacatacacagtgagacccatgacctttgtggagaaactacttgccctgtttcagctggtgattttgttattgctcattcccaagttttactgnaattactccacctgggtcatacactttgaagatgaagat

SEQ ID NO: 10229 - DNA, 372 bp, Glycine max
agttattagtgaacaattcacatgggaacctcagctggatgtggatgacaatttcttcagcagtttccaaatgtgcgacctagactcctctgcatatgaaactgggtttcccattattgatgagctaagttcatttgataacagtcaaagctgttataacctttctgatcttctatttcctgggatcaattttacaaacgatggcactgaggaaaatatggagtatcccactctcgaggagacaataggagcagcagattttacttttggaggatcctctgaagggtttcaacagatgtttgattcttcatgggttaatcatctcatgtgccatcaggccattgcatttactgaagaactactgtcagcctc

SEQ ID NO: 10230 - DNA, 349 bp, Glycine max
accactcaaatccaaatccaattccaattccaattcccaatcttctcaaaccctaattcctcatcttgaaaatgagagaaatcttgcacatccagggagggcaatgcgggaaccagatcggagcgaagttctgggaggtgatatgcgatgagcacggcatcgaccacaccggaaagtacagtggcgactctgaactccaattggaacgcatcaatgtttattacaacgaagcgagtggcggaaggtacgttccacgcgccgtcctcatggatctagagctcggcaccatggactccgtcagatccggcccctacggccagatcttccgccacgacaacttcgtcttcgg

SEQ ID NO: 10231 - DNA, 352 bp, Glycine max
gtttccattggcggagctccgattcgccaccaccgttctccgaaccggatcgggttgttgccgcctctcaaatgctcctctttggagccggaaaccgccccgcctcctcccttcgactggactcacaagttgatcgccggtgtcgccggcgtcggattcctcgaaacctcgtacctcacttaccttaaactcaccggcgcagacgccttttgccccgtcggcggcggcacctgctctaaaatactcgacagtgattacgccctcgttttcggtattcctcttcctctgattgggatggctgcgtatggcttggttgctgcacttggtgttcaattggcttcgaagaatttcg

SEQ ID NO: 10232 - DNA, 417 bp, Glycine max
aaagaagggatggcacacggggagtttaaggaacatacagaacgtgtggaaggcagagcagaagcacgaagcggagcagaagaagctggatgagctccgcagacagatccaggaggagagagagcgcaccgagtttcgtcgtcttcaggagaaagctggcctcgcatcaggagaggttggaatttctgtacgattcgggattgtcggttgggaaatcttcgaattccgaaggattcaaggcgctcgaacagttaccaaaatccgatgcaacggatgcagcaggctcctctgcttctgcatctgcttctaaggagggggcgagtgtgcctggggcattgttcgaggagaagcctcagtctgccaatgatgcttggaggaagcttcattctgaccctttgctcatgattcgccagcgcg

SEQ ID NO: 10233 - DNA, 425 bp, Glycine max
agttccgcggaacagagaaaaagaaagtaccaatttctttagatagtcatggcttccaccttcgacgccttcaccgtcgacgacgaccacttcgccgcccccgccgccgccgacaccttctctggctaccccgacttctcctccttcccctccgacgacgtccccgtcgattacgccgacaccgcggcgtcgccggagatcttcggattcagcgatcccggtccagtttactcccagtctcccttcgagcaagtgcacgagaatgggaatggaaatggaaccgaaaacggctacggcgacggcgttttcgtctccaacggaccggtgcttccgccgccgggagacatggagcctgaggaaagttacgttcctcgggagtggcgcggtccaaatgtcacccagcttgaggagaaggagaaccggga

SEQ ID NO: 10234 - DNA, 435 bp, Glycine max
aaccagcgccggaaacaactgggccaaaggtcactacaccgaaggcgctgagttgattgactctgttctcgatgttgtcaggaaggaggcagaaaactgtgactgccttcaagggtttcaggtttgccactctcttggtggtggaactggttctggaatgggaacactgttgatctcgaagatcagggaagaataccctgactgaatgatgcttacattctctgtgttcccatcccctaatgtttctgacacagttgttgagccttacaacgcaacattatcagtgcaccagctcgttgaaaatgcatatgaatgcatggttttggataacgaagctctctatgacatatgcttccgcagccttgagcccatcaccccaagctttggagatctgaaccatctaatttcagccaccatgagtggtgtgacatgttg

SEQ ID NO: 10235 - DNA, 373 bp, Glycine max
actttcttgtaacttcaacaaacagcctcagcggaactctctggggtgttggtgttgctgagggatcttaggcaaaggtgttgatgatatgggagcgtgtgtttcaactccacaaggttgcgtgggagggaggttgagctcttccaagaagaaaaccaggaagaggaggagagagggactcagaagaagagttacttctcggttgtgtaaggaatcattggagaaaattgatgtggcagggttgcctgattgttcctttgccaatcccactttccaaggaagtattgaagaggcatggtttgattcggttgcagtatttgactctgactgtgatgatgattatcagagtgttcctgatgatgttgtatctctg

SEQ ID NO: 10236 - DNA, 267 bp, Glycine max
  modified_base (213)..(213): a, c, g, t, unknown, or other
acagagatggaattgatgatgtcaaggaagcagcttccagagcaacaagggttagaagttcagaacccaaattcaataaaggccctgcagcagaaaattcaagcattacagcggggaaagaacacgaatggagatcctgagagatgaagatagacgacttcgagctcaactgatggatactgctgaagcactgcaagctgcaggtgaacttcntgtgcaacttaatgaagcagaagaagctgtcattaccgcacagaagcgggcgat

SEQ ID NO: 10237 - DNA, 406 bp, Glycine max
  modified_base (348)..(348): a, c, g, t, unknown, or other
accatcaaagttggagtagttcccgtcaggtaaaaacaatcgagccagccaccgccacatgactgagaataaccccaaaacccattacccttcttcgggtgggattcccagtcccagtgatgatggcccaaaaaagcttccagggaagcagaagatgcatttcaacccgccagagaaagagattccggacgcggccactctgagggatcaatggaggtatgccattaggcagtacagtaaatggtactctcacgcttggggcactgccattctcgctggcaccgccttcttcgccctcggctggttcatcaaaggagagaaccccataccctctttcaactctaacanagacaaagacaaagacaaagacaatcacaattctcacccctgatgtcatgtgcccttc

SEQ ID NO: 10238 - DNA, 163 bp, Glycine max
aacaacgcattatagcacaccacacagaaacgcaaaacagagagaacaactgttactcacacacgccatgggtaaatgaatggtttttgagcaacagcagttaaaagagaaaagggattcagcgaagatgacatcggttggtgtggcagcaacttccggtttg

SEQ ID NO: 10239 - DNA, 420 bp, Glycine max
atgaaatctctgtcacgattcaggtcttgcatgcacgggattgatcacctgctcacgatttaatagcatgttgtcaatctgcatactagcacttgagcgatccggcctggatagatatgtgactcgtatgacattgcattcaaagtcaatctatctgcagaatttgctacattgacatggaacaatattgggatcgtcaaagttctcaagaggaacctgccatgcctgatcacctgagggttcaccctataattcttgatttgttgttacaacatactgggtcacatacaattgagggcttggctttgcaggacatacagctattggacttcacttcggtactatagcatttgtgataatgacggaattggcacttttgctacatgatcatgtacaccttgttgcccattatgaatagct

SEQ ID NO: 10240 - DNA, 325 bp, Glycine max
cagcgattgaggtgaggaaccatgtctccccagaaccagagccagagtcggaggaggattccagttgttgttgcccattctgcttgggaccattccttcaactttcctacctcgacgaatgttttcataagttttgcttcaattgcattttacgctggaccaaggtggttgctggcaagcaccgttctccaccttcttctgctctatgccccctctgtaagttttatcttatcaagatcgcacagatattgattacaatgctattacactgaacaaggtctcttagatgacagactctatctatcgcattattggagatctctaa

SEQ ID NO: 10241 - DNA, 419 bp, Glycine max
accacagcaattgtttctgatttttcccaggttgttgttggatgttacatgggaaaaatacattttcttgattttttgaatggacgcatctgttggattttccaaacttctggcgaggtaaaagcacagccagttgtagacacatgcagacaattgatctggtgtggctcacatgatcataacttgtatgctcttgactacaaaaaacattgctgtgtgtacaagctatcatgtggaggcagtatatatgggtcacctgcaattgatgaggttcgtggcttgctttatgtggcctctaccggtggtcgtataacagctatatcaatatcggcttctccatttactatattgtggctacatgaattagaagtccctgtgtttggttctcttgctgtcgcccacaatggaactgtaatatg

SEQ ID NO: 10242 - DNA, 433 bp, Glycine max
  modified_base (416)..(416): a, c, g, t, unknown, or other
attcatatcttcatcctacgccaatagcccaaaaccttgttctctttttgtggttcatttctctcttccagatgccacttgccgttcttcaccctcacgattttctcaggaaaaacccatctaaccagtaccagaccataatccctcactctcccaacatgaatcctaataagtctcatcggacttcccgaaaccgtaagaagcggcccgatccaagcccacaaggcgttgtcagcccagcccggctcacattatccccgaaaccccaagtcaaaaacaagccgcagcagcaactcgtcatgggtcaggtcaaaatactcaaacgcggccaacttttgacccaaacgacgccggattcaccgccgcagacggaaatcgtcgatcagaagttaactccgcagacggaaaccgtcganaaaaaggacttaacttc

SEQ ID NO: 10243 - DNA, 380 bp, Glycine max
accacgcgtccggtacacactacatcttcaagacgcacaatcactcactctacattcttctatttcctctatccctaatttcccaattcgtccctaattctgcattttgcagacacttaattacccgcaatggcagagattcagccgccggagggccaaataaacggtgccgtgggaaccctaattcttcactcctcggagccttccatcggatcgaagcggcagcggcggccgagcgtccgattgggcgacatcggcggcgaccagccctacgatccccacgcccgccgcaacccgaagccgtggaaactcgccttcgacagtcaccaccaccaccaccaccaccaccgcagcaaagacaagggaccaggtaaaccctc

SEQ ID NO: 10244 - DNA, 401 bp, Glycine max
accacgcgtccgggcagatagtgaaatcctaagattgtttagttggaagatggaggcagtggaatcaatagcggttccggaaccggacgaagacgatccttcatcgacgcttctggatctctcgagttaccagctccacgaccttgactcggtcgagttgccacccagcctcaccgagttggacctcaccgcgaatcgcttgtccacgctggacccgcgcatagggaacctctcccatctcaagaagctctccctccgccaaaacctcatcaccgacgccgccgttctccctctctcttcctggaacgccatttcctctctcgaggagcttgtgctgcgcgataatcaattgaagaacattcccgatgtcaccgtatttaagaaacttccgggtttccaag

SEQ ID NO: 10245 - DNA, 435 bp, Glycine max
agaaaaaaggagtaggaagccatggaaaaggaaaacgaagagatggaaaggaaaaggagagaggaagagttgatccatgagagggaatgggaggagagaatgaactgcaggaggctggaatggaagaagagggttgacgagatgctgagccagcaccgagcagaaatgggccagatgcagactcgttttcttcacgagcaacaaaatcttactaaccaattgcttggtatattctcgcagtggcctgcccaaccttctggcctatctgatcatactagtgctagcaaccattatctttcacaaatgatgcaaaatttgcatcatgtgaatggaattgttcatggtgacgctagggttgagggagataatcaagaagatcaattcattgttgatggatgatgtatctctgccattttgtgtatctgtgctggggag

SEQ ID NO: 10246 - DNA, 442 bp, Glycine max
accagataaaacaaataaaaacctctgttttctttgtgtgatttctcttctggttccgagtattgtgttattcaccaaaagcttgcacctttctgttgtggatcacctaaaacttgggttttggttgagatggctgagaaggaagaagccatgcatgctgttttgaaggaagctgtggatttggaaaacgttccacttgaggaagtttttcagactctgaggtgtgattcaaatggactcataacagaatctgctgaggagaggctggtcatctttggccacaacaaacttgaggagaagaaggagagcaaggttttgaagtttttaggatttatgtggaatcctctttcatgggtcatggaaactgcagcaatcatggccattgctttggccaatggaagatgaaaacctcctgattggcaagactttgttgggattacac

SEQ ID NO: 10247 - DNA, 382 bp, Glycine max
accacccacgcgtccgatttgcacttgtgttgtacaggaggagaggtgcacgagtgttgaagtggagccaagtgtccactcattgctaaggaatgaactttggtcagtcagtattgtgtttttctggaccaatgcgtcgccaaatttggagattcctggcttttcatgtgataaaatcccataactttcaatctggtgtgtggtggctgacagaaattgtgagggttagcagcgcattgtctatgacatgttagaagtttatcctaattttaggtctccagttgattgatacttctgattctggcacgtgtgtttgaatattcatgctccaagtaattccttgtctggaacatcttttaatgtgataagcaagatttttaag

SEQ ID NO: 10248 - DNA, 399 bp, Glycine max
accacccacgcgtccgggagcatggcgggtgaaaaatgggttcaggtggcggttcatggagtgcatggcgtcgtccagacgagcaagggcctcgtcgaggttgcgggaggccatgaggaacaatgatgaaagcaccaattgttagggtatgaaccctaaagctggcttcgagggcagcaaacctccagcaagaagaagaagaagaagacacagaggtaagaaaagggaaatatcattttcttatatcccgcttcattgtttacatagctatatatagaggaatttctcttaacagaattgtaaatcttatccaaaaggaatctaataacgatttctgttttcatatgattgcctacgaaggagcaaccactacaagcaggatttggagctgattcttgc

SEQ ID NO: 10249 - DNA, 415 bp, Glycine max
aatagcctaaagagtcctccccaattgcttcaggcaattactgcatacactttgcggctgaaaagtctaatctccagagaaatagagaaaattgatgttagagccgatgcagagaccttgaggtacaaatatgaaaataacattgttatggatgtttcgtcatctgatgggagctctcctctacagtatcaactttatggcaatggaaagattggggttgatgtgcctccaggagggagtcaaaatcagcttcttgatagacagaaagctcatgttcaacaatttttggctactgaagatgcactaaacaaggctgcagaagcaagggatatgtgtgaaaaacttatgaaacgtttgcatggaagcactgatgtttcatcacgctcacttggtattggaagtaactcccaaaatg

SEQ ID NO: 10250 - DNA, 428 bp, Glycine max
accacgcgtccgggcctcgaagatcctgcccttccacccgattccatccacgaagcttttctgaaggccgccgccgccgtcaaatcacgcgccgcctccattttctcctccaccgacgacgacaacgacggaggttgcgtcagcgacccgtggcccagcgccaaggacgcctccgatgcagtcatcggagtcgaatcggaaaacgaactgccgggatcctgcatcgtagagaggggagtcgagcccgtcgccgacgaagtcaaagttgctggtgaaggaggcgacgcctccgccgacgtggtggtggagggaggagacaaattaggagaggatgtggaagcgtgcgttgatgagttgcaagggttggatatcaaggatgtgaagaaaggtggagaagaagatgatgaagaagacaacaagagacctac

SEQ ID NO: 10251 - DNA, 369 bp, Glycine max
  modified_base (358)..(358): a, c, g, t, unknown, or other
accacgcgtccgcccacgcgtccgcgtcacttttccttaacggcgaagccatcgccgaaaagggcacaaccgtcattcccaccccccaaaccgtttcttcaattctcctctctcccatcccagtaaaaaggagaggaatcgaagctgttccgttctcatcggaaaggggaaaacggtaacggagatgggacttctgtctaacagagtaactagagagagcctgaaaccaggggatcacatctactcttggaggactgcgtatatatatgctcatcacggcatctatgtcagtgatgacaaagttcatcactttcacaaaacgtggccaagaagtaggaaccggtactgcactagatcntctcctcatta

SEQ ID NO: 10252 - DNA, 391 bp, Glycine max
aggcaaacgctatcggatgcaatggaccatgcagaaccctcaacgactgcgacggccaactcatttgcatcaacggaaggtgcaacgacgaccgcgacgtcggaacccacatctgcggcggcggaatgccgccaaatccgccaccaagcggcggaagctgccagtcctcgggaaccctaaattgcggcggaaaatcgtatcctcagtaccgttgctctccgccggtaacttcctcgacgccggcgatcctgacgctgaacgacttcagcgaaggcggcgacggaggggacccgtcgcagtgcgacgagaagttccataacaacacggagcgtgtggtggcactccccaacggggtggttcaacggcattccgctgtgtttgaaaatgataa

SEQ ID NO: 10253 - DNA, 345 bp, Glycine max
accacgctctgtgcagtttcctcgctctcttttctgcaattttcttttttgttccttctctgcggttatctttttgagcttcaatggcggacgctgaaaccttcgctttccaggctgagatcaaccagcttctcagcctcatcatcaacaccttctacagcaacaaggagattttcttgcgtgaactcatcagcaacgcttctgatgctttggataagattcgatttgagagtttaaccgacaagagcaagctcgatgctcagccagagctcttcattcgtcttgtgcccgacaaggccaacaagactctttccgttattgacagcggcattggaatgaccaaag

SEQ ID NO: 10254 - DNA, 430 bp, Glycine max
atcttaagcagtgcccacgaggttagatcgcaacatttccctgccaaaacttcgtttgctactttaccccctttggcgctgtttgaaggattttttttttttttttgattcagacccactttgcaagacagtgttttgacctctttttatgctactttatcccgaaacagcaaatgggtcgcatcgctttcagcctcggaatttgatgacgacgatgatgatggagcatggtggtgacatgtgtaatcatggggttgttaataattaggggtatattaggttttggactggtttgtatttgtatctggtaatggtgtttaggttcagagaccttgtggagttggcatctctgtgtcaggggtgtttgcatttgttgcaataataatagtactaataataataatgggcaacggcacttctcgtgttgttg

SEQ ID NO: 10255 - DNA, 345 bp, Glycine max
accacgcgtccgaaaaaaaaaaaaaaaaaaaaaaaaaaaaaaaaaaaaaaaaaaaaaaaaaaaaaaaaaaaaaaaaaaaaaataaataaaaaaataaaaataaaaaaaaaaataaataaaaatataaaaaaataaataaatttaaattcaattgaatttttttttattttctaaagtttttggaagtaaccggctttttcatttatttaatctatttgctttatatcacgctttcttttcgtgagctgttgtcatagcgactctgaccgatttcatttcccttcactatcgttgcgataacctgattgtggaatgggaccttttttgtcacatttaattatgcgt

SEQ ID NO: 10256 - DNA, 365 bp, Glycine max
acaggtatccagttggagagattttatgaagggtggaaagaagaataagaaaggggaaattcgtccaccgaagcttaagacagaagatcccaacaaatcctacgttcaaaggcctgtaaaaagaggttaggggttctgccgtcgagttagaagatcacagcaatcaattgaaacaggagtccgagagaacttatttatgcaggctatcttttgtatcagttagatacttttaaacagatttattactggggtcatttgaggcatgttaatggaatgtagacctccaacgaatgactatcccattttgggatgctaggacgttacaccccaatactgataaataggaattactggttgaggcattg

SEQ ID NO: 10257 - DNA, 409 bp, Glycine max
atcccacgagtttccactacgctcttctctttgtctttgactatagtagagaagagaaattaaagcagatgggaagtttacaggaagacgagttggtacaaatggtgcaagattttatagaatccgaatcaacatcccccacaagttccacttcctcaaattgccacaccttaaaccaccgaactcaatattttattctacaggatattctaaggagtgatggtgatacagcatgtgaggctaacgtattgaagtgtgtattgaagcatatgagacgtagaaagggtgctgagaacacaacaagtctcagtagatggcttgttatgacgatgacaatggatggcctcaatgcttctatatgccacacctcttgggcaacttctttgggttgtcctgctgcaggtgatta

SEQ ID NO: 10258 - DNA, 377 bp, Glycine max
agagagcagttggaagacctcctgccaaaaaatccttcttctaataagctgttcaatatttcatagtttcaacttttgaaacacatttttagacaagaaggaaaagaaataaaattaaagcaaaaacagaatgagagaataataattatgggcataagatatgccatagtctatataacaaggccttttccttttttaagtaactaaagggtgcaagattgattgcaattagcagcactatgatgaaaaaaaaaaaattgaagatgaaggaaaagtgtcaaaataaggtaaggaacaaatggaatggttttaaattaatggaatggttggaataatgtgtgaagtggtggcacgcctaattgactgtgctgggtgag

SEQ ID NO: 10259 - DNA, 382 bp, Glycine max
accacgcgtccgggaggctggaggacttgatgctgggccacgcctggtgaaaaaattagttggctttggagataataggacatctaagattgcggctagaattgctgatgaggaagttgcacatgtagcagttggtgtctactggtttgattctatctgtgaaaaactgaattgtgctcgagatttcacttttaaaggttgtgaagtctggttaatatctgcttatctgctcacatacactgatacacacatattgaaggcatgcaatcttcaacataattttctgtaagcatgcaaacttactaaaggaatacaatgtggaaacaaaagggcccctccaattattcaccccaaaataaaccgggaatccccggtaattggt

SEQ ID NO: 10260 - DNA, 349 bp, Glycine max
aaaaagctttggcattgttcttatgctgtggttttttggcagatttggttgggaagtattaatcgaaagagagttgcatatgaaaattgtgttctcatgtggataattctgcattaaggactgcttacatcatctgctatcgagatttgtgcgtgttggagccggtcgactatagttgctagtcatcacttgggatagttcacctacgagatattacaggtagttaattcatgtaagatccgtggcttcgactgggtaagaggtctatgctcatcatatgcttcgtgctgtcagttgtgcgaatttatcacctgtcatttgctagacccatccatttaactctcacctc

SEQ ID NO: 10261 - DNA, 346 bp, Glycine max
atcacacgtccgcccactcgtccgcccacgcgtccgggcaacgaccttgctggacaaatttgaggaacaatggctgcatcttttacctaaagttgctgaggaggaaactagacactttgaagaagacacatacgcatatctagacattcagcgtgctctcgaaaccacttttgccaatacgagcacgtaaaggtcaatgcacgctcatgtattaagccgaatgagtaccctgaggacaagaataagatgacaaggcgagattctggtgattcttccgacatgacaacaccaatcaagaagagactatccacattgtgattcattaattgcaccataatagacatta

SEQ ID NO: 10262 - DNA, 379 bp, Glycine max
atcgatgaagagttaaggagagaaaacatcaacatcaaaccaaaccataaagatgaagcccattgacgacaaacaagagacagtgacgataagaacggtgagccacgacgaggaagggaaaaagagggtggagaagacagagcttagcactcacaacatcgacactataaggtacgtcgagaagaagctcatcaacaagggtgtccagcgacaggaccgccaccccgccgacggcatcggaatcagccggccaccgccaaagtccggccacggcggcaagttcacgtgggagggccctgctacagtggagaatagcgaactcatggcggcgccggcggccatggacgaaggagaccccaactatgtggactgggaagag

SEQ ID NO: 10263 - DNA, 397 bp, Glycine max
atcgaccattacatttatcaaggggagtggagaaaccaagtgggagggtcacatacacagttgttcctgaaggtttgtgcagatttagtgtccaggaactgagcatgagaggaatataccatactgcgaggataacttcccttgaaatgaccaagactgaactggaacaagtggagcaagacccagatttcataatgttgtctcgccaatttaaagctactgcaatggagcttatttctgttttggagctgaaacaaaaaactggtggtatgacacaagtccttttggacaacgttccagttcacaagttggctgatatatgtgttgctagttttgagataagttttgaagaccaattatctatgctggacttaatttgacccacagtgacgctttc

SEQ ID NO: 10264 - DNA, 419 bp, Glycine max
aatttttaacttcctctttctacatttcattcaaaacaatcatggcttctcttcattccattacattttcaacaaaaactgtcctttatgtatttgtattggcctcttccatcgcagcctctgctggcaacttctaccaggattttgacgtaacttggggagatggtcgtgccaagatactcaacaacggcgatcttctcactctttcccttgacaaagcctctggctcggggtttcagtccaaaaacgagtatctctttggcaagattgatatgcaactcaagcttgtacccggaaattctgcaggcactgtcaccgcctattatttgtcatcaaaaggattaaattgggatgagattgactttgaattcgtggggaatctgagcggtgacccatacattcctcacaccaatgtgttc

SEQ ID NO: 10265 - DNA, 431 bp, Glycine max
aaaaatccaacagatctaaaagtaccagttttggacataaaaatgccaaagccatcagaaggaactgaagagaaacattctgtaccatcatctgctgcagtgatgcagacagatgaaaatgacaaggaagaagatgaattcagtgaagatgattgggatgcatttcagtcgtttcctgtctctaaaagtgaggatggagatgattcaaaaacagagtatgttgctgaaggaaaggatcctagcacagttaaaatgtcatcagaaatagaaagttctattggaggagttgagtttcaagaatgttctatttccaaatccatcaatagtgaaaaggagctgaaaggtgatgaatgtctggaggctgttaaagagaaacatgatcaaacttatcctagtgctaacaagccacatgataatgagaatcaagagat

SEQ ID NO: 10266 - DNA, 292 bp, Glycine max
atccgatgcttttcactacaagggattcgcatgtccgacgtatatacatggtcactctgcttccgatcgctccagtagtcacttgcgaagatcttaacgaaaatttaggatgggtacactgcatccagatgacaaatcgggtaatctaaatgctttggtagagcttcagcaacagatagatgtgaatgcaggcgctctcgttgtccgcatagccgaaagttctgggagccattgtgcgtagcacgtgaaaatgtcgattgtggcagcagctcatgtaagtcttccttatgca

SEQ ID NO: 10267 - DNA, 424 bp, Glycine max
tggatctgctgtcaaccctggttctttccagcagcacattagacatgattctaatttgatgagtcagctctttcagagtgatccagagttggcacaagctattttagggaatgatctgaacaaattgcaggaagttttacgattgcgtcatcaccaaagagatgaattaaagcgtcagaaggaagaagagcttgctcttctttatgctgatccttttgatgttgaagcacaaaagaagattgaagctgccatccgccagaaagggattgatgaaaattgggctgctgcattagaacataatcctgaagcttttgctagagtggtcatgttgtatgttgatatggaggttaatggtgtcccattgaaggcatttgtggatagtggagctcagtctaccattatatcaaaaagctgtgctgagcgt

SEQ ID NO: 10268 - DNA, 198 bp, Glycine max
  modified_base (138)..(138): a, c, g, t, unknown, or other
accacgcgtccgctcggttgaactcggtgtgtgtagaaatggcgaaacttgaagccaagctagggatgatcttggactcggtgggtcagttcttctccggcaaggaccatcttccttattgtgactctgacgtcgtanctggatgttaaagaaaagtcttggaagcaaaaaaacaatcatctcaagaatttatgccag

SEQ ID NO: 10269 - DNA, 406 bp, Glycine max
atactatagaatgaaggtggagatgatgagaaaggttaaaagaagttagcaaattgaaagtaattaattgatccaagatctgaagattcactagtactttgcagcatcatggttttgtttcatgttgaaaaactggaaactatcttgtgcagctctgagcttccgtgaatagattgtagcattgcaatgtttacagaagtccttgtgaggaatgcaagaaatgttatttcccgtggcaaggaactttgttcgatcaaaggtctttgtttgttatggtagtagatagctggaacatgggaatgcacgaaaacacaactattgagattttaggtactgtgttaatgagcgttgataagaaacttcccgttacttttgtacagatcatcttccaaacatccaatattga

SEQ ID NO: 10270 - DNA, 371 bp, Glycine max
accaagcgtccgatatttggtcctgatgatactccatgggatggaggcacgttcaagttgacactccaatttactgaggactatccaaataaaccaccgactgtacgatttgtgtctcgcatgtttcatccaaatatttatgctgatggaagtatttgtttggatatattacaaaatcagtggagtcctatttatgatgtggctgctatactcacatctatccagtcattgctttgtgatcccaacccaaattctcctgcaaactctgaagcagctcgaatgtttagtgagaacaagcgtgagtacaatcgaagagtgagggaaattgtggagcagagttggacagcagattaagttcatccttatatgca

SEQ ID NO: 10271 - DNA, 426 bp, Glycine max
atccaagaggacattgcttgctcaattcctcgttatttctttaatctctacaatttcacttacatcggtggtcttaactattctgcatatggtccgttaagtttctcggggtatcctcagtatgcggtgtttctaaactgcactaccccagtcaccgatgatcctcgatacgtatctgtgaaggtcaacggtaattgtgattcgagttccgtaagccatatctatgccattctggtcacagacgatgatgatcgctttgggtttacactgacggacatcaacgttgggtgccgattgaacgttgctacatttgcaaactggaaatatattaacagggacgttaacgtttcctattctgatatcaacaagtggctgtaccactgaaattggatgtcatggttctatcgagtaatttgtatggaccga

SEQ ID NO: 10272 - DNA, 433 bp, Glycine max
atccgaccgacgcgtccgctttggtatcacgagaaactatacgattcgattccttgttttcaatggacaccttcttcaattctcaatcttcttcttcttcgagaagccgctggagttacgatactctcaagaatttccgtgagatctctccgctggttcagaatcacatcaaacgggtttattttacgttatgttgcgctgtggtggctgctgctgttggagcttttcttcatgttctgtggaacattgggggttttctcaccacgttggcttccattggaagcatggtttggttgctatctacagcccctgttgaagagcagaagaggttgtctctgttgatggcttcggccttgtttcagggcgcttccattggacctcggattgatttggctattgccattgatccgagccttattgttagtgcatttgt

SEQ ID NO: 10273 - DNA, 402 bp, Glycine max
aattgccccagacacccctcttaagctcgccgattacttcaaaatctccggtgttgtccgccccggatgcatatctgacagacccactggtggcggcatttaccttgacacttctgtgttacaagctgactacagaacttttgttgagattgtcatccagaacaactagaagatcgttcagagctaccatcttgattgctaatcgttctttgtccttggtatggacgggggacagtcgacacctgcgatcacgagccagtagaatctccgagatgcagttgcacgttgcaccacagaggtataccccttctcatgtactgctatttatagtgcccttgacaatgtgcgaatgtggaacttgaggtcagagttttgggcacgacaataccttgggcaacagtt

SEQ ID NO: 10274 - DNA, 364 bp, Glycine max
  modified_base (304)..(304): a, c, g, t, unknown, or other
aatcatctttatataacctaattgcaaatatgaataccatgcccgttttcttcttgtgcttcctctgtgcactgcatctcatctctgttgtggcaactgagccatccaaagatgagacacaagaagaaccaatgacacagccagatgcctgaggaagatgtggaagtggggggcatgatggaagctggggacacggtggagactgggggcatggcggacgaggacacggtggaggacatggcggaggatgacacggtggacgacatggcggaggatgcagatgctgcagtcgaaagggctgcanatgttgctgaagtaaaaatcacaaatatatgaactgaacacactcatatacttgagtgta

SEQ ID NO: 10275 - DNA, 288 bp, Glycine max
agcaaacattggaatgaggcctaatgcggtgaacgtaccggttgaacagttaaccacaaggttggccactggcttgctgcaattggttgaaccccaaattcaaacgaatatttctcgtcaatctcctcagcttgttactcaatgattaagcattgtctttgtttaaaatatatttgcctaagaatgtcccgggtatgtgaatcacatgctcttcttttttcaatacgggtctgtaagagataaatttatttgaatggtgctatggatttgaataatttattttgctgt

SEQ ID NO: 10276 - DNA, 402 bp, Glycine max
  modified_base (346)..(346): a, c, g, t, unknown, or other
atcacttacttaggaattgatatcgaggtgtatggtggcagccttatatttttgcaacccgattctaccaagaaaggggttatacttctcgacggtaccaataagttgtgggctcttcccagtgaaaacggtaggttgtcgtgggaggaaggagttttggacttggagagtgcggcaatgcacgagatagggcatttactacggcttgaccactctaacaaagaggactctgttatgtacccttgcatattgccttcacaccaacgaaaggtgcagctctcgaaatctgataagaccaacgttcagcatcagtttgctaacgtagaggactctgcaggccacgtanggcgtttgggagtgagtttaattaccactttgtctcttggattcgcttacttactt

SEQ ID NO: 10277 - DNA, 176 bp, Glycine max
  modified_base (68)..(68): a, c, g, t, unknown, or other
  modified_base (138)..(138): a, c, g, t, unknown, or other
actaactagtgttctataagttcacggtcagttctgaaaaatgggttccaaggttttgcttgttgtanttatgttcatagcggctatacttctgatctctgctgaggtttgcaccaatgaatacgaaaattttaacanaaaagatgggaagcatgctccaaatgggttatatgata

SEQ ID NO: 10278 - DNA, 415 bp, Glycine max
acatatcttccactccacaacctcaaacttctctctctctctcttcctattctaaaaatcccacaaacccctttctctattccatctaaagattcattctttctgcaatttcgatacacgggtcttcattaattcactaagattctgcgtaaataatcgttttcactgaattttctgttccgatggagctaatttcaggattaccggaggacgtagcccgagactgtttaattcgggtttcgtatcagcagttcccaacggtggcgtcggtgtgcaaactctggaaatcggagattcacgcgccggagttccgccgtcaacggcgtagcacaaagcacgcccagaagctcatagcgatggttcaagcacgcgtcgaactgggaaccggttcgaccaagcgactgacgaaaccggt

SEQ ID NO: 10279 - DNA, 361 bp, Glycine max
aaaatggggaacatgcacaaagaattgattctctggttttcatattgtttttcttattttagtttattgagacttggatatctttttcaatcaattttattgtttaactgctgagtgttatcgatcaaaaatatcaattttaaattattggtcttaatggattaagcaattttcctttttccctttttaattttaaaattgtgttcctttgccttttgaaactgtgtgtttggtaattggtaagaatggaattgatattaacaccaaaaaggtgctccttaatccaatcctttaaataaattgatgctcaaattcaccaaaatgttactggaatcaattttaatttgggaaaaattccaat

SEQ ID NO: 10280 - DNA, 429 bp, Glycine max
atccgagcttgcctcgtgaagacatcaattcaaccatcaaacgaactcttctgaagagcttggaaagccctgattggaacgttcgtatggagtctgttgatgctgtaaacaaaatattggaagaggctaataagcgcattcaagcaactggaactggtgagttgtttggggctcttaggggacgacttgttgatagcaacaaaagcattgtcatggcttccttgacaacaattggcaatgttgcatctgcaatggggcaagctgtatagaaggcaagcaagggtattctgtctgatgtattgaaatgtcttggtgacaacaagaagcacatgagagaatgtgtgctgaatacattagacgcttggctggctgctgttcatctggataaaatggtttcatatattgcaattgctttgatggactctaaac

SEQ ID NO: 10281 - DNA, 248 bp, Glycine max
aagcttgcctcgttaagacatccattcaactatcttaccaactcttcagatgatcgtagaaattgatgattggaacgttcttatgacgtctgttgatgctgtcttttggggggtggattacgttgataagtagatttatgcagctgcaattgttcatttgtttgggggtctacggggacgacttgcaggttacagtgtatgcattgtcatgcgcttctttgcgaactgatggaacacttctgtctagc

SEQ ID NO: 10282 - DNA, 422 bp, Glycine max
atccgagtatgacagtgatggtgagattattgatccagatcagcttcaaaaaccagaagcaaaatctgattcggaggcctctcaatatgaagatgaaaagccagatgctggtgaaggtccttgggaccaaaagcttagcaagaaggacaggcttttggatagacagttcatgaaaaaccctagtgagatcacgtgggacgcggttaacaagaagtttaaagaggttgtggctgccaggggaagaaagggaactggtaggttcgaacaggttgagcagctcactttcttaacaaaagttgctaagacacctgcacagaagttggaaattctgttcagtgtggtttctgctcagtttgatgttaatccgggcctcaatgggcatgtgcccataaatgtatggaaaaaatgtgtgcagaacatgc

SEQ ID NO: 10283 - DNA, 405 bp, Glycine max
  modified_base (224)..(224): a, c, g, t, unknown, or other
attcaattttggtaccaaaaatgaatacaggcattacaaattactaaacaaactattaatcatgcctcttggagcaccgaatcattctgcatagaaaagaagctttggtatgctttaggaaagatgagagcagagaaggctgcttggagaatatctaatgaaaggggtttgaagctcacaactatttgtccagctctaattacaggtcctgaattttgtcatangaatccaacagcaacgattgcttatctcaaaggtgcacaagaaatgtactctcaaggttttctagcatcagtggatgtgaccaaattggctgaagctcatgcaagtgtattcaaggcaatgaacaacgaggcttctggtagatacatttgctttgaccatgtaattgatacacatagtgag

SEQ ID NO: 10284 - DNA, 323 bp, Glycine max
  modified_base (81)..(81): a, c, g, t, unknown, or other
aaccacgcgtccggtctttacatcacaccctctttccccctttgccaaagctctgatcctttccctcctcaaatcccccgntcctcaactttccttgttaagggtgccccgtttcccagtttccgaaaccatttttggtccggggctccccccaacttcggaaaagattcgaattttccgccccctttttttggttccaaaccctcctgaaacctcctttccccattcggggttttaaaggaaacgccttttaaccgttccattaagaaggaaaaggaaaaggaaaatccctgttgcctttgttggcaataacaacaattcca

SEQ ID NO: 10285 - DNA, 430 bp, Glycine max
atccgactttttggaggaaatgcacaatggaaattctttacgcagcacaacaactcttgggaatgaaaaagaacgagagagagtttatgacactatcttccgcctgccatggagatgtgaattgcttatagatgttggcttctttgtctgcttcgattcatttctttcgttgttaactgttatgccagcgaggatcatgatgaccatttggaggcttctaaagacaaggcagttcaagaggttgtctacaatggaagtttctgattttggctgttttcttattttgagtagtggtgttgttcttttgcaacaaacagatatcagcttaatatatcatatgatccgcggtcaaggaacaataaaactatatgtggtctacaatgttttagagatatttgataaattatgtcaaagttttaatggggatgtg

SEQ ID NO: 10286 - DNA, 368 bp, Glycine max
  modified_base (360)..(360): a, c, g, t, unknown, or other
aatgaattgcaatgagtagcgaaaagtctccttcatcagcttctgcttcagcttcttcttcgagtagctacgagttgagcaaaggcatcaatggcctcgacaaggttattcttcgcgacccacgtggtagctccgctgaggtgtacttgtacggtgctcacgtgacttcatggaagaatgaacaggccgaggaattgctttttctcagtagtaaggctatatttaagcctccaaagccaattcgtggagggatcccaatatgttttcctcaattttcaaacctcggtcctctcgactcgcatggatttgctagaaatcggttctggaccattgatgattctcctcctccttttctgacanatactccg

SEQ ID NO: 10287 - DNA, 396 bp, Glycine max
  modified_base (238)..(238): a, c, g, t, unknown, or other
attgatcctcaaacacagttttctcaagtgcaaacaattaattttcaaaagaaaggtaagcaatttatatatttgtagctacctccaaggataactgctattagtatctagttatacttttgtagactgcaaaatgtttgtcattaagtatccttttattttcctggtgacaattgtaaatacattgtgaacataaggtctcgcttagtgttttgctttgttcgttgagaagatctangtaagcaaagtaaggaggtacaggagtccaactgttgtgacaatggtatctaactactgtagtttgtatctctagttattatttgtttcaagtggtattatttcttattttctttctccttcagaaaatgctgtaaaaggcatataagctctcaattg

SEQ ID NO: 10288 - DNA, 416 bp, Glycine max
aaaaagctgaagcggagactgaactgaaacaacgatttgagcacagcatgatcgaagctgctgataaatatcaaggcgcaaacttgtatgtagtaaatttacatgatagcattggtgatgaaaaacttaaggagctgttctccccttttggtaccattacctcttgcaaggttatgagagagccaaatggcttaagtcgtggatcgggttttgttgcattctcgaatccctaggaggcatctagagcactcctggagatgaatggcaaaatggtggtaagcaaacctctgtatgtgacgctaccccatatgaaagatgatacgagagctagactgcaggctcagtttgctcaaatgcgacctgttggtatgccaccatctgttggtccacgtgtgccaatgtatcacccatgtggt

SEQ ID NO: 10289 - DNA, 427 bp, Glycine max
agcggtgtcatcactggcgtgtccgttgctgagtgattacggttacagcgtggcgccgccggaagtgcaaccggcgaattggtttctgagagagtggtttgagtcaggtaaggggaaattagaagaaggactgaggctttgcgcgcacattgggtgcggtcgaccggagacgcggccacacgagtttcgccggtgttcggtttgcggcaaagtgaattactgttcacgtggatgtcaggcgctggattggaagttgcggcataagattgagtgttcgccggtggaaatgtacggtgatggtggtgttgatgtggagaatgagtttgtggtcccaaacgatgccgtttgaagaagtgtttcagcgacagaatcaatttctaaggttgaaaaataagaaaatagagaggaaaagaagcgattctataaa

SEQ ID NO: 10290 - DNA, 396 bp, Glycine max
acaactgtgagggcgccgcaaaacatgaagggcaagtgcattctctgggcggatcgtaaagtcgttgaagaggaagatgcaaagctagtgaaccttagtcgcaaatctgacggagaagaaggaatcagacccatgtatttgcataagcgtaatcctaaccctcttcttgcactgcctccaaacatctcaagtgcgacatgagccccaaattcaacttcactgccaaacccatttcctttgtctcccccgttctcgttgttcctttttcacttctccctttttggttcagcacaaccatcgcgagatctagcttttgtttttaagatcttgaatatggagttaaaacttggctattttgtcaattatgggtgctttttggattcaaattttaagaat

SEQ ID NO: 10291 - DNA, 428 bp, Glycine max
accaagcgtccgggagaaggagaaggagatttctgttgaatgatgaggaacctaccctcttgtgctgattgagaataagaaccagaacaggttgcagttaaaaaaatataacttgatgcaaagaggagtagcagaaccatataacaaaccgaaagtaaaggaaaagaaaagaagtgtttgaatttgatcgttaaactgagggagaagaagatgaatcacactcgcttggagtcttgtcatgaatctccccttaaagtatacaaattctgttttgtcccagaaaaacttggtgatatggttatactcttaataaggtttggcattcttgtgtgtcttgttgcatccatatcacttgctctccactcagcattctctaaaccagaccggtggttcccgttaccggagcatattcgcgccgtccagaatac

SEQ ID NO: 10292 - DNA, 124 bp, Glycine max
aaccacgcgtccgaaaaaataaaaaaaaaaaaaaaaaaaaaaaaaaaaaaaaaaaaataaataaaaaaaaaaaaaaaaaaaaaaaaaaaataaaaaaattaaaaaaaaaaaaaaaaagtaaaat

SEQ ID NO: 10293 - DNA, 436 bp, Glycine max
  modified_base (350)..(350): a, c, g, t, unknown, or other
accaagcgtccgaaagaaggtaagtccaagcccaaggggcagctgggttacagacgaagactccaaaagcttggtcagtgtacagtcagaccggttccggaggcactccattgccggttcattggtgagagatgatgagagccttgctagctctccagcagttccaagctacatggtgccaactcaatctgcaaaagccaagtccaggacacaaagtccattagccccagaaaatggaaaagcatagaaaggttcctttgggagtgcgaagaagcggctttctttcgcagcttcacctgccatgccaatgcgccattcaggtccaccaaaggtagaaagcagcagcttanatgcacagttagctgtggacaagggtgtggacagttgatcatacaagtaaaacgatggaaaaacataaagtacgattgaaaatata

SEQ ID NO: 10294 - DNA, 364 bp, Glycine max
accaagcgtccgtttatagatacttcttatgaccaaagattgcagtcccaacattccctttgtttaattgatgcctttcatattattctaatttgtattaggaaccttcctggttcctccttgaatttaagccctttgtttagcacacagtgcatctaccatttcacttcacaacctttttttaaggaatattatttatagatacttcttatgaccaaagattgcagtcccaacattccccttgcttcattctcctgttctcaccatacatgttgttgtcatgatatccatcactttcattgctgcatccagcatcgtcttcctgcatgggatatgcattatacatagtccatccagattcacg

SEQ ID NO: 10295 - DNA, 429 bp, Glycine max
actcttcctttctctcgctccatctctccactcttatctcgttccctttcacaactcaaacaattcccaaaatcccacccttgtcccctctggtcctcctccttctccttcttacccacacacactccgcaagtccacttcccctattcgcgcctcttcttctttttctccctccatggctgcttcttctccgctaaacgacgccgtcgaaggcaatcctcttctgcagaacttcgacttcccacccttcgatgtcgtcgagcccaaacacgtgcgacccggcattcgcgccctcctcggcaagctggaaagtgaattggaggagctcgaacggaacgtggaaccgtcgtggccaaagttggtggaaccgttggagaagatcgttgaccggttatctgtagtttggggcatgattaatcatctaaagtc

SEQ ID NO: 10296 - DNA, 434 bp, Glycine max
atcgaccacgcgtccgcccacgcgtccggagcaagtagagacagcaggtccaggtcatcgtccagaagccctgatggaaagcaaggcttggtctcatatggcgatggttctccatactaacgtgaaaggtgaaatatgtggtgcggagggctttgggttactgtaatcttcaatgagctgcaggcttcaatttttgaacttcaccacctgcattgcttgatggaattcgtgaatgacaatcgttttcccccctttatagacagcaatggcatgttgaaaacttgaaatattctagtcctagaataagttaagacaatagacggtacttatgacattaggatgcagccttggttgtgaagttgttgcggtatttgttggaatcggagactcggatgctgttgctctacttatgcttggttggttacgaccagcat

SEQ ID NO: 10297 - DNA, 332 bp, Glycine max
agtcctcagcagccacagtccctcttcgaacgaccccttcgatttcaatcgtgcaaggatttccccctatctcagcgctccttcttctcccaagcgttttggccaattttattacctaagcgccccctcaagcccttctaaagattttgatcttgcggctcacgatgatgatgccttcgcctttttcgttactggggaatccaagagccctcgatccgcggcagagcttttcgacggcggcaaaatcaagccgctgagcgaggatgattcctcggagtctgctaaaagcccacttctccctgccaaacgatcttccatagcccaaggcaaga

SEQ ID NO: 10298 - DNA, 265 bp, Glycine max
atagaaggtccgttctgaagaaatccttcagccaagagcaagtcaccttcacctctcctctctccgccgaccccctcgtcgccctcatcggcggcggcatctccggcctcatttgcgccctcttcttggagaagcgcggcattcgctccaccgtatttgacaccggtattcacggtctcggaggaagattgggaaccagagtcgtcgatcctcatcctttgaaattcgatcatgcggctcagttctttactgtcagcgattctcg

SEQ ID NO: 10299 - DNA, 412 bp, Glycine max
gtgatttcagacaaaacattcaagaagcagcaggaaactcttgatgaaattctttcacgacacaggaaagagatattgcagctgcagaaaaaggaagttgagatgaaaaaggctgcagctagaggtagcaaggctgagcagaaagctaagaagaagcaagtggaggaagaggtttctcaactttctgctaagcttaaggaaaaccaagccaaagagctggctgcattaggctataacagtagcaatggaaatgaaaagagcaatttggacagtttggtgaatgccatagctggagtatctgttgctagtcaacctgaacatacaaaggtcagcaaggccaaacagaggcgagagaaaagagctcaacaagaagcagaaagggagcagagaatccaatcagagcagagtgaca

SEQ ID NO: 10300 - DNA, 387 bp, Glycine max
agtggaagaggtggaagtggggggcatgatggaagctggggacacggtggatactgggggcatggcaaatcaaacttcatggcatttgagtttccttattgacaatcccaaacagtctacagtttttgatattctcttgggaatttctcaagattttgaaattgctggtaatactcttatgccagctttttctgttccacaggctactgccagatcttctgaaaatgcggaatcctctgcatgatctggaatttgtgttatctttcgcttgttcgtttgtgtaattcaataaatgaaattaggcatgaccctcttgttgagtatgctctgcctatttgaaaatttccacacctcttttaactgtcgtaatgatgtgtgaactgtgtg

SEQ ID NO: 10301 - DNA, 365 bp, Glycine max
aatcaattcacaaacagcaaaaaaaaaaattgaaaaaaaaggcgaaaaaaaaaataatccctgcaatgagacatcaaattatgatcctggagaatatcggaaataaaataaaaacagatgtgtatcaaacttacaatgcacatactgggccaccatcgcatcaaaacgcgtgttcgcagcaccaaagaaacacatcgcagcgagtcagacgccccttcaactaatcacatggcagaaccgtcgtccaccgctgccaccatcgctaccgctgatcctccggttccaacgaccaataactgggccgacgaagcggaccaacacaccaacgcctctaccgccgaggcataaacctcctccgttaacct

SEQ ID NO: 10302 - DNA, 366 bp, Glycine max
agctactcgctcatcccgtggaggtttcgctctctcagtttcttttccccaaattggtttttcatctaacaatttactttgcagaaccgtaaccctaaccccttcccctaccttgtaaccttcctttcgatccttcacctcgcaggtctgattttagttgattcggtgattcccagataatgggagaaacaaaggacgaagcatacgaggaagagcttctcgattacgaggaggaagacgaaaaggcccccgactccgccggagctaaagtcaacggcgaagctaccaagaaaggctatgtttggaatcacaattccggagatcaaggaatttccttcgaaacccaaacttctcttgggcaatgtg

SEQ ID NO: 10303 - DNA, 425 bp, Glycine max
attaaatcagttttcaatccgccacaaagaatttgtgaaaagggggaaaaaaaaagagtccctgctatgaacaaaaagttatgatcttggagaaaagaagaacacacaaaaaaacagatgtgtaacaaacttataagacaaaaactgggccaccatcgcagcaaaacgcgtgttcgcagcaacaaagaatcacatcgcaacgaatcagaggccccttcaacgaatcacatggcagaaccgtcgtccaccgccgccaccatcgctaccgctgatcctccggttccagcgaccaaaagctgggccgacgaagcggacgaagaaaccaacgcctccaccgccgaggcagaaacctcctccgttaacctggaagcgttaaccatcgacgacaaagaaaagaactcttcaaaactcttggacgaacccga

SEQ ID NO: 10304 - DNA, 430 bp, Glycine max
aggaacgagtgggagaaaagcctcgaatttccatttaattacgtggatgccactctcaacaacagcttcatggcccaattccagggcaataatcagatgttgtcgccgctgcaggacatgttcatgtactggcccaacaagtccttttgagcacatcatgatggttttaaattacgatccgcaattgctcttaagattttctgactcaccatgcgaccacaatcgtaatttaaaaccatgtcacataaaatccacgcgcgccgcccattcgcatttgcacggtagcacgagactcaaggtccatgagtgtgcctgtgcgaccacacacatacgattattgatcaagttagcttagctaggccaaagtaagaaagaaagaaacattgaagctggaaacgcatgtgttggctccaccgtttgctttggtatt

SEQ ID NO: 10305 - DNA, 276 bp, Glycine max
aaccactcgtccggttgattgttgattgcagatgtgaggtggcccgtaataccccatatgaacttaacatcacaatccctgtatgagggttatgagccaattgaatttatgcgtacacacacatgtgactatagacaggatccaccgggatgtcgcacaatacgatggccaatatatggtgtgatatattacataatttgtgtctcttcacaacgccattgtggttgagtgttcatttataatacataagttgtactccagcatgctaattaggca

SEQ ID NO: 10306 - DNA, 421 bp, Glycine max
aaacaaacatacattacactataatgtctttgctcatgttcgtagtaacgaaggccaaccttaaggttgcacgtctggtcgccgtgatgtccatgattgcggtggctatcaatgccacacccatggcaaaggtcacattcaggtgccgtcaagtcgacgtgcacatgatctcctgtgcgtcagtgtccatacgaactgaggtaaaccgtctcaggactgctgcacaggtctgaaatcacacatcatcggcacgatgaccattgctgactgccagggagcatacaattccctgaaaatcgctgataacataacgtgacagagtttgaatgccggcatcgtcaacactcactctgtcatatgtgacgtcaagatcccataccagatcagcaacaccaactaatgcgctatcatcaagttctga

SEQ ID NO: 10307 - DNA, 420 bp, Glycine max
cccacacgtccggtattttgactggcgtaattgggcttcccctgtacctaatgttggaaggaatcctcccacatctgtaacagaacttaattttaataagtttggaatccgtgccgccttaattggctgtttggccacatccacaaagactattcttgcagaatctcttctgcatggatacaaatttgacagcataaacacagtttattacatggcaccttttgcaaccatgatcttggccgttcctgccatgttacttgaaagcaatggaatccttgaatggttaaatactcatccatatccttggtcggctctcatcattatttttagctccggggtgttggctttctgtcttaacttctccattttttatgtgattcactccaccactgctgtaacatttaatgttgccggaaatct

SEQ ID NO: 10308 - DNA, 399 bp, Glycine max
agtgcaaatatactgtctaaaggtaccaaacttagggattatacaaaaggagttgagaacgatttgcgcaaagttgaattggattcaattcaggattatattaaagaaagtgataatctagtttctcttcacgatcaaattcatgattgtgatagtatcttgtcacagatggaaactcttctaagtggatttcaggctgaaattggttccattagttcagacataaagattctccaagagaagtctatggatatgagtttgagacttaagaatcgcaaggtggctgaatccaaattggctaagtttgtggaggacataataattcctccaaggatggttgacgttcttgttgatggagaggtcaatgaggaatatatgagaactcttgagattctcagt

SEQ ID NO: 10309 - DNA, 414 bp, Glycine max
gtgctcttcacctttcactccacgaaatcaaaaacaagtgctaagaagctccgtgtctccaatcccaaacatgtaacaccaaacccaagttggcatccaagttttaaaacaacaatactgcatataatattattataatatacataacaacagttattgatattgttgtgattgtgtgtgattttggtgtcgtccctttttcctatgtttaaggttgtacggagtttatgtgttgattcaattcgtcgataagaaaccttagtttgatattttgattggttctgtggagagtttttttttctttggtgtggtttttggtttgtgctgtttttggttgggaataacaatggccgatgaaggaaacaaaagcaataacttctattcgatcttggggttgaagaaggagtgcactga

SEQ ID NO: 10310 - DNA, 303 bp, Glycine max
agtcaaaataaaagatggtgaaaccctaactctagagattatctacagcaacaaccaaagccacagtggagtaatggggcttttctacatcttggtggctgaacaactgccacaccaacacctcctttgacattattatgtgtcctaagtaaattcatcttggaatggatccaagagactattatattatatgatatctatatgagcaaatgaatatgttgtgatgaaaaataaagccagcactgagagtcttgtaataataggaaagcattaatttattatactatagtcacatatctttag

SEQ ID NO: 10311 - DNA, 426 bp, Glycine max
agcccacgcgtccgagttcggttggcagttgtagtgtgataagtagtaactcaaataaattttccagtgatactttagcaggttcttgccaggatgaagattccctttgcagtgatgcagaatctctagatgttgaacctgtgaatgaaggatgctccacttcttttgaagaggttgtagcagaaagaattcatagggccagtgtaggaggcttgcatgccttgcttccaatggctaagtatgatgctaggtttgcttcttttctctctgtaaattaattggtgatgtctaccaataattttctttcagagataagaaattttttaccactgttttctcactgtcattcatggcagaatatgaactttcttataagctgtggacgtaatcctcttatggaagatcttcctatagtacaatacagat

SEQ ID NO: 10312 - DNA, 433 bp, Glycine max
  modified_base (416)..(416): a, c, g, t, unknown, or other
agcccacgcgtccggaataccacgatcaccaccgcaaagcaatgggcgctatactttctgccttaactggcggtgccgcaacggcggcgacgtcttcgccggagagttctgcttctagggtccagtctttccactcttcggcgcgctggcagctccacttcaacgagctcaaagaaaccaataagctcgttgtgatagatttctcggcgtcgtggtgcggcccttgcaaattcatagagccagcgattcacgccatgtccgaaaagttcaccgacgttgacttcgtcaagatcgacgtcgacgaattgccggatgtggcgaaggagtttaatgtggaggcgatgccgacgttcgtgttgtgtaagaaagggaaggaagtcgacaaggttgtgggcgcaaagaaggacgagctcganaagaagattgagaaaca

SEQ ID NO: 10313 - DNA, 380 bp, Glycine max
  modified_base (319)..(319): a, c, g, t, unknown, or other
aactcaaatccccaaccaatcccccctccttacttaaggtcattgttttgttcaaccattcaatctacgctttggctggtcaggacagtaccacataatcttcttctataacatcgaccggggtcgtcctctcgaaaaatgctacctctgcgtccacaatcacaggttggagcaccaaaaacatcgctgtctcttgtttcctcagaccccctcctgtctcctgatgaacctaggtcaaactctgacaatctccgtgaatctccggctgaaagtgcaagttcacaagaaacttggcctatagctgatgctgccgcagcanagaagatggagaatggaaaagcggagattaattgccttgagcagaaagtgattcatcgtgt

SEQ ID NO: 10314 - DNA, 433 bp, Glycine max
  modified_base (255)..(255): a, c, g, t, unknown, or other
  modified_base (417)..(417): a, c, g, t, unknown, or other
aagaccaagccccactcaaccaacaaaacactctctccgctcctcctccaactttcaagtttttaaagtaataagatggcagagacattcctaattaacctcagagtcagtgaacgagggacaccctgacaagctctgcgaccaaatctccgatgctgtcctcgacgcttgccttgaacaggacccagacagcaaggttgcctgcgaaacatgcaccaagaccaacttggtcatggtcttcggagagatcaccancaaggccaacgttgactacgagaagatcgtgcgtgacacctgcaggaacatcggcttcgtctcaaacgatgtgggacttgatgctgacaactgcaaggtccttgtaaacattgagcagcagagccctgatattgcccaaggtgtgcacgggccacttaccanaagacccgaggaaatc

SEQ ID NO: 10315 - DNA, 433 bp, Glycine max
agcatttttcttcatcccccaaagtttcaatctttgtattcaattcaccctttctctctctccatggccacttgtgttgatgccccaacccctctttctcggaagcctaacgggtcccaatccgatgatcattccttcaattacatgaaattctgccgacccactttctctgatcgcgttccctgcatacccatttgcaagaatcgtgacactgccttcacacgcgtggaggagtttgacacatgtgtggaggataatgatgatattgaggttgaggttgtggagggtgttgatctttggttgaagattcaagaggaggcaaggttagatgttgatcaagaaccaattttatccagctactatttcagttccattttgtctcacaaatctttggagagtgccttggccaaccacctctccacaaatttgagca

SEQ ID NO: 10316 - DNA, 435 bp, Glycine max
agaaattctcaaaggcaccaatttcattgctcagagttcccaaattctccccaagagataaaatgtctctaatcccaaacttcttcggtggccggagaaacaatgtgttcgatcctttctcactggacgtgtgggatcccttcaaggattttcctttcccaaatacgctttcttcagcttccttccctgaattttctcgggaaaattcagcatttgtgagcacccgtgtggactggaaggagaccccagaggcgcacgtgttcaaggcagatattccaggactgaagaaggaggaagtgaaggtgcagattgaagacgataaggttcttcagataagcggagagaggaacgttgagaaggaagataagaacgacacgtggcatcgagtggagcgtagcagtggcaagttcatgagaaggttcagattgccggaga

SEQ ID NO: 10317 - DNA, 396 bp, Glycine max
agctctcataacgctttctcgtttgaaatccctcaagggatcaactaactgaaggagcaatggggttgacatttaccaagctttttagccggcttttcgccaagaaggaaatgcgaattctaatggttggtcttgatgccgctggtaagaccaccatcctgtacaagctcaaacttggagagatcgttaccacaattcccaccattgggttcaacgtggagactgtggaatacaagaacattagtttcactgtctgggatgttggtggccaggacaagattcgtcccttgtggaggcactacttccaaaatacacagggtctcatttttgttgttgacagcaatgacagggacagagttgttgaggccagagatgagttgcacaggatgttgaatg

SEQ ID NO: 10318 - DNA, 425 bp, Glycine max
  modified_base (283)..(283): a, c, g, t, unknown, or other
  modified_base (286)..(286): a, c, g, t, unknown, or other
  modified_base (291)..(291): a, c, g, t, unknown, or other
  modified_base (294)..(296): a, c, g, t, unknown, or other
aaggtgaagccagtattggattctaagggtccctttccattctctcagacagtggaagcatttgcatacttgaagactaatagaaccattgggaaagtagttctacatcccatcccataaacatatttaattaagcatataaggagagagcacagccttttaattatgtaatatgaatattgttagtcaagaatgtttagatttagaaacagattgtccttataaggttgtattggtaaattttgtcatatctagttcaaatgaaggtggtgttatcgttcanaanaaaanaannnaaaaaaaaaaaaaaaaaatgacaaaaacataaaaagaatcaaaaaaaaaataaaaataaataccaactcaaaatcttacctaaacaatctccaaaaaaaaaagggggggcccttcaaaagattccaacc

SEQ ID NO: 10319 - DNA, 435 bp, Glycine max
aacccaagcgtccgagacactgcagcaaaaattagatgtttctcccctttcaaaacaattccagtctgcatctggtggttctatctgcagctcatgtgaaacttttgcacttagtcacacatcatcatcagacttccttgtagatatagcatggttgcttaaggacaccacttcagaaaattttgacagagtgatgacagcttcacaaattcaaagatattgccatttgttggattttctgatatgcaatgattcaacaattattttgggaaaaatattaccaaatttgataatcttgacagagagcgtggaatccaacaatgttgtaattaataggacaagtgatgttgacataacgcaactcctgaatcacatacataatgctagtaatgtcatatgtcagaaacatcagcaaagtagaagtatattgtgcac

SEQ ID NO: 10320 - DNA, 337 bp, Glycine max
agagctctcacgtttgtgcttgcacttgcacctctccaacgataacaacgacgagcacaagatccagacaaggcaggcacatagtatggctggaccttttgagttgggttcatcaaagaagaaaccaggggatggagtgaatgatttactcacttttaatgctgaaaatatgcaaagcaacatgaaaattatttattacaggtttgttttggcagcagatttgtttaatgctttattgaatgaattcatttagttaggggccttatacttggtttgaaacggggaggggggttgttcctttctttctctcccagtttatggggttccacacaccagc

SEQ ID NO: 10321 - DNA, 389 bp, Glycine max
agctggaacatcagcagcagaatccaagggaagcatcccttgctggctctcaaacccaaccacctaagcagtccccacaaatatggcaaaacagctactaatcttattcacctcccgggtttttaagggtcttgatgtgagtttgaaagggaccggtcacaggaggcatttccttccgcggtctaataattaaatgcaaccattgtttggtcccaagagaccatatatggccgcagctgccctgtgcgaagttgtattctatatgattataattatgctcgtgatgtttaacttaggtatttaagtgtgcaaatttggtgtacaatgcactgtaccctttttttcaacattcttctcatctggttatagtggaaagtttcttggatgct

SEQ ID NO: 10322 - DNA, 431 bp, Glycine max
agcgaattcttctctgctattttatccctcctttgatgattatcatccctttcgtatctctatgtttagggggaggtaacagtgcatggggtgtagaagaataggggaaaagatgagaaggaggcactgctacttggtaattaaggttgttgacagaagatagagagcacagatgatgatatgcatattatataatatatagcagggaactcatgatgaattgtgcatcttactcctttgtgctctctatacttctgtcatcaccttcagcctccatttctcactattccccctctacaccaactgttagctagtgtagtatatacttcgtttctatctactggaactataattcatatataaattactttaataagcctgttcatatataataatttgatgttcaccctgggtatttattacctagctag

SEQ ID NO: 10323 - DNA, 431 bp, Glycine max
  modified_base (390)..(390): a, c, g, t, unknown, or other
agataaattgtcaaattatttttcttggcatctgcatagttataaatggccttgaggtctagctcagatccttatttagttctacaattttcttgtgtcaactgaacttatcaccaggaactattcaatatttaagttacccaaaatgtcctgtgagattatattcacgtcggagtttctctcattttttcactagttgctcataattaattttaagtttctgacaatattttaagattagagactgagcaaaaacttttggagttaaaaagcttatacttgattgggaccctcttggtgtataatcaaatgggtaatgatatatattgaacttacttctagaagatgcatgctaagaacactctagtttttgagaaacgagaggttgangagatgcaatagctgaagagtctgaacattcctagttctgc

SEQ ID NO: 10324 - DNA, 412 bp, Glycine max
ctgcacttcttctctggtctctggcttccttggtacgggaaagaaccaatcttgtccaattccctttgggttttccctcttcgatttcttcaacttccaatcgaacaacctcctaacacaactcgcgttaacttaagccctccccgttgaattgacaattcgtgaataatcgcttgagaatttaacggcaaagctggtttaaaagggtttctcaagttgtggtttgattttcagtttctgatgctgaagaaataaaaaagcttgaaggctttgctcttctgtgtgaaaaatgttggaaggtggtgcgaaattcccgggaataatagatctcaacaagaataataacaactactatgatttctctcaaggcttttaacataagctgggggaaggtaccaatatgtcaattgac

SEQ ID NO: 10325 - DNA, 434 bp, Glycine max
agaaaaagtctcacgagtggggagagtttgtaaattgcgacttccaatggcgagttgcgaataaagcgaagatagaaaaagtgcggcaaaggatgtgtgtgcttgcttcattgtttgcgttgtgaagtaggtgatcgaagtcgttgaatgctatattcgtttacgaaatgaaggaggacgcggagaaagataaaggcaaagacaacaataggatttggggagctattctcttcggcttaattggcgccaccgtcactacctttgcggtcggtcagctgcggaggagtgttgaatggttctatactcagtcatcctggaaaggagagagaaatggttctttccgatcagctttacaggaagaggcatggaggaggcacaataagcgaatgcaagaagagttagaggaggagatggaaagagtggaacgaataagg

SEQ ID NO: 10326 - DNA, 411 bp, Glycine max
  modified_base (117)..(117): a, c, g, t, unknown, or other
aggtcgtcaacaccgttgatctcaagaaaggagaggtcaccaaagggtcatatgaaggaggaaagcctgatgcatctttttcgtttaaggatgaggactttgttaaggttgccttanggaagatgaatccgcagattgctttcatgaggggtgcgatgaagattaagggaagtttgagtgctgctcagaaatttactccggatatcttcccaaagccttctaagctgtgagctgagatttctgcaactacctgcacaaggttgctagaattatcgtttggctgcagtcaaacaaaatagatagcaatcatagtagcatcaaaagctgaggattataattatatctttagttaatgcatggatcatcattcctaaggttgttggtggttcatgattttaatatatctctgaa

SEQ ID NO: 10327 - DNA, 436 bp, Glycine max
cccaagcgtccgcccacgcgtccgggatgctccagagatcttgacagtgattggcaaaatcccttatctttcagagtttttgaactccttatatgattgtcaatacaagtcttttttctcagcatttgctggcctgacggagcaaattaagttggaccgctatctgcatccacacttccgatattacatgagggaggtcagaaccgttgtttattcccaatttttggaatcttacaagagtgtgacaattgaagccatggcaaaagcctttggagtgacagaggatttcattgatgtggagctatcacgctttattgcagcagggaagcttcattgtaagattgataaagttgaaggtgttcttgaaactaatcgccctgatgctaagaatgctctttaccaagcaactattaagcaaggggacttcctattgaat

SEQ ID NO: 10328 - DNA, 377 bp, Glycine max
agcccaagcgtccggagaaattgacaggtgtactgaacgattctaaagcttcacttgaggtgcttgcatttgctgctatttctttgggcttgatctatgtgggttcttgcaatgaagaaattgctcaagcaattatatatacactaatggaccggagcgagtcagagttgggagagccccttacacgacttttacctctcggtctgggtcttctatatcttggaaagcaagacagtgttgaggcaactgccgaagtttcaaagactttcaatgaaaaaattagaaagtactgtgacatgacactcttatcatgtgcctatgctggaactggaaatgttctcaaggttcaaaatctgttgggtcattgttcacaacat

SEQ ID NO: 10329 - DNA, 383 bp, Glycine max
agattgacagaagatgctaggtggtgttcatcaatattctgaaaggtaaaacaattttggtttttaatgataatataacaatgaatctaacatcaaatattgaacgctaaacatcaaaaataaatcgagccaacgcatttaattgtaagtgtcttcatattacctgtgttctgtcacatctttttgcataatattggcactaagtcttttttgatagaaattgtgaagatgtactgttatcattgtatcaactatattgtgcccttctttttttatttgatttggcaaacacggctacttttctccaaataagatggatcatttgtattgccggctttgtgcacaattatctacttgtaagaagtccaatttcgggcaacaac

SEQ ID NO: 10330 - DNA, 432 bp, Glycine max
agcccacgcgtccggaaaggggtgaatccagtggatcaaaagataaatcagatcaaaagacattaagacggcttgctcaaaatcgtgaggctgccaggaaaagccgactgaggaaaaaggcatatgtgcaacaattagagagcagtaggttgaaactgacccaacttgagcaggagctccagcgagcacgccagcagggaatatttatttcaagtactggagatcaggcacagtcaatgagtggaaatggcgctatggcatttgatgtagagtacgcacgatggttagaagagcataatagacaaaccaatgagctaagggctgcaataaattctcatgctggagatattgaacttcgaaccattgttgacaatttcatgacacaatttgatgatatcttcaggctgaaaggtattgcagcaaaagctgatg

SEQ ID NO: 10331 - DNA, 192 bp, Glycine max
agtaatagcaaagatgaataccaagccctttttctccttgtgcttactctgcgcactgcttcccatctgtgttgtggcaactgagccaaccaaagattcgacacaagaagaaacaaagacacggccagatgcctggagaagttgtggaagttgaagaaatggtggaagttggggacaatgtggaaaccgggg

SEQ ID NO: 10332 - DNA, 219 bp, Glycine max
catgaacattgacgaggacatccattctttgcagctcgattcggcacatccaacgcaagatgttgaggctgaacctaaagctgttcaagctgatccaaaagttaaacctaaagtgaatccttctgttcaacattcagaacaagttcctgaaaatattcctgaacactttaatgttgtctttaatggtcaagttaatgctcgtaattctaccacttgatg

SEQ ID NO: 10333 - DNA, 146 bp, Glycine max
agcccacgcgtccgaaaaaaaaaaaaaaaaaaaaaaaaaaaaaaaaaaaaaaaggaaagaaaagcaaaaagttaaagaaagttaataaacttaaaagaaatttaaaaaaatcttcgggagggtctccaaggtcgcttttcattgga

SEQ ID NO: 10334 - DNA, 432 bp, Glycine max
  modified_base (98)..(98): a, c, g, t, unknown, or other
  modified_base (341)..(341): a, c, g, t, unknown, or other
  modified_base (408)..(408): a, c, g, t, unknown, or other
aaaaaaaagggtcccaccgaaacaatgttggagcaagcacgcaggagacacgtagacgcagagagagggagttactaaaaatgaggtttggtttgganggagttgcatcggcgacaaatactgttgttgttgttgttggagaagaatgaattctgagaacaagagactcacaagaagaagcatttagaatcgaaattggaagagaagagggtatgaatgattacaaaggaagagaaggagaaagtagcgttgttgttgttcggaagcgattcaaggaaaagcaacaaccctgtccttccacaaggcccatcatcaaccaacaacaccgtcgctctgcttcnctccctaacactcaatacgaagaatctgaaacagatgtcgaagtatctgatgttagtgtttcagaangggatgacacatcttggatctcat

SEQ ID NO: 10335 - DNA, 413 bp, Glycine max
  modified_base (262)..(262): a, c, g, t, unknown, or other
  modified_base (322)..(322): a, c, g, t, unknown, or other
  modified_base (326)..(326): a, c, g, t, unknown, or other
agctattattcatccacactccctcccttccagatccgatcctcgatggcggcggcgtcgcggaggctccgggacctgcagtccgaggccgggaacaagatttgccttgactgctcccagaagaaaccgcagttggcctccgtctcctacggcgtcctcatgtgcctcgaatgccccggcaagcaacgtgggctcggcgtccaaaatccccttcgtccgatcggtcaacaatggactcctggtccgacatccagatcaaganaatggaagccggcggcaacgacaagctcaacgcattcctcgcacagtactccatccccanaganaccgacatcgttacgaagtacaacaccaaagccgcttctgtttaacgcgaccggattcaggccatcgccgagggccgcccctggcgc

SEQ ID NO: 10336 - DNA, 359 bp, Glycine max
aggcagattaccaacatcttggaggagaatgtggtgcagcccctgcttgtgagcaccagtgcgatcaccttggcgacagagtgtgtgcggatgattttgaagattgatgatattgtaactgtgaggtagagttgattgaacaatgacgaatttggagagaaactgaatcatccattatcttctttttttttttttgtctttcgtgctttaattttatgttggtagtttatatgttctttctagctactttggttaagttcttttgactttggctactgctgttgtttgcaattttgaatgtcctcaaggaatgggatgtttgcaagtcaacagaatccaaagtgttgggaatttaacaa

SEQ ID NO: 10337 - DNA, 405 bp, Glycine max
agtccacagccaccgcagcgtggacggaatcagagtgcagccatagcagcagcagcagcagcagcagcagcagtcattgaagtgctgctctagtttgaggcacaatgagattggagaaatgctggttttgctcttcaaccgtataccctggacatggaatccagtttgttcgtaatgatgcaaagatttttcggttttgtagatcaaaatgccacaagaactttaaaatgaagagaaatcctcgtaaggtaaagtggaccaaggcatatcgtcgagtgcatggaaaggatatgactcaggactcaacctttgagtttgagagaaaacgaaacaggcctgaaagatatgacaggaatcttgcggagaatgtcctgaaggccattcctaagattgataaaattagag

SEQ ID NO: 10338 - DNA, 394 bp, Glycine max
agcaactcaaagggttatgcgttttgtgtttaccaggatcttgcagttacagatattgcatgtgctgctctaaatggaataaagatgggagataagactcttacagttagacgagctaatcaaggtgcaaacccacagcagcctaaacccgagcaagagagcattttaatgcacgcacaacagcagattgcactgcagaaacttatgttgcagccagccttagtggcaacaaaggtggtgtgtttaactcatgcagtttcttctgatgagctcaaagatgatgaagactatgaagagattcttgatgatatgagacaggagtgctccaaatttggtactttggtgaatgtggtgatcccacgaccaccgtctgatggtgaacctgccgctggag

SEQ ID NO: 10339 - DNA, 60 bp, Glycine max
acccacgcgtccgcccacgcgtccgcccacgcgtccgcgcacgcgtccgccacgcgtccg

SEQ ID NO: 10340 - DNA, 341 bp, Glycine max
agcttcttcttctttttcatcaatcatcaccagtggttcttttccttctgagaagatcgaattgtgttttgcaaaaatgggagttccagagaaagaccctctttcccaattgagtttgcctcctggttttcggttttaccccaccgacgaggagcttctcgttcagtatctgtgccgcaaggtcgctggccaccatttctctcttccaatcattgccgaaattgacttgtacaagttcgacccatgggttcttccaagtaaagcgattttcggtgaaaaagagtggtactttttcagccccagagacaggaaatacccgaacgggtctcgacccaacagag

SEQ ID NO: 10341 - DNA, 412 bp, Glycine max
agcccacgcgtccggcggcatatgtggtgaatgggctcattttggctgtgataggcggcagggacttggagcatttaaggactatgctaaaaccgatgggctggagtacgtttgtccccgctgcagtgcgttaaaattcagcaaaaaatcccaaaaaactgcaaatggtttttaacaactaacacaggtcaaacattgctggcccagagcaaaatgtacattgcaagtgctagatagatttatttacacatccattgtgcttggacccttgtctcaattggtaagggtaggtttctaaggactgtaattgtttcacttatgttaaagctgtagagttttgacatgctatggtcacctcacatctcaaacttgcctattttattttgtcaaaggtactcatacctagtacaaa

SEQ ID NO: 10342 - DNA, 317 bp, Glycine max
ctctattttaagtaattcaatggcttacactgcaagtcttgtgttcttagcttccactttccttatcataaactttcctcttctggcaaacgctatcggatgcaatggaccatgcagaaccctcaacgactgcgacggccaactcatttgcatcaacggaaggtgcaacgacgaccgcgacgtcggaacccacatctgcggcggcggaatgccgccaaatccgccaccaagcggcggaagctgccagtcctcgggaaccctaaattgcggcggaaaatcgtatcctcagtaacgttgctctccgccggtaacttcct

SEQ ID NO: 10343 - DNA, 343 bp, Glycine max
  modified_base (171)..(171): a, c, g, t, unknown, or other
acccacgcatccgcccacgcgtccggttagttcaaacactaagttctgaaaaatgagttccaaagtttttcttagtctacttatgttcatggccactatacttttgatctcctccgaggttgcacccgatgatgcataccagaattttgacaaaacagatgggaagcgtantgcaaatggggtagatgaaagcaaatattggcgtggtggctatggcgactatggtggttggcgtggtggtggttggccttgtgggctatggaggctggcgtggtggctagggtggtgggcgtggtggctatggtggctggcgtggtggctatggtggtgggccgtggtggct

SEQ ID NO: 10344 - DNA, 215 bp, Glycine max
aggctttccacatgtaggatcttagtatattattaaaggcttacagtgtttttcgctttggtggggtttacttatagcatgttttttttccccaccttggcgattcaataagctatgtttccgtttctctatagtgattttgtactttgtagtaagaattttgtattgagttataaattataaatgttgaagaactatgatgattaccccactcc

SEQ ID NO: 10345 - DNA, 338 bp, Glycine max
agcccacgcgtccgcccacgcgtccgcgaaaaaaccttagggttcctctgttcttcttcgcccccaaaaaaattttctggctcagagaaattcaaccgttctcgccattgccgaagctccaactcctcgcatttccaactcttcacccaaaaccctttttgttggaacagagtttcagagagagacccttcacaacatggcaaaaacgaggccaggcagaaaagacttggattcctacaccatcagaggcaccaacaagatcgtaagagctggggactgtgtgctgatgcgcccctctgatacgagcaagccaccgtacgtggcgcgcgtggagaaga

SEQ ID NO: 10346 - DNA, 259 bp, Glycine max
agatattccattctctctgtgtatttccctacctctcccttcaagatgcagatcttcgtcaagaccctcaccggcaagaccatcacccttgaggtggaaagctctgacaccatcgacaacgtcaaggccaagatccaggacaaggaaggaatccccccggaccagcaacgtctcattttcgccggaaagcaacttgaagacgggcgttaccttgctgactacaacattcagaaggagagtactcttcacctcgtcctcc

SEQ ID NO: 10347 - DNA, 168 bp, Glycine max
caaacaaattttttccatgaactttgcatctttctatcatcacatccatggccacagttgtgaagctccacgttttcccagaaagtttgaaccaacacaaaacgaagttgctcaggaaaagccttgggccaaggccttcaactgggggtcttgggtttgggcaataaa

SEQ ID NO: 10348 - DNA, 304 bp, Glycine max
aagcttgctgggtttgccgtgttcgcgttcgttgttcgatcggagaagacccttttccctctcgtcacttgagatggcatcaagacaccgtgttcacacagaacccttgaatgctcgaagggggtacccgccagaagggccatatgctcgcgtgcctcccatgcctcgcccgccacctcctattcctcctcatccggctgtgttggaagaggaacttgaatttcagcatgccgagatgcggagactcgtggcagacaacaggaggttgattgatgaccgaatggcgttgcagcgagaccttggg

SEQ ID NO: 10349 - DNA, 86 bp, Glycine max
aggggctcttcacgagaagatctgatgaaagatgtaggtattggagatgagggagtcgttgcagggtgaggtgactcaggagttct

SEQ ID NO: 10350 - DNA, 423 bp, Glycine max
aagcggtttatgccgtcccaggctgatgaagagacgcatcagttgtcgtatctgcaaaagcacttggctaacattgtgtctcttctagcagagcctgtggagggagaaggcgatgagtccctggttttaaccatggatagatttgagcatcttgggttcctaattcagtttggtgataagggatcagaaggaaattcgtttagtcaatgttctcctttttttgcaaactcagaccctgacatgcctgctgttcctgttcctgccgcacaagttcatgattggcttctgcaaaatgtagcggctgctttggaatatatttctgaacggacttcttcaaaggaaaatggcccagctagtgcctctgatcaggatgttgccatgactgatgcaagcactgtctcatttaaggtctcaacaggtact

SEQ ID NO: 10351 - DNA, 356 bp, Glycine max
agattgttgtgactcgtacttcttcgtcgttatcctcatcctttgtcgtttgtgtgtatgttctttctctcagctgaaaatgtcttgctgcggtggtaactgtggttacagaagcgcctgcaagtgcggcaacggttgcagaggctgcacgatgtcaccatacgtgagctacatcgagtcaaccaccaccgataccttggtcatgggagtggcatcagtcaaggctcaattcgagagtgctgaatagggtgttcacgctgagactcatggctgcatatgtggagctcactgcacctgcaactcctgcacttgcaagtgacgtgttggagatctaaagcttcatgtatcgatggccc

SEQ ID NO: 10352 - DNA, 371 bp, Glycine max
cccacgcatccgaattttactttgccataacggtgagtttagagagggaataatggatggaagaggaggctgttgcatcgccaggtatgtacccggtgcatcgcacgggtccaccgtcgagaaaataatgcttaggtttcgtccaatcgctcccaaacccgccgccgcggccaccgcttccgacggctcttcgtccgagagcagtgacgcttttctcaaaaacggaaccactagaagaaagtacgtaagagataacaactacaccagcaaacgaagaatccgccggagaaagaacacttcctcgccggagaaaaagcagaaaccggtggtgactcttccgtggcttcgggaaactcgcgattcggaaggat

SEQ ID NO: 10353 - DNA, 404 bp, Glycine max
aagtagtattgcagtttattctatcatatccttgttcaaataattttcttttcaattacaataccccaatcccagaaacttatgttcatgaccatcctcaaggtcccaataacatttacttgaagacaattttgagttgaccttacagcctagttccacctacaaacacccttgatccttcaaagcctctcatagttccaatactggcaacaataatactcttgggcatctaaactatctccattcttttttccccctttctttgcagtggatttgcgaggttttaaagaaattaaatgcgtgtttatgtgctaaagagctaggtaattataaaattcatctcacacatacttctttttactaccttttatcttttagattttatttttgaattatccttgttt

SEQ ID NO: 10354 - DNA, 216 bp, Glycine max
aaaggtttctgtgtgttgcgagggaggattgtgatgtgagtgatgggaagcagcgaagaagtggttggcaaagaagaggttatcgcaaaactcaaggaggatggcgactttgacaggcttcgtttgaagatcgttcgcaagctcaaggacaacgaagagttgcgacgacatagtacctcaattgtgaagcaatcagtggcactcaatcgtgctgga

SEQ ID NO: 10355 - DNA, 228 bp, Glycine max
aaatgctctcaatctatttctagtttgtgagacatcagatgtcctcacgaatgctggtgcccatagccaagacgcaaccacaaagcagataacggggtcgtatgcaaacctcaaatgaagtgtacgaaacatacctcagaccttagcagcaccgtctgagtctgcggctcctgtctaaaggaacgcctcataaccttctccggcgcgcatgcccatttccaaacccat

SEQ ID NO: 10356 - DNA, 381 bp, Glycine max
aggaaaaaacgtaagaaatctaaattaacaactgatggtgaagaagaaaagagacttaagaagtccaaaaagtccaagagggattctcctgacatttatgcttccgatttggaatccaactcattagttgtgcaggatgaacatgcagaatcaaagacttgtgaaagtctggttgatttagaacagaaaacagcaagcaggagtaagatgggaggaaaaatatccatcactcctatccctttaaaacaggtctggatgataaaatcagaaaaaatgaaaaagggaaatcattggtccaaagattgtatccaccagctgatttttggctgcctcaggaggatgcaatattatgtgctgttgttcatgaatatggtcctaact

SEQ ID NO: 10357 - DNA, 411 bp, Glycine max
agatttattccgcgtctataagctttcttgttttgctattgcttgctccgcaatcataatttcatcatcgaatcaaatcaattttgaaggttcattataatggcggaagagataaccaagaacgacgtcggagtaacctccaaaaccaccagaagcagctccaggttctggcctcgttggattcccacttccaccgatcacatcatcgctgccgagaagcgccttctttccgtcgtcaagactggttatgttcaagagcatgttaacattggctctggtcctcctggctccaaagtgaggtggttccgttcatccagcaacgagccgcggtttattaacaccgttacatttgacagtaaaccccattctccaacgcttgtcatgattcatggttatgctgcttcacagggg

SEQ ID NO: 10358 - DNA, 170 bp, Glycine max
agtataatactcgcgctatagctccccctgttcttcctcaatgaccagatacttatggttttggagacaaatttttccgggcagtaaattaaaattatgactcagttattgtagagccctaggttgattcatcattaatcgtgatgagtaatcacatgaggctctacaag

SEQ ID NO: 10359 - DNA, 295 bp, Glycine max
acccacgcgtccgctttgccggcaaaggaagttccaccagaacttccggaacctgcactccgaatcaattttgctaaggatggcatgaaccgcaaggactggctttctctggttgccgtgcacagtgattcgtgggtgctctctgtggccttctatcctggagctcgtcttaaccgcaacgaaaggaaacgtttaattaacttgattaatgatcttcctactgtttttgaacttgtgacagagaggaagccagttaaggacaagcccactgcagatagtggaagcaagtctaggg

SEQ ID NO: 10360 - DNA, 241 bp, Glycine max
aggaaaaacatcagcccagacgtctgggattggcgaaaagataatagaagtagggtatatcatcacacaaactgtgtcacagattaggggaagtacgaacgcaggttacatacactggaagactctcatatacgaccatgtaacgcatgtcaatctcgaatcaaatcaacatgggatgccaaaatctgaataagtacattcgtcgatatgccaagatggcgcaattggacatgtcacagat

SEQ ID NO: 10361 - DNA, 399 bp, Glycine max
aggaagaatattaccctctctctataacattattcatcagatcagtttgatcttatgtaaatgaaggatttttagacaaaacccagattcactgaaaaacctcgaagcggagaaaaaaggcaacaacttttcatctctacgcaagtggttatggcggttgctgagaatgttggggccaaaatcggttcttcgagccagagcttggagaacgggttagtgtcggcggattcgggtgaggttgagaaatcgaaaaccagaggcgatcagaatctgaacaacggcgttttcaaccatcaagagagagttcccggtaccatgccagttcctaaccggaaatttcagctacaaggctcagatgcacgcaaatggggtgaacaatgatgggtatgggatgaatgg

SEQ ID NO: 10362 - DNA, 396 bp, Glycine max
agcccacgcgtccggtgatgccaaaggcattgccaaggaagttcaacgttccctgcacaaaaattttccaaaacaaggttccccccaaaattccaaaggctaaaacaatgttaagaatccacaaactaacggcaaaaaatttccccaattatggtgaataaaaccgaattcaagcccccgggttgacaagaaattaataaaacctagaattatggccattagatattgaaaaggccttatttgcgccacctttcatagtgcccccaaaattgatgggggttcttgttgccatcccgacaacatttcctaccattctttttcaccatattttctaaagaattctttttggttcgtgtaatttatatactgtttatacctagactatgaacgatttac

SEQ ID NO: 10363 - DNA, 341 bp, Glycine max
agcccacgcgtccgctcacacgtccgcctgctacttggtatcacaagtatggctggtcttggcaaaactgacgtttctcttacctctcaaattgccatcatgctttcagcttgagtacaacatttgacaattgcgtgagttcgtccactaggacatatcgtgtaatgttcggtgatgatggcccttgatactttggtgattctgaactccgatctccccaatgttctaacttgtcagcctctcatatctaaccctcgttagcagatgccccaagttatttccaaagggagcgtctagtggaatacatcataggggtgaaatctactatggtcacagacctg

SEQ ID NO: 10364 - DNA, 194 bp, Glycine max
agcattttcgtatttgcataatttattatgattttttgaaaatgggaacgtgcagttaagcaagagacaaggcggagaagactgtatattgcttaactgcaggtgcccatttgcgtagttgcataagttattatgattttttgaggagagggaagaggggggtcaccaggggaagagggcggccgctctagagg

SEQ ID NO: 10365 - DNA, 351 bp, Glycine max
agagaaaatgaaatgcctggaaatggctcttgtctcagtcaccaccgcaaattcctcgaagcatattctcttacgcactctctctcgttctcacgctttctccttctctctccaccgtcaatttcaaccactctcctcttcctccgccgtgctccgccgtcttccccggtgccacgccgcctcccccggtcccccactcgcaccttccgaaaacgattccagcaggcaccttaaaggagcagatgttgctacatctttatccaaaattcaagatagaatacagatcttctttgctgttcttttctggatgtctctagtcgtttgggcttccgcctgggatgggaggaatag

SEQ ID NO: 10366 - DNA, 383 bp, Glycine max
aagcaaaacaaaggaacacagaagcaggaacgaggaggagcactgtgtagaagaaatggggaagaagcagaacgagatccagaaaacggggctaggtcgagccctggtgaagcagcacaaccagatgatccaacagagcaaggacaagtctcgcttctacaggaagaagttccttgaatccttcaccgaagtctccgacatcgacgccgtcgtcgagcaatccctagaacccctccccgaacttgccgctgccgcttcaaccactctcatcagccttgaaccaggttccgtgcccgatgaaacgacgacgccggaagaagcgaggaagcagcagaagcaagaggaggcgctccacgccagcagcctccgcgttcctcgccgcc

SEQ ID NO: 10367 - DNA, 368 bp, Glycine max
agaactccaccttcaccaccgagctccgtgccggcaccgccaccttcctcaccatggcctacatcctcgccgtcaacgcctccatcctctccgactccggcgggcactgctccgtctccgattgcgtccctctctgctccgaaccatccagccctctctccgccctgctcaggccaatccctccggcgtcaatcagccccgacgtctcatggcaaattcaccccagtttaacccgggctacgcgggcctgcctcgaaaacacgcgcaaggacttaatcgtggccactatagcctcgtccctcattggctgcttcatcatgggcaccttcgcgaacctcgctttgggcctcgccccgggcatggcctct

SEQ ID NO: 10368 - DNA, 400 bp, Glycine max
agttcttccatttccattaaaaagaaaatatcataaatgggtattttcacattcgaagacgaaatcacctcccctgtggctcctgctactctttacaaagctctagttacagatgccgacaacatcatcccaaaggctcttgattccttcaagagtgttgaaaacgttgagggaaatggtggccctggaacaatcaagaagataactttcgttgaggatggagaaaccaagtttgtactgcacaagatagaagcagttgatgaggcaaacttgggatatagctacagcgtagtgggtggtgctgcctttccagacacagcggagaagatcacattccactccaaattggctgctggtcccaatggacgctctgctggcaagctcactgtcgaataccaaa

SEQ ID NO: 10369 - DNA, 217 bp, Glycine max
aggcgtcggaaggaagagaagatgagtgagaatttgatggagaaagtgagcgcactgggagagcgcctgaaaatcggaggcgtggaagtggggagaaagatgagcgaggggatgagctccaagagtttcaagctcaaggagttcttccagcctgggcccaatcaggccgaaaagcttgtggaggaagctacttccgaggccctggaagagcccgaat

SEQ ID NO: 10370 - DNA, 311 bp, Glycine max
agacactctattcaacccttcacattttctctcttctttatcttaaattacttttccatggaggaaagcaagaaacgagtccgggacgagtccagctactcacccgagtcccaaactcagctggtcgactctcccgagtctgaaagtcagcgggtcgactcacctgagtctaagattcgtcgagttgactcgtccgagtctcaactcgactcggtccttgactcggaagttcgtctacaagacgacatttttaacatactttacgacgccgataatgtgcctgagcgtgactcggttcagggtcttgactc

SEQ ID NO: 10371 - DNA, 262 bp, Glycine max
agggttgaagagcatatagagtttttgcgttgaggtggatcggaaggttaattagctagacggagaacgtaggtaaacggcgaagacggaaagtagggttagtttgtgatttgcacgtaagtgcgtgcaaatacggttacgtgcgagaagctcgtgactcgtgagagccaaaatgcctcacagaaccacatacattttcccgcgtcagtttccggagcgaggagggttggatgaatcgtccaaacacctattagatcacgag

SEQ ID NO: 10372 - DNA, 197 bp, Glycine max
aggtataagggaagataggtttatatagttaatcaaagtggtttggttttctttcatgaagttattttatgagctgatgcattgatacatacacagatgattcctttgttgagaaaattccaatgcagaagttgctattagctggcaatctgtctatgcctgtatgagtttcaatcaaaggttcccaactttgttgt

SEQ ID NO: 10373 - DNA, 339 bp, Glycine max
cccacgcgtccggtcagtgatttacatatcagtgaaagaaatcatgaatactccatcaataagcaacctgagtctgtgataccattacatagacctggtctttttgcagctgctccttcctctgatttttctaagtcttggtctcattcggcttcttcttgggaaatggccaatagcagcctaagccagaagttgatatcaattcagacacctccatgtataaatgcatctggtgctttgagtaagagttctcagtcacatcaaattaatgggatattggaagaatgctggcctctaaatatcaattccaagcctaaccaaggttttcgaagtgatgca

SEQ ID NO: 10374 - DNA, 398 bp, Glycine max
agatttaagtgtacctgcaaattttccatcaatttcttgagtgagccccatcagctgatttgtagtattctagctatacttgcaaaatcagtgtcactcagtaatggtagcctcttgatccatgatgctcacttcaactagttggtgcctttgcaaattgcaaattttcaactgaaatcctctcctctatgaaatctttctttttgcttatcacctttctgaaatgagaattgcaacacaacttgtaattgtaagttgtataaatcatgctgggtacaaggtcaaaagtattatttggataacactgtccagagaatccaactaacatgtcttaccatctgcctggtggctttaataaagggctcttttacattagtctgaataaatttgttagtttc

SEQ ID NO: 10375 - DNA, 390 bp, Glycine max
  modified_base (320)..(320): a, c, g, t, unknown, or other
aggaaggtccaccgaagctaaaggtgcttccacacgcagcagattttacctccataaacccttcgttcttcttcgtctccctttgcttctctcacttcccatgtctgagtggcttcgacgccttccctcgccagaatgctaactcatctccgccgcgcggctgccgcatgcggtggtgctacctccgaccacttcctcgctctcaggcagttcagctccgccgtggtcgccgtttcctccgtgtctgattccgatccaacacttccctcttcttccgattcacagagaaaagcatctagatggttgctatttctacctgnggcaatcacatttggccttgggacttggcagattggtagaagagaagaaaagattaaaatgttggaatat

SEQ ID NO: 10376 - DNA, 333 bp, Glycine max
aagcgcgagcaagcatcccaaaaccctagctcgcgttctgctttcgtcttttacatcaggatggagtctcaggtgaagcacgcacttgttgtcaaagttatgggtcgtactggatccagaggacaagtaacccaggttagagtgaaatttttggatgatcagaaccgtcacatcatgaggaatgtgaaaggacctgtgcgagaaggagacattctcaccctactcgagtctgaaagggaagcaagaagattgcgctagatggtttcctttggcttgcctccaaattcgaacaaaacagtgtgattttgttgattttaatggtagttggtggat

SEQ ID NO: 10377 - DNA, 399 bp, Glycine max
acaaaatcgccaaagcttgaaatctgattgcggcgtctcgcgcttccttcttccaccttccccgggtttcactgtgccgatgacttttcttctgagaaagagatcgtcatccatcgcgtgccttcgttttcccttcatgaaccggggcaggctttggcgttcttggaacttcttcttccgccactggacttgaccctacccccccccaattagggttatctatttcttccatttttttttccttagaaaaaaaaaacccgtttcttcttctctcgctgccgacgagtcttctttctcttcgaatctttctggctgctacattctgaagcacttcatatttcggtttttcattttcatttttaatttttttttaatatccgggatggccaaacaaaaatg

SEQ ID NO: 10378 - DNA, 401 bp, Glycine max
agatatagaacagaggctacttattatgagaattgcaacaccagcttattaactggtttcacgttcataagcgtcaatgggagtaattcgatgtttcgacataatattattcctccaactgggcctcgctatttcctctgcaccgttggaaatcactgtgaaagatgccagaagtttagtatcagcgttgagtctcatcctgattccgctgctcctactacactgtcattcagaatcttatctgcatttctctctagcttggctgtgtatttcttcactgttactagttagttactttgtcgtgtaactctacgaagattttgcattcttgttcccagcaattctttgaacatattcactatagatattatatgattgctgggttgtttgtttcaataaat

SEQ ID NO: 10379 - DNA, 240 bp, Glycine max
atccatctcccaggcttctacattctcacgccaccagtttcgggttcaaacaagttaacgaagaagaaaagggtcccaagggtggggacgtattcaagagcgttgcttcaagctacgatctcatgaatgacctaatgagtggcggtttgcatagattggggaaggataggttagtttccaagctgaatccgtttcctggaatgaagcatcttgatgtggctggtggaacaggggatgttg

SEQ ID NO: 10380 - DNA, 278 bp, Glycine max
  modified_base (252)..(252): a, c, g, t, unknown, or other
  modified_base (254)..(256): a, c, g, t, unknown, or other
  modified_base (258)..(259): a, c, g, t, unknown, or other
  modified_base (261)..(261): a, c, g, t, unknown, or other
accaagcgtccgattttgttccttctgtatttatcgattaaatggtattaaattttctgaatcatgctctttggcctcaattggaagtgtattcgttagttcacattgtatatgatgagatgatggggcaaaagggatgaggtgaggtgaatttggtcgccggcgattattttgcaatgtattttgagtagtattaagcctacaacggtacataatcgataaaatttagatacagtttcttatttaaaaaanannnannanaaaaaaaaaaaaacaaa

SEQ ID NO: 10381 - DNA, 389 bp, Glycine max
acaaaatgactcaagcccagattcaaccagttaaacttggaacccaaggctttgaggtactattaactacattacttgctcttattttgataattgatacaattaatctcattctaggtttcaaaattgggattccgatgtatgggccttactggagcgtacaatgaccctctccaagaacaggatggcatatctgttatcaagtatgcgttcagttagggaatcacattttttgatactgcggatgtttatggagccaatgctaatgaacttttggttggaaaggctttgaagcagctgcccagagaaaagattcagatagccacaaaatttggtattgcttcacgaaggttttcctgatatgaagatcaagggttcgcctgaatatg

SEQ ID NO: 10382 - DNA, 367 bp, Glycine max
aattcattctgtcatgcaatgaatgtcaattctgagtaagttaactgatttttgttggtcctgctctccttaattgcagagctgtgttcccaaagttaatatccactgcgatggttgtgagcaaaaagttaagaaactgctgcagaaaatcgatggggtttaatccgtgagaatagatgcagatgaatggaaagtggtagtggcacgagatgtggatccagcgaaactggtaaaaaagctaaagacgggagggaagcatgctgagatatggcacaaccagaaaggagagatgatgtacaatcacaagtatcccatcaaccagaacatgatgcaacttgggggaaaggacaataataagtctcaaaat

SEQ ID NO: 10383 - DNA, 347 bp, Glycine max
aaaatgcggggcaagaatggtaatctacattcacagccattaagatcaaactcttttcctttgcaacctccttttataccaaataattcattttccccaaatccccaaacttttgcaacttcagtagtgccacctagaactggtggacccagcttctctgcagcaccactacttaatgtaccaaatattagcaatcggaaaatttctggatatcctagtaatgctcatgatccacgccctgttaaacaatggaatggagacttgaaacaaagttctaacaataatgctccaagtcctgtaaagtcaattggcgaacaaactggacatatggtacagaacacacaaca

SEQ ID NO: 10384 - DNA, 345 bp, Glycine max
accacgcgtccgcccacgcgtccgcccacgcgtccggaatattctcagccaagggtaagcccttatcgtcttgcagctcatcttacatcagcatttgctatttactgtggcctcttttggactgcactttctgttgttatgcctgaaccaccagctgaatcactaacatgggttcgtggggcagctaaagtgaggagacttgcattgcctatcagcatacttgttggtcttactgcagtctctggtgcattcgttgctggaaatgatgctgggcatgcttttaatactttcccaaagatgggtgatacatggataccaggagacatttttgaaatgaagcctctg

SEQ ID NO: 10385 - DNA, 356 bp, Glycine max
tataagttcacggtcagttctgaaaaatgggttccaaggttttgcttgttgtagttatgttcatagcggctatacttctgatctctgctgaagttgcacccaatgaatacgaaaattttaacaaaaaagatgggaagcatgctccaaatgggttatatgataacaaatggggttaccgtggttggggtggtccttggtatggccgctggggtggcccttaataaggtggccgctggggttgcccttaataatgccgttgttggggccgtccctggcgtggtggtggccgttgtggctggggaagttggcgtcgacctaatggcaaccctcacaactaagaagaaaacttgctaaag

SEQ ID NO: 10386 - DNA, 361 bp, Glycine max
aaagactgctgtttttgttctgtcgactctgcagcagattgatcctgttcctggccaagtttctgcacttgttctttgtcatacaagagaattagcataccagatatgccatgagttcgagaggtttagcacctacttgccagatctcaaggttgctgtcttttatggtggggtcaacatcaaagttcacaaggatctgctgaaaaatgagtgccctcatattgttgttggaacaccgggaagaatactggcattgaccatggataaggacctttctttaaagaatgttagacatttcatattggatgaatgcgaacagatgctggaatcagtggatatgaggaaagatgtttcaagacat

SEQ ID NO: 10387 - DNA, 380 bp, Glycine max
aacaagcgtccgggttgaatgagctggttcaggaccagtctcaattgccacattaccacaatggacctcttctagacggcaaaatcgccgttaagctcatctggtatggtcacttcagatcatctcaaaatgctatcatcatcgatttcgttatctcactgtcatccccatcgtctcagagcagccaatcctctgttgccaagtcgtggaaaaccaccgagaagtactaccacctgagtcccaggaaggcttctctctccctctctctcggctatcagattctctacgagacatactcacttgggaagtcactaaccggcaagaatctcgtccagctggcttccaaaggctgacagaggaactccatcaacgttgttctg

SEQ ID NO: 10388 - DNA, 399 bp, Glycine max
aaaacgtctgtttgttttcatatacaagaccggtaaataggaagtagaaaggggcaagttcatgatgttagaagtagcaagtagagatgaggaaaggatgggaggatgaagacaaagtttgtgtgggacctcagaaaaacaaaaatctcttaattaattggtcttggtggaaatgatgatgggttctaaatcaagtgaaaataaggggttgtacagtgctttcattatcggaaaggcgtgttgtaaaattattttcagtcgtgctgttttggtttgttttgtggcattattcattgtatctgtttgtggtgaacgcggtacttctggtgccttctgttcttttggtctaataataataataataataataataataataataataataataataataat

SEQ ID NO: 10389 - DNA, 381 bp, Glycine max
acccacgcgtccgttttaaaggttttctatttctaaaacagcgtttgcgtttgtgtttggtcttagacgccgcacgccaccaccgtcactgtttcaatcctcgaactgtgtcttcttcgctttctggtctttttattaggttttgttcatcgatccatcgccaaacatgccttccagtcacttgcttctcgaggaacctattaggatggtctccatccttgagccatccaagcctagttttttctctgcaatgacaaagattgttggtaccctgggacctaaatctagatccgtcgaaaccatttctggttgcctcaaggctggcatgtctgtggctcgttttgacttttcatggcatgaccctgagtaccaccaggagac

SEQ ID NO: 10390 - DNA, 355 bp, Glycine max
acgcaacgcgtccgtaacaatcattcttcatcatctgcaaatacttatccctcactgattcatcatggttcggttcagcaacaatgttatcggactccttaacttcctcaccttcctcatgtccatcccgatcctggtggccggagtgtggctgagcaagcaaggcgccatcgagtgcgaacggtggctggagaagcccgtcatcgcgctcggcgtcttcctcatgctcgtctcactcgccagcctcgtcggcgcatgctgccccgtgtcatggctcctctggctctacctcgtcgtcatgtttgtcctcatcgttcttcacatcgcctatcacaatttcgctttcgtcgttacc

SEQ ID NO: 10391 - DNA, 432 bp, Glycine max
accatactggagcgtacaatgaccctctccaagaacaggatggcatatctgttatcaagtatgcgttcagtaagggaatcacattttttgatactgcggatgtttatggagccaatgctaatgaacttttggttggaaaggctttgaagcagctgcccagagaaaagattcagatagccacaaaatttggtattgcttcacgaggttttcctgatatgaagatcaagggttcgcctgaatatgtgcgatcatgctgtgaagctagcttgaagcgtcttgatgttgaatacattgatctctattatcagcacagagtggacacatctgtacctatagaggaaacagtgggtgaacttaagaaattggtcgaagaaggtaaagtcaaatatattggattatctgaagccacccagatacaattaagagagcaca

SEQ ID NO: 10392 - DNA, 293 bp, Glycine max
aacgtgtaccctggtctccaaccctcttcaactcaacagcatctccaccacgcattcacggaacgttgccgatcaggcgtgtgatcccagtggcctgggacgatgacgagagagccactgggtcgttgccttccaacacacccgtggcttcatgtgggacgcaccacacactgtcgcacgcatttacagcaacaagttacacgcgtacttcgccaagacgcctgacttcggcaattgatgtatattaatccaatctcattgcactgctatagcaaagacttggttacagtatc

SEQ ID NO: 10393 - DNA, 275 bp, Glycine max
agctaccattgcccatctccatgtggttccggttctgtttcagcactcgctcaccaagagtggtgatgaatacagcaagactccggtatcgatatctgatgtcatacactcgcgggttaaagcgctcacatttaggaatccatccacagttgctgattttgcccttgcccttaaactctcgaaaaggtataggttgcttcatccgcattatattgacctcgcatatcgagaccgagctcttcacgtttcaataaatagcttcgtaacctctcgac

SEQ ID NO: 10394 - DNA, 367 bp, Glycine max
attgatctcacctgatgatttgttgcaagcatgttctctgtgggagaagtttgatgtgtatgttttacattatcttctatttaaattacttctgttactgtgattcggttaattactgtagacatggtgagtgggtgacttcatttcatactccatgggattcatggtagttaaaatcgggattaaaaattataaaattgcagggttttacgatgttaatccctccgaatgactcagatagcacatggaattgtagttggagtgaaattgttgtaaaatcctgatacaagttgtaaaattgtgattttatgatttctcgaaactgacccagttgcgttttcaacccggtttcatattttacctgctt

SEQ ID NO: 10395 - DNA, 400 bp, Glycine max
actcgctcacggcgcatgttagcattgttgacaaaaaaacaaagcgcgtgggactcacgcgcctgagtcctcctcgtcctcttgcaaccgttgtcgacactctttctttctctctctaccttagttacgttcgtatctcggatccgtcgacgtttctgtcccttctttcggatccaccttcgttgtttcgatcgaatcttgttactatgatgagaagagatcaaatacgtgcacgtgagatgcgaaccccatccctggttgacctttgtgttcagaaagtaatagataatgtaaggtaccttggaaatgttggttctcttgaccatcatctgctcgagcagattttgccgcactgcacagctgaccagttgatgcatgtggagaagtccagcaagggaag

SEQ ID NO: 10396 - DNA, 406 bp, Glycine max
aacgtgtaccctggtccccaaccctccaaagctcaacagcatcgccaccagcatacagggaacgttgccgatctggtttgtgatcccagtggcctgggaccaagaagacgaaccagtgggtcgttgccttccaacacagccatggcttcatgaacgacgcaccacccactgtcgcacgcatttacagcaactagtttctctcgttcttcgccaagacgccccatttctgcaattgaactatattactccaaactcattccactgcaatggcaatgaatttgttagagtatcgacagtttaaaattcagtaaattgacggttttgagtgaaaatggggatttgagagttttaaggtagagcacaaacatgcttaacttcagtacctacgctggctagctagctcaag

SEQ ID NO: 10397 - DNA, 136 bp, Glycine max
attagcttgaggggggcaatgatgatgaaaggtccaatactgaaggacaagggccttccaacaatgagaatccgggaacttataaacgttatgaagtacttgccgcaatgtacaaggtcccaaccgaagttaattt

SEQ ID NO: 10398 - DNA, 356 bp, Glycine max
agccaacgcatctgtaagcatatgcccacgttgatcccggtgggatgcttccaacatctcattaattggtttaagcgccaaagtttccgaatttgcataacggtattgctagttgggcttacagtgcatttgggtcacatcctcgctgttcatctattcaacccacgacactgcacatctgggcataaggcaaaatctcacgccaatttaaacattgatgacgcatcaaaatcctacagtaaaacagaagtttcattgcataacagtagaacagactgttggataatcatcaagaacaacgtacatgatgttacctcacatgtggaagaatatccaggtggtgattccaatcgtgt

SEQ ID NO: 10399 - DNA, 135 bp, Glycine max
aaccaagcgtccgcccacgcgtccgatagttttataaaaaatgaaagcacataggcataccatcaatgaaaatctgggacatgataaacgtaatgaaactacttgctgcattgtacaatagtccgaactgatatt

SEQ ID NO: 10400 - DNA, 414 bp, Glycine max
agtgaaagctggcgtgtttgacaaaatgagggaatgaagactattagctcattctctgaatattctgacatccgccaccgccacgtgtcaacctaattgggatccacagtcttcttccttcttcagctccacgcgccctctttccctttcctgtttctagctgttaccgacgtcaattgttactccgattatttattcttatttattttccccatctcactctccttcgattcgggatcactcacaacacaagtactactaccttggaatcaatttttagggtttctgattcctttatgtgtttgtctcgcaattgatcatcgcaaccacaatgtccggtcccctcgatcgttttgccagaccttgctttgaggggttttcgggcagtgatgagaagaaggagaggagatctga

SEQ ID NO: 10401 - DNA, 408 bp, Glycine max
cccacgcgtccgggaataacccgtggacttacactgatccacttcgtgcaaagtataatgacaatatggcatcagtgaacgcatctatattgaaacctacaggaagcaggaaattataggattgggaatctcgatgaacttgaagttacaaaagtatgcatgaagatatcatcctttcagttattagactttggagaaataccatagtagatatgtccttgtcctatgtatgattgtgttctgtcttaaacagaacgtaaagtaattcatcacggttggatcgtgtatgttgtggaccatggaacgcaattgtgacgagaattcatcactactttaactggatattcttcccgagttaatgaatcatacctgatttagagtcctgcgagcgcatcctaatgactaggt

SEQ ID NO: 10402 - DNA, 207 bp, Glycine max
atgagtctttacagtctcagaaaattgttaaatattttttttgcctgtttaagttttttgatagattacagcattaactaacaaaattctctctgtttacatcatatagagcttttgagtcactatcctttttggaagcacattatacaattgtcattcgtgcaatatccatacttttacaggttacaagcctaaaaaaaataaaca

SEQ ID NO: 10403 - DNA, 51 bp, Glycine max
aaaaaaaaaaaaaaaaaaaaaaaaaaaaaaaaaaaaagtttaaaagctctt

SEQ ID NO: 10404 - DNA, 343 bp, Glycine max
acggattgagtttccggttatctctggaatatggagtttgtgtaggtcgagagagcttttgttgaatctcgaacgggacatatacggaacttgaatcatcgaggcaaaagaaagctcattgtggatgatcagttctgctgcttaatttaacatggattgttggctttctatggacttcctctaaaacactcactgggtcacggatctaagcaaccccttgcatccttgcctgagggattttagttgtaaatggacaccttgcctgttgacgcttatgcagtagcatatggatacactatagctgtgtatgtgagtacatcattcgccatggaatcagcatctg

SEQ ID NO: 10405 - DNA, 303 bp, Glycine max
aagataagattactgtcgaaaatctagaaaatagagcacaaggaggggctgagccaatggagatctcccagagccccatgtcgtcgcctgatgatactccatgtggttatgtaaaacttttgaaaggtcatacatcagaggtttttgcttgtgcatggaatccatcagctccacttcttgcatctgggtttggagattcaacagctcgaattttggaaattgctgatggagcttgtgactctagtgtgcaaaatgaaccagttaatgttgtggtgctgcaacacttcaaagaaagcaccaatg

SEQ ID NO: 10406 - DNA, 84 bp, Glycine max
agaaaaaaaaaaaaaaaaaaaaaaaaaaaaaaaaaaaaaaaaaaaaaaaaaaaaaaaaaaaaaaaaaaaaaaaaaaaaaattaa

SEQ ID NO: 10407 - DNA, 382 bp, Glycine max
  modified_base (331)..(331): a, c, g, t, unknown, or other
ggatcacgcgtccggttgtctacaaggctatggataagaagctggagaactagtagcattgaagaaggtgaagatgaacatagagagggatggatttccaatgtcatccttgagagaaataaacattctcttgtcttttaatcatccctccattgtgaatgttaaagaagtagttgttgatgattttgatggtacttttatggtaatggagcacatggagtatgacctgaaggggctgatggaggttaagaagcatccctttagcatgagtgaaattaaatccttggtacggcaacttcttgaaggtgtcaagtatctccatgataattgnggttatccatagggacttgaaatcatcaaacatcctgctgaaccatgatgg

SEQ ID NO: 10408 - DNA, 398 bp, Glycine max
atccaaccacgcgtccgcacacagctagcagatattacatacacgtgaatcactaattaagccatggagaagaaatcaataactgggttgtgcttcctcttccttgttctctttgttgctcaagaagttgtggtgcaaactgaggcaaagacttgcgagaacctggctgatacatacaggggtccatgcttcaccactggcagctgcgatgatcactgcaagaacaaagagcacttgctcagaggcagatgcagggacgattttcgctgttggtgcaccaaaaactgttaaatggatccattcactccaacgtgaagaagatgcatgcagcgctattttataaaaaataaaactacaatatactatatataataagactggcgctgcatcaatgacct

SEQ ID NO: 10409 - DNA, 394 bp, Glycine max
  modified_base (14)..(14): a, c, g, t, unknown, or other
  modified_base (75)..(75): a, c, g, t, unknown, or other
aacgcaacattaanaaaagagcaagcacgcctaacttcggaacccaccaagagacagctgcactgaacaaaacanatttaaattacgatattcgtttcaagcagaggagaagggacacacagttcacacaataataacatcttcattcgtttacccacttttctttacgaccttattccttcgattctgtcttagaatgacgaattcactatctccctgaaaccatgactgtgagggacagtcatcatcattgagccttacccagaactaaaaaagcaatctttatcacatatcacaattcacaaagcttctgtggttgatgggtacaaggggaatccaactgtttgatgagaaaagagatgtttttttctctgtctgcaatttggggtttgaa

SEQ ID NO: 10410 - DNA, 345 bp, Glycine max
acgcccacgcgtccgagaaaagattgagctttcaggagagagaaagaggaaaaagacttggaatttttttttttggggtgttccaatggttgaactggaaatccaaagaagggtgtgaaaaaaattgcatctttgtttggtgggtgtctctgaaactatgatcttgtgaaaacccacaaaggaaaccttcgatgcgcgttggtagatagagattgctgttgggattttcagagaaccgttgattgacaaatgaacggtggtgatgaagtcgtggcagctccggcgggtccaccgcagccgctggagtggaaattctcgcacgttttcagggaacgtacggcgggg

SEQ ID NO: 10411 - DNA, 403 bp, Glycine max
atcagttccttgccttctacaaattctaatgcaattcaagaaccagttgctagagacattcatgggacctcagctaagttggaagagccgaaggaatccgagtgcaaagttcagactgatctggagctagattctgcaaagggttccgaaattgaacttgcaaattcggggaaacctatagatttattggaagaggaagatgcatgcccaatctgtttagaagaatatgatgcagagaatccaaaactcgcaacaaattgtgaccatcattttcaccttgcatgcattctggaatggatggaaagaagtgaaacttgccctgtgtgcgatcaggatttggttttcgaccctcccattgaataatacatcaacataggagttcaaatatactgtgtagtgtttg

SEQ ID NO: 10412 - DNA, 418 bp, Glycine max
aacccaagcgtccgcccacgcgtccgcgataagtctgatctgaagctggatgttttcatggttcagcacgacatggaaaacatgtacatgtgggttttcaaggagaggccggagaacgcgctgggtaagatgcagctgaggagttacatgaatgggcattctcgccaaggggagcgcccgtttccgtttagtgctgacaagggttttgctcggtcccacaggatgcaacgaaagcattatagaggactatcaaaccctcaatgcgtgcatggcgttgaggttgtttccacacccaatctgatgaccctggatgaggatgatcgaaaaaggtggatagaactcactggccgagacttgaattttacaattccaactgaagcaagtgatttcagttcatggagaaatcttcccaacacga

SEQ ID NO: 10413 - DNA, 402 bp, Glycine max
acgtacggggtcatcttcagcttctctcactttgatgcaacctttaaattagtccaatttcaattattcaaagacagtcccacccacttcccatctttctctcttcttttctgtgcagttgaggaaaaaaaactatgctccaatccaacaacaagcaaagaagcttctcctcacttttcttctttatcttttctctctaagccttttgttctctctacttcattcatgatgagtttgtgttcctccaaaggaacctgttctggtgacaccaatgcacacgtttcctcttctactgttggaaattactcatctgacagaaaaaggcacaacaacaaattcataacctttttgagaaaaaccatgtgggagtatgctttggcatgtgttggtgttgttccttgt

SEQ ID NO: 10414 - DNA, 358 bp, Glycine max
aaccaactcgtcagggaaataattgatctttgataatgcagggaggaaagaaatctggatattccaccaaggaaacagctgcaaacattggtgcttctgccaaagctggcatggataaaaccaatgccactgtccaggacaaggcagaaagaatgaccgcacgtgatccgatgcacaacgagttggcaacccagaacaaagaggcaatgatgagccaggcacagctggacaagcacgcgtcgcgtcagcataacacggctgctaagcatgctgccacggcagggcacatgggacaacccatggggaaccatcagacgtcagctatgcccggtcatggaaccggacaacccacgggcca

SEQ ID NO: 10415 - DNA, 412 bp, Glycine max
  modified_base (351)..(351): a, c, g, t, unknown, or other
atcagggcggcacgatgagcagcagccatttgtaaatgggagctgtggagtagtgaacactatttatatagtgagagaaccagatatcttaccttccatcttaaatactgaaacacctggtcgatcacacatggaggttgacaacatggaagctaatcccaggatgactgtgtctgatctggaggtttctcgccaccgtatatcggtattcctgtccacgcatacttcatatgatttgcttcccgagtcaggaaaggtcattgccttggatataaatttaccagttaagcaagcattccatgttctttacgaacagggtatatctatggctcctctatgggatttttgcangagccagttcgttggagttcttagtgcaatggacttcattctaatattgaaagagctgggg

SEQ ID NO: 10416 - DNA, 334 bp, Glycine max
atcaggttagctagctgctacctcttggctttttgtcttgctggttcaataacagtaagctctaagccaccgccaagttccattcccttcttttcctcgctttctactttttggttattcttcttcaccttggttatcctgccctacccaaaagttcaatattttttttgcagcttcaataccccctaaatcccaataaagatataaagatatacatatacacacgtttatatgttcatatagtatatggtacactacatggcacaacaatattcatcctcaagttggagctgcaatttatccaagatggcacggcttgcctttgtgctccctg

SEQ ID NO: 10417 - DNA, 166 bp, Glycine max
acgcccacgcgtccgcccacgcgtccgttattaacataattatccctctttacaattcagtgtgaattctgaccttccagtagtcctgtttctacttttgcaaaccccagtttagaatttgtgagccccaaacgtgaatactaaaaggtttcggatttaccttttc

SEQ ID NO: 10418 - DNA, 420 bp, Glycine max
aatcagccaccccttctaatttctctcttctctgaagctatcagaggctagagttctcctattcagtatctcatgtgcttcaaagaatggctgttagctttactgggcttgacatagaaggcagagaccagacagaagagaacatgacaatatgacatctatctagtggagtaataatttatttgtgatggatgaaactgaagtggaaaatcccatattcatggaaattaattctgaagataagagaaatgaaaatcaagagtttgcatcagagaaaggagaaggtagcagtgttgttttctcaagagaagcaccacttatgaggaaagagtcaagaatgtccactccttattgttgcaatgctaagaagctcaaatccggggctgttacaatagattgtgatcttggaagtaatgagaa

SEQ ID NO: 10419 - DNA, 415 bp, Glycine max
atcaatgcacacgtcagaaaatgtggtttcttggttggaaagggcaatcggggttctcagcgtcctccacagccgaacaggtcactcaagggattgatggaaacgttctcacagccatcgtcacaggagcaacaagtggccttggtctggaaaccacccgggttcttgcattgcgcagtgtccatgttgttatggcagtaaggagtgtggacagtggtaagaatgtcaaagaaacaatacttaaggaaattccctccgctaaaattgatgtcatggaattagatctaagctctatggcatcggtaacgaaatttgcatcagattttaattcttctggtcatccactcaatatcctaatgtaagaacttttaattctatctgttttagatatcttgtaattaggtaatgtttttgt

SEQ ID NO: 10420 - DNA, 401 bp, Glycine max
aacttatcatatcgttaacaagaagaacacgtaacagaaagacacatccaaaggaagtctctggttatttcaattaattaagagaaaggactcgaatagttggttattcatggaagacaccgcacaacaaatcaagcgtccttttggtgttcctgaaggaccagaattcactgttgggttggatgtacctttgagcggcgccaaaaatatcttggcgtttgcggagtgataagtggttatcttctttaattgctagaggcatttataatagtcaagaaagtgaggttcctcttatagatctattttgtactctgctagcccatgctgaaccggagcaacgtattatagcatacttgggatgaagttgttgtgctggcatcatctgatttgtcattacaact

SEQ ID NO: 10421 - DNA, 396 bp, Glycine max
acgcggacgcgtgggcggacgcgtgggtaaattctgtagctgttgctccaaatgatagtttagtatgtagtggttctcaggatcgtacagcttgtgtttggagacttccagatctagtatctgtagttgtatttaaaggtcataaaagaggaatttggtcagtagaattttctcctgttgatcaatgtgtagtaacagcatctggtgataagacaataaggatatgggctatatctgatggctcctgtttgaagacatttgaaggacacacttcaagtgtgttaagagcattgtttgttactcgtggaacacaaattgtttcttgtggtgctgatggcttagtaaagctgtggactgtaaaaactaatgaatgtgttgctacttatgattatcatg

SEQ ID NO: 10422 - DNA, 373 bp, Glycine max
acggcagcaattcacactggtctttgcttctcgttactcatttctcacctaactttctattcttctcagtctcagatcagaaccttagccatggcagcgttccagaagatcaaggtcgccaaccccatcgtcgagatggacggagatgaaatgactagggttatctggaagtcaatcaaggacaagctcattttgcccttcttggagttggacatcaagtagtatgacttaggccttccttaccgtgatgagaccgatgataaagttacaattgaaagtgcggaagcaactctcaagtataatgtggcaattaagtgcgcaactattactccagatgaagctcgtgtgaaggagtttggtctgaagtcaatgt

SEQ ID NO: 10423 - DNA, 418 bp, Glycine max
  modified_base (182)..(182): a, c, g, t, unknown, or other
  modified_base (328)..(328): a, c, g, t, unknown, or other
agctattcctccctcctcacaaacttcactttcttcttcttcattaatgtctcacttcaagggcaagtaccatgatgagcttatcgcaaatgctgcgtacattggcactcctggaaagggtattcttgctgctgatgagtcaacagggacaattggcaagcgtttggccagcatcagtgtanagaacattgaatccaacatgcgagctcttagggagctgcttttcactgctcctggtgttcttcaatatctcagtggtgtcatcctctttgaggaaaccctctaccagagcacagctgcatgcaagccctttgtgaatgtcttgaangaagctggtgtgcttcctggcatcaatgttgacaagggcacagtcgagcttgctggaactaatggagaaaacaccactcatggtctagat

SEQ ID NO: 10424 - DNA, 117 bp, Glycine max
cccacgcctccggagatgtggtatacatatattcttgtcccctaatatgttaaattaataaatattacatattatgggacacatctatctgtatctcacatctctggacgcgtgtgt

SEQ ID NO: 10425 - DNA, 340 bp, Glycine max
atcaagcagttcattcgatcatatccttgttcaaataattttcttttcaattacaataccgcagtcccagaaacttatgttcatgaccatcctcaaggtcgcaataacatttacttgacgacaattttgagttgaccttagagcctagttccacctatacaaacacccttgatccttcattcgtttttgagttgaccttacctagctcaaatactggcaacaataatacccttgggcatctgaccaatctcaatccgttttttctgccttcctttgcattggatttgcaaggttttaaagaacttaaatgcttttttaggtcctaagaagctaggtaatt

SEQ ID NO: 10426 - DNA, 293 bp, Glycine max
aggggaagaaagagggcaacgcagatgaaacgaaggtagaaaaacaaaattgacaaaaaagttcgatcatattagggttagggtttttctacgcatcgaatagtcactcaaattcgactcaaattccccaaattggagaaacctcaacattactgccttgctagggatagaaagaacgggtggcatcaaaagactcaaagcagtggaaatgctgggagaataaatagttgagtggaaatgagtaggttgtctttcaggcctcgaacacttgacattcataagaagctccccat

SEQ ID NO: 10427 - DNA, 398 bp, Glycine max
acgcccacgcgtccgcccacgcgtccgattttccaatccaccttcccttttaacgataccaaaaatagcgttctggagtccaagatctcattcattgtcctttccttcccttcccttggcccaattgagaaatgaattccaacttcaatttcgatttcgatctcggcatcggatccaaccgtcccaaatctcttaacgaccagaaaaaccccaaaccaacttcctcctattcctctgcccaacccgcatggacccaccgacccgcccccactcagaccaccgccttgcccggtgggcccccctccatggtcggagacatcttcggcaagagttggggaacccctcaaccttcttccgcttccaaaaacatcgggatcgttaataagaaccctaacctt

SEQ ID NO: 10428 - DNA, 387 bp, Glycine max
acgattccattctctctgtgtatttccctacctctcccttcaagatgcagatcttcgtcaagaccctcaccggcaagaccatcacccttgaggtggaaagctctgacaccatcgacaacgtcaaggccaagatccaggacaaggaaggaatccccccggaccagcaacgtctcattttcgccggaaagcaacttgaggacggccgtacccttgctgactacaacattcagaaggagagtactcttcacctcgtcctccgtctccgtggtggcatgcagatcatcgttaagacactcaccggcaagaccataaccctagaggttgaaagctccgacaccatcgataacgtcaaggccaagatccaggacaacgagggtatcccccgga

SEQ ID NO: 10429 - DNA, 384 bp, Glycine max
aacgaacccttgggggttgtcctcaatttccgggaccaggtaaaaaacaattttaaaaacctgtcaaaaaaaggttcaagaggaattttgccaaacatgaattcaatttacattcaagaaaaactggttcctgtcatccgcggcctgatcacttcattggagagtgtttcacatggtagtagtaattggagagatgaaacttccttgtcttttcaagtggatctgtctccgtcaccaagtaatttgaatggacaaattgaaggtgctagttcaacaaaagccccgttattgggaaaatctaacaagccagataagaagaaagtaaaagatcatgtgattgctatgagagacgttgagttggaggagcatcggaaatctacagat

SEQ ID NO: 10430 - DNA, 341 bp, Glycine max
atcagaaacttctcagccacatctgaaagatgtacaagcaaaatctcatagtggttctgctagaagttgcactaaagttcacaagaagggtattgcacttggtaagtcagtggacctcacaaaattcagtgattatggggaattaattactgaattggatcaactattcgaatttggatgtgaattaacttctccacaaaaggattggcttattgtctacactgataatgagggagatatgatgcttgttggtgatgatccgtggcatgaatttgttgcaatggttcgcaaaatttatatctaccccatagaggagattcagaaaattagcccgggtacct

SEQ ID NO: 10431 - DNA, 170 bp, Glycine max
atcaggttgatgcgtgcttaaacaaaggcaaaatgaaaattttgaaaaaattattattgaatgttaaaaatcaagcaacccgttcatacgcatgggtaatctatatctatttatattattgcacgtcgcttgaacaagagcaaaatggaaattttgtaaaataagccatc

SEQ ID NO: 10432 - DNA, 412 bp, Glycine max
atcaggcacaattacagtgactccgcttggttcctcttcttcgatcttcggtttgattctgcgtttgttcacatcatggccaccgcttcagtggcatttaagtccagggaggaccaccgcaagcagattgagttggaggaggcgcgtaaagcggggcttgcgccagctgaactcgatgaagatggaaaggaaatcaatcctcacattccccagtatatgtcctctgctccttggtatcttaatgctgagagacctagtttgaaacatcaaaggaaatggaaatctgaccccaattacaccaaatcatggtacgatagaggtgctaaaatctttcaggcagacaagtatcggaaaggtgcttgtgagaactgtggagctatgacacatgattccaagtcatgcatggaaagac

SEQ ID NO: 10433 - DNA, 401 bp, Glycine max
acgtaaaatacagaccaccaatgttttgccaaagcacgggccaacttttctagtttatgtggaaaccaaaccaaacctcatttgtattttttcctattggaaaaatctcacttttaaattgtttctattgcagggactgactgacaaattcaaagaaaaggatactgcgtattctggctctgcaaccttcacctatgaatcgtttatgctgacagtcctgccattcctaatagcttaggaaattaatggtgtgtgtgtggttggtagggtttgtaaatggccaggctgtatttggtttgaaaatgtgtggtcgaattactttactattgccagcctttaatatgctagtactccctgttgttttactctataagtaaccagattcaaaatactatggtttt

SEQ ID NO: 10434 - DNA, 393 bp, Glycine max
acgcaaacatgtccaccgcaacaactcacgtgctcgcttatcccttccctacctccggtcacgtgatccctctcttagacttcaccaaaaccctagtctctcgcggcgtccatgtcaccgttctggtcacaccctacaacgaagccttacttccaaaaaactattcccctcttctccaaacgcttctcctccccgaacctcagttcccgaacccgaagcaaaacaggctcgtatccatggtaaccttcatgcggcaccaccactacccgatcattatggactgggcccaggcccagcccattcctcctgcggctattatatcagatttcttcctcggttggacccacctcctcgcacgtgacctccacgtgccgcgcgtagtcttctccccct

SEQ ID NO: 10435 - DNA, 367 bp, Glycine max
  modified_base (296)..(296): a, c, g, t, unknown, or other
aaccacgcgtccgccacgcctccgctttcttttgttcaggggtgatccaacagactccatttacatggaggtagaacttagaagattatccttcctcaaagaatcattttctgatggaaaccagtctgtgagcgatagtcagacaatcacactagcttcaagcgtgaaagctcttcggcgagaaagaggaatgcttgtgaagcttatgcagaggaggctttcggagaaggagcgaagaaggctatacgaggagtggggcattgcattggattcaaagcgcaggagggtgcaactanggaaccgtttatggagcgaaaatgatatgaaccacgtaatgcaaagtgctacaatagttgccaagttagtg

SEQ ID NO: 10436 - DNA, 388 bp, Glycine max
tccagtttggaattgcggcctttatggaatcctcccgtgactaagaagggccatcacaaaatagaacttaaggtaaatgcatcaaccaatttgtttgcaatggcagttggcataaaacagaaagatcttgtgagcaagatggttaaaaagtttatagacagtaatttcgtcgtgatgctcttccactatgatggtattgttgacgaatggaaggatctcgagtggagtagtcttgtcattcatgtgtcggcaattgatcaaagcaaatgaatatgattatattttcctttgggatgaggacctaagagttgagcatttccatccagataagtatgtttctattatcaaacgtgaagggctggagatatcacaaccagcactggatcct

SEQ ID NO: 10437 - DNA, 413 bp, Glycine max
  modified_base (370)..(370): a, c, g, t, unknown, or other
atcagcccacgcgtccgcaaaaccagagtggttctagtaatccggtgctgctagaggatgggaactagtgaatggcatatcgagcgaagatctagcttcggcactgaatcccccttagcaagagaggcaggaaatgtgcctgaaactgggtcactctctattgttgtgcttggcgcttctggggatcttgctaagaagaagacatttcctgcacttttccatctataccggcagggattcttaccagcagatgaagttcacatttttggctatgcaaggacaaaaatatctgatgatgaattgagaaaccggttgcgtggctatcttgttccaaacaaaggtgcttcttcccaactgttggaggatgtanagaaatttttacagctgatcaaatatgtaagtggctcctatga

SEQ ID NO: 10438 - DNA, 393 bp, Glycine max
acggtcaaagatgctccccagggaccaatagttcgaaaggatcaggctattgagaacaaagaagttttggctattgaatacaaaaagacaacagaagtggaagaggaatgtccaccctcaccctcaccccctccacctccaccttctgaacctgtgaaagtggaagcaccaccagtacaaccacctcctgatctgttgaatttggaggatcctgttccagctgctgcagagttggcagagaagaatgcattggctttagccattgttcccgttgctgttgaacaacaaccttctgctgtttcaaatcaagcaaatggaactacaggatgggaattggcccatgttactgctcccagttcaaatgagagtgccacaacagctagcaaactggct

SEQ ID NO: 10439 - DNA, 420 bp, Glycine max
aaaaaaaaactaattgcaaagatgaataccaagccctttttctccttgtgcttactctgcgcactgcttctcatctgtgttgtggcaactgagccatccaaagatgcgacacaagcagaagaaccaaagacacggccagatgcctggagaagtggtggaagtggaggacatggtggaagtgggggacatggtggaagcgggggacacggtggaggctggggacatggtggaggctggggacatggcggtggacatggcggaggatgcaaatgctgcggtcgaaagggctgcaaatgttgctgaagtaaaaaaacacaaacatgaactgaagacacacatacgtgtgtactccatgtaataagtatagtatgtagaattaagaaataaaagcatggaatctatatccgtgctaaggctgtc

SEQ ID NO: 10440 - DNA, 406 bp, Glycine max
  modified_base (373)..(373): a, c, g, t, unknown, or other
aatcagattacataaaagatttatcctgaaaattttcagatgcttgctaattattattggggttaaacatctgcagtggattaccttcatggattctgaaggacgagtcacagattcagaagctttgagaaaaagagtattttatggtggacttgaccacaaattacgaaatgaggtatggggtttgcttttgggatattatccatatgaatcgacatatgctgagagagaattcctgaagtcagttaagaagtcagaatatgtgaacataaagaaccagtggcagagtatatcctcagcacaggctaaaagattcacaaaattcaaggaaaggaaagggcttattgagaaagatgtggcgatgataatccanatgtaaatgttctgcgagatatcctgttgacat

SEQ ID NO: 10441 - DNA, 405 bp, Glycine max
agcaaaagcaaaatttggggcgagaaagcgaagcaccaggtggttttaaagtgctcaagtttcactaccacgcccactgttagatcttctcctttctcacctcttccaacaatacatcttctgcctactgctaggtgaaatgcagaatccagatgcaaatcaacttcccgaagttgattcgttgccagatgggtttgttgagagtactacagagcctcttgctcctgcaactccatctcctgaacaagagaaacccctgaatagttacaaggatgatggtccctctgaccttattcattctaatgaacgatcaaatgatttgggagaaaaagagtttcaaaacaatcatgactgctcagcggagagtccctctagaagctctatgcagcagacagaaagggcaca

SEQ ID NO: 10442 - DNA, 416 bp, Glycine max
atcaggggttcggaaggtgaagaggagaaaaagactatggagggtttgaagaagagaaagctggagctggacgaagcaggcaacggtgaattggcttccacggaagagcttcgcttcctcattgaacctctcgctaaaccccagctcgtcgatcttcttgctaaactatggtcccaatatccttcaattgcagaagaaataaaaagtattgcaagtgcagatcctgcccatcgaaagctttttgttcgtggcttggcctgtaataccacttcagaaacattgcgtgctgcatttcaagagcacggagaaattgaggaatgagctgtgatctttgataaagtgacaggaaaatcacgtggctatggatttataactttcaaaaatatggaatcaactcagcaagcattgagagccct

SEQ ID NO: 10443 - DNA, 401 bp, Glycine max
  modified_base (389)..(389): a, c, g, t, unknown, or other
acgggaatacttcattgatgtgaaagctgttcagattgatggaaatgttgtgaacttaaagccttcccttttagctattgacaacaagggaaatgggggaaccaaactcagcaccatgagtcctttcactgaattacaaacaactgtctacaagactttcattcgagatttcatcaagaaggcttcggacagaagattaaagagggtggcatcagtggcaccatttgaggcatgttatgattcaaccagcattagaaattcctcaactggactagttgtgccaactattgatctagtgctgcgaggtggagtgcagtggactatttatggagccaattcaatggttatggcaaagaaaaatgtagcatgtcttgcaattgttgatgganggacagagccta

SEQ ID NO: 10444 - DNA, 420 bp, Glycine max
aacccacgcgtccgcccacgcgtccgcccacgcgtccgcccacgcgtccgcggacgcgtggggttgttggaaaaggccaaaaactatgttgcggagaaagtcaccaacatgcccaagccagaggcgagtgtcaccgacgtggacttcaagcgcgtgagccgcgacagcgtcgagtacttggccaaggtctccgttcagaacccttattccacttccattcccatttgtgagatcaagtactccctcaaaagtgctggcagtggtgaagggagatagcagcaggaacaatacctgacccagggtcattgaaggcaagtgacacaacaatgttggatgtgccagtgaaggtgcctcatagcatattactgagcttggcaaaggacattggtgcagattgggacattgattaccaattggata

SEQ ID NO: 10445 - DNA, 412 bp, Glycine max
atcagagagaggaagttttggggtttgaatctatagaatagaatcaaaccaaattgaaagaagatcgatcgatcgatcgatggctctggtcggagttgaagtgaagcatgcggcggagggcgcaccggaggagaattgctccgccaagcccaccaagcagggcgagggcctccgccactactattctcacaacatccacgagcatcagctccttctccgtcaaaagacgcataacctcaaccgtcttgaggctcagagaaacgagctcaattccagggtgaggatgctgcgcgaagaattacagcttttgcaggaaccaggctcttatgttggtgaagttgtcaaagtcatgggcaagaacaaagtccttgtcaaggtcccacccagaagggaaatatgtcgttgatattga

SEQ ID NO: 10446 - DNA, 381 bp, Glycine max
acgtacggtttattctatcatatccttgtccaaataactttcatttcacttacaataccccaatcccagaatcttatgttcatgaccatcctcaaggtcccaataacatttacttgaagacacttttgagttgaccttacagcctatttccacctacaaacacccttgatccttcaaagcctctcatagttccaatactggcaacaataatactcttgggcatctaaactatctccattcttttttccccctttctttgcagtggatttgcgaggttttaaagaaattaaatgcgtttttatgtgcgaaagagctaggtgtgatatttttttctgctgaaaaagttcacttcagagagattgttcacagttcaaacgtgta

SEQ ID NO: 10447 - DNA, 384 bp, Glycine max
agcccacgcgtccgcccacgcgtccgcacttttctaatttttccctcgacagcgacgacgacgaccgcgtctgttcgatcggagtgggttttgagtggttgccgaatagttctgaattggagaaagaaggatatagaggaagaagaaggataggttgggaaagaaagaagaacaagaaagaagaaagaagaaaaaagaaaaaagaaaaaagaaaagaaaaagtaatcttagccatagatttaaaatcaaagagatctaagggtgcaagataattttcccacacggtgggagaccctataaaagtttccaccctagtctgttaaatattctctattcgattcgaaactggcactcgcttcgcttcgcttccacagcccacgcacg

SEQ ID NO: 10448 - DNA, 399 bp, Glycine max
agctctcatcctttacaaaaacctaaattctgcgaagcaccgttctctacatatccaaacgccaccgtttttctcttctctccgtcttccgaagcttcgagaatcatactgctgggatgtctggggaagtttttgatggacaagatgcaggctatgtgcctgagaaccctgagtttccacaaaaccattctgatgaacacgatggaggaaatgtgattgatgactctgggttcccgcagctgcagcctgatgaacatgatgctggagggtttccgcagctgcagctgcagcctgatgaacacgaaggcggcaatttggctgaggatgccaatcatcctgaacataattttgacgggaatgatgttgaaggtttgcctggaaactgatttcctcctcaag

SEQ ID NO: 10449 - DNA, 383 bp, Glycine max
  modified_base (360)..(360): a, c, g, t, unknown, or other
agcccacgcgtccggttgaaggaaatggctgaagcacaactacgagaccagcatggcaaccctgtcccactcaccgatcaatacggtaatccggttatcttaactgacgagcgcggtaatcccgtccaactcactggtgtcgctaccaccgctaccggcacagcaggttctgggtttgggtcctatggtaccggtgcttacggtggtggtgcaagtgcaaccaccgttgcagatcttttggcaacccaaccaaggagtggcagggaggctagagagcttcgtcgttcctccagttcaagctctagctcgtctgaggatgatgggcaaggtgggaggaggaagaagggagtgaaggataanataaaagagaaactaccaggggt

SEQ ID NO: 10450 - DNA, 418 bp, Glycine max
aggggtagttgacaggttttcacatcataacaattggctgcttctgttacagttttaacttcattggaagaatttctcatgtgcttgagtttgtggtggttgatttgcttaaattggtttattgagttctgttaggtcaattcctttgatctatgtggtgtttgtgtttgttgaggttggttatacttatggcttctcacttcactataggtataaactttaaagaagtctgttgattgagaagtgctcttttggttcctgaaaatgcaagttaccttaggttgaatagagagctgttaggggcatgagtgtcatgaatattttaatattattaggtctaaagtgaaaattttgtaaattttttttatcgaatttgagctaactgaatggtttaattgactttatgaatttggtcccc

SEQ ID NO: 10451 - DNA, 394 bp, Glycine max
agggcgaaggagatagtgaaagagcttcttcctctaattcgagtgtacaaggatggcagcgtggagcgtcttctaagctctgaaaacgtggcagcctcccctgaagatccccaaactggagtctcatccaaagacatagtcatcgcagacaacccctacgtctccgctcgcattttccttcccaaatcccaccacactaacaacaaactccccatcttcctctacttccacggtggcgccttttgcgtcgaatccgccttctcctttttcgtccaccgctatctcaacatcttggcctcagaagccaacataatagccatctccgtcgacttcagactcctcccacaccaccctatccctgctgcctacgaagacggttggaccaccctcaaat

SEQ ID NO: 10452 - DNA, 388 bp, Glycine max
agcccaagcgtccgggatagggttaaggccatggagcgcatcatctgcgccaagtacaagctaggtcgcaagatcggaagcggatccttcggcgaaatctacctcgcgacgaatattgataccttcgagatcgtcgccgtcaagatcgagaacggtaaaacgaagcatccacaattgctttacgaggccaagctctacaatattcttcaaggaggaagtggcatcccgaacataaaatggtgcggcgtagacggggaggataatgtgcttgttatggacttgctgggacctagtcttgaggatctttttgtctactgtggaagaaagttctccctcaaatctgtgttaatgttggccgatcaaatgatgactagaatagaatatgtgc

SEQ ID NO: 10453 - DNA, 400 bp, Glycine max
agctttacagcacctccgttacctggtcgatacatatcatactggaggatgacaactccatctggacataaatttggccaacgtgtttgggtccttatacaggttgatgcatctctccaggactcattttatgatacctctcaaggtctgaacttgaatattccccttgatatcagtggctctaaaggacctcagattatagatatcaatgtccagcctactgaggaagatactgttcttcaaacccgcaatcctaatgctcccattgaacctgtgaatcaaatggttgataatgaaccaaggtttgagctggaaaatgaattccctataaatgaagctacatttgttggccctgctgcctcagcccctgctgcaacccctgtggcatcttcatcagttt

SEQ ID NO: 10454 - DNA, 386 bp, Glycine max
agcaaggaggagacaacacaaagtgcaaaaaaaaacagaaattaaacactactagtagctagctagggtgagaaaatgggtgaagctaaggaaatatggtctgcaccaataacccctagaacagcttcagtagtaggaacacctgttgtggcatctccacctgtgtcatgtccaccctctcagcttcactcaccatctctaacaaggtcacctctacttcaccctgaggatggagatgcaccacgtcgtaaaacatctaagactccaaagactccaagaacccctagaacccctagaaccccacttagaatctctaatttgactccaaagttcatcacccctttgggaagccctatgagaaaagctctgaggttcaccaagcttga

SEQ ID NO: 10455 - DNA, 389 bp, Glycine max
agaaaaaaaaaaacacaaaaaaaaaaaaaaaaaaaaaaacaaaaaaaaaaaaaaatacaaagtaaaaaaatcaaaacaaaaaaacaagctacaaatgcaacacaagtttgaaatcacaaaacaatgcataaaaaaaagggggggccccccaaaaggttccaaccttacttccccttgcatgcaatttcaaaccccttcaaaagtgtccccaattttcatttcacgggccttcgttttaaaccttcttaactggaaaacccctggctttccccactttaacccccttgcagcaaatccccctttctccatctggcttaaaaccaaaaaggccccccccgatgccctttcccaacatttgcacaccctgattggcaaatggaaccccccct

SEQ ID NO: 10456 - DNA, 387 bp, Glycine max
agggagattcaaagcaacaaattgttttccttttctcttcaattcattttcctaagagaaaaaaacaaaccgaaatttcgagcaaaatgagagaaattgtttctgtcatggaaaactagttttttttttttttttgttagttcacttcggattctccgacaattcgccgatcttacattcgccggaatttcgcttcgtctggttaaaatcgcgacctctgaacagcaggctttcaaattgagtgctcatttatctgatcacgggtcttggattgctggttttttgtgtttgatccatctattttggcatggttcctaagatatggtattgcagaaaaggttagagtacggatttaatggctatcaggctccggccatgccgcgagct

SEQ ID NO: 10457 - DNA, 309 bp, Glycine max
  modified_base (74)..(74): a, c, g, t, unknown, or other
  modified_base (78)..(78): a, c, g, t, unknown, or other
  modified_base (105)..(105): a, c, g, t, unknown, or other
aagcacggattagtgctgtttatggtgggacatatatgttgaataagcctgagtgcaaagtagaatttgatgangaangaaaggttgttggtgtcacatcctaangggaaactgcaaagtgcaaaaaagttgtttgtgatccatcataattgccccgcaaggttaagaaagtttgtaaggttgccagaaccataaccataatgaatcaaccaatccccaacactgaagaatcccaatccgttccaattaatttaccacaaaaacactttggtccgaaatccaaccagttactaatttggtggtcaaaaa

SEQ ID NO: 10458 - DNA, 387 bp, Glycine max
agggaaagtggggacaataataatcatggaagtgttgtgagggctgatcaagagaatggcactgcttcctctattgccactctgcttaatcaactccctcaaaccccttcattgcaccaacaatcaatgttggggtcaataggcgatggacttctaagaacaacataccaaataccaggaatgaattggtatgcttagaacaatttcaggtttttatttattgatgaacaaggagatattgaattactataagaaggctatacgatatgattctcagctggtggaaacttacactattagattgtaaagattttaatgggatattgagattttggttgttaggaatttggaagcagttgttagactttgatcaattagatgggcctc

SEQ ID NO: 10459 - DNA, 371 bp, Glycine max
  modified_base (362)..(362): a, c, g, t, unknown, or other
agtcccgacctcctttgttttcgacaaaccctccctccctctcaaactgtcacccctttccgtacgtccattcaaacatttcctctttcttatattcttctttttctctcttcactttcaaacacaaaccctaattcactttctaccaattcattcgcaaacaccttttccaatttccaacacacaccaaccatgggctacgaagacaatccgtatcgtgacgaggacggagagcccttgatggactacgacgacattcaatccgatcgcgagccatctcccgagcctcgccgccaggacgacgatttcgatgaggacgtcgacgagtggcgcggccgtgatcggtcgcagacgccggtctnatgacacga

SEQ ID NO: 10460 - DNA, 386 bp, Glycine max
agggataccttgcagcccttgcttgatttcctccgagctcacaaatacaagggccatgctctgatgttaaatgatagaatacaaaccatttccaaacttcagtctgcattggccaaggctgaggattatctctctaagcttgcacatgatacactctattcagagtttgaatatgtattgcaaggaatgggttttgagagaggttggggtgatactgctgaacgggtattggaaatgatgcatctgctattggatattcttcaggctcctgatccttctacactagagacttttcttgggagagtaccaatggtattcaatgttgctatattatctcctcatggctactttggacaagccaatgtcttgggtttgcctgaaactgg

SEQ ID NO: 10461 - DNA, 337 bp, Glycine max
  modified_base (253)..(253): a, c, g, t, unknown, or other
agatttgaacgctatcttgtgggagaaatcctaactgttggtgctgaggctggagaactaaaggctggaacaaaggtactagtttaactaccgtgaaggaggtgaaatagaaatggaaaaatgacaaagagtactattcactgacatgaatgcttatgaggtggatttggggactgatgcaaaacactgcttctgtaaagcaagtgacttattggccgttgtggagtaaggttttggccattgaacgagacanaaagggagcaatcttttttgtgatatctttgataagtgtatttttagtagaataaaccattttttttcattggtgttaaaaatt

SEQ ID NO: 10462 - DNA, 386 bp, Glycine max
aggctactctttacaaggccctagttacagatgccgacaacgtcatcccaaaggctcttgattccttcaagagtgttgaaaacgttgagggaaatggtggcccaggaaccatcaagaagatcactttccttgaggatggagaaaccaagtttgtgctgcacaaaatagaaagcattgatgaggcgaacttgggatacagctacagcgtggttgggggtgctgcattgccagacacggcggagaagatcacattcgactccaaattggttgctggtcccaatggagggtctgctgggaagctcactgtcaaatacgaaacaaaaggagatgctgagcccaaccaagacgaactcaaaactggaaaagccaatgctgatgctctcttc

SEQ ID NO: 10463 - DNA, 387 bp, Glycine max
agaacaaaaatttacattaagcatagtacaaaacaatgaagaccaaactgctagcatttctcctcttctttgccttgactacaaaaccactactacttggagcagctggagctgctccagagccagtgattgatacatcaggcaagaagctgagagctgatgcaaattaccatatcatccctgcagtgcccttcaccatatgtggctttgttggctgtttcactggtggaggcctttcactagacagcatagatgaatcttgccctcttgatataataatcgagaaagccaatgaaggcctaccactgagattctcaccagttaacaccaaaaaaggtgttattcgtgtctccaccgatttgaacatttttttctctgattctgatg

SEQ ID NO: 10464 - DNA, 385 bp, Glycine max
acgcccacgcgtccggcaaaacgcaaacactctcctcaaaacgacaaccgccacaaaacaacacaaccaccgcccctcaccgccttcatcttctctctctctctttaggtatcatcatatccatcacaacattcatcatcaaaaaatgtttcttgttatttttcttgttattaattattaattataatcatttacctgttttaaattcccatgatgaagcttgaaaagacgaaaacttaaacctttttgttacgaaaaaaacagggtcgatggctgaattcggaaacaacaacaacaacggcgccaacacgacgtcgtcgaggttctccttcttcaaccgttccctcacgacgctccgcaacgaaaaacgccgcagctggaccgt

SEQ ID NO: 10465 - DNA, 377 bp, Glycine max
attcactatcagcgcaattcaccgtttggattctccagccggcatgggcaacgcaagagcatgttcatccaaacgcagcccacgccaaatccctcgtctctcatgttttatcccggcaagcccgtcatggaagttggaagctccgacttcccaaaccctcgttctgcaatgaactctcccctcgccaaatcgctcttcgcaatcgacggcgttactcgcgttttctttggatctgatttcgttaccgttacgaaatcggaagaagctgccttggaattcctcaagcctgaagtcctcgccggcattatgggattccactcctccgctcagcctctccttttagattctcaagcccgcggcggcatggatacagctat

SEQ ID NO: 10466 - DNA, 374 bp, Glycine max
cccacgcgtccgatttatttatttttattcctagatgttttgaaaagccggttttggagttttccccttccgatgtttcttcaggtatgggagcggtgtatggcatcactaagagcagcgtcggggttgcgtcgatgggtcacgccggagctggattgattttgtgcttggtatcctgcaccttccttgcagttaggcttttacagttttcccctttcccattcatcaattcttttattgaatatgtttgcacaatagttaacaataccaaatagtggcattgagtgacttatcccaaaattgatacagtgggtaatggacacatgaatgagaactgaatgagaatttagttgtttcgaatatgtttgcacaat

SEQ ID NO: 10467 - DNA, 314 bp, Glycine max
gtaaaatgctctcacacaatttgctcaccgttacgcttcttccagtctccatgtcaagctccacctcatttaactattgctactgatgacgttcaggtttactatagcaggtacgctaccaggcttactactaccaggccactatcgatgcttggccatggaatcaccgacatggagattcacttcctcgacgtgaaattccattcagtcggagcttagatgggttcacacttagtatgtcacttggtctagttcacaggagtatctgttaccgcgctggcagatgctgaatagttcttcactgctctcatttc

SEQ ID NO: 10468 - DNA, 155 bp, Glycine max
agcccacgcgtccgaaaaaaaaaaaaaaaaaaaaaaaaaaaaaaaaaaaaaaaaaaaaaaaaaaaaaaaaaaaaaaaaaaaaaaaaaaaaaaaaaaaaaataaaaaatcaaaaaaaaaaataaaaaaaataaaaatcaaaaaaagaaattcttac

SEQ ID NO: 10469 - DNA, 426 bp, Glycine max
agctgtggttatcatcttcttcttcctctttcttagatctcttctttctctacgccgcacgccgaaaccatggccggaaaaggagagggtcctgctatcggaatcgatctcggaaccacctactcttgcgtcggtgtgtggcaacatgaccgcgttgaaatcatcgccaacgaccaagggaacagaaccacgccgtcttacgtcggattcactgacaccgagcgtctcatcggtgatgcggccaagaatcaagtcgccatgaaccccatcaacaccgtcttcgatgccaagaggttgattggtcgtagattcagtgattcctctgttcagagtgatatcaaattgtggcctttcaaggtcattcctggtgctgctgacaagccaatgatcgtggttaactacaagggtgaagagaagcattttgcc

SEQ ID NO: 10470 - DNA, 414 bp, Glycine max
aggaaaaccttaaggggaaaccggtacttttgaagtatgtcaaattccaaaatgttcgtagcttgacaatttttattgaggacaatcagtcaggttcagagatcacaaaagttcagaagatcgtgctgcatggtacaacagttgaaacaacagacatgaagggtctgaagaagattgaggatcattaacccctggaaagaggagattcaactttgctcctaatccctccttagaaattttgattggaattgtaatgttaacttggtgaatgatggtttatgacttctaatgtctatctgatttcaaataaaacagatgcacaatatatctacatggttgtgacaatttgtgattggaggtaacattcaagctgtatggttatctattgtgtccttttacatgttttgaaacatg

SEQ ID NO: 10471 - DNA, 262 bp, Glycine max
agcggtgacagagaccgtggttatggttgttgttgttaccgttgttactcccttgtggtaacgttgtgatggaggctggagaaactaaggcttgatgtcgttgattacggtttatgattatgctcagtaattttagttgtgtttgagtttgagtatctttatggttttgtgtcaccgtggttcctgtttttgaccaatatatctggttgtttatagtccatttaatgaaatgataatcagaaattggagtatcgaagttcta

SEQ ID NO: 10472 - DNA, 399 bp, Glycine max
agatcacacatcagcacatccatcagacaaatcttctacctaggatcagggattacaacccaatcgtgttgccgagtacgttccagacgttatcagtagggtcattagcattgtgaccgatcacctcagtgcctacaccataggtaatgacaacgacatacactacatctacaacaacataatcaatcatgccgagtatcgctgtgcacggaagacattcgacacacgatacgctttccaaaaagctcacacatcgcagtagtagtttggtatgcctgatgctcatgataatgcgcagcttaacgtgtcatctacatacgcacagatcatccctgaaagtagaacagtgtgcgacacatcacagattaccagttcagcagacgactactgtcacgagag

SEQ ID NO: 10473 - DNA, 395 bp, Glycine max
  modified_base (338)..(338): a, c, g, t, unknown, or other
agattttgtttcagacaaagttttgttgcaaagcaaaaaactacgaggagctttcctccatacgaatccaaggaggagagaggagacacagacacaaaggaaacggaaaaagcaacacacacaaaaaaggtctgtgcctcctcttatatgtaatagatagtttctgaaacaaaagaaacaaataaaataaaaataaaaggaccacatggattatgaaaacaacagttggatttgggacggggtaaactactacccgcgtgtgtttggtggtctaatggttacagcagccttgctgggcttgtcaaccagctactttggtgggattggggtttcatatntgtcactgccatgttcctggtctaatttggggatttttcacaagaagaaatcgggga

SEQ ID NO: 10474 - DNA, 243 bp, Glycine max
cccacgcgtccgcccacgcgtccgctgggtcacactgcattccgcacggggtgagagtgtggaccggaacacgattgtgtttgttcatcgtttatcaatgatcatcagacggggaatttacatcttggagagaacgacaagtaagacgcactcacgcaaccttcgctgtcaccgggtgtactttcacacccatctattctgattccacattgagcggatctcacagattagactcttcttcta

SEQ ID NO: 10475 - DNA, 415 bp, Glycine max
agatatttaataataaatttaaatatgcttttgatttgtaatgaattaacatattttgttttaaatttttaataatttcttttctttgcttcgagtttcaaaataaaacaaaagaaaattgactttggtcattgttatttttagtttagacaatttactgtatatatttttgtttttgtcactagaatatttaggtcatttgttattagtttctatcaaatacttttttaaaaaaattaattaataattaattaaatattataaggattataatataacatagatatattacaaggattaaaacacaataacatatattaaaaacataattttatttaataaaaatctcaatatatagaaaaattataaaaaatgtaaaataaaattcattaattaacaatgaaacaaaacatat

SEQ ID NO: 10476 - DNA, 421 bp, Glycine max
agcccacgcgtccgcccacgcgtccgcccacgcgtccggcagtttattctatcatatccttgttcatataattttcttttcaattagaataccccaatcccagaaacttatgtccatgaccatcctcaaggtcgcaataacatttgcttgaagacaattttgagttgaccttacagcctagttccacctatataaacacccttgatccttcaaagcctctcatagctccaatactggcaacaataatactcttgggcatctgaactatctccattcgttatttcaccctttctttgcagtggatttgcgatgttttaaagaaattacatgcatctttatgtgctacagagctacgtaattataaaattcatctcacacatacttcattttactacctttcatcctttagatttgactcatg

SEQ ID NO: 10477 - DNA, 338 bp, Glycine max
  modified_base (190)..(190): a, c, g, t, unknown, or other
aggggcgaactgctgaggagaagcttaaacgcagtttatttggtgatgatgaaggagctccacttgaagacattgctgaagaggaagagcaaggagaagaggaagaagatgcagacattggagaagatgatgaaatggccgacttcattgtggatgaagaagaagttgatgagaatggggctcctatgangcagaagaagctgaagagaaagaaaactaggcaggctcctggagtctcttcttcagctctacaagaagctcaagaattatttggtgattcagatgagttgattctgaatcgccagaaaaatctagaaatgagtgaatttagagagact

SEQ ID NO: 10478 - DNA, 394 bp, Glycine max
  modified_base (337)..(337): a, c, g, t, unknown, or other
agctgaacatggatctctttaggaagtgtatggagccggtggagaaatgtttgagggatgctaaaatggacaaaagaagtgttgatgatgttgtccttgttggtggttctaccagaattcccaaggttcaacaactgctgcaggacttctttaatggaaaggagctgtgcaagagcatcaatcctgatgaagctgttgcatatggtgctgctgttcaggctgcaattttaagtggtgagggcaatgagaaggttcaggatcttctcctccttgatgtcacccctctatctcttggtttggagactgctggcggtgtgatgactgtcttgatccctangaacactacaattccaaccaagaaggaacaggttttctcaacatactctgacaacca

SEQ ID NO: 10479 - DNA, 415 bp, Glycine max
aggaaaaaatacaaagaaaatgacataaaacagaaaggaaatacaggagaataattatttattctgggatagaatgtggcatgccatttattttgcttcttttttaaaataaaaaatattctgtggctcttgtacggtagtgcgcgtcctttctttcttttactttttagacttctggctggaaaagctatagacagagggttggcaagctgtggatgggtttacacgcgtcagcggaagcttgtttcacagcgaatagtgtgggttcaaaagttctgttacgagaactcaaaagttcaaactcctaagtatttattatttaaacacaataaaagttcctaaaaattaatgatattttttttagtagaaatcacgaaaataaagttatactacaatgtactaattaataatattt

SEQ ID NO: 10480 - DNA, 375 bp, Glycine max
cccacgagtccgcccacgcgtccggggaccgatcaggtcaaagaatgagcttcagaatctgcctcctgttcctcccgtagatgcgattttggaaccacaccatcaaacggtgccagttggaattgttatgtcgactcttggtgctcaagtcatcgtggaaggagtggagaagcatgaccctcttaatgagggttctattctttggttgactgaaagccaaaaaccactaggtttaattgatgaaatttttggaccagtcaagaacccttattatgttgtgagatacaattctgaaagtgaagtccccacggggatcaatgagggaaccttgatctcctttgttcaagaatttgctgatcacgtgattaataacaa

SEQ ID NO: 10481 - DNA, 418 bp, Glycine max
aggataattctatcttccagagagccatagacctttacaagaagcatagcatgaacctacttaacaagggggaggtagatgatattgcggtatccaaccagatgcaagtggatgagtcatttcctattcctagtttggagaatgggcatgtttttgtctcagcatccaatgggataaaagatgtgccaatgcctacattagaatcaggcaaagtggaaactacatctcctgcaaaggagcaattggaagagatcaatcaaacctacggccaaatggaggaagatcataacaagactggcctgtctagaccatcttctggttgtgcgaaccaagaagcagctgtagcaggtttgcaagagaaagagcccaaaatcacttctgataaggtgaattcaggggatgcaaaggaggattacac

SEQ ID NO: 10482 - DNA, 419 bp, Glycine max
agattttgacgaaattttcgggattaaagaactggcgttaaaaaatgccgcccagtgcttcaaaatgcgaaaacaatgaagcagcatttttcagaaggtgttcgacctttaacgccgtggcaaactgtatataaactgcaccttttttcgtccattttcttaccataaatattcaattcaatgcttcatcctcatctattgcctattgcattcgtacctccctttgttttcgctattgctgtgtctctcgaggattgtctcaattgagttggtgctgaatccgaggtttattttagctggtgtggaatcatttcaacattatctggaagaagactttcagatttttagtcaaatttaatacttaaagatggggttatacgagcatccagatgttgtgcagtggggtattaatctttttg

SEQ ID NO: 10483 - DNA, 331 bp, Glycine max
agccgatctgcatcttcacttcttactgcttattcttcttctttccgattcccatttattccttctttcttctcgatttcgtatatttgtattttctcctcttttttcttcccgcgaagaataaaaaaaacactggagaaatagatcgtgttgtgtgttgtattttagtgaaattgattgtgaagtgatggaatctatatttgaatgtttttattctaaaatcaaattaatgataaaattgagtagtgttatttatttacggcaaaaatactcaattgctcaaactcaaatcaattttggatctagaatcaattatgtagtattatgaata

SEQ ID NO: 10484 - DNA, 327 bp, Glycine max
agcccacgcgtccgcccacgcgtccggcaccctcctctgttttgaaacagagaacaaagaaccatcgccatgcttgatccgagaacacaccaccccaccaattctttcgaattgtacgacgcaacacgacacaaaccccacacatgggatgttacgaactccggtttgtggccttcgaaaccggctttggaggaggcagaggtagatgattccgggatttgttcacctcccatgaggaccacgagccccccacgccgaaaaaacaaccaccgaagcctctcgccaacgtcgaggacgcaagccaatagtgagaaggcagaaggagct

SEQ ID NO: 10485 - DNA, 321 bp, Glycine max
aggtccgtcgccatcatcgattcccatcggccttagccagtctaaggtttcggttcacgacgctatcgtacacatagcgagacgatggatttacgatcaaggccgagtcatcaggttggtcgaacctttcgtcttagtgcatcacgttatatgtctgacatagacgatcagatgcctactgccatcgatccatttgcagatgcaaatgccgatcactcgggtactgggtcacacgactatgtgcatattcatgtacagctgcgctgtggtaggatgagcctgacaaccgttcacggattgacataagaagtcagctcttat

SEQ ID NO: 10486 - DNA, 413 bp, Glycine max
aggggtgttgtcagtagatgagatatcggagcaatactgggtggctgcatcatcttcttcatcatcatcatcatcatcgttcaagtcaaagatgaaccggagcgaatccgaatgggcctttcagcagttcctacagcaggaagctgcttcttcttcatctaattctgatcatgatgatgatcatcatcatgctaaactcaaaaaggaatccaacaccaacatccctgttactctacatgttgattcccaagactaccatgctattcttaagaccaagcttaatctcgcatgcgctgctgttgctatgactcggggatctttggtcaaatctcaaaaccctgacagtggaccacaggcatctaatttttctgaagttggatcgcatgctaccttaaaaggatctggcccttttg

SEQ ID NO: 10487 - DNA, 252 bp, Glycine max
tgtagatgtgtgcccctggagaagttgtaatgaattccataagtaggaccagctcactggtaccttcacttccttttcattttgattgctgcagttccatatgatgacaacttagttgatgcctgtgttaattatttcacccaacccccataaaggaaatagaaatcgtgtaaccctagtttcagttaaattgtagtttgattgtcgtcttcaaaaccatcaagtgaatgggtatctcaaggatttcaagat

SEQ ID NO: 10488 - DNA, 423 bp, Glycine max
agcccacgcgtccgggtctagtgagtgatgaggaaatcgtggcaaataaaggaccacctgttttgtccatggaggagaggctggcccttgtcagtggattgaagtgggtggatgaggtcataactgatgctccttatgcaattaccgagcaattcttgaatcgtctctttcatgaatataaaattgattatgtcatacatggtgatgatccttgcttgcttccagacggaactgatgcatatgctgcagcaaagaaagctggtcgttacaagcaaattaaacgtactgaaggagtttccagtacagacatcgtaggaagaatactgtcttctttaagagatcaaaaaaattgtgaagatcataatggcaccgaggtaaaacctcaagaagaaaaccagtcaaaggcttcccacatagcccaat

SEQ ID NO: 10489 - DNA, 419 bp, Glycine max
agaaaaaaatcaaaaaaaaaaaaaaaaaaaaaaaaaaaaaaaaaaaaaaaaaaaaaaaaaaaaaaaaaaaaaaaaaaaaaaaaaaaaaaaaaaaaaaaaaaaaaaaaaaaaaaaaaaaaccaaattcccggggggccccccaaaaggttcaaacctaacttacccttccaggcaagttcaaacccctccaaaagggcccccaaatttcaatccacggcccttcgtttaaaaacttcgtaacgggaaaaccccggggttaaccaaactaaacccccttgcacaaaacccccttttcccaaccgggcttaaaaccaaaaaggcccgaaccattcccccttccaaaaattgccccaccctaaaggccaaatggaaccccccttgtacggcccataaaccccgcgggttttggggttaacccc

SEQ ID NO: 10490 - DNA, 384 bp, Glycine max
  modified_base (370)..(370): a, c, g, t, unknown, or other
agattgtcaattgtttcatcatccattattttttccgatttgcttatgatgttgttgttttctgttgagatcttctcacttcaaagttgaaacctttctgtgcgcaacaattagaatccctcagcccctcgtctaacgcatactctgttatctaaatttgcattcttttacccaacaaaaccaacccaaaaattataacaaaacataacctctcagaaaaccaccttaaaccggaaaaaaccactatttccccacaattttcgccggaaacccgctattgtgccttgtccctccatacccacgtcaccgaaaccggttttccgatacccaaaagcctcttttctggccccaagtcatttttaatccgtcnttgacgggtttttt

SEQ ID NO: 10491 - DNA, 389 bp, Glycine max
aacgcactcgactttggcatttagctagggcattggagaaggcaccgctgttggcggagagcgagtacgactacaaggtggagttcagggcgtacttcgacgactcgtgggacgcgacgcgcgtttcgctgcacggagaaccactgggagtgacatacttcatcttctccgacgactacgacaacgcgtttcaagcctcctagtttgcggacgtgtttgagcatcaggagtttggggaagacttcagagacctctccaaacacgttcacgacaacgattgtgatacacactctgatgctgtctcggtcggcgcgtgtcactgtctctgtcaatgatgatcttcactacgatgaccctgtcgtcgacggggtgcaccatggaatgcatta

SEQ ID NO: 10492 - DNA, 348 bp, Glycine max
agctgacttctttaaggagtatctgattgacaacagccttgatgatcttatttcaattctaaaacggggaaaagtagaggaggatcttttggacattttcccccctacaaaaagatccattgaagctttctctgagcatttcaccaaggaaggattggtggccttggtggagtataatgaaaagaaaatttttgaggtgaaacttaaggaaatgaagtcttctttaacagcacagataacagaggaggctgatacatctgaagtcattgagactgtgaagctgcgagttagagatgctaaattgccggaaattgaggtggtgcggatcttgtgggatgttttaatgga

SEQ ID NO: 10493 - DNA, 378 bp, Glycine max
  modified_base (370)..(370): a, c, g, t, unknown, or other
agggaaaacgtgtggggcttcacactgtgctggttggtacatcacaaagatgtaaaggagcagattatgccttggaaagcattcacaaccttagggaggctgtgcctgaactatgggaggctgatataaaatcagaagttgcataccctggaaagctagctgtggagacatctgtcactgcttgagattattattaagtgcatgaaattaattaagtcccttcaaaattgttcatttaatcaaaattgaaaatccaaccaccaacaacaaaaaaaaaaacgaacaaaagagagaagaagcccacgggaattcccccaacttcagatgtagtagttgtagttgatgtagatgctttgtaagattgcaatanaatagtca

SEQ ID NO: 10494 - DNA, 322 bp, Glycine max
agcccacgcgtccgcgcagtgctagcaggagtccaagtaggagcaggagcaggagcaagagtttgtctcggtaagctctgattgttgcaattgaagaagttgtggatgatggtgagtgctaccaagtttttctagtaaaattgacattagccaaaaaaggcatttgggttttatatttgatcttctttttaattgaacttgagacttctgacctattggcgtcttagttttaatattgaggatttgaaggaccctagatttctgtaatagactgttaaatgtcaaaaacatgtgctatttggttaattatgccagtttattt

SEQ ID NO: 10495 - DNA, 415 bp, Glycine max
aacccacgagtccggggcagtagccgagattccgtgagttgcaaaaatgaagacgattctttccaccgagaccatgaacatcccggacggcgtgagcatcaaagttcatgccaaggtcatcgaagttgagggcccccgcggaaaattggtgcgagacttcaagcatttgaatctcgattttcagctcattactgacgaaaacggtaaaagaaagctgaaaatcgacgcgtggtttggttctcggaaaacatccgccgccattcgcaccgccttgagccacgtggagaatcttatcaccggcgtcaccaagggctaccgctacaaaatgaggttcgtttatgcccattttcccatcaacgcaagcatcggcaacagcaacaagtctattgagattcgaaaattccttggcgagaag

SEQ ID NO: 10496 - DNA, 379 bp, Glycine max
aggaaccctcaacgactgcgacggccaactcatttgcatcaacggaaggtgcaacgacgaccgcgacgtcggaacccacatctgcggcggcggaatgccgccaaatccgccaccaagcggcggaagctgccagtcctcgggaaccctaaattgcggcggaaaatcgtatcctcagtaccgttgctctccgccggtaacttcctcgacgccggcgatcctgacgctgaacgacttcagcgaaggcggcgacggaggggacccgtcgcagtgcgacgagaagttccataacaacacggagcgtgtggtggcactctccacggggtggttcaacggcagttcgctgtgtttgaaaatgataaggatcacggccgggaacggg

SEQ ID NO: 10497 - DNA, 389 bp, Glycine max
  modified_base (382)..(382): a, c, g, t, unknown, or other
aggcaaggagtacgaggtggagtgcgggcgacggtaacttaccaacgctaatgagttgttgagtttggtacatgggcggagaagtgttgacgatggcggacgtcacggccaacttgcaagcagcaaccaccgcatccaccccttacgcgcttcccaccagtctccctctcctctccgcttttctctccttcgctctcgctcagttcctcaagatcttcacctcctggtataaggagacgagatgggattctaaaaggttgcttgattcgggtggaatgccttcgtcacattctgcaacggtctcggctctggctgttgctatatgtcgccaagaatgggcagggtcacctgcctttgcgactgcaatggtcctggcatgtantgtgaag

SEQ ID NO: 10498 - DNA, 386 bp, Glycine max
atcaggctcttgctagttgaagggtgtccatgtggttcctttggaagagagtggtatctcagaggaatctgtggaaaatggaactgaaagtgtttctgcacaagaggaagacactgagcagtattttagctttctgaaagtcttgactgaggtgaacaattggaggaagcaatgtgaagtagtagaacagttaaggctgctgctgagggatgacgaggaagccaggatttttatgggggcaaatgggtttgttgaagcacttttgcagtttttgcaatcagctgtgcgtgaaggtagtttgatggctctggaaagtggagcaatggctctcttcaacctggctgtgaataataacagagataaggaaattatgttatcggctggag

SEQ ID NO: 10499 - DNA, 352 bp, Glycine max
aggcaaatcgttctaagagaggtgatgatgaaaaagaaactctttcaccatcaccatttccctctacactatcaccagttcttgagcctttctcatcatccgagagtccctcagattcaccaatatcatctccagaaatttcccattcaccatctccatctctctccactttctttttcattctctcaccctcaccttcacctgaggtagcaccaactccagacttatcacctccagcaaatccaccaatggttgtgttcacaccaccacagtccaattggggttcaatgccttctcctgcttcatcttcaaaccaagggaatgcatacagttcaaattacaagcaacatac

SEQ ID NO: 10500 - DNA, 345 bp, Glycine max
agcccacgcgtccgcattttcagaggaacaatggcgggtagggtttcgacgtgcttcatcttcgtgtttgctctttcactccttcttccttttcagatctccgctgaggaatcatcggagatagagttcgtattcacattggatcattctaactttcatgacactgtcaggatgcacgatttcatcgtcgtcgagttctacgcaccatggtgtggccactgtaagaagcttgctcccgagtatgagaaagctgcttctatcttgagtagtcatgatcctccggttgttttggctaaaattgatgccaatgaggagacgaacagtgagcttgcatctcaatatgat

SEQ ID NO: 10501 - DNA, 364 bp, Glycine max
  modified_base (267)..(267): a, c, g, t, unknown, or other
aggaaaaccttccatagatagcctcccataaaaatgaagagtactacctctttggctctctttctacgttgtgcccgaatttcatcatatcagccttcagccgtcgctgatattgtactcgataccgagtgcaatccgattcgaaacagcggcacatactatgtgttgccagttatgagaagaaagggcggctgaatacagtttgcgaaaaccgaaacagacacatgccctctcactgttgtgcaatctccctttgaggtctcaaanggtctaccactgatgatttcatccccagttaagatccttgacatcaccgatggacttattttgagcctcagtttcacttatgtactcacctgtgcct

SEQ ID NO: 10502 - DNA, 362 bp, Glycine max
agggagatgcggcgaagaaccaggtcgctatgaacccaaccaacaccgtttttgatgctaagcgtttgattggaaggcgtttttccgatgcatcagtacaaggtgacatgaaattgtggccgttcaaggtgattcctggccctgctgagaaacctatgattgtggtgaactacaagggggaggagaaacagttttccgcggaagagatatcctccatggttcttatgaagaataaagagattgccgaaggctatccaaggtccaacaataagaatgccgttgtcactgtgcctgcttacttcaacgactcacaacgtcaagccaccaaggacgctggtgtcatttctgggctcaacgtgatg

SEQ ID NO: 10503 - DNA, 331 bp, Glycine max
agcaacgcgtccgccttgcgggagagggcaagaaaattagatcagggtatcctgattataaggtttgagatgccctttaatatatggtgtggaggatgcaattcaatgattgcaaagggtgtccggttcaatgcagagaaaaaacaagttgggaattattactcaacgaagatatggagtttcgctatgaaatctgcctgctgtaaacatgagattgtcattcagactaatcctaagaattgcgagtatgtcattattagcggggcccagaaaaaaactgaagattttgatattgaagatgccgaaacttttgaattgcctgctgatgaag

SEQ ID NO: 10504 - DNA, 84 bp, Glycine max
atcaggatgatctacagaagattgcacggataagtattcgcttcgagctgtcgagtcaggaagttactcggtagctgaaagaca

SEQ ID NO: 10505 - DNA, 416 bp, Glycine max
agctcaacttcttcttccgttcctccctttcgctctattaaggatctctatctctatctctccgatcgtcccaccatcatcgatcaaggtataaagagttttcaattggagaagcggactgggaacaagtgttacatgctttccgctagagatctgagcattatatggggtgacactactcattattgggagtggacaaccctaccagagtccaggttcgaagaagttgctaggcttcgagctgtgtgttggtttgacattactgggaggatgaacacccgcgttttgtcgccaaatactaattatgcagcttttcttgtgttcaagatgatcgatgccggtggatttcactacgatcctgcggtgttatcagtaggtattttgggaggcaatagcagtaccaaaaatgtttgttt

SEQ ID NO: 10506 - DNA, 415 bp, Glycine max
agcccaagcgtccggaacttcttgttgacagtgtcccacgtgatctcactatggtccttcataaactgtttatccaaaagccggtccttcttgctaagcttttggtcccaatgaccatcaccagcatcttgcttttcattgtcatactgagaggcttcagaatcagattttgcttccggaagctgctccggctcaatatcatcactctcatactcgtcctcgctctcctcctcttccttttcctcctcactctcatgattctccctgcatttggtaatcaactcctcatactgcttattattcttcttcaacttctgcttcatggagttcaaggccttggcattgctactactcatcttcttcttggcatccttattagccatagcctgaaccaagaaatcgtccagcatcacaa

SEQ ID NO: 10507 - DNA, 356 bp, Glycine max
agccacacgcgtccggtgttctataagttcacggtcagttctgaaaaatgggttccaaggttttgcttgttgtagttatgttcatagcggctatacttctgatctctgctgaggttgcacccaatgaatacgaaaattttaacaaaaaagatgggaagcatgctccaaatgggttatatgatagcaaatggggttacggtggttggggtggtccttggtatggcggctggggtggcccttattatggtggcggctggggtggcccttattatggcggtggttggggcggtccctggcgtggtggtggcggtggtggctggggaaggttgcgtcgacctaatggcaaccctcacaac

SEQ ID NO: 10508 - DNA, 390 bp, Glycine max
atcaggttccctaagtcttcgtattgctccatagtctagtcgtctctgaagactgaagctctcacaaaaaaaaacaaaaaaggcttaccttagcgtgttatttgtttgacccggtgaatatctttctcttatgtgtgttctcatcacaattcatgaaacacgctctcttttttcccatcatcattatttctttgtgattctctctctctacactatccttgctctagtcttccttttctatgccttgccctttcttcgggcaaagttgtgtttccattttgtttccgagttgacttgctcaatatcccaggataagtgtgtgttcttatgaaggttgcagtgctatggagtctatagatttcatgctgcagcttcattagataccaattt

SEQ ID NO: 10509 - DNA, 423 bp, Glycine max
agcccaagcgtccgattgaaacagaaaatttgaagagtttgtttattgtgaaaaaaagaaaaatgcaggcagcaaagaaagccatagagacctttaaggaaaccgcagccaacattggcgcctctgccaagtctggcttggagaaaaccaaggccactatccaagagaagaatgagaagatgaatgcagaagatcaaactcaaatggatatggctaccaagaggaaagaagagaagatcaaccaggctgagatggagaagcagcaggcccgtaagtactacgccgctgcaaaacaatacgccatggctgagcacatggcaaagggcaaccacgacaccgccgggcctagaatcgagactgccacacacatcaccagtgggcccgggactgacaatgctatgtactctaacactgggcctggga

SEQ ID NO: 10510 - DNA, 385 bp, Glycine max
  modified_base (347)..(347): a, c, g, t, unknown, or other
aggaaatgcatatgctaatagcacaggtttcaggggcggcagagatatgcatgggtgcctgttgtttggtacttctaatgatcctccgaagttgatttttactactggtgggaagcagcttaataggaatctgagtatatatcaggcaattcagagacagcttgtgctagattaagatgatgatgagagatttgctggcagtgactatgtatctggtgatggaagcagtctgtgaggtgatatttacaccatcacttatcagagggcagataaccagccagataaggcgtctactggaggatcaagttcaaatacgtcatcatctgccaaatctgggtcggccttanattcaagctcagaagctaaattgcatcagacatctgtt

SEQ ID NO: 10511 - DNA, 377 bp, Glycine max
agcaacgcgtccgaagaaaatcctcaattttctgagcagccaaacactctctctctgtctctcgaagattctcagtttgcagagaaaatctgaatcatgtcgtggcaagcgtatgtcgacgatcaccttctgtgtgacatcgaaggtaaccacctcactcacgctgctatcatcggccaagacggcagcgtttgggctcagagtaccgacttccctcagttcaaacctgaggagataactgccatcatgaatgacgttaatgaacctggattaacttgcccaactggaatggaaccccgggggcacaaataaaaggtcatccacgggtgaaccggtgctgtcattcgatggaagaagggtcctggtggtgttactgt

SEQ ID NO: 10512 - DNA, 404 bp, Glycine max
aatcaggcaacacgtatctccttctcaaactagtattattattcttccattccgttctacatataatcattcataatgggtgttttcacattcgaggatgaaatcaactcccctgtggctcctgctactctttacaatgccctagttacagatgccgacaacgtcatcccaaacgctcttgattccttcaagagtgttgaaaacgttgagggaaatggtggcccaggaaccatcaagaatatcactttccttgaggatggagaaaccaagtttgtgctgcataaaatagaaagcattgatgacgctaacttgggatacagctacagcgtggttgggggtgctgcattgccagacacggcggagaagatcacattcgactccaaattggttgctggtcccaattg

SEQ ID NO: 10513 - DNA, 415 bp, Glycine max
agcccaagcgtccgcccacgcgtccgaaagaagccgccgccacggaaaatccaccggagaagaaggttgaagagaagaaacctgaagagaaaaaaccagaagaaaaacctaaagagagtatggtggttttgaagattaaactgcactgtgacggttgcattgcgaaaattcgaagaatcattatgaggttcaaaggtgtacaatcggtgagccttgacggaagcaaggacttggtgacagtgaagggaacaatggacgtgaaggagatggtgtcgtacctgaacgagaagctgaagcgaaacgtggaagtggtgcctcctccgaagaaagacgacgataagaaagagaaagaacgtgacggtggcgaaaagaaagagaaagagaaagacggtgccggtgagaagaaagagaaaga

SEQ ID NO: 10514 - DNA, 414 bp, Glycine max
agcttagcgtttctcctcagcctcgtaaaaccaaacagattttactctctcaaatggagattcccattcactgtctccctcttcctcctccgacggcgtcggcttcgagacggatgagccgcggacgccgttggccgtgcgccgcgcgctgcagctcctcaactccggcgatcccgacctgcgcctccaagctgctcgcgacatccggcgcctcacgatgacgtcacaacgttgtcggcgccagttatcccaggctgtcggtccactcgtttccatgctccgagtcgactcgcccgagtcacacgagcccgctctcctcgccttgctcaacctcgccgtcaaagacgactcgaattagatcaatattgtggaggccggtgcattagaaccgataattagtttccttaagtctca

SEQ ID NO: 10515 - DNA, 314 bp, Glycine max
agcaaaaacatcctggtatagtccctacagaagttcaccatcgtggttgtcaatctcaacagatgaaatgctaccatggaccttttctcggcaattttctgcttcaagtactcaaaactttcatcaaaatctgtggggaaataattgcactacgccatttgtgaatcattcagcagaagttcgctttccttctaatcatcagacttcttctctaggtcccatgcagacgactcctctttcacgagtatcacatggtcatcctcaacatgtatcggttacacactctagcataaatagtgataacagatacataa

SEQ ID NO: 10516 - DNA, 373 bp, Glycine max
atcagctcagccttacgtttccgtaataaatctttcaaaatcgataaccgtttctcgttttgtttttggaccttatctttattcttaggttcgattctgcgtacgttgggaggaggaacagacatacatgaaggattctaattcgaattcggatctgtttgacccggtcatggctatggagtccgagtggtctcgcggcggcggcggcacctccgacgccgatttcgccttctccttcatcgacagcaacttctccgacagggttctccggatcgagattatgatcgactccgtctacgcccgccccgattcagacgcctgcgccaccattgccgactgggcatgccatcgcatgcgccgccgcgatgatatc

SEQ ID NO: 10517 - DNA, 385 bp, Glycine max
  modified_base (174)..(174): a, c, g, t, unknown, or other
agtacatttgtggatgtgaaggaataggaggttgttttggggtgaaatgagggatgctatcaaggttgatggactttctgactgcctgctggcggcgaagattcttcccccgaacggcaaggtggttccgaggttacggggccgaaagaaaggctgctgtggtacaatgatgcngggcagcacttgtttggtgaatactcaatggctgttgtccaggccaataacctgctcgaggaccagagccagattgagtctggtcctctcagcctgcttgacactggcccttatgggacctttgttggtgtatatgatggacacggtggacccgagacgtcgcgctacgtctgtgatcatctcttccaacatctaaaacgatttgcatctg

SEQ ID NO: 10518 - DNA, 343 bp, Glycine max
aatcagcccacgcgtccgctgacgcgtgggtgaaattgaaatacaccaatctctctccgtacgatgttgccctgttccgtcatcaattctcgtgtctaaggacacagtttgcttgacaaatttacatgttttcatctcgatgttatgattttgaatatgtatgactatgccattgataacgacacatgtggttttgccacaagtggcttgtaaatggtttcaggtcttgtcaattgtcacatcacggacgatactcaattggatcttagttggtacaatgtctcctgtcccatatgcttggatttacctcagtacagtgttctcctgcattgggcatcgcatg

SEQ ID NO: 10519 - DNA, 409 bp, Glycine max
agcccacgcgtccgcggacgcgtgggttgcagtttattctatcatatccttgttcaaataattttcttttcaattacaataccccaatcccagaaacttatgttcatgaccatcctcaaggtcccaataacatttacttgaagacaattttgagttgaccttacagcctagttccacctatacaaacacccttgatcctacaaagtctctcatagctccaatactggcaacaataatactcttgggcatctgaactatctccattctttttttccccctttctttgcagtggatttgcgaggttttaaagaaattaaatgcgtttttttgtgctaaagagctaggtaattatagaattcatctcacacatacttctttttactaccttttaacctttaaaatttaatcc

SEQ ID NO: 10520 - DNA, 247 bp, Glycine max
agacaacacatccaaaataaaaaacacattaaaaaaaaaagaaaaacaaagattacagctcggaaagaatgctatactagatagagaacacaggacaacttggaatacttcgtagtgagataattgtactgtatacatagacgatatcgttccatcctccatttcgctgacgtgaattacttcattgcttcttcactttttcactcactccttctgatctcaagcagtttcccctcatggatcgctt

SEQ ID NO: 10521 - DNA, 419 bp, Glycine max
aagtgaattccagggctgaaagaaagaggagttaaacgttcaaattaaagataataacgttcgtcagataagcggagagaggaacgttgagaatgaagatacgaataacacgtggcatcgcgtggagcgtagcaacgtgcaagttcatgaggatgttcagattgccggagaatgcaaaagtggatatagtgaaggcttcaatggaaaatggggttctcactgtcactgttcccaaggaagaggttaagaaggctgatgtgaagaacattcaaatctctggttaagcaaaagcaaattgttgttggtcatttgtgtttatctttgttgtttgagaaattgtgtgattttctatgttctattgtgagtgatatgcttgggagaatgtatcgtacgaggtgtgattgtataaagaaataaaa

SEQ ID NO: 10522 - DNA, 378 bp, Glycine max
agcccacgcgtccggtgagtgaaaagttacaccaacaaacccgtgaaagcaaagcacccattagaccctttgcctaaccgactcactcccatggaatccgatctaaacgacgccgttttccccgaagaagatctcgacgacgacgacgacgacgacgatgaaactccagaggacgaagaggactacgacgacgaaaccgaagcccctcccttcgtcctcgccgtcgtagcagtcgcgccgcccgcttccaccgcctccgaaacactcgacaccacgttgatcccgatctccgccgtcgccgattcctcactgaaaccactgcacccggagctaatcgaggagaaaaaagcgctggacgattcgcggcgactgttccag

SEQ ID NO: 10523 - DNA, 379 bp, Glycine max
atcagggaagatccgatgctgctagatcgaatttgacaaaacccacttcgtgtctgatcgaagcaacaactgggttctgtctgaattttgagataagatggaatcggatcttggcaagctcttcattgggggaatatcttgggacactgatgaggaacgtctaaaggaatattttgggaaatatggggaggtgatagagactgtgatcatgagggatcgagtaaccggtcacgctcgcggctttggttttgttgtctttggtgatccttctgttgctgagagagtcattatggataagcacataattgatggccgcacagttgaagcatagaaagctgttcctagggatgattagcaaaacattaataggcaatctggt

SEQ ID NO: 10524 - DNA, 388 bp, Glycine max
atcaggtttctttcacttcacaaaaatgaaaaacatgaaattgtgttcggtgatgctatgcttatcactagcgttccttcttggggccacagcagaacaatgtggcacacaagctggtggagcgttatgcccaaatagattatgttgcagcaaatttgggtggtgtggtgacacagattcctactgtggagaaggttgccagagccaatgcaaatctgcaacaccctcaacaccaactccaacaacacctagtagtggtggagatattagcagactcattagctcttctctctttgatcaaatgcttaaataccgaaacgatggccgctgttctggccatggattctacagatatgatgctttcattgccgctgctggctctttcaat

SEQ ID NO: 10525 - DNA, 395 bp, Glycine max
agctccttcctctcatcctctataaagaaagtgcttaatttgtgttgttacttggttcagtttccatggattgggggcttgctatatcttctcatcctaaaccttattcagtcacaactggtggaaatctctggcggagtaaacacaccaccaagaatatttactttgcaagttcttggatatcaaaagcttcacgacacaaaagggaaactcaaatagaacataatgttttgaggttccaacaaccaagtttggatcatcattacaaatgcatcagaggagggtctacatatcaagaatgcaatagaaaatttgttgtgaaggcaatctctaaacaccctcttggttttgaagctcatgcttccaatcctaagaacattttgactccgtcaaaa

SEQ ID NO: 10526 - DNA, 374 bp, Glycine max
  modified_base (202)..(202): a, c, g, t, unknown, or other
  modified_base (360)..(360): a, c, g, t, unknown, or other
agccaacgcgtccgaacttcttattccttcactgaatccaaaaatatcacaacctgtattgttgccaaagtcttcttcaaaagcttcaataacttccagttctgaagccactcctggagtccaaaattctcctatcacgggtggtagctctaggggaaaatctgacaagtctcagagtaatagactttcttctgagcagcanaaaactgaagtcaaggagaaagggacaaaaaggaaatttgaacaaaaaggacacaaggaattgattcctttagtacgcaagagttcttcaccaagcttggtaacctgtcaaacaagcaaccacatctcaagtcaacacaagaggaaattgcggagtantgctttgtgtcctg

SEQ ID NO: 10527 - DNA, 371 bp, Glycine max
agcccacgcgtccgcccacgcgtccgcccacgcgtccgcctcctcttccaaaatatccacgtttcttttcccacacactatcttaaatcttaaaaacattttttttttcaaagcaattagaatttagaccacaaaaggaacaccgaagagatgtacggacagagtagtagtagcagtagttcttacgaatcggatttggcgctgttggattcgattcggcaccacttgctgggcgagtccgaatccatattcggcgccccgaatttcgggtcgggtcggagctccagtttcagcagcttggactcgtgtttgagcgacaattggggcgagcttccgtttaaggaggacgatacagaagacatggtgttgta

SEQ ID NO: 10528 - DNA, 420 bp, Glycine max
agtgcttgtccagtcctcaatattattatcaccaccaccatctttcccctctaagtctaacctcaacaataacatggatcatcaattctcacacatcatccccacagaaagatcacctagaagagaactccaacttcaaggtccacgccctacacctctcagaataaacaaagactctcataaaatcaagaaaccaccgttggcaccacaaccttcacaccctcatcaacctccaccgcgccaacctataataatctacaccgtgtcccccaaggtgattcacaccaccccaagtgacttcatgaacctcgtccaacgcctcactgggtccagttcttcttcctctgctgaagtggtcatgtccaacaataacaacaccactcatgtcgaccctttcaacaacggcggccgcggaatggt

SEQ ID NO: 10529 - DNA, 370 bp, Glycine max
aggccaggagaggagggcttgatattgttgggaaaaggttatccgcacttgcacagtcatgtcatgtaccctttgagttcaatgctgtaagagtacctgttactgaggtgcaacttgaagaccttgaacttcgcccttatgaagctgtggcagtgaactttgccattagtctgcaccatgtgccagatgaaagtgtgaacagtcacaatcatcgtgaccgattgttgagattagctaagcaactgtctcctaaggtggtgactctggttgagcaggaattcagcaccaacaatgcgccgttcttgcagcgcttcgttgagacaatgaactactacttggctgtttttgaatcaatcgatactgttcttcc

SEQ ID NO: 10530 - DNA, 393 bp, Glycine max
agtgaaagcaaatattggcgtggtggctatggctactatggtggttggcgtggtggtggttggcgtggtggctatggacgctggcgtggtggctatggtggtgggcgtggtggctatggtggctggcgtaatggctacggtggtatgcgtggtggctactgacgttggggtggtggctttggccctaacgaacataatgaggctgggattgatgctagccctcacaactaataacgaaacttgctaaagcttatatacgatttaagttatcgtactacataaaacttcattggaacggtagttataatagatgtggagatcgttcttcgctctggtcatataaaggaagaatacttttctattaggatcgtgttattcacgggcggccgctct

SEQ ID NO: 10531 - DNA, 410 bp, Glycine max
agctccttcaaactccatctttccaaatcctctctttgcgattgtgttttgatctgcttcctactgcgatagtttctctactgttacatggccatggcggtttccgcaattggttttgaaggtttcgagaaaaggttggaaatatcctttttccagccgggactttttgctgaccctgaaggaaggggtctaagggctcttacaaaatcccagttgggtgagattctaacaccagctgcttgcaccattgtttcttcgctcaaaaacgataatgtcgactcctatgttctatctgagtccagcctctttgtttatgcctacaagatcatcatcaaaacctgtggtactactaagctattgcttgcaatcccacccatattgaagttcgctgaaatgctttcccttaatgt

SEQ ID NO: 10532 - DNA, 420 bp, Glycine max
agaaaagttcaaactgtctgagttttgcagaatccacggagctaagaatgaaattgtagaagaagaagcactttcacagaaaacatgaaagggttaggtcctcatgcccctttggtttcaaggggaaagcttcctccttcgttggcagtagtggatgccttgccaacatgctcttcttatttctctagaaccaccgtcctatacccattaagatgcagactaaaatcaaggttgagcttggcccgtggcacaattcgagcccaagcatccaatattagtggtgttgaacctggagattatggaagcaatactgagaaagatggtcagaatgtatttgaatggaatgttatcgaaggcagttcttctaatgttgtaaaacctcctgatcggattccttatcctctctctatagcttttgtg

SEQ ID NO: 10533 - DNA, 274 bp, Glycine max
aggagaaaacgtaaaacctaattaattagggttccgagactgagaatcctggattgctcgcagccttgacccaccttcttctctcagtcgttagggtttcgtgtgctaacaaccaggagttgtgtgatatttagtaaaatgggtgagactggaaaacgatatcattcgcagagagaccatgatggggacaggaaacatcaaaagagacgaatgactgacagagatgataggggcaatgatgaattgattgtatataggatactctgtccagatg

SEQ ID NO: 10534 - DNA, 406 bp, Glycine max
agccaacgcgtccgcccacgcgtccgctcattaccaaatgaaatagaaatgcttggaacagtgggccctcctgtaccaaatgtggatgtttgcctggaatctgttcctgaaatgggatacgatgccctagcaagtacaccaagaggagaaatttgtgtaaagggaaaaaccttgtttgcagggtactacaaacgtgaagacctcactaaagaggttctgattgatgaatggttccatacaggggatattggagagtggcaacctaatggaagcatgaaaattattgatcggaagaagaatatatttaagctttcacaaggagaatatgttgctgtcgaaaacctggagaatatttacggtcaagtttcttctattgaatctatatgggtttatggaaacagttttg

SEQ ID NO: 10535 - DNA, 403 bp, Glycine max
  modified_base (323)..(323): a, c, g, t, unknown, or other
agcccgaacatgggaaactgctgcgccacgccgtccacggacgaaacggcgaacaagaagggcaaaaagggaaaaaaggaaaaccccttcgcgatcgactacggtttcaacgccaccgccgcgaacgggtcgaagctcaccgttttgaagtccccgacgggccgcgagatcgaggcccgctacgagctgggccgtgagctgggccggggcgagttcggcataacctacctctgtacggacaaggggaccggagaggagctggcgtgcaagtcgatctcgaagaagaagcttcggacggcgatcgacatcgaggacgtgagganggaggtggagatcatgcgccacttgccgcagcatgcgaacatcgtgaccttgaaggacacctacgaggatgacaatgccg

SEQ ID NO: 10536 - DNA, 415 bp, Glycine max
  modified_base (391)..(391): a, c, g, t, unknown, or other
aggttggtgtgaggcaatgacgcggcctttcggtgtgaagggggggaggaagcgaaagcacgcggaacccaaatacgacgcccatgacgaagaagaagaagaagaaacgcaaccaaagaaaactgtggtggaggtggagcacaaccaagaagaagaagaagaaactccagcaccagcaccagaggatgatggattgagcggtatcccaattgcgcccagtgcgaacaacactaacaaacccaacgtcatcttcattcttgaaaaagcttctttggaagtcgccaaagtcggcaagacatatcagctcttaaactccgacgaccatgccaatttcctccgcaaaaataacaagaatcgcggagattacaggcctgacattactcatcagtcncttctatcaattttggataaccca

SEQ ID NO: 10537 - DNA, 412 bp, Glycine max
  modified_base (364)..(364): a, c, g, t, unknown, or other
aagtcagctttgttgaaatcaagggagttacatattgtggctcgtcgactacgtcaaaattgacaatggataatgtcccttggcatgctgatgtgaaagctttttctgaggccctagctttgaaaagccaaggagagtatgaagttgcatgtgagcatgctcactcgtgctgtgtcctcttagcaaagactaataagttcaaaattgatggccagtggtatacatggatagactatgaaaaatttcatgatctggtggcatctggaagaacttttgacagcagagattacatggctgcaacaccatcgtggtcagtctatggattagaagaaagtggatttgatccaggacaattgagatacangatagagagacatcacaagtctacgcgcaatcaagcaggttagacatt

SEQ ID NO: 10538 - DNA, 395 bp, Glycine max
agtcaaaatcaggctctacgaagggagggtttctcggggtccacttactggaactccggtaacttttaaggtttatcctggaaggcgagctgggggagtcgtggctgatgcactcgctgcaaatgagttgaatacacacttgtttcttcagagcagttctaaaggtattggtcagaatcttgtgctgcttgtaggtgggtttgaaacaacgactggagagcagactatgcaaaacttgcaagtgagagggtatcgagagatcgagaagggtcatcctggaatccctttgagcaaggactgacaaccaaaaggagacaaaattttatcataaagatgctccaaggtgtcatgaagggtctagcttacttgcatgaccacgataggttgcaccagag

SEQ ID NO: 10539 - DNA, 405 bp, Glycine max
agcacgaattccatcttcccagctgccatctcaaaggatggtcgatcatacaatgatcagttgtttagtgctggggctgatgttcttcacagaattggcgaggatgggagaattatacaggaatttattcaacttggcgcaaaagctaaagttgctgcttcagaggccatggatactgaagccactctaggggagataccagatgaattccttgatccaattcaatacacattgatgaaggatccagttatcttgccttcttcaaggatcacggttgatcgtcctgtcattcagaggcatcttcttagtgatagtactaatccattcaaccgttctcatcttaccgcggatatgttgattcccgacgatgagctaaaagcaagaattgaggagtttgtcaggtct

SEQ ID NO: 10540 - DNA, 314 bp, Glycine max
agcggacgcgtgggaaaacagctcttgattagattatatagtttcaggcaagaatagttaaaggaggcaaaaggtgaggagtacaaacggatgaatgctcacattcgatttaatggctattccgcaggactcctcgattgtcagtgaagtcaaatttggtgcattgcttgtcatcagcactgtcagggaactccactagagtaaccatgtgatcacctcaggaacaaaaccccacgctgcaaatgtagctactgtcgaaataagcttgaaggaatagttcgtctaaaaggtttctgatctggatctgctcatgg

SEQ ID NO: 10541 - DNA, 417 bp, Glycine max
aggcatgttaccctcaaaagagatggtgtggtccttgatttggtgcctcctcctacaaaagttagcaacttgatttttggacgaacttggattgattcaccaggagagatgatcctgacaaatctgactacaggggacaaagtggtgctgtattttcaaccatgtggctggtttgggtatggctactttctcttgccatcaaatgttctctagtaacttactacttcttgctcagtacttctgttatatattatcaaacttaaagatttttgcttttgcagagctggtagatatgaagtggatgggtacgtgtataattctgctgacgagcctaagatactgatgactggaaaatggaatgaggctatgaattatcaagtttgtgactcagagggagaaccacttccaggcactgag

SEQ ID NO: 10542 - DNA, 420 bp, Glycine max
  modified_base (403)..(403): a, c, g, t, unknown, or other
acgtcagcggagagaaaaaaagttagggttttgcattttggatcagtcagactcagacatgggaggaggcaatgcccagaagtcaaagatggctcgcgagaagaatctcgagaagcagaaagcagcggctaaggggagccagttggattcaaacaagaaagctatgtctattcagtgtaaggtgtgcatgcaaacatttatatgcaccacatcagaagtgaagtgtaaggagcatgctgaagccaaacaccccaaatctgatctctatgtttgttttcctcatcttaaaaagtgaaagagttcatgttgagacatgatatcaatatatggcctgttctacagtctctatccacatagatcttcaatttcttttaatataaaatatgtctgtgtgtttgtgtcntcaggggtagtgagaga

SEQ ID NO: 10543 - DNA, 411 bp, Glycine max
agttcttttccttggtgatggttcggaagatgggaaagtcccacctgggtcactctgcatgatctcacacaaggaaaaggaggtactcaatgctctagacgatgctggctttccagcaaatgatgaggaggttcagcaagaagtggttgcaatgtctaaaacaaatatatttaggcccgggattgatgttacacaggcagttctgttgcctcagttgacttggatgcgacaggagaaaacataaatggtagggccttggaaagctaaggtctatgatatgcacaatgtagttgtgagcataaaatctagaggagttcctggagccatgacagatgatgaactcttttcttcttgcaatgaacatgaaacagagagtgaagagctcaatgatattttgactgaggatgaaag

SEQ ID NO: 10544 - DNA, 412 bp, Glycine max
agccaacgcgtccgaaagcataaaggaagtagtgagcaatggagggtttgatgtcatcattggcacagatgtgacatatattcctgatgctatattgccattgtttgcaactgctaaagaactgattgctcccagtggaaacaaggaagatgataatgttcctgcacttattctttgccacatctttcgccgagtagacgaaccaaccttactttcggctgcagcccatttcgggtttagattagtggacaagtggcctgctggaacttcaactaatttgtctcatagaattattggcaattggtttgttgacaatgatttaaaggatgatcttcctagtacagcattaaacatcttgctcttctgcaaggagtgatattgaacaacttgattcttctcttcattactatta

SEQ ID NO: 10545 - DNA, 418 bp, Glycine max
agtgaattttaactaaccaaactaataagcaaaaatgttggcggtgtttgcaaaagccattggaaaaccaccggaggaactgaggcttccggcaatggggtccaataattcaaagaccccagaagaaattgtacagaaatttcaatctttgtggccagattctgcagtttacaaccttccacatgggaattttatggctctgtctcatgaagatgaaagtccaatacaccccaggtgtattgttgttttggatgatatcttctgcatttttatgggagctctagcaaacatagctgagcttagacatcattatgggctcccaagacaagcaacagaagccatgattgtgattgaagcctataaggccctaagagatcgcgctccctacccacctgaccaagttgctaaacatcttgat

SEQ ID NO: 10546 - DNA, 422 bp, Glycine max
agcccacgcgtccgtttcaatgcttgcgtctacaatggcatatcatatctatccagagcacaagagtcagcagctagaattcgtcttgggactgctctcccttctcttcgtgtgatgaaatcttcttcaccctctactgttgctgatacagtgtttgttgagaggattagatcaaaggttaaatattggagagagtcatgtaaaagctccgacacaaacaaaagcagagatgaagaacttgtcaactcccttaggaatattgtcctgggcaatgaacagttcagatcaagaccttgcattaactgtagatgtttgcagtgaacgtcaagtgcaacttattctggagatggtgttagactactcagatgatcttcttcctttgccaatccctactaagagtgggaccattcatgcagtacgaa

SEQ ID NO: 10547 - DNA, 406 bp, Glycine max
agcccacgcgtccggaataggttcttgaacaagcactattgaagaatcacacttcacagaagaagtacctctatacatgtgatgagtaaatgtctattcgccaagatctaactgttcatcgaatacgcaagcaattagtagtcaatgtgtacgaaacacatgcccgattggcactggaatttggggacctgtgtgactaaaatcagtgccaatctcagttgcaaactctttatgccgaatgcattgaggggtctgatatggaatttgccgcttacaacttgctttgtgtcataatgcattcaaataataacagagatcttgtatcatcaatggcaaggttatctcacgaagcaaagaaggatgaagctgtacaacatgcccttgccgttcgtgctgctgtaacttc

SEQ ID NO: 10548 - DNA, 371 bp, Glycine max
agcccacgcgtccgcgtactggtcctggtactgttgtcggatcgaaacccctatcttgaattcgactcaacaacatgcggcatggcggaggacgacacggtcgacgacatggctgaggaggacacggtggaagacatggctgaggatgcacatgctgcggtcgagatggctgcaaatgttgctgaggtatctatcactaatatctgaactgaacacactcacatacttgagtgtactccatgtaataactactagatatgtaagatataacagataacagcatggactctatccgtgcttgcgctggcatacgttgatctgttttccgccaaccatgcatgtagttgacacatctttttactagacagcat

SEQ ID NO: 10549 - DNA, 418 bp, Glycine max
aggtgctattgaacccagtgagcttgaggatttccagaatcgatatcatgttggacaacctgtttctggccatgttctaagtgtcaacatggagaagaagctattacggttggttgtgcgccccttttctactcttccttgcggaactagtgaagagccacacattaatgttgtggataagggtttaacagcacattttcatgaaggagatattttaggtggaagggttagtaaaatacttccaagtgttggtggattgcttgtccaagttggtcctcgcacatatggaaaagtacattttactgaacttgcagacacattggtgcctgatccgttgtctggatatcatgaagggcagtttgtcaaatgtgtagtgcttgaagtcagccacactgtcaagggtactattcatgttgac

SEQ ID NO: 10550 - DNA, 410 bp, Glycine max
agatttgatccaaattttgacgaaaaagaatctctgcttcaagataagcttcaaaatgcagttgattttcagaccgagtgtcctcagacatctaaaactggtcagtctccaattacacccaattccaatgaagaacaatttagcagtgtcaatgagttagcaaatatatgtcagaagcaaaagcgtcaactagagaagggttctaattttactagtcctaaaaaatcaaggaatgatgaacaaggcatggctgttgctctctgtgagatggcagctgtagtttcaactgtgtctgcaaaaaagatcgatacctcaatatcaatagagaatgtcatagaagcagtgcaagcattgcctgatatggatgatgagctggttttggatgcttgcgatttcttggaggatgaaag

SEQ ID NO: 10551 - DNA, 410 bp, Glycine max
agctttggttctcctgagctgtgtttattctctttctctgccctctcatcttcgagctccgatggcgagcctgtggcgcgcggcaaccggcatgacggacaacgccaccgattacgacggcgtcgagttctggtcgaaccccgagcggaccggctggctcaccaagcagggcgagtacatcaagacctggcgccgccgctggttcgtcctcaagcaaggcaagctcttctggttcaaggactccgccgtcacgcgtgcgtctcgtccacgcggcgtggtccccgtcgccacgtgcctcaccgtcaaaggcgccgaagacatcctcaacaagcccaacgccttcgagctctccacgcgctccgacaccatgtacttcatcgccgactccgagaaggagaaggaggattgga

SEQ ID NO: 10552 - DNA, 372 bp, Glycine max
agcgcttcgctccctacccttgggctagggttttacttgtgcgtcttctccgaaagcaagctagggtttgtccgtgtggcagaatgggaaggtatcgaagccggagcaggagctatagcccccggcggcgaagcaggagcccaccggcaccgcgcggacggaaccgctatgtcgacgatcgctacggtgacagcaggtcttacagagaccgccgctcacctcttccttccggcttgcttgttcgcaatcttccccttgatgccaggcctgaggatcttaggatcccatttgagcgctatggtcctgtgaaggatgtttatctacctaaaaattactacactggtgagcctcgccgccttggatttgtgaaat

SEQ ID NO: 10553 - DNA, 414 bp, Glycine max
aggagaaatttgacgttttcagagaattggaaactggagacttcactttcattcgatcaatcatgataactcgatacgccgattccgcctcgaaatccgcaacccctaaggaagacgccgccgaaggaaatcccctgcggccaagcgcaccaccgcgacgaaggccagagccactaaaaagaacgagctctcgcccgcagtcgattccaaacccgatcaatctcctcgatttcaggtttctttcatccatgacgatgttgtaattgtggaacagagatcgttaggtagtgctagcagcgcaaaatctgtgaaaaagaagactccggggagatcgagaagtacagcaatcagtactccgaattcggaagagcaatgtgaggcagtagctgatgaaactccaaatgaagatgatac

SEQ ID NO: 10554 - DNA, 284 bp, Glycine max
aggccacttctgtgagtttgactgtggcattgttggtggcgtgcgtgtgaataagaagattttcttggccatggatggtaatgtgctcctagttgtgtttgagagagcataatagatgtgtatcttcaattaatttgtgtttgtgttgtgtgcttgaaaattcttttcctgtaatgttggataaaaattggagctaccgtacgtcgatgtataagaccagggatagatatacatgtctctttttcagtttataaatttatggaataaatgtacaatctgagaaa

SEQ ID NO: 10555 - DNA, 394 bp, Glycine max
agcccacgcgtccggaaaccgtgtcaattgagctcaagaatggcactattgttcatggcaccattacaggtgttgatatcagtatgaacacacatttgaaaacagttaaactaactctgaaagggaaaaatccagtgactctggatcatctcagtgtgaggggtaacaacatccgttactacattcttcctgacagcttgaatctcgagaccctgcttgtggaagagacacctaagatcaaacccaagaagccaactgctgggaaacctttgggacgtggacgaggaatgggccgtgggcgtgggcatggacgtggtggtcgttgagttgcacctttcttcatttttgtggcatgtggttataagctatgcagcaagaatttctgggtggtttt

SEQ ID NO: 10556 - DNA, 410 bp, Glycine max
agggaatctgaaaaaaatgatgatatggctgctcaggatcatgctaagcagtctttgaagcaaaaaaatgagtctgaaaatgatgctattatggtgcccgagaacagaggtttatgttcaggtgcaactggtcttgatgctgaatatgtggaagagaattcaggtacaaaagaggtttgtgaccaagatgcaggagcaggacagatactgcacacagatttacctagctttccttcacgagaaatggatcagcattcaggtcaaagggattcaaaattggctgccatggaatcagaggaagcagaggaatgcacctctaccactggagatgcctcttctgcatctgttgctggtgtctcagaagtggacacaaaagttgaatttgatttaaatgaaaggctcaatgcaga

SEQ ID NO: 10557 - DNA, 411 bp, Glycine max
agggaacaggcacatacatacctgacttgaattacaattcctactgggatatgagcaccaaggcacctaggccaaggagatttccttcttcaaagcacaatgcatttcccagatcacgtctgagaaagaaacaagtggaagaggttcattctgagatagacataaatgcgaattcagattcaaggttgtttgagttcttaaatgaagatttccccgttcttccatgcaattccaaggctataccgccaacacaagccgaagagtctacgccattagaaaagtttcattctgagacagacatggatggtacttctcggtcatttgagttctcaaatgaagatttcccacttcttccaaaggtttgttctgagacacacatggatggtaattcaaggtcatttgggctttcaa

SEQ ID NO: 10558 - DNA, 415 bp, Glycine max
  modified_base (364)..(364): a, c, g, t, unknown, or other
aggctttcttggttgaagagacagggaaagtgagggatgagcataccgaggacatttcagtttcccaagctatttcaattgtgctagataggcacccagaactaaggcaacaaggacttgcccatgaagtgctacaatggtttatatgcagaatggaagcttggtttgctgctgatgcagatatgatttcactgaaaacctgggatcaggaacatgtcctgtctggtggtcatggactcatggtgcaaggatatgatccaatcataaaagttcttgcaaaagatattgacatatgcttgaaccaaagggtgaaaatgatatctagtggttacaacaaggtaatggtcacggtcgaagatggcangaactttgttgctgatgctgctatcataactgttcctattggaatcctaaa

SEQ ID NO: 10559 - DNA, 413 bp, Glycine max
aggttcatactaagttctgaaaatgagttccaaggttttgcttgttctacttatgttcttggccactatacttctgatctcctctgaggttgcacccgatgatgcatacgagaattttgacaaaatagatgggaagcctagtgcagatggggtagatgaaagcaagtattggcgtggcggctatggtggcggctatggtggtggttatggaggtgggcgtggaggctatggaggtgggcgtggaggctatggagggggacgtggtggatatggcggcggacgaggtggctatggtggcgggcgtggtggctatggcggcgggcgtggtggcgggcgtggtggctatggtcctaatgaacataacgaggctggggttgatgctaaccctcacaactaagaaggcaactttctaa

SEQ ID NO: 10560 - DNA, 421 bp, Glycine max
agcccacgcgtccgcccacgcgtccgccaacttcgatccctccccctccggccaccaccgtccccttcactgtcgaacccagcaatcacgtgacccccgccgacaacaccaacaccaaccaccctccttacgatgagatgatatacacagcaatcggggctctgaaggagaaagatggttcgagcaagcgagccataggaaagtacatggaacaagtgtacaaggaccttccacccacccactctgctttgttgactcaccatctcaaccgattgaaatccgctggtcttctcatcctcgtcaaaaaatcctacaagctccccggatctgatcctcttcccgtgctccaggcccaaaagccccgcggtcgccccccaaagctcaaatcccagcccaacactgagctcacatggcctgcgct

SEQ ID NO: 10561 - DNA, 387 bp, Glycine max
acgtcagctttctgcagtcggcgcctcttcgctttctcttgaagcttacaatgtctgtgctgttgatgattcaggatggatagtgctgtgttggcatgtacgcatgtatcagttcttcccgtcagtcacgtgttggagaccttgacataccttgggaatcgagggcatgagctatgggatcctcttgtccttacttctgcctcattcttaagtcaattgcctgtagattcttcctctgtagactttgtgacattaagctggctgtcagtagactgtcctgtggatcaactgattcacgatcaacttagagtgtaaaaagtaaatggtacaactctgatgcgcaagtcatctcagtctgcagtgggtacatttaaggagatgatatct

SEQ ID NO: 10562 - DNA, 411 bp, Glycine max
  modified_base (397)..(397): a, c, g, t, unknown, or other
agcgaaacagagggattataaaaagagaagttactcgatagttcaaatcagaagatggttcctgtcacaccaactcaataacagatcaaaccaaacccaaactgttaggtttcctttgtttggtgtgaagccatggctgattcttcttccaacctgaaatccgacgcgataatggagcagatgaagcaacacctcgccaccgacgctggcaaacaagtcaccaataaaattggactcgtttatcagtttcacattgctcctaagaaacttggattcgacgaggtcgtctacaccgttgatctcaagaaaggagaggtcaccaaagggtcatatgaaggaagaaagcctgatgcatctttttcgtttaaggatgaagactttgttaaggttgccttanggaagatgaatccg

SEQ ID NO: 10563 - DNA, 404 bp, Glycine max
  modified_base (306)..(306): a, c, g, t, unknown, or other
aaccaacgcgtccgcccacgcgtccgcgtccttccacgtggccttgcaaacagggcacaccaagcttccatgcttgcgtacatgcgctgcgatgcacgggaaatgaaacgcgtgaccgcattccgctgtgtatatcgccgtaccctgtcctgtcttcacgctgttcaagcaaattccacagctactctgctcaaccataacaaatcacaatcattgaatactccatacatgggaatcttaaaaagatgaaagaagcatgacataccctgaatttgaagctgttcttgaagagggagagcttgagangggagcgtggagaagttggatttgagactgatggtgatttcgttgctctgggggtgttcttgctttgaactctgggactatcacttaatgtaactgtt

SEQ ID NO: 10564 - DNA, 422 bp, Glycine max
agcccacgcgtccgcccacgcgtccgcccacgcgtccgcatattcttcttcttcttgttcttgttctatctgtgacgagcatcatggcctcgagagcagtgctattgttggctatgtgtgtgcttccggccatggttgtggccattcgcccagcaaagaaccctttttgcgtgaagggtcgcgtctactgtgacccttgccgtgctggttttgagacctcagcaaccacctacattgccggtgctgagattatgttgcaatgcaagagcagggttagcaacgaggttgtgtacaccaagaaggggtacactgactcaactggagcatacacaatgtacgtggacgaggatcacgcagattaaatatgcagtgccaagcttgtaagcagccctcaccctcaatgcaaggaagtcaccccgggc

SEQ ID NO: 10565 - DNA, 426 bp, Glycine max
atcaggggtgactgtgaagcgatctcagagccattgctgacgttaaaatagagtatagaattagagtcagcgagcgaaagaggggttttggaacgtgcaagatccggtgctctaatctctgcattctgtgatggctccaaaaccgataacgagtcccgtccccgattcgtggtaccccacgctctccgtcttcaccctcgccatcggcctcgtcttaaccgcctctttcttcatttatgaagcaacatcttctaggaaaagtcgttcacttgttcaggagctgacaactggtgcagtggcttcagtcttcttgggttttgggtccttgttcctcctacttgcttctggtgtttatgtctaatttaaacattgaattggatgaaaattttgctaagcagatagctttaaatgaaaaattgcattgga

SEQ ID NO: 10566 - DNA, 201 bp, Glycine max
accacacgtccggatagtatccatacctagtagtaactgagcacgacctcgtcgaacaggagtctaagatgtattcgccgcgcagaatgctccaagaaagacatctagatgagtcaaccttgataaaagttctaaagttgggactccaaatatagtggcctaagagacacatcatgagaattctcctgacaatcgaagcac

SEQ ID NO: 10567 - DNA, 374 bp, Glycine max
aatcactttcaggtccgccattgtaagagcatcaatcacaatacgataaccgaacccaagcgattcgattccatgcaggaagcaataatagaatacgcatattcgattcctcgtcccaaaccctattccgctatttcgagtccgattccagcgagatcccaagtgacacagcagatccctaaaattaaaattccgtttcggagagatccaagtctcttcatggcgcctcgtggagccacgctgttgttccttctatgcgctctctgctattctctcatcgctattgctggaaagagctattacgatatacttcaactttctaacggtgcgtcagacgatcagattcagagagcgtatacgaagctagcattgaa

SEQ ID NO: 10568 - DNA, 418 bp, Glycine max
atccgaccacgcgtccgccttgatatgatccgcaagattgctgatgatgatcctgacgactcaactgacagagaaaagaaagatgcatcctctgacaatgatgacaagaatggtcaatattctaagttctggaatgagtttggtaaatccataaaacttggtatcatcgaggatgccaccaacagaaatcgtttggcaaaactgctcagatttgatagcaccaagtctgagggtaaattgacatctctggatcagtagatatctagaatgaaaactgggcagaatgatagcttttacatatctggaaccagcagagaacaactggaaaactctcccatccttgaacggcctaagaagataaattttgatgttattgtcttcacggattcagttgatgagtacttgatgcaatacctga

SEQ ID NO: 10569 - DNA, 433 bp, Glycine max
aacatatatagaagagccttccatatatagcctcccaaaagaatgaagagtactatctctttggctctctttctactttgtgccctaacttcatcatatcagccttcagccatcgctgatattgtattcgacatcgaatgcaatcctattcgatacagcggcacatactatgtgttgccagttataagaggaaagggcggcagaatagaatttgccaaaaccgaagcagaaacatgccctctcactgttgtgcaatctccctttgaggtctcaaaaggtcgaccactgataatttcatcgccatttaaaatccttgacatcaccgactgacttattttgagcctcagtttcacttaagtatccccctgtgcctcaactccttctcggtggaccgttattctcaatggtctgccagaagaactccaatgttaac

SEQ ID NO: 10570 - DNA, 375 bp, Glycine max
aacaaagtggtccaattgctataggcgtgaatgcacttttcatgcaaacatacattggcggtgtctcacgctctctcatatgtaccaagatcaggatgaaacacggtgtgtaacgtgtaggatatggtgcaaaaggcttctcaattcatacgcttggcaggaaaacacactggatcatcaagaattcgtggggggagaaatggggagaagatggctattacagactctgcagatggcatggcaagtgtggtacaaacaccatggtttctgctgcaagggtgacgcatccacacttaacacctacatagaattatgcatcttattaactatgcacttaaggacatctatttcaataatttgcactctaggtgatgt

SEQ ID NO: 10571 - DNA, 440 bp, Glycine max
aacaagcgtccgcccaagcctccgcgaaaattccgttgagaacaataacaatgggcttcaaagaattccaattcgaagatgaaaatcgtacatggcaatgctggttacatacttgaagacgttcctcacttcgccgactatattccaaatcttcctacatatccgaatccgcttcgatccaatcctgcttactcggttgttaagcagtatttcgtgcacatggacgacactgttcctcagaagggcctcggcaaaaggtatactttaaatcggatgaagtgcatgcatgcattgtcacgtgtggtggactctgccctggcctcaacactgtcataagggaaattgtctgtggtctttcctacatgtatggtgttaacaaagtccttggcatagatggtggttatagacgcttttattccaaaaacaccattactttaaca

SEQ ID NO: 10572 - DNA, 344 bp, Glycine max
acaacgcgtgggcggacgcgtgggcggacgcgtgggtgtcgatgtcagttccatgttcatagttaggaaaaacggcaaaacttcactgcacaatgctgctaggtatggtgtccatcgtattgtaaaaacacttattgctcgggatccaggaatagtatgcatcaaagataaaaaaggtcaaactgcactgcatatggcggttaaaggacagtgtacttcagttgtggaggagatattactagctgatccttctattttgaatgagcgagataagaagggtaatacagctcttcacatggctacaaggaaatgccgttcacagatagtgggccttttgctaagct

SEQ ID NO: 10573 - DNA, 444 bp, Glycine max
  modified_base (418)..(418): a, c, g, t, unknown, or other
agaaaattacgaaagagtattgaaaaattggggttaaggaaaaggtgaacggtgaagagctgtttatctctcgagtgctgagaaaaaggtgccattgtccatttctcgatccgtaaattttgctgtgcgttttcgttattttcgcatgttctgcaccgatcttttgtttcgcatgaatataataagctcctgatattattcggaactttcttcttcgtttttcttttctcgaacaatttcggaatttctggtctgagtttttctcgtttccccaaatattagggttccttcaacgctcttttcgagatgttgatcgctgactgaaacaaatcaattgcatgataagtaaattgattgataataatggaattgtctttattgatgttgattccgtggattcaaaccagttccgtacacnttggtttgaagagaaacaacgacaat

SEQ ID NO: 10574 - DNA, 339 bp, Glycine max
accaaacgtccggcgctaactcctgttaaattcctccccaacttaccaatccctcaccttgggttaaaaccaacaagggtttgccaaaccaattaaacgacgtgtcctccggttcgattccgcttctggggttggcgcagatagtcacctgcgtcaactacctccgctccatgcctttcgcgcttatgcaaaccctacgtctcagccgactccactccgatcagatcgtcgacgagcgcttcctcaccgccgtcggattaggcctcgccggacttatcatgctcaccgatcagctcatcctcagcagacaattcttccaccatctacacggcaccgccg

SEQ ID NO: 10575 - DNA, 428 bp, Glycine max
  modified_base (293)..(293): a, c, g, t, unknown, or other
agcgaccatctcatccacgtcaccgccgtcgatatctccgtcgcagacctcctctccccgtcgtcgtcgtcgtcgtcgtccgatgtccctccaatcgtcaaacagctcttcgccttcgaccacggtatgagttacaccgctcagtccacgccaatcatggccttccaggtcaacgacctcgccgacggcatcttcctcggctgcgccgtcagtcatgccgtcaccgacggcgcctccttctggaacttcttcaacaccttcgccggaatctcaatacgagccacgaactctcnctccatcctcccggattttcgtcgcgaatccatcatcaactccaatgtcgtgctccgcctgccacaagaaatgcaagtgacctttaatgtagacgaggcttttcgcgagagaatcttcagcttcagccgctaatc

SEQ ID NO: 10576 - DNA, 400 bp, Glycine max
ggccgtttgaagtttgaagtttgaagtttaaacatagagaaacgaaattgaatgcaacccaacaaaacacattaactcccatttccattcattcatcctcaaactttttttataaaaaaaccaatcttgctcacctcggagagagagagaaatagaatgaccggagtggtcatggtgaccaagggcggtggatgcggcggcggcgggaagcggacgaggtcggcgcgaaccgccgaggaggaagaagagcagcagaaccagctgtcgctggtggcgcttctcttggcggccatcagaaaatcgatggtgtcgtgcagggtggacccacccgaggacgtaatctccaccgtccatcacatggagatcggatggccaaccaacgtccagcacatcactcatg

SEQ ID NO: 10577 - DNA, 426 bp, Glycine max
attaatcctacaatggattatgtgttatctttctgttaacggttaaggtgtatgtagattcaggaccggcgaggtgttaccggcagataaagaacataccgtactcgaaatcccgtttctgccgcggcgtgccggagccgaggatccgaatctacgacgtgggaatgaacaagaaaggcgtggacgagtacccgttctgcgtgcacctggtctcgtgggagaaggagaacgtctccagcgaggctttggacgcggcgcgcatctcatgcaacaagtacatggccaagttcgccggaaaagatgccttccacctgcgcgtgacggtacatcacttccacgtgctccgcatcaacaagatgctatcgtgcgccagggccgacaggctccatatcggtatgaagggcacctttgggaaaccgcaaggga

SEQ ID NO: 10578 - DNA, 307 bp, Glycine max
ataaagcatcggcgtcaatttcgccgccaacttcgccacatcccttcgcatactcgctaacaggccctcaatcgggtcgtcaaactggcaggggagctgcattcgctgtcgaggtcgcagtgaaagttgcagtaacagttgcagcagccgacgcagtgtacgccggatcactcacgcaaaagctcaagtgtatcctgctgtgtttcatggcagtttcgatcgacgtactgggctaatcaaacgggctaacgaacggcgcgaagatctccgtcgatcgatctttcgtgaggcattctgccaggcatgc

SEQ ID NO: 10579 - DNA, 423 bp, Glycine max
atagaatagatagattctctgaagatgaatccaagggtgaagaaaatggaactggtggtaaccaagggttacggggatatggatgtggatgatgttctcaggacaaatgaagacctggttgtgaagagtggctcaaaattgttgccaggacatcttgaatactcgagacttgtgaatgcaaatattcaggaccctgctaatggtcccataaattcagtcgagttccatccgaatgcgcagttgtttcttgcagctggattggaccggaagcttagattttttcaaattgatggcaagcggaacagcacaattcagagcgtcttccttgaagattgccccattcgaaaagcctcttttttgccagatggatctcaggttatagtatcgggaagaagaaagttcttttatagttttgatttagtt

SEQ ID NO: 10580 - DNA, 428 bp, Glycine max
  modified_base (377)..(377): a, c, g, t, unknown, or other
aaaaaattataatttctattacatacattttgtagctaggatgagcaagttactactcattcgtgttgctgggttcgtggcaacctttgtcaccatggtgatgatgatggtgcccaaaaacgtgagtgcccaaaacataggtgatgacatcgtcacacaagacttcttcaacagcataatcagtcaggctgatgatggttgtgcagggaagaacttctactcacgagatgctttccttaatgctcacaattcctacaatgagtttggtacgcttggtaatcaggatgactccaagcgtgaggttgcagctgctttcgcccatttcacccatgaaacaggacatttttgctacatagaagagattaacggtgcatcangggactactgtgacgagagcaacaccgagtacccatgtgcccctaacaaag

SEQ ID NO: 10581 - DNA, 372 bp, Glycine max
aagcaatcggagggtaagatttctacgacgtgagcaaagtggatagccttcaacttcccaatttcgttaccccgcaagggtggaattgttgattgcatggcacaagtttgcgcgaaaacattaactctgtgtagcctgcagatcttcacgtcatcaggtccgatggcaacgtcatcacttgcaataatgcttgcgatgcttgtacaggtaatagattctgctgcactggacctatcaataccgcacagacatgtcaacctaagatcgactcgcatattttccaggatcactgtccccatgcggattcctacgcttacgatgatttgagcaacactttcagatgcttcaacaagcctgaatatacgatcacat

SEQ ID NO: 10582 - DNA, 293 bp, Glycine max
accaaacgtccgggttggattggttacatgcgcgtaatttcctcaaccacggatatgttgtatttgattacttagtacgcaacgcagtctctcgattcgcgaactggttactcacagcattggttcgggaactgattccagcttcaagctgtctggtgctcgcactgtatgatcccctaaagtcaggctaatccaacccgtcatgtacatcgtcgacgtcgacatcgagtggtggttccatggtcagcactcacagtagtttctgatccacatgctcaacggagactccactg

SEQ ID NO: 10583 - DNA, 396 bp, Glycine max
atcacgcgtccgggacatcacatggagagcatggagattctgctaaaattgagttcagagatgcccttaaattgttggcggaacagctgggacacatgacttattttggaggagacaatctaagttttgtggatataacgcttgttccattctacacttggttcacagcctatgagacttttggcaccttcaacatagagagtgagtgccccaagtttattgcttgggccaagaggtgccttcagacagtaagcgttgccaagtctcgtcctgatcagtataaggtttatgagttcattatggatctatgaatgacgttaggcattgagtaagttggaacttaatggccattgtgaactaatggttttccactggtcgttcatagcctttcaaata

SEQ ID NO: 10584 - DNA, 412 bp, Glycine max
atccgagactaccacaccctcaatgcgtgcatggcgttgaggttgtttccacactcaatctgatgaccctggatgaagatgatcgaaaaacgtggatagaactcactggctgaaacttgaattttacaattccaactgaagcaagtgatttcagttcatggagaaatcttcccaacacggactttgagcttgagatgccacctcccccaatcaagaatggtcataatgcacacccgattaagctgcataatggatctggacttaacggatctggcctgaacggatctggtcttaatggatctggacttcacctatctaaccacagtaatgatgataggttggacctctctcctgtcagcagcaagaagatgaaagaccttttccctcatgggaatgaagaagaatgttacct

SEQ ID NO: 10585 - DNA, 380 bp, Glycine max
aaccgattcaacgttgaggttcatttttaatgagctcattgctttgataaaggatactcgtcaacatacaggatatattgagtggcacattaagatttaagatgtatacatagatgcttctcatgagacgctggtcgacgctattctgctggcatcttgcgagacagaacagtccatctagaagtatccctatggaatttggtcaaagtgggtcatctatgttcgctcccaaagctcatgtggctgccatgcgtgcgattgcctactcaagttcgtgggtatggttctcatgatgctcacattcatgacaagtaatcttaagacgctatgagattgtaagttccattgcctcacacaactttacgtgatgaatccatgac

SEQ ID NO: 10586 - DNA, 391 bp, Glycine max
attaattcttctgggacactctagtttcgctaatagggagcactactggtctgggagtgacatcattgaatacaaaggaactggtagataatttgcatcattatggagtaatcacatctataacggtagctgaagtaatggtgaccattgatacagcattgtgtatacccacctgcggtggacactaaccatatgtgcacagtcctatgccgattggctacaatgccaccatcgctgctccgcatatgcatgccacctgtacttcagttgcttgagaagaatttgcaacctggaatgcatgttcttgaccttggatccggatcaggataccagacagcatgctttgccatgatggatgataccccacagccgtactattgctgtcgcacat

SEQ ID NO: 10587 - DNA, 311 bp, Glycine max
agcaaatggccgactagattcccttcagcatgatctgcatgctcgcccgtcacgttcccgaaagcggagcacatcctcctctgctgagccctcgattgacacgaccgcaccgacgattggatcactcgcatgatacagatccggactgaatgcgtcacgaatcagagtgtcgtgaaaatcatcaccaccgacgacgccgtcgattccagtcacggcaacaatgacggtgccaccattttctccggcgatactagtcactctactctcatgtgtgccctgatgtcggtttattcccgggacattgtcgttca

SEQ ID NO: 10588 - DNA, 384 bp, Glycine max
aaaactagtaatattattcttcgaatccattttattattcataatgggtattttcacatttgaggatgaaaccacctcccctgtggctcctgctaccctttacatagctctagttacagatgccgacaacgtcatcccaaaggctgtcgaagccttcaggagtgttgaaaaccttgaggggaacggtggctctggaaccatcaagaagatcactttcgttgatgatggagaaagcaagtttgtgttgcacaaaatagaatcagttgatgaggcaaacttgggatacagctatagcgtagttggtggggttgggttgccagacacgtgtggagaatatcacattcgaatgcaaatttgctgctggcgccaacggagggtctgctg

SEQ ID NO: 10589 - DNA, 370 bp, Glycine max
aaagagtgacgcatacacagccatccaaacctacctgagtgcaaactcatcccatagagccatgaggctcaaagctgaagttgtgaatgatagccatacccctcttgtcctcagcatggattacaacgatgagataactgacgagtttcatggcatcaaactatggtggagtgcaaacaaagtaagcagcagtccacaaagatacaaccctttttcttattacggttcctcagactagaaaaggttctacaagctaacattccataagcgccaccgtgatattgtcatcatgtcttacataaagcatgttttggatgagggaaaggatattgagatgagaaacagacagttgaagctttacaccaacaat

SEQ ID NO: 10590 - DNA, 410 bp, Glycine max
attcactcgccaatgcacatcacaaatgcctgatgattttctcactctggatgacttatattacattgtcagtacatcacccgaaggaaatatcatagctttgaagtttgacacaatgaactggctcattagtatgcataataagtgggtcctttagattctgtcgtgtatgttctcctaagttgtctgtgtctatttaccatcacttcaacgtctcatgaagggcctgagacgtcatataagtgtgcgtggaacagaagaataaagttcgtcattgtagctatattttgaatgatataacttgccttatgtatactaacaatgaaaatcattatactataaatttgttaaatctctttacaagatctcgtagtactacatagtattgttgcaacaactacacatgaaac

SEQ ID NO: 10591 - DNA, 412 bp, Glycine max
aaccgcccacgcgtccgggacatcaaaaggagaagaaagtgaagctgctaagaaggagttcatataagcccttaaattgttggaggaacagctgggagacaagacttattttggaggagacaatctaggttttgtggatatagcgcttgttccattctacacttggttcaaagcctatgagacttttggcaccctcaacatacagagtgagtgccccaagtttattgcttgggccaagaggtgccttcagaaagaaagcgttgccaagtctcttcctgatcagcaaaaggtttatgagttcattatggatcgaagaaagaagttaggcattgagtacgttggagcttaatggccaatgtgaagtactggttttccattggtcgttcatagccgttcaaataagtaatatttg

SEQ ID NO: 10592 - DNA, 430 bp, Glycine max
atccgaagagttcacgcagtttgttctgaagatgagtggcttttctgtgaaatttatgatggctttaatgggagagatgcagctgactttctgataccctttatgactttatcatatcttattttaagatgttatactgggatttggaaccagattccataaaagcttctaacattgcgagtatgggtggatcctttcaatataattttgatgatagtcttaatcttcaggagcatcaatctctgtcatcatttaagggaagcgattccagtcttgactgtttcacagacagtactccacattccaattcagaagcatctcctaaatcattttcacaaactacagtacttaatggcctccaacatgttcttactcaggttgagaatgatttcctgtacatggctgagtaggaaatggacgaacatccaga

SEQ ID NO: 10593 - DNA, 424 bp, Glycine max
cgcgaaccaacaatcgcggagatggtctgctgactgctatacgtaaagaatgtctaagagttatggattataaagagttgcttttaaacgattgtggcgatcgcgttgctcagttgttacatgttcagtcagctaccccctttgtacaaaacccaaaaggcagtgttcctcaagagtttctgattgtgaacacccacctgttatttcctcatgattcaagtctttgtgtagtgagattgaatcaggtttaccagatattgcaatatgtggaattgtatcagagagaaaacaggctcaaacccatgcctattatactctgtggtgactggaatggaagcaagcgtgggcatgtttacaagttcctaaggtcacaggggtttgtatcatcatatgacattgctaatcaatacagtgacagttatgc

SEQ ID NO: 10594 - DNA, 354 bp, Glycine max
aattcaccctcgtgctcggcgttcgtctgctagcagtaagcactttggtttgtctcgtcaagttggattatccctagagccttaacacaatagcggccatgacatagatcaattattgtagcgacattagtcgatacgcagagaaggggaaccacagagtccagttcgacacccggttctgagttccaatcagcagatgacgatcccacacgtcacgaccctacgtacactgtagcagccacacgtttatccgttgctatgattgctgaagttgagatccatgagttagatgcacaggacgaagcatcttacgccaccgtcaggagagaaagaatggtaagtcttcactcctat

SEQ ID NO: 10595 - DNA, 424 bp, Glycine max
acaacgcgtccgcccacgcgtccgggagagaccattcaatataaggacattggctcaactttcagtttttgaggcagatgtgtaaatctgactcaagaagactgttagttggtaacatccacgtactttacaacccaaacaggggagaagttaaattaggtcaaattcgttttctcttgtcaagagcacaatacctctcagagaaatggggtaatacccctgttgtgctagctggtgattttaatagtactcctcagagtggaatatataagttcttgtcatcatctgagcttaatgtcttgctgtattacagaaaggaattatctggacagaaacgctgtcgtcctgcccaagttttaggcgagaataaacaaacagttggtccaattgtcacactatatggggctcaaattgtacacaggga

SEQ ID NO: 10596 - DNA, 414 bp, Glycine max
aactcagagaggaaagatggcatttttgtggtcagatctgatgcaacaagggtaagcagccaggttctgaaggctggagctcgtaagcatgaattgttagttactaatgcagttgcaacaaaggaaggccgtcctgcggcttctacatcaaaatctgggcatgaacttctcctttttgaggccctacgtgaaggtttggaagaagaaatggagagggatccttgtgtatgtgtcatgggcgaagatgtaggtcactatggaggatcctacaaggtgactaaaggtcttgccacaaagtttggggaccttagagttttggacacccctattgctgagaactccttcacggggcatggcattggggctgccatgactggtctgaggccagttgttgagggcatgaacatgggattc

SEQ ID NO: 10597 - DNA, 399 bp, Glycine max
  modified_base (206)..(206): a, c, g, t, unknown, or other
atcaacatgccccctactattcgagctttcatcatcaagtattgcatctccacgtacgcgcatggcgaaatcacatagcagcctgaggattgccctcatcgggcatcagacgcaccgtcatcaactctagagttcacctcagctcatccaccgtatggttagagcgttgcttgcgacccatggccgacgaatatgcgaccaagtcnagtgccaaacgtaagcacagtactacgtccgtgaccgacaagccatcacgcgtctctgctcaagacgttaatgaagcgctactacgatgcaacctaataactttgatatctctgcttgttagatgatcacttttgtttctcaagtcacagcacgacacacctagttgctcatgattctaagaatttttttttt

SEQ ID NO: 10598 - DNA, 437 bp, Glycine max
  modified_base (410)..(410): a, c, g, t, unknown, or other
atttacgtgtagtaaattctatggataccatggcatgtaataaagggcaaaccgtgagaaatgcgaagaagaagcaggtgaaagacgagttggatcgtcttaaacaggctgagaagaaaaagaggcgcttggaaaaagcactggctacttctgccgccattatttctgaactggagaaaaagaaacagaaaaagaaagaagagcagcagaggctcgacgaagagggcgctgctattgctgaggctgttgctctgcatgtgctacttggggaagactcggacgagtcgtgtaaggttgtgatcgatgacggtgggtgcaagacctggaactgcaaccgaactctcggcatctccttgggtggagaaagtgcttgcttccctcatctagatggtggcagatggtcttttganagagtggttgggtctctgatgcataca

SEQ ID NO: 10599 - DNA, 425 bp, Glycine max
atccacctgcaattgagaatcttatggagcttctcacaatgattgatgcctgcatgagggcttcagccaaaaatattactgctgtcattccatattttggatatgccacagctgatagaaagacgcaaggacgtgaatccattgctgccaagcttgtagcaaatttaattacagaagcatgtgcaaatcgtgtacttgcttgtgacctccattctgggcagtccatgggctattttgatattccagttgatcatgtgtatggccagcctgttatacttgattaccttgccagcaagactatttgttcagatgatttggtagttgtctcgccagatgttggtggtgttgccagagcacgtgcttttgccaaaaaattatctgatgctcctttagctattgttgataaaacgcgccatgggcataat

SEQ ID NO: 10600 - DNA, 374 bp, Glycine max
tccatacctcgcgcctgccgctaatggggcgccttccatgtcaggaaccatggcgtacccccttcactcatcacctcccgccgccgcgccggcctcaccatcttctcggacactcacattcctgacaagctctgggactcctgctcggcctccgctcacgaaggttactgaagcaaaatgctcgcatcaactatctccgatgaaaacgatgccgttcaggtcctcgattgaaaggactacttcgaccaccatacgctgctactctcacgccggaactctaacaggtggccggagtttcataccgactatcgtgagctggtggcgacgtataacgactagatgacgattctggcgcaaaagttgctggctttgat

SEQ ID NO: 10601 - DNA, 417 bp, Glycine max
aacattcctccttgctccccaacataaaggcttttttgtgcgcaatgatatttttcactttgttgaaaaggatccagttcaccaacaacaaccattcttgtgacctcagagcactcttgattcaaaattgaatgcatcaattgcaaccaataaatctgtgtccaaatacatgctgggtggagatatccaatctatggactacgttgctacaaatgatgtcacagaaaatggtgtagttgataaatatggattttcagagcaaatcatgcagcgagcccctgatactgagcatattagggaggataatactgttgaagagtcaaatggttcacttcaatcttcagtgaatgcagtacaagaccatgtgcctgtttctcctgatgaacctgctggggagctacaaaagcacacttatgc

SEQ ID NO: 10602 - DNA, 423 bp, Glycine max
atccatggatgacaactggattggttttgtcttttgtgttacatttgagcggaacattattcgtcctgcggtttctagtagttctccacattgttcattttcttcgtcacatccgtttcgtctttcttttgaaagtgaatacacagaagaatactttgacatgccacttaatttggagttgaacaagatttatggatcaaaacatctttgggtcatttatatctctcgagaacactgccattttgtgaaaacaggggctcatatcacatttaaagcccactcaagtgttaagatcaatgcatggggcatgaagagtatattcaggcaagatatagatgaccttgaaaggatgcaacaaggagaatctcttccactccatcctaatgatgtagtacaccatgttgactttgatagtgtagaaaa

SEQ ID NO: 10603 - DNA, 174 bp, Glycine max
atcaaacgtccgcctactcttccggcaattgttgtaactttttgagtcttaacgtcagtaaaagtcgaaattactttgtcgttaggggaaagagattgtgtgtgtctcagtcactatcgctggatcgagcgaaggtcttaccagctgaatcgatttgggaacgacttacttgtg

SEQ ID NO: 10604 - DNA, 311 bp, Glycine max
atcaagtacctacgcacagatagatcttgttttttttctgcctccatcattttctcgagagctttcagtttgtgtggctcatctttcttcgtctccttcactcgcccctcagtaacagcccgcctctctgaatcgctttccgtgattcatctgtcgttcaagctaagattttcgggcatgtctaggacgtcaccaagaagcaaacttacaaagatgtttcgaaagctacgtgttttcaggaacgagatgcaagttttattgtcgactttcgctagtccaattaagtttcagaactacatgtttcattgaaa

SEQ ID NO: 10605 - DNA, 433 bp, Glycine max
atccgaaacatctttccctccccttctgcttcaaaaagcttcgcttcgcggacttcttccttctccgctgctcatgcactcttcggatagaccgttccgctactggagcgaccgcgggtagtccacctcatctgctcactatcagatcctagagtacagtggtcgctggtgtcatcgaagggcttgatgggaagatcgctatcatggacaatgaaaatcgttacactggaaacttgacaagtcatctaaagcctggtggcggcgattttggaaacttctacaggcttccttctgtcaatgatttgagaattgacatgttaccatgatccatcagaattctccttgaatctgctattcgtacttgtgacaattttcatgtcaaatgcagaagattttgataagatactcgattgtgaaaataattctacgaagc

SEQ ID NO: 10606 - DNA, 314 bp, Glycine max
aagacacatccagactcgaagccgaagaagacgatcctcataatactgccaacagcaccggatgcagcaatgagcatgacattccagatccctcccttcagccgagtcaaggatcacatgttcaaacaccatggtggcaaagggttcgtctctggccctatgacgtcagttaaagccagaagaaaatcatcagatggtctgtgttgatacgcaagatctcacatctcacatgatcgcctgcatgtgacagatcttgcccacgacgatcaagtagcaaatcaataatgcggaacagatcatgtctatccctacat

SEQ ID NO: 10607 - DNA, 416 bp, Glycine max
acattcaacaagaaacaagaagacgtgcttttcaataccaagaagcaattatgcatttcctcagagtcacaagggaaacaagttgctgttttccaatgtgaaagtaatggagagttagttcttgaactcatttctcgcccaagtttcaattttagaggagtaaggccagccaaagtattgggaaaaacttcaatcaatctgggggatttgcaagatgtagcatctaaattgccaaaagagaagtggttagatttgacatctacagtcaattggtcaaagcctattggtattcgcattggtttgtctttaactcctccagtttcggcaccatatgagttgcactttgtttctatgtatccattcaaaggaagttagttttccttcctgcttccaagaaagttccagcaaacaaaatg

SEQ ID NO: 10608 - DNA, 369 bp, Glycine max
atctacttcaaccttgcggatcaagaagacgccgcagccatggtgaactactccatagaatccgacaatcccaccatagtcctgcaaggccagatgcgcttagcttacagtgcatttcacgaacactatggagactgcctttgccatcacgaagttgcccctagttaaagctaacagatacctgcacgatattttggcccacagacaggccatccctttccgacgcttctgtagtggtgttcggacgacagcccaggctaacagcagacactcgaatggtcaatgacgctggcccgtcaaatcagctaagttcatcctagatttgctgaagaacgctgagagtaatgctgacgtacaaggtttggatat

SEQ ID NO: 10609 - DNA, 58 bp, Glycine max
aaacaaatgtcagcactaagtgcagtaagcaaatctgcgtatcattaactaccttttc

SEQ ID NO: 10610 - DNA, 434 bp, Glycine max
atgcacacaggatgcacattcaaccatcgttatgtgaaatcaaatccacgagaagtagagaatgccacttggatgctcacagtatttcattgttttggccaatatttctgccttcattttgaagctttccagcttggcatggcccctgtatacatggcattccttcgttttatgggtgatgaaaatgaggctcggaattatagctatagcctagaggttggggccaatggtaggaaactcatttgggagggtacaccacgaagtgttcgtgatagtcaccgtaaggttagggatagccatgatgggctcattattcaaagaaatatggccctatttttctctggtggggatagaaaggagctgaagctcagagtcacaggaagaatatggaaagaacagaattcagatgctggggtgttgcatgcaaatctctg

SEQ ID NO: 10611 - DNA, 73 bp, Glycine max
aagaaacgcagccggtaacactgctcacgccacctccggaaaattcgcaaccaccatttgccagccacgatca

SEQ ID NO: 10612 - DNA, 435 bp, Glycine max
atccaaggacgcgtggggtgccccgcgcgcggtatccaattaccgacaataacaacattgggtggtaacaaaaacaaaatccgcggttgtgcgtttttaaccttaattaataacaacaggatcatgaaacagctccacaagcaaacgagtctgaatcaccggagggaggaagagatgttggggagcagcgagagctcaccctactcccccaaatccatcaagcacaccagatctctccccagatccatcaactacctcctccgcgagcagcgcctcttgttcatcctcgtcggcatcctcatcggctccaccttcttcatcatccagcccactctctcccgcatgggcccacccgagccggcccacacattcctccctcgaaccgggcttgcccgcttcagcggcacaaggcctcgcacgggccgcgttccggtc

SEQ ID NO: 10613 - DNA, 370 bp, Glycine max
aggaaagtgcagtggacagatacttgtggtagtgagcttgttgaaatacgggaatttgagcccagcgacgcggatgggtcagttgatgaattcgaccatgggaatcacaaaacttgttcctgtgctattatgtaaattggcattccaaaagatgacagagtcacagacccatttatgaggtatcaagtcgttgattgctaacatattccaccactcagcttgaggaaaaggagcagatatttttcagtctagtggagatttatacacctcttttgcctgagcaatcatttgtgtctataaatgcttgctgtggccttcaaattttgtgcctctgctttcatcaatttttgtgtaatctttgtcgtgtgaa

SEQ ID NO: 10614 - DNA, 368 bp, Glycine max
ataaaacgacgacaatgcgatcaagaagcgtggttgggtcacgtggacgtagcagagaggtctctgattaaactttcacgctcacacctctcatacacaacgcaatccaaattttccttgcgtcttttcgtccatggatttggattggtcgtgttcttccaccatcagcatcaccaccggcaacccctactgtctcctcttccaagcgctatcactcattccaatctcgcactagctcctcttctcctccttcgttttcctctccttcctctaccgtttcctggagctccatttcctccaagacctcttctccctcttctccggctcctccgtcaccttaacctaccatcgcgcttcccaattctacg

SEQ ID NO: 10615 - DNA, 393 bp, Glycine max
cccacgcgtccggtcttctcaactacgctactatgtatatatgtttttgcattttgctgggtctacattgtaagaattatggcatcagaggagacaacaatttggaaggcaatgataaaaactccagcctccatagtgttgataatttacacctttatatcaatgtggtttgtaggtggcctcactgccttccatttgtatttgataagtaccaatcagactgcatatgaaaacttcagataccgatatgatcggcgagccaacccatataatgaaggagtgttgaataatttcaaagagatattctgcatcagcattcccctttcagaggacaattttagggcaatggtgccgagagaaccagcattacctactcgattagttggtggaggc

SEQ ID NO: 10616 - DNA, 389 bp, Glycine max
  modified_base (366)..(366): a, c, g, t, unknown, or other
agataagagtgtcatccaccaactttatcgcccattggttagttctggcattggttttggtgctcacagatggattgccaccctcctaaggcagtgtgactgcttggcaatcctcaggtctcctcaaggcccatctgaagaccccacagcccaagcgggtacgacaaacatgatgaagctcgcacaacgcatgaccgagtgcttctgctcagggatctgtgcttcatctgcttgcaagtgggacatactgcacattggtaatctggctgatgacatgagaatcatggcccggaaaatcgatgacccaactgaagctcctggcattgtgctgagtgcttcaacttctgtttggatgccggtgtcacngaaacaggtgtttgatttttctg

SEQ ID NO: 10617 - DNA, 442 bp, Glycine max
atccgaacaattccaagcatctattattggtttgaacaagttttgggcttttggtggtaatgtggtggctatggataatgactcgtgtggagtggggttcatggcggaactgtccaacgaaagtagctgcaaaacggtgattgatgttttggagatgctggtgcgcatggacccttcggacattggtattaggcttttggagccactcaaggcggagttccctattttgagctatgccgatttctacccggtgatgatttttttgtctttggtgtttgtgcgcttaatgttgtatttgtgttgacgcaattggttggcgttgttgccgttgaggtcacgggtggacctgaagttccattccaccctggaagagaggttaatatataataccttggtagagttgtgttcaacacaaatgacgggaactgattcacacacaact

SEQ ID NO: 10618 - DNA, 372 bp, Glycine max
aaactgttacaccctctacttttcgtaatttctctcatccttctttctttcaagtgcaaaatcgatctctcactgcctcagcaatggctgcagatgatggtgtgaaacctccaactctcgagtttctcagcatctgcaagtctctcctcgccggcggagttgccggaggagtgtcacgaactgctgtagctcctctggagcgattgaagattctgctgcaggttcaaaatcgtcaagatataaaatacaatggaacaattcaaggcttaaaatatatatggaaaactgatggttttagaggaatgtttaaaggaaacggaacaaattgtgctcgtatagtcccaaattcagcagtgaagttctttagctatg

SEQ ID NO: 10619 - DNA, 362 bp, Glycine max
aaatatcttgtcctcaaatgtgccatagaaacaaggacaaaaaaatcccatgtttctgaagttagcaggtttggagttccataagtagaaatgggaaaaagacaatctttgcgcaacaaagccacccaccttgtttctgtccttctcaaccccatctccgattccgacacttccaatcccaaaacctccaaacaacacccaccagcaccaacacctacacctccttccggacaagtaagtggattagagacaaatgatgaagagggtaaccgtggtttagttgatgggcctgatacttcatccttcactgcgttcctctattccttattgtcctcctctgacactggagataatgcaaactc

SEQ ID NO: 10620 - DNA, 113 bp, Glycine max
ctcacacgtccggaaagaatctatacctcgtactcatgcaccatgacttggttcaacaccactctaagctgttttcaccgcgcataaggctccgacaaacacacctgctacac

SEQ ID NO: 10621 - DNA, 52 bp, Glycine max
cgcacacgttcgggtcgcatttctaccacatacatctcgaccatactacccc

SEQ ID NO: 10622 - DNA, 124 bp, Glycine max
ggatatcgctgaggcagcatcagctgatgatcttgctcgatattaggatttaaataagctgggtgaaagagtttccatgtgtgaggccgtgtgaacgtacgatgggagggggattagggaaagt

SEQ ID NO: 10623 - DNA, 140 bp, Glycine max
cccacgcgtacgggtggctgctcttggctatgataatggtttctatgcccctggaagatgctcaaaagaatatgggaattgtactgctggcaacacaagcactgatccttacatagatgcccaaagtttgatatggtcgc

SEQ ID NO: 10624 - DNA, 223 bp, Glycine max
atcactcttacgtccgactctgtacaagcagcactcacaatacgataacccatccggggcaacacgattcctttccatagtcaatggcacaacactcacattccattcctcgtcccaaacgccgattccgctgtggcgatttgtatgacaacgagagcgcgagtgacacatcagatccgtagagttaaaattccggttctgagtagatccaagtctcttcatg

SEQ ID NO: 10625 - DNA, 133 bp, Glycine max
cccacgcgtacgccttgatatgatccgcaagattgctgatgaggatcctgacgactggactgacaaataaaagaaatatgcatactctgacgatgatgagaagaaaggaccatattctaagttctggaatgag

SEQ ID NO: 10626 - DNA, 243 bp, Glycine max
ctcaaatttcaatctccttttcttgattcgttcatctttggtctgaattctcctatgggtattcgagattttccgaaaaggtatattggttgttgaatcgaattaggtcttttgccatgtgtacagtctacgctggatgtgcaggatgcaatgatgccaatgctaccatgagacaattctataggcgcaagtactcaaagtttactcaacaagaacttccagcatgcagacctattctcacac

SEQ ID NO: 10627 - DNA, 123 bp, Glycine max
cgaaaattaggaaagagtattgaaaaattggggttaaggaaaaggtgaagggtgaagagctgtttatctctctagtgctgataaaaaggtgccattgtccatttctcgatccatgaattttgc

SEQ ID NO: 10628 - DNA, 133 bp, Glycine max
cccacacgtccggcgctagctcttgctaaattcttctctaccttactactccctcactttgtgttagaatcatcatgggtttgcataaccagttaaacgacgtgtcgtcgggttcgagtccgcttcttgtgtt

SEQ ID NO: 10629 - DNA, 66 bp, Glycine max
gttaatcttataatggattatgtgctatctttctgttaaccgctaatgtgtatgtggattcaggac

SEQ ID NO: 10630 - DNA, 117 bp, Glycine max
  modified_base (90)..(90): a, c, g, t, unknown, or other
tgagaggttggaagacttgtgatgtggagtatcaatcttactttgctcttgatgagggctggtaatcgtttaaggagtatagtgcgtatngatcaggagtccctttgatacttgatc

SEQ ID NO: 10631 - DNA, 206 bp, Glycine max
gttaaacatactgataaattgatggttaaattgattagaaagatagtgatagtgtagggaataattaaaatatagagatgattataataatatgagtacatgtattagaacattgagtgtggaagtttgtgacgtaatagaggaggatgttacagagctgggtaaatgcaggtgtgatgttgattaagcatatgataagaggtata

SEQ ID NO: 10632 - DNA, 81 bp, Glycine max
gaaaaataataagatcgaacgaatgctccatccatgattccattcatcgattccatggtggggagaagcgtgccgtcgatt

SEQ ID NO: 10633 - DNA, 136 bp, Glycine max
cttaaacatcctcgtcaatatcgcctacaattgtgtcaaattctttagaaacggtctagaagactttcaataaggtcgataaacttgcatgtgagctgcattggatgaagaggtcacagagaaagttgcagcgtaa

SEQ ID NO: 10634 - DNA, 108 bp, Glycine max
tccgcaacattataatttctattacatacttttgttctaggatgacaagttactactgattggtgggctgggttcgtggcagcatttgtacggtggtgatgatgatgg

SEQ ID NO: 10635 - DNA, 59 bp, Glycine max
gtactatcaaaccctcaatgcttgcatggcgttgaggttgtgtgaacacccggtcgggt

SEQ ID NO: 10636 - DNA, 62 bp, Glycine max
cttaaacgttgaggttcatttatggtgtagttattgataatagtaaggattgtttggtattt

SEQ ID NO: 10637 - DNA, 216 bp, Glycine max
ctaattccttctgggaaactgtatgttctctaatatggagcaatactgatctgggagggccgtcagtgaatacataggaatggtagataatatgcatcgttgtggagtaaccacgtctataaaggtagctgaagtaatggaaaccatgtgtagagctttgtttggacccggagggagtggagtccaaccttatgtggacagtcctatgcctattgg

SEQ ID NO: 10638 - DNA, 337 bp, Glycine max
gtttgagaccctgatcagtcactcactcactcgaagacgatgagttcgatccgtgatggaaccaccaagccagattgtctcattgcggactaccacgactgatcccgatcatgtgaaagtcattcagtgggacgacttccagcacgatcttgcaaggttggcgagtctctcttctgcactccacgaagccaacgagaagaagcggaatcttcagcacaagctcgagtccctaatccaggtcaatgctgaatcattgggtcggttgaatgaacttgaggagatgcgtcagaaattggaatcaaagaaaatgttgatggagaatatgtctatatgttct

SEQ ID NO: 10639 - DNA, 53 bp, Glycine max
taaattaacattccatcctccaaacctaccggatgcaaacttttccatagagc

SEQ ID NO: 10640 - DNA, 57 bp, Glycine max
cctgctctgttttgaaacataacatgaagcaaagtgaacaaagagccatcggcatgc

SEQ ID NO: 10641 - DNA, 106 bp, Glycine max
cccacgcgtccgggacatcatatggaaaagataaagaagctgccaagatggagttggtataagcccttaaattgttgtatgaacatgttggagacaagactgattt

SEQ ID NO: 10642 - DNA, 124 bp, Glycine max
gcgcgaaccaacaatcgcggagatggtctgctgactgctatacgtaaagaatgtctgggagttatggattataaagagtggcttttggacgattgtggcgatcgcgttggtcagttgttgcgtg

SEQ ID NO: 10643 - DNA, 307 bp, Glycine max
cccacgcgtccgcccacgcgtccgggagagaccattcaatataaggacattggctcaagtttcagtttttgaggcagatgtgtaaatctgactcaagaagactgttagttggtaacatccacgtactttacaacccaaacaggggagaagttaaattaggtcaaattcgttttctcttgtcaagagcacaatacctctcagagaaatggggtaatacccctgttgtgctagctggtgattttaatagtactcctcagagtggaatatttaagttcttgtcatcatctgagctaaatgtcttgctgta

SEQ ID NO: 10644 - DNA, 53 bp, Glycine max
cccatacctcccgcctgccactcatggtgctccttccacatcataaaccacgg

SEQ ID NO: 10645 - DNA, 66 bp, Glycine max
gacattcttccttgctctctgatataaaagcttttttgtgctcaatgatatttctgggtttgttga

SEQ ID NO: 10646 - DNA, 52 bp, Glycine max
tggatgacaactggattggttatgtcttgtgtgttacattcaagcggaacat

SEQ ID NO: 10647 - DNA, 80 bp, Glycine max
gtcatacttatgcactctcccaccgtaaagataatctgatgtctagcctttggctagggtttaaatgaaataggctcatg

SEQ ID NO: 10648 - DNA, 106 bp, Glycine max
ctcacgcttccctctccgtatccgtgaaaaaccttcgctgcccgcacttattccttggacaccgctccttccagcatgcgatggatgcatgaggcgctggagccac

SEQ ID NO: 10649 - DNA, 60 bp, Glycine max
tcacgctcccatctcgtcgttttgctaactcaagatcttcccaatgcgggggtgctgctg

SEQ ID NO: 10650 - DNA, 296 bp, Glycine max
ccttcaacaagaaacaagaagacgtgcttttcaataccaagaagcaattatgcatttggtcagagtcacaagggaaacaagttgctgttttccaatgtgaaagtaatggagagttagttcttgaactcatttctcgcccaagtttcaattttagaggagtaaggccagccaaagtattgggaaaaacttcaatcaatctgggggatttgcaagatgtagcatctaaattgccaaaagagaagtggttagatttgacatctacagtctattggtcaaagcctattggtattcacatt

SEQ ID NO: 10651 - DNA, 81 bp, Glycine max
atctaactaaaccttgcagaacaagaaaacaccgcaaccatcgtgaactactcctgagaaccgggctatacaaccaagtcc

SEQ ID NO: 10652 - DNA, 267 bp, Glycine max
gagcgacttatcggttgttcggcacaaccttttagttcttggcttacactaggttaagattctgttttctgggttgcagggtcgtaactcatccacaacaaagggggagcagagaaacaaggtcgatgagagttgagtatataaggttgcagcaatacaagtgaagtatcttcgctggtgctataaataattaaacatgtcttctgcggcaacttcaacttggatcacgtacttctcgtgttcacccaatgcaactaccaatttacc

SEQ ID NO: 10653 - DNA, 380 bp, Glycine max
ctctgccgctcaatttcccgcgctccgtgtctccctacgtgactcaccggaaatccgagtgcgaacgccgccgggaaaggctattctacggcacgccgcagatgaacgctgccgcgtgcgacggcggagcagcgtcggagaaccggagacacggtggaaggttctggatcctctcgaatttattccgagccagatcgaacaagaccgaatcctcgccctctcatcctccgccgtcatggttctcgacaatccttcacgcgcgccggcacaataagtgtcggcacgcggatcgaggattgtcgccgttgacagaggtggagaatttcaccgaatactctgctgacacagtgcaagaccgatctgactcgggaatttcgtcg

SEQ ID NO: 10654 - DNA, 109 bp, Glycine max
caatttgcttcctctgtttccattctttcttcttcattttggtgtcttcttcagttctacttttttcttgtgttctcgggtgagttttacagctgctgaaggcttccat

SEQ ID NO: 10655 - DNA, 75 bp, Glycine max
ctgacgcgtggggtgccttcttcgcggcatacaattaccgacagtaccaacatctggtggtaacataatccaaat

SEQ ID NO: 10656 - DNA, 71 bp, Glycine max
cacatgcgcacccggtcacactggtcacgccaccgtcggaaaattcgcaaccaccagtggccggccacgat

SEQ ID NO: 10657 - DNA, 177 bp, Glycine max
tgaagtttatgtatcttgcattcctacttctatttgttttctctagccaattcttgcttggatgagcagatgcttcgcccagacaagtgattgacacagatggcaagaaatttcgagctggcgtagatgactatatccgacaggtcccgacaaccgcatgtgataggcagtgggccg

SEQ ID NO: 10658 - DNA, 52 bp, Glycine max
caatttgcttcctctgctaccattcactcttctacattttggtgtcttcttc

SEQ ID NO: 10659 - DNA, 386 bp, Glycine max
ggaaagtgcagtggacagatacttgtggtagtgagcttgttgaaatacgggaatttgagcccagcgacgcggatgggtcagttgatgaattcgaccatgggaatcacaaaacttgttcctgtgctattatgtaaattggcattccaaaagatgacagagtcacagacccatttatgaggtatcaagtcgttgattgctaacatattccaccactcagcttgaggaaaaggagcagatatttttcagtctagaggagatttatacacctcttttgcctgagcaatcatttgtgtctataaatgcttgctgtggccttcaattttgttcctctgctttcatcaattgttggataatcttttgtcgtgtgaattcatttggcttttaat

SEQ ID NO: 10660 - DNA, 74 bp, Glycine max
gttaaacgacgactatgcgatcaagaagcgtggatgggtcacgtgaacgtagcagagaggtcgctcattaaact

SEQ ID NO: 10661 - DNA, 176 bp, Glycine max
cccacacgtccgcccacgcgtccgcccacgcgtccgcccacgcgtccggtagaactatgtattgttgtattaatatcactggatcctaataagtgttgggctaaaggcctaaagctatatatgcaccttatatttcaatttgcaataccaaaaaaaaaaaaaaaaaaaaaaaataa

SEQ ID NO: 10662 - DNA, 243 bp, Glycine max
cccacgcgtccgaaaatattgaaaagccgcaagggaggtttcgtttcgttgggttcagttcacacattctattctctatcgatggctggtccctgcttctcaatccactacaccagaggtatgaggagccaacgtgtgtgtgatgggtgtggaagcatagttagtttaccctagaggagcaggcagtgtgtgctgggcgttgtgcaacaccagttacctctgtggctgctcctgtgatggaca

SEQ ID NO: 10663 - DNA, 106 bp, Glycine max
cacaattccaagcatctattattggtttgaacaagttttgggcttttggtggtaatgtggtggctatggataatgacgcgtgtagagtggggttcatggcggaact

SEQ ID NO: 10664 - DNA, 348 bp, Glycine max
gttatattgtcctcaaatgtgccatagaaacaaggacaaaaaaatcccatgtttctgaagttagcaggtttggagttccataagtagaaatgggaaaaagacaatctttgcgcaacaaagccacccaccttgtttctgtccttctcaaccccatctccgattccgacacttccaatcccaaaacctccaaacaacacccaccagcaccaacacctacacctccttccggacaagtaggtggatcagagacaaatgatgaagagggtaaccgtggtttagttgatgggcctgatactatatccttcactgcgttcctctattccttattggcttcctctgaacactgga

SEQ ID NO: 10665 - DNA, 346 bp, Glycine max
aaaccacgcgtccgcccacgcgtccgatcccaactcatctttctctttttctcactctctcacacccacaccctaactttcaccatgcggttccaatcgctctaaccctaactccctctctccatcatcgatcttcgatccgcaccgccgttcctttgaatctcttcagattctccgctgcttccaccaggaggaggattttttcgcgattcgcgctcgacgcttccgttgccgccaatcgatgagattcgctccgaatcccaacgccctgccgtcaagtttttcgcggaagtaacggatcctgttgttgttctgcttcgagtcgattggattgctctgttttgcc

SEQ ID NO: 10666 - DNA, 383 bp, Glycine max
acacccacgcgtccgccgcgacgtcgttttcagacacggcttcgatagtgaagcaacgattcaatagttgacaagtggttttggtttgatatatagatgtggtgcgcgtcgtgttgttcgaaggaagtgaagtaaagactaaagagagttgtggtgtggtggtggttgtcgtttttgaaatggcagcgtcgtcgtcagagaagcaagtggtggtgatagggatggacgacagcgagcagagcacgtacgcgttgaattgggctctggataactttttccccagcccaggtttcaagctcgttctcagccactccaggcccaacgccacctccgctgtgggcttcgccggccctggagccgctgaggtcttgcctattgtagat

SEQ ID NO: 10667 - DNA, 416 bp, Glycine max
  modified_base (368)..(368): a, c, g, t, unknown, or other
  modified_base (401)..(401): a, c, g, t, unknown, or other
aaattaatttacaaaaggtcaagggaagcacggaaacgctttgacaaggctagccttatttatgaccagactcgtgaaaggtttctgtcactaagaaaaggcacaaaaactggtgtagctactgccctagaagaggagcttcatagtgcaagatctacatttgagcaagctcggtttaatctggttactgccttgtcaaatgttgaagcaaagaagagatttgaatttttggaagcagtcagtgggaccatggatgcacatcttcgttacttcaaacaggggtatgaattgttgcaccaaatggagccatatattaaccaggtcttgacttatgctcagcaatcaagagaaaagtcaattataagcangcaacccctaattaaaaaaatccaagagtacanacgacagattgatcg

SEQ ID NO: 10668 - DNA, 410 bp, Glycine max
aacacgccttcgcacaattttgattgtgatttaatggatttaattcactacgaaagtgcattgtacctatgaataacatccataattgatgccacaatttgattgtgagttaatggatttggttctcttatttgatacttcaggagtacatgttaagggcagagtttcgtcttcccagtatagtagatgaggaagcaactcctgagagaaaagctcctatacgtgtaaaatttgagataccatattttactgtgtctgggatacaggtattgctccgtgtactgatgtacaatcttcttatattctgaatattgttatgcctgtatgcatctctatcttattaaaagatgaatatgtcatgtattttatatctcacatttgtcaccattgatgtctcacatgtcattttg

SEQ ID NO: 10669 - DNA, 434 bp, Glycine max
acacggacgcgtggggcacaatggactaccttctacttcttccactaataatcaccatagtatggataaacattcatgtattcatctctagcttcaaaccactcaaatcctctaaaaatcccccgggtcctcgcccttttccaatcataggaaacatcttggagcttggcaaccagcctcaccaagcacttgccaagctttctcaaatttatggtcctataatgagtctcaagcttggtaagactaccaccattgtcatttcctctccacaagttgccaaagaagtgctacaaaaacatgatcaaatttttgctaataggacagtccctgatactctccgagcacttgatcatcacatactttctgtggtgtggatgccacctttagcacaatggaggacccttaagcgagtttgtgctaccaaagtgttctct

SEQ ID NO: 10670 - DNA, 141 bp, Glycine max
aacccacgcgtccgcccacgcgtccgcacacgcgtccgcatatatgtaaaataaattaataataaaatttctattagtaccaaactcagtaaaaaaaacgataaaacctgaaggttcaataaaatagaagattaaataatt

SEQ ID NO: 10671 - DNA, 418 bp, Glycine max
aatgtctgttgggcttttagggttagggttagggttagggttttggtttgtggatctattgttgtcgctgcgatggatcgcaagaggggaaggcatgaagctgccttcaatttcaatggcggcgccaagaaatcgaggcctgcacctctggctgtccatttggtgaaggatgccacttcctgcattatgttccaggtggattcaaagctgtctctcagctgatcaatgttggtagcaatcctgttattcctcaagttggtagaaaccctgttccaccatccttcccagatgggtcgtctcctccagttgttaaaactcgattgtgcaacatgtttaacacagccgaagggttcaaatttggtgacaaatgtcactttgcccagtgtgagtgggagcttggcaggcctacagcgccatc

SEQ ID NO: 10672 - DNA, 432 bp, Glycine max
aactgtttccgaatgctgctcccaatgaaatgaatttttttttaataataataattttgaccttaaatccttgtccttttgaggttaaatttgatggaatatactgttggggtgtctcactgctgcatacagaagtaaaggcatctgcacctgctacattgatggaggtggtcaaagcaattgccaagcacgaacctgcagctcctgaaagtgttgctatcagagctgatcagaagagttatagttacaagcaactcatcacatcggcacagaagatatctaatctcttgtgtggcagtgatgcacagacaggaaatctcggtggagctcgaataggaattgtagccaaaccttctgctgaatttgttgctggaatacttgggatttggcttagtggaagtgttgctgttccgcttgcaaccagctatccag

SEQ ID NO: 10673 - DNA, 430 bp, Glycine max
aaaatgaggaagaagaggaagaacactatgaagaagctgaacaagttaatgatgcatcagatgaggaggaagaggaggaaccaaagcagaagaacaaggagtttagaggcagtgccaaaaggaagggatttgaatctgatgaggactctcctccaaggaaaacaaccacccatcggcggatggcggttgtgtacgatagtgatgaggactaaacttccttaagctagattttcatgggaagtgcagctatctgatgcagcaaaggcagagatggctcttagttccccccatatatagctacatttttaatatttcatccttatatacataaagcagagcctgggacactaaagtagtgtttattctcaggtcacaatatatgtttttttgactgtcttgttaatggtgataaaagaaattcagtgtacat

SEQ ID NO: 10674 - DNA, 416 bp, Glycine max
accacgcgtccgcccaagccttcgggttgatcgggatcaagagtccttcagtttctcctcgttgttcttcgctttcctgttttcaatttcgattctttcgttaatttaataagatgtttgggagggcaccgaagaagagcgataatacgaggtactacgaaatcctcggcgtctccaagaacgcttcgcaggatgatctgaagaaggcttacaagaaagccgccattaagaatcaccccgacaagggcggtgatcccgagaagtttaaagagctggcgcaagcttatgaggttctgagtggacctgagaagcgtgagatatatgatcagtatggtgaagatgcgcttaaggaatgaatgggtggtggcggtggccatgatccatttgatatcttttcatctttctttggctgtggg

SEQ ID NO: 10675 - DNA, 415 bp, Glycine max
agaatggcttctagttcagaatctcaatctcagtctaaaccgctccaagaccgagttgcaatcgtcaccggctcgtcccgcggaatcggccgagaaatcgcgcttcacctcgcctcactcggcgcgcgactcgtcgtcaacgagacctccaactcggcccaagccgactcagtcgcggcgcagatgaacgccggttccgccaccacgacaccgcgcgccgtcgtggtccaagccgacgtgtccgatccggctcacgtgaagtcgctcttcgactcggccgagcgcgccttcgactcgccgatccacatccttgtcaactcggcgggcgtgatcgacggcacgtatccctccgtcgccgacatcaccgtggagtccttcgaccgcactttcgcggtgaacgcccgtggcgccttcg

SEQ ID NO: 10676 - DNA, 427 bp, Glycine max
  modified_base (417)..(417): a, c, g, t, unknown, or other
aagtgttctataagttcaaggtcaattccgaaaaatggggtccaaaggtttgcctggtggaattaagttcaaagcggctatacttctgatctctgctgaggttgcacccaatgaatacgaaaattttaacaaaaaagatgggaagcatgctccaaatgggttatatgatagcaaatggggttacggtggttggggttgtccttggtatggcggctggggtggcccttattatggtggcggctggggtggcccttattatggcggtggttggggcggtccctggcgtggtggtggcggtggtggctggggaaggtggcgtcgacctaatggcaaccctcacaactaagaagaaaacttgctaaagcttctttacgggtttaggttttcgcaataaataaaacttcatgagaagtgtanttgtaataaa

SEQ ID NO: 10677 - DNA, 343 bp, Glycine max
agactcccacctccaccaccattgtcaaaacccccaccagtagcaagagaacggcttccatctctaccacccctccctgagaaagttgacccacctattgtcactctggatgatctcttccgcaaaaccacagcaactcctcggatctactatcgacctttgtctgaagagcaagttgccgcaaaactttcaacacagggtaaaagcgggaggcagtagataggccattagcctgcaaatcgtcccttgcagccctttaactgatttggatagttttagtagtgctatgggattattgtgaatgcgtcgtgttggcagatctggtggtgttttgtctcgggaa

SEQ ID NO: 10678 - DNA, 354 bp, Glycine max
actgatcctttcatttgcaaattgcaaatgcagaaaggaaaagcggattctatctccatcatcagctcccttcctgaagatgttgccctcaaaattgcttcgctacttcaggtgcgggatttgtgtgccttaggttgttgttcgatgttctggaaggaactctgcttctcagattgcatttgggagtctcttgtcagaaacagatggccctcactctcttccttccatttcccttcttcttcttccactcattctcccagtttcgagtacagaaattgtttgtgtggaaaattgggttacagaagtggacgaaattgtacttggagaggcacgtggaattgggaattagagcta

SEQ ID NO: 10679 - DNA, 393 bp, Glycine max
acccacgcgtccggattcccttagttttgaaagtgttcctttcatttgtgtttttagttgaactatggcttttaacagccaaatacttgtgtgacaccacaagtcttaattctgctgttgttagaatgtgttttctcgcatatcggcatatgtggtcgggataattaccgattttttattacacagattgacaagcagagaaaaaaatgctatgcaatcagtttggattcaacaagtcaattttctttttctttttctagtccggcaagtacctgaatgtcatttgttttgtaatttgtcaaaggatacgccacatttatttacactgctttttctatattgggaacttttacatatccaaacacatggtggtgggcctctgtgccggagatg

SEQ ID NO: 10680 - DNA, 369 bp, Glycine max
cttcgatcaattcgtttaattcattcccccggtttttttcattcgaccaacggctagtcttcgtttacatcactaacttcaaggttgatatcataaacatctccttgaaattatactaatcttacttcccttaactttcgtttggtttttaatcttccaattattgtattttacatcatgaagaataagcttttgcggcaattcaaggttctttcttctttcctctgttccctaccatccaagggaataacctctttagatacactttttgctctgagaccacatatgaccacactctcttccatttcatccataaaacttggagtgcactcatagaatcccacattcataacatgtttcctatgggca

SEQ ID NO: 10681 - DNA, 432 bp, Glycine max
acacacgcgtccgtaaacccccaaagcctttgactttgttcaatccttcgacatgagtatgacccaattcgccatggttgaggagttggcttttcttgtcaaggacaatcttccttgcaagcatttagttctcacaatggaagaagcactggttaactttcttcaggatgatgacactagttcagatggaatcttggaattggagccaatgaactcttacaaccgtcttttattgcatcgccttgctgagatatttgggtttgcacatgaatcggttggtgaaggagatgatcgccatttgattctggaaagatgtccagatacgtccatacctccaatccttgttagtgatatcctatggaagtatgatgaaccacaatctttggttacatcccaccaaatattaaggagaagtgtagcctctccagtctc

SEQ ID NO: 10682 - DNA, 435 bp, Glycine max
atttcatctcaaccttcctccaattccaacaattccttaacaccacaacataaaccttcccgcccccaaacaaaaaacctccttcttttaaagggttaatcttaaaccaggatttttggcactaatttctctatgggagaagcaccagcattgcttgttgatgacgtgcaggatggggctctgaatggccttgaattgaaaaatggaacttgcaaaacaactgctactgttggcgataagatgtatgtcattggtggagctgatgatggaactttgtccattgaagttcaaatttttgacggtagtcttggagaatgggttcgtcccactgtgcgtggcaccaaacccgtgttgtgcaatggcctctcagcagtgcctttggaagaccgaatactgattcttaagaagggttctaagcctgatgatcggatatgg

SEQ ID NO: 10683 - DNA, 272 bp, Glycine max
acacacatgtcagcttcttctggtaatttagacccctctgcaagtgcaatctcgttcacgaacttcaccttcaccacatcgcctttcaggactacctcattctatggaatcggtgcttctgccttggatcagagaaacccaagacatggtggtttgtcagatagaagtggcgcttctgtgccgacattaattccagaatagaaattgctcggcctctgatactgcctccgatatcacgtacgtcattgcttgagattatgcatgaactgagt

SEQ ID NO: 10684 - DNA, 426 bp, Glycine max
acccacgcgtccgcccacgcgtccggcaggctttctgaccccagcaacgtgcttcagagctgggacccaaatctcgttaatgcttgtacttggtttcatgttacctgcgactccaacaatcacgtcattcgcttagacttgggcaattctaagctctccggaactttgggaccagaacttgcccagctaccccacctccaatacctggagctctacaggaataacataagtggcaacattcctcgggaactttctaaattgaagaaccttattagtatggatttgtatgacaaccaatttcatggcaaaatccccaagtcttttggcaacttgaactcacttaaatttctacgcctaaacaacaacaaactgacaggagcgatcccaagagagctcactcatcttaaaaatctcaaaatccttgat

SEQ ID NO: 10685 - DNA, 435 bp, Glycine max
atacgaacgcagtctacatccatgccatcttcaagtggtagacagcgcctggaaaagttgttgggagttgatgatgaggatgccgatttttccgtggctgactatgtgaataagaaatctgtgagtggagacagaagactgggaaagaaaaatgctaaaaggaatgattttagattccaagaacctcaatctgcccagaacaagtactcaggaagccataaagtgaaggacaagaaagggagtggacaaaagggttcatatgctaatcagcctgtgtcatttgtatcaagtggcttaatccattcagaaactgtacaggttacagttgatgctgaagagactaataggaatggtgtcaccagctctgctaatataggttcatttgaagaacacactactggttttggttcaaaaatgatggctaaaatgggatac

SEQ ID NO: 10686 - DNA, 417 bp, Glycine max
acaaaagatcattaaccgtgcaattcttttatctttattaaaatatttttactctaacttccttaaccacccaaaaacccttcccttagttttccttctcccatgtttttcttatattaagtctacttaggtaagctgggatcgaagaacagaacatcatgagcataagctagcttcgtgttgtgctgtctcaaatgttcatgaagtcgtaaatgccgccacacacctctgttgtctcataaaaatgtctctttttcctcgtctccatatcttcgctaggcctttactttcctcatctctctctgccccttctggcaggtcctctctccctccctacactttcattagcagtgtttgtgttttccttttccaaagactatcagtctcacatattttgtttggaactactacttaccc

SEQ ID NO: 10687 - DNA, 433 bp, Glycine max
acacacgcgtccgtataaaactaattaaaatagttctagtccttgcaagaggcagatttgtttgcagaattcgaaaatgttaatgacattcaggaagatatgcttaatgatatatatgataaagctactgaagaaccttctcagtccatgcacaatgtgattggcactagcatggcttcagaaagtaacgcaactgaaaagacatcagaggaaaatggatccagccagtctggcaaagctgagataacagaagaacagagagcccgtatggaagcaaataggttgaaggcactataaaggcgagctgagataacagaagagcacagagctcgtatggaagcaaatatgttgaaggcactagaaaggcgtgctgccttatcacaggcctcccaactttgatctgaattgtagatgaaagcattacttgtcgttg

SEQ ID NO: 10688 - DNA, 346 bp, Glycine max
agaagctggatagtttagttgagaagagttctgatctgagtgccgcttcgcagatgttcgaggaacaggccaataaaaccaatcagtgttgtaccatattgtaatcgagcttccaagtctttcattatgcagcgtgctcagttgaagcctgtgcggacatggagactgttggataggataaaatagcttcatatgtctatatcactcgattgtttgcgtggttaaaattatatgattgtaccaggatacatgtactgtcttaccgtgttggcaaatgcagattgggatttacggtgttgtgaggttgagtgagaatttatagtatgcataaattagtgttttggtg

SEQ ID NO: 10689 - DNA, 294 bp, Glycine max
agaggacgcgtgtgctgtcgcgtgggatgatatggctcaggacttggcattggatctggaggagcttcgccgcctccacagcatcgccaattgacctcgtaccctctctcttctctcctccgaaattcgtgacctcgagaagttatcgtcagaggaagcttctgcgcagattccggcgccgatgtcgaacggaactgaagtggagccttcacctgcgctggggtatgcggcagtcgcgtcgttcagttgggacgatgatagtgacgatgttgggatgtatgtgttgggggatgg

SEQ ID NO: 10690 - DNA, 244 bp, Glycine max
accacgcgtccgatgaaaggtccaagctattatacgttagcacaataatctgggatgacgcgcggcctttgggcgtgacacgggtcaaagcgatactacgcgattttgggaccgtggctccagcgacgtagcgtccaatcacgcgttcagtatataggtccgccttaactcggaaactgtggcatggaagtgcatatactcgacgaatttttaaactgatcagtctgggtagaacatgacgaaa

SEQ ID NO: 10691 - DNA, 336 bp, Glycine max
aaccgagtctgcccacgcaaacgtatcgagccagcctctcaagctagggttcttcaccgcgctccaaccttcgtctctctcgcttcgtcccctccaattggaatgtgattgtgacgtcacatgctggtatctgacattttgaaattgtaactgtggtgggagcattattatatattttgcgacatcaaggagattcagacatgtagcaggccgattgactccttgctagagagagtgctttgtatgaatagtctctcgtctgattacttcaatgagctctaccgattgaaaatgtatcacgaagttagtgacgacatctacactcaagttgatcac

SEQ ID NO: 10692 - DNA, 258 bp, Glycine max
aacccacgcgtccgcccacgcgtccgcttccgatctctttaccttattgctcgtggcaccggtggcattaatccttgtgtctcatcctatggagcagatcagtttgatgatactgactcggctgagactgaacgcacgagttctttcttcggttggttctatttttcaatgaacattggcgctcttagtgcatcttctctattggtttggatacgcgatggtgtgggttcgggatggggctttggtattcctgctgta

SEQ ID NO: 10693 - DNA, 411 bp, Glycine max
acacccacgcgtccgattagctgcatgagctggtttgggaaactccgtttattctccaatttcaatccctttcacttcattacttctttgttaatttttaccctccatttttcaccccaatcgcgcttttccctccaacccctgttactgatccacgctaaaaccaatctcaatcgtaatttccggttttcgtcacaatatggggttccgattcaagagtaatccgcatttacgcagaggcctttgctgtgcaaatgatgacaagcagcaggagaggtccccatctgttattgtcattggaggtggcatggctgggattgctgctgctcgtgctcttcaagatgcctcatttcatgttattcgtctagaatcacgagaaagacgtggtggtcgaattcaaacggacgactc

SEQ ID NO: 10694 - DNA, 211 bp, Glycine max
aacggagacgtccggggagagttgtgagttatcttgtcatttattataggcggtatttgatgaggtacaggatgttcgtgtagcagtgtgtggttgtttgttccgttgtcatttgattcaatgatttcagttaggttttctgttctgtgagtgagatcatcagttatagatagagttatacaaagtcttgtactagtcttaacaatgtgaa

SEQ ID NO: 10695 - DNA, 425 bp, Glycine max
aaaaagccctgtatgattctgtgacggagcaatataatgtgctgaaatctgcaatacatggcaaaaaaggatttgaagcatcaactccagtagtttctttgtcacagtcatggaagtagatgaaatctgcatttcttcattgcaatttgctctgatgcaggctccaactgctatgttccctttcagaagcaagttacaagacttcagtcaaacaatttcaactgattcacttctgagggactgcctattactacaccggtcaccgaatgatttagcttgttggaagtttgcagtcaaatacatatttttcatttcatttttccttttgctcttggttgccgttatcagcattcaattcatctggaatctgtttcagttcagaatgttcaaattctgctgcttactgtacaggtctctcttagttc

SEQ ID NO: 10696 - DNA, 348 bp, Glycine max
aagttttctccttttcttctctccacacaatttctctctcctctctctctctacaaatccttctttctttcttctcttcgctgctcactgtgaccatggctttcagagtaggaggagcgggagggggaaatgcctcttctggcatgggtgttgctgagcatagtgtaaacaccttcctggaattgcagaggaagaaagttcatcgctatgtgatttttagaattgatgagaaaaagaaggaggttatcgttgaaaatactggatgccctgctgacagctatgattatttcactgcatccttgcctgaaaatgattgccgatacgcggtccttgactttgattttgtga

SEQ ID NO: 10697 - DNA, 199 bp, Glycine max
tcgtagacgaagacggtcgtcatcctcttgctccagctggagctggttctttccctggacgcttcagtgggagatagacgttgcacgcagccatagagcaacctcaataaccagattagtattttgcaggtcatctcaactcatcatgcctcattattgtgtcaatttggaataattggcataagttgaatcaattggt

SEQ ID NO: 10698 - DNA, 431 bp, Glycine max
gggtttcacattctgttaacattggccactgttcacacacacattctgtgcacaactttaagtacatttagtttgtttgtctgtgtgtgtgaacagtggccaatgttaacagaagatagaacaaactaaatgtacttaaagttgtgcattgggtttcacattctgtgctttttgccttttcatttaataggttgacatgaatggtgaactgtctgtcaagcataaattgtctggtcaccagaaacctgtttcttctgtttcatggagtcctaatgaccaagagctcctcacgtgtggtgtggaggaggctgttaggcgttgggatgtctctaccggtacgtgcctgcaagtttatgaaaaaaacggtcctggcctcatcccctgtgcatggtttccaagtgggaaatatatactttctggcctcagtgaca

SEQ ID NO: 10699 - DNA, 432 bp, Glycine max
accacgcgtccggttttagtttttaatcctaaaaaattcaaaacaacaatcaacatatgcacgggtgttaccaagaatatgactatatgcatgtgtaaacattctaaatgtgtttaagctcactgcatatgttgagattgttatgccttgatggatatgaacttgcgatgaatctttcttctttttgcttactctcttgaaaatatatcatttttaaaattaggcttgctgctataagaatttggtttggttaccaaacacaagaaaggtaatattttttgtaatatatcccttgctgttctaagaatttggtttggttatatggacctggtacgctgtagagaagaggttagccttcccccaaaaatgaggttccttttaaattttccgtgctatcaatgagcaaacatctatcatgaaagtttttccctt

SEQ ID NO: 10700 - DNA, 430 bp, Glycine max
aaaatatatacgtataccattaattatgatgaaatcttcttcacatctttctgcaatattcctattgttctttctccttactgccctatccccttcggatggagtttcattctcttcattcctaaagcaattaaaacagaagctggagaagagtcccaccctaaaagatttcctgaaacccaccactataggggatatttattatacgttgaatttcacagaaatcttctcttccgaagagagaagcgcaccaccggtgtctctcatcaaagattacttatcaaactacggctacattgaatcctctgggccattgagcaattcgatggaccaagaaacaataatatcagccattaagacctaccagcaatatttcagtttgcaacccaccggcaaactaaacaacgagactcttcagcaaatgtcgttc

SEQ ID NO: 10701 - DNA, 430 bp, Glycine max
aaatttacaatggccgtcacgaaaagcctctcaatcttcctcttcatcgcaatgagctgcgtcgccgcagctcaggcagcgaacttcaacatcacaaataactgcacctacacggtgtgggccgctgccgtgcccggcggcggcgcaaggcttaaccctggcgaatcgtggaacatcagcgtgacgaacggcacaacaggaggacgcatctggggtcgaacaaactgcaccttcgacaacgcgggacgcgggaagtgcctcaccggcgactgcgagggtgttctggagtgcaacaaaacaggtacacccccgaacacggtcgttgatttcgcgttgaaccagtataacaacctcgacttctacgacatctccctcgtcgacggtttcaacgttcccctacagctgaccccgacctacaactgcagttccg

SEQ ID NO: 10702 - DNA, 267 bp, Glycine max
cccacgcgtccgccttcgcccactttcaatttttctctccctaaaaatcaaatcgtggccaccgccacatcccaaacccttcgattccaatctccgtcactttctctctcctccaaaatccctctctccgcattctccgtctcgctccgcccgcaacgccgcgcctcccgccacctcgtgctggtcgtctccgccggcctcgacgcaaagcccacggtgctcgtcgcggagaagctcggctacgcggggctgaagctgctaaaggac

SEQ ID NO: 10703 - DNA, 107 bp, Glycine max
gcagcattgggagatagaaagagagtagagtatgagagagagagaaagacccttagcctgggctatcgctcgctttcctttgacgcttctgacccttgctatgtctg

SEQ ID NO: 10704 - DNA, 178 bp, Glycine max
ctctgtttcgctttcaccgaagaattacttgactttcccgaactccacctgagagaaagatacccttaattcgcaggcgcgtcttgtgttggacaacaaccacaagatgattaacttcgaagaaaccgagttgcgactcggcctccctggcaactactcatcactcaagggaagtgct

SEQ ID NO: 10705 - DNA, 235 bp, Glycine max
cgaaactaaagtataatttaatggaccaaaagtgacggtaagtctttatatgtaggacttaaagttttacttgaagatatttcttcatcgtcatgattcttttcttttttccttgtacgactttgcagttttctttaactacttccggcgcatcttcaaaaatattttcagccatgcagagcaaattactcaggtttattttatatttacattgtcttcttgctttgccattttt

SEQ ID NO: 10706 - DNA, 229 bp, Glycine max
cgcaatcttcgccttcgcccacaacaactcctccttcaggatcgctgccaacgtggctttccatttttacccttcatcctcgagaaaaaaatggcgaacgcagcatctggtatggccgtccatgatgagtgcaagctaaagtttctggagctcaaggcgaagaggacgtaccggtatatcgtttttaagattgaggagaaatctaagcaagttattgtggagaagctgg

SEQ ID NO: 10707 - DNA, 130 bp, Glycine max
agctcatacaactgatgcctgctatctactccagttgctggtataacctttcatgggaatgccatacatgcacgaggaagagactcctactatataagccatgctttacacctaccatgccttctaactc

SEQ ID NO: 10708 - DNA, 271 bp, Glycine max
cagcattcagcatcgcttttttctattcaacgactccgttccgttctcttgcttggtcttcgaaaccctaataagcttctgcacttccttctgattccacttttggtaatataagcccctcctcttcttctcagatctgaaactacttgttttaactttttctattcaacgactccgttccgttctctttcttcttcttcgaaaccctaataagcttctgcacttccttctgattccacttattgctacaactgggaagatactgtatggc

SEQ ID NO: 10709 - DNA, 200 bp, Glycine max
gtttatcgccgatcccaacgggaaagcgaaggatgcccttccgttcggaaccggggtggctatggacgaccctttaaccgtggggcccgaacaggactcgaatcttgtgggcaaggcccaaggaatttacacttcattatcacaagaagagatgggacttatgattgtgatgactattgcatttacagatggatattttt

SEQ ID NO: 10710 - DNA, 433 bp, Glycine max
atagacactgaattattactaaatttaatcacttgaatttagccaagcgagagggttaaattgaaggtgaagtcagataacatattatatattgagttgattagtattgagatatattaattatattttaattttatataattatattatttatattaaatataataatattaattatattatattataagtatttaatttttataataatatattatattaatatttttattttatattatatttttatatatttttttatttattttgtattatttatttattattattttaatatattattattattaaatttaatattataaattaattatattatgttattttaataaatgtaatatatattatttattaatttaatttatatttttttatataattattatattattatatattttattatatttat

SEQ ID NO: 10711 - DNA, 59 bp, Glycine max
cccacgcgtccgaaaaaaatttaatttaaaaaaaaaaaaaaaaaaaaaaaggaaggaat

SEQ ID NO: 10712 - DNA, 209 bp, Glycine max
ttcctactccaaccgcacttctgcttcgcaattatcatgggcaaggtcaagatcggaatcaacggatttggaagaattggccgtttggtagccagagtggctctgcagagagacgatgttgaactcgttgccgttaacgaccctttcatcaccaccgattacatgacatacatgtttaaatacgacagggttcatggactctggaatct

SEQ ID NO: 10713 - DNA, 120 bp, Glycine max
ggcacgcgtccggttcgtttatgttttctactcttgatcgtctcatctatcacgggctacaatcaatgaaagccatgagagcattttgttgatagaatgattaggtctatatattggatt

SEQ ID NO: 10714 - DNA, 194 bp, Glycine max
cccacgcgtccgcccacgcgtccgtgtggcagtggtagttgccaaactagtagcgagaagtaagtcacgtttttctccgttttcattcatcacaatattaaagcttttagtttccttcagtatgggggacacttacgttttggccacaccgaatctcaaccgttccgatgacttgttctgttattatgcttatt

SEQ ID NO: 10715 - DNA, 285 bp, Glycine max
gtcaaaaaagcgaatcaattgaaatctcaggaatgcttgaagttaacggctttgagcctttcaaaacagaagcatcaacaagtgacttaaagaaaaaggatgaaaatggcatgaacagatctagtcttcaaacaacagaacctgcaagccaagttgcaattacccattctcaaagtattgcatctcaagtccatcctcgggaacaaagcaatcaccagcagcaaagctttttcaacatttctggactaactcaagatcttatgcataatgaaaggtggtcaatgt

SEQ ID NO: 10716 - DNA, 145 bp, Glycine max
atctgaatatctcacgccgaagactgtgcgttgaaatcttgcaaggacgagatgcaagcatcgttgttttccttcccagaatttacgctcttcttactatcatcaagatacaaaatggaatatctactgaccagtggttggcatg

SEQ ID NO: 10717 - DNA, 295 bp, Glycine max
catggacgaattagaagaaaccctactcacccaaatcgactgggaatcgttcctggacgacatacctgaacttaacgtcgatgattttttgcaggacgacaacgccgttcctgttgttaccgacaatcattcctccccgaacgacgaccccgttttgtccgagatcgagaacatgctcatgacgcaagccgaaaacgacgctgtcgttttgcccgagacgccgtcttcagaggccgggttttacaagctcttcgaagagattctggtggaggagccccaggatggacccgtgagc

SEQ ID NO: 10718 - DNA, 287 bp, Glycine max
tgcacctcggctcagcacagctactatcgaaaactagccaaggctctgtcttttggccggtttccttttgcttcaacaacatcgtcgtcacaaatctagagacagagagagagagagaaaaaaaaaactgttgaattgaagatgaagatcactgtcatgactgctgatgaacaaatcatcacgttggatgtggatcctcactaatctgtggaaaacttcaaagcatttctcgaggttgagacatgagtggctttttatctagtagtttatatatgattataatttat

SEQ ID NO: 10719 - DNA, 86 bp, Glycine max
aaaaaaaataaattaaaaatttatttaaaaaaaaaaaaaaaaaataaggaggataaaataaaaaaaaaaatggaaaaaataataaa

SEQ ID NO: 10720 - DNA, 124 bp, Glycine max
cccacgcgtccgcccacgcgtccggtgaaagagaaaatccgagactctgatttggagagtcgagtgagtgagtgctgcttcctctgaatcaaatcattcatcactctctctggtcctgagtttc

SEQ ID NO: 10721 - DNA, 143 bp, Glycine max
cgaagtgcccttcttgtgctttttttttaaaataaaaaaaattataaataggaaggttaatttaatatatatagtataaatattaaaaattaatataattacaataatatatatacatttatatatatttttatttttattta

SEQ ID NO: 10722 - DNA, 156 bp, Glycine max
cccacgcgtccgcaacagcatcagttcatggctgcgatgatgaaccaacggcgcgcaatctgaaacgacagattccagccaatgatgtacgcgcggccacctactgctgtcaattatatgtaccctccatacccttaccctactctagatccttac

SEQ ID NO: 10723 - DNA, 135 bp, Glycine max
cccacgcgtccgcccacgcgtccggtcaacatggaggaggagactaggaggaagcagcaacaagctcaggaggcatatgatgaggatgatgacatgcctggtggtgcacagagggtacagtgcgctcatcattaa

SEQ ID NO: 10724 - DNA, 92 bp, Glycine max
cccacgcgtccgcccacgcgtccgttcacgcgtccgggattgaagaagagaggggaattgaagagcttgagagagaggggatggggttgaag

SEQ ID NO: 10725 - DNA, 152 bp, Glycine max
cccacctccgtttcataaagggtagaatgaaagaagcaccgattgtctcgactgctttgaggaatacgatcaaatttggtacaattctcaatgatcctgacttgcctctttcatactttcctgaattcaagaactcaaaaagagttcctaat

SEQ ID NO: 10726 - DNA, 189 bp, Glycine max
cccacgcgtccgtccacgcgtccgttcaatctgagtttctagccattcagccaagcagttggccatcaactgctcttttacatggtgctcatgattttatttttattattttttttttattatttatttatttttttattttatttatttttattttattattgtttttttatttttttattattttta

SEQ ID NO: 10727 - DNA, 187 bp, Glycine max
agccctttggactttggttgttgcaattgtatatcgatcggttgattcatgctaggccatttcgtaagggcacttaaagcattctaagttctctagctagctggcccttaagactcttctgctaaaatgatgacctcaagctcttttatctatagcttttagatctatatatataaatactagactt

SEQ ID NO: 10728 - DNA, 238 bp, Glycine max
ctctaagctagctgcaacacaactctgaaatttttgtgagtatttggatgatgaattctcgtgtcgttcgaagtgtttcagaatgttttatcaaaccgttgggccaagctaaagagtcaaacctaatatgtcatttaacaccatgggatattgctatgatgtctttgcactacatccagaaaggtctactcttcaagaagcctgctacacttgttgatccacatgatatcatggagaa

SEQ ID NO: 10729 - DNA, 303 bp, Glycine max
aagctaacaacatcaaccaactctctccaaaccagcactgaataacaacagtggcgaacatatatattttcaccaatcacatgaaagagtccttcaaattgcagagatgtccaataactcaagtcacccaccacatataacaatataataagaacaccaataaaatgtgaaggaaactcggatcatttcatgatgaaattgtgcataacttcatctcatggcatggaacttcaacttcaaatcttagatcttatcaagcttttcagccttgacaactgggtttgcttaagctatagcatcatt

SEQ ID NO: 10730 - DNA, 201 bp, Glycine max
cggacgcgtgggcggacgcgtgggcagatggtgctctctgggatattttttggagacaggatgtccctaagttgcaggaatatctgaagaagaatttcagagagtttaggatgattgacttttggatgtataggtctttgcgcctttatcttattctgcaatgactctgagagagaggaagaataaattggaatggaagtt

SEQ ID NO: 10731 - DNA, 241 bp, Glycine max
aagtgcttcaaccctctcatgaaatcagattcatctttaccaaaggcgggcaggaataggtcctatctcaatttgaatctagcgaggatggacaagtccagtgctctcctaatgctccagttgatgttgacaattctctcagctgtgttgccatcaatgtcagtcctattgagtatgggcatgtgctgctgattccgctcattttcgagtgtttgcctgaaaagattgtaccgtgatagct

SEQ ID NO: 10732 - DNA, 267 bp, Glycine max
gttatatatgagtgtagaactacactttgcgatctaactagcaccatgacctcgagggtgagacttatacttcatggaggtgaaattccaaaaaactatggtatataggtactcgaaatacctgtataactgtacttacactgattcatatgtattatgttaatcaagaatgtctatgaatcactatatcactgtgcgtattatacttgatatgatctatttatatacatttaattggttaccttttacgtaggaaccaagttcaat

SEQ ID NO: 10733 - DNA, 320 bp, Glycine max
gccacgcgtccgatttgctttgaaagcatgatttacagattcgatatgcttatgagtggctgacaaatactttatgggggagagactatgacatatttggtattgatgaacaacttcatattgttgaaaatgccagcaagcgttatgcaaggaaacatatttcagaattggatttccctttactacaagcccccttttgatctataaatcattcttctaaaatcattacagctagtgacttccaatatatatttccagaatccaaaccattgctaattcagttgtattcatcatggagtgaacgttgtgctcaatttttc

SEQ ID NO: 10734 - DNA, 185 bp, Glycine max
cgcgatgatgcataccagaattttgacaaaacagatgggaagcgtagtgcaagtgggatagatgaaagcaaatgttggcgtggtggctatggcgactatggtggttggcgtggtggtggttggcgtggtggctatggaggctggcgtggtggctatggtggtgtgcgtggcggatctagtggatg

SEQ ID NO: 10735 - DNA, 181 bp, Glycine max
gttcgcggagaccttggtttcatctttcatttgctctcctttctatgctaccttcgtgtcgtttccaaacgctgctgtcatctactccttacattgtacttattcgatgaacaatttcgatgcttccaagttctgtgtaattattgccaatttttggatgaaaatcctgttcacatatatc

SEQ ID NO: 10736 - DNA, 359 bp, Glycine max
gtgagatacgcactatcatggtggactttattgagaaaatattggagagaggtgacgggattgagcttcttgttgatgaaacagcaacaatgcaagacagtgcatttcactttaggaaacagtcaaagcgccttcgaagagctctttggatgaaaaattttaaactcctggccttattgacatgcttgattgttgttgttctttatttaataatcgctgcttgttgtggaggcatctctctaccgtcctgcagatcctaattgtcactcttgccagtttatttgttttctgagctctgcaactatcaagatcgtacgataagcatttgacgacacttaagtattccatattcaaattta

SEQ ID NO: 10737 - DNA, 421 bp, Glycine max
cttctctctttaccttcttaactcaccaagcgaagcgaaaagcgctttctaaggtaagtgatggcgaacgcaggtgaagtttcagccttgaaccgcatcaaactgcatcttttgggtgaactctctccactggccactcccctaaactattttgatgaatcaaaccctagcccctctgaatcttccaattcccaatcttcttctgtttctcttaaccactacttcactgacctcttcgaattcgactccaaaccccaaataatcgacctccaaactcccaaaacactaacttcagctcagaagaaacctcaattgaatcggaaaccgtcgctgctaatcgctgttccaaagaagaccgagtggatccagttcgggagcccggatccgaacccggtgatggctgccccggaaaacctgccgc

SEQ ID NO: 10738 - DNA, 380 bp, Glycine max
ggcagagaaggcgaaagagatgggccagagttcgctcctctcaaccctcatcgtccatgacaagtcctgatggtggatgcaatgatagtgatacggatataagtagagaaaatcgtggaatttcttcaaggcaggtatcaaaacatggaaagcttacttggggaaggggtggatttagaagtaacactcggcatggtagtggtggcagtagcaatagcaaaagttctcgcagtagtcgattatctaagtttgttgatcatctccgcaacttggatgaaaacactgatgagtttgatgtccatctcatgcttgtttctcttgaccaacaaagttcatcaagtatgcatcaaccttacctttgctgtcgaccaactatgtct

SEQ ID NO: 10739 - DNA, 110 bp, Glycine max
aaaaaaaaaaaaaaaaaaaaaaaaaggtcagccgatctaaaggatcacagctgtggatgcacatacatgcaacatggtagactattatataatgtaacctaaattcaatt

SEQ ID NO: 10740 - DNA, 350 bp, Glycine max
ggaaatattgttggctgcatcttattctttatatgcttctcacgctgtgtattggagctggattttctggtctggggcgttctctgtcttctgttgtgacaagagttgcatcaatttttgtatttgcatcattctcttcccttctaagcattgccagggtgcctgcacttaagaaagaaatcaaggttcgtttcattattggagttgatggacctaagcatgttcggttggaatatatgacagaaaagcattctcttcaagatcgagttgaaatgttgtgagcttgacaacatgtacaagtctcatctgttctaatatatgggcacatcattcttaaacatttccttaac

SEQ ID NO: 10741 - DNA, 315 bp, Glycine max
ggaagaagtatttttgaaggacaggatacccacctggtttgcagcttctggagatgtgggcttggctgcgatagccatagcaacaataccaattatcttccctcctctcaaatggtacttggttctgtgctcttacatcctcgcccctgcccttgccttctgcaactcttacggtactggcctcacatactggagtctggcatccacttatgggaagattggtcttttcatcattgctgcatcagtaagccaaaactgtggtgtaatagcaagggtagcaccctgtgctgagatgatgtcaatcgttgtaactag

SEQ ID NO: 10742 - DNA, 424 bp, Glycine max
gatttttatctattatctattactgaagaaattaaaatgcattgccagatgccttcgaaaaaaaatgcattgccagaattgctcaatagtgtcatatattaagtttaaaacacatgattaagtatattatttgtttttgacacatttatttttaaacagctattgtcctaatctcagtgtttctcatatattataaatgaaaatgtttcaggtcttaaacttaactgagcttgaattaaatcgggtggatgtgcgtgtgggattatcaggtgcattatattatatggatggttcttcacaagcagtgcggcagttgcgtggtcttgtttcacaggttgcttctcctctaaagtgcatattctgtttcaatttgagatggctttttttgcatttgtgtcttccgagctattttttcttccttttg

SEQ ID NO: 10743 - DNA, 284 bp, Glycine max
ctcacgcgtccggagaaaccaagtttgtactgcacaagatagaagcagttgatgagggaaagttgggatatagctacggcgtagtgggtggtgctgcatttccatacacatctgtgaagatcacatttcactccaaattggctgctggtcccaatggaagctctgctggtcaactcactgttgaattccaaaccaaatgagatgcttaatccaaccaagaccaactcataactggaaaagccaaagctgatggctctttcaaggccattgaagcttaccttttg

SEQ ID NO: 10744 - DNA, 224 bp, Glycine max
attcttccataattctcatgtttctgatccaaggtttaagacgttatagtttccttgaattgtcgtctgggttcaacgtgtttgatgtttagactgaatcagtttgaattagtggagaatatctgataccgaaaaaaagattcagctctttttcttgtttctttgtcacaatacttggatttttgagaatctggagacatgggttgttgtgtaagtaaatattc

SEQ ID NO: 10745 - DNA, 351 bp, Glycine max
catgttatacacgcagaaagaacaattctttgattgagttggctatggttggattgatggccttaaaactcatgctgaggaacattttactgacagaatgatgctcaatgctgctaacattttccccttcaacacaccaaccaccaaagaagcatactactatagaatgatatttgaaaggttcttccctcaaaacttaaccaggctgaatgttcctggaagaccaagtgttgcatttatcacaaccaaaactgtataatgggatgctgctttgtctaacaaccttgatccatctggtaaggcagcacttgtattgcatgcatcaacttatggaaatcatgtcaaaacttt

SEQ ID NO: 10746 - DNA, 156 bp, Glycine max
aaaaaaaaaaaaaataaaaaaattaattaaaaaaaaaaacaaacaatataaaagaatcgaaacttatatacacatgcatgcaacatacctacatcttctatactttccaccttttttcatctcctctatcccacattttacatcttctttacttta

SEQ ID NO: 10747 - DNA, 234 bp, Glycine max
ctcactcattcgctctgtcactctctctctacacgactggctatacaaaaggtgctggactagctaactcactggattactcgtcacaatatagcacatcatatacctctgccctactcgctactctttttactaaagtgactctccacatccataacaagctcgcacctattaactaaactctcccaattcagatcctaatccgctccggcaacttatgctggcctagaccca

SEQ ID NO: 10748 - DNA, 308 bp, Glycine max
ctgacacgaaatgcttcattaccattatgattgacatatcataaagtcgtatattcagcatgtatgaccaaatcattggccctgttggctctgctactgtttacaaagcactcggtgctgatgccaataacatgatcgacatagctgttgattcctttaagagtgttgaaaacattgcaggaaattggggacctggaacaaataggacaataactttcggggatgatggaaaaaccaaatatgtactgcacaagatataagcaggtgataatgcaaacttgggatatagctacaacgtagtgggtgga

SEQ ID NO: 10749 - DNA, 333 bp, Glycine max
gttttcccttcgaggatttaatacagttgcatatctgggattcgaacacgagaccagtaggtaagctaaaacaacccgtgctggttgatctatgtgctcggtggttgggtctactttatttgttcctgtgggctaggactgcatctcttatgcgtatctgtctctggattctgctggttgcaaaggaatttctttcactctggccgctataacaaagtcaaactattctcgcacctctaggatggtgtggggttactattatggagtgatttggctttgtgtttattatttatggggggggtcttatattgtagatttttttttgtatttttt

SEQ ID NO: 10750 - DNA, 368 bp, Glycine max
gccgttagggggagccatcttcctcagctcggacctgaggccgcgcgcttctgctcgtccgggccccctgcggctgccccgtcgccaaactcgaggcctctggtcccaaaaaggccaaacgccataagaggaccccacccagtgcgactcttaatggaggaggagatcatcgtagattgactgagatgttaccaccactagcatctcatttatattatactaatcatttactgaaaaactactgatcagaaccaatttttaaaataaaaatatcaatatggactaaacaattcgttgagtagatatttgcactatgaaataaatatatataaacaatacaaagatcaaacaaaaataaactgctataa

SEQ ID NO: 10751 - DNA, 280 bp, Glycine max
ggtttatcatggacctgatcagtgggcgaatgaatttacaagtgaaggacggcagcgtgatgcagttgatgatcagtgggttaatgaattctcaaagttgaaagttaatgattgggcaaatgaatttggtcagcagtttggtgaaggagccttaggggatagcacttctgatagttgggcacaagcatatgatgagttcctaaatgagcaagtggctgccaagcagcagtttgacattttcgaggggtgtgtttgtcttttacttatttaaaaccttgtt

SEQ ID NO: 10752 - DNA, 316 bp, Glycine max
gtagagattcttccacttcctacctctacctctgaacttgccaaaccctcttgttagcaaagacaaaggagtcagagaagggagagaaaacttgatcgtttttgttttgtagaaacaacttggtatagttaataataatatttgaggagatcgagagagcaaagacaaagtttgtagtttgtaagtacagagaaagatcacatgattgcgaagacaaacacgattatgcctatcattggcaaactgtactgttcatcgtctgagacggtgcttgtggtgaggaggaggccacacgtggtgaatggtgggggttttg

SEQ ID NO: 10753 - DNA, 417 bp, Glycine max
agcgcgtgagaaaagcagaaatggcggcggctacggcgatttctcagctaggctgtggttgggccgtccaccgcagctcacacctccggcgccgctcgtttctgttcccttcccctcgctccaagttatcggttgttatgagtctggagaggcatgacacggatactgctgggtctgataccaaaaatacactaagttatgcagttgatgtgtcaaagctacatgttgaagaaaagaagaactcatattcaacaaaagatggccatgatgctgaaaaaataaggtttggagaggcaacacatgaaagtgtcgatcaaccgaaaaggactgcaaagattcatgacttctgtttaagcattccctttggtggatttgttttaacaagagggattattggattccttttttcactgaatc

SEQ ID NO: 10754 - DNA, 222 bp, Glycine max
cacgcacttgcaacagtacctctgaggtcctttcacaacccttacttctccatataagggtgatcgagtctacctgccgctggaccttggaccgtatatccctccttcacttcaacgtccaagaaatgtcctcttgaatgctacactgattcttaatgtgcttattgactatacatcgctgccaatggcatctacaataaacctagcatcgaagactatatc

SEQ ID NO: 10755 - DNA, 409 bp, Glycine max
cccaattaatgttaagattgctgagctcagagaggcactagaatctgttacagctgagcagaagtacttgaaagctcgtgatgcgagacatcgccatacgaatgagagcacaaggaagcgtgttgtattctacactgtgggagagtaccttctcttggctgctgttagtgcactgcaagtcatatacatcaggcgcctcttcagcaagtcagtggcctacaatcgtgtttgagtccccttcatgattaacgttatggtttccttcattagcaacaggattaggtttattacatatgcgttctctattcaacagtacgattacaatcccttggtgaacactttttttcttttcaagagagactccacttgtatgttgatacccaacaagatatttaaattccttacaact

SEQ ID NO: 10756 - DNA, 240 bp, Glycine max
tctcgatattgtatatgaagatggtatagcaagatgctgaatgctagcattgcatggaaagaaattgcagggtgcagtgcagaacaatttattcctaatttcctatgctaatgtagtagcagtgttctttgagattaggtctgatttctgttaccaagtaatacgagaaggctgtactttatcctctccgttgaagggaaatataatggaaagtttactatttgacatttcaaaaaaata

SEQ ID NO: 10757 - DNA, 149 bp, Glycine max
ccgacgcgtccagggttttcagttatttaaacttgtcataacttttataacaggtaggtttaattgaaagcatattagcaaatacaacatcgatataatgatattaaaaataaaaataataaattatacaatttaaaaaaatataataa

SEQ ID NO: 10758 - DNA, 379 bp, Glycine max
cgcacgcgttcagttgaaatcagtggaactgcttctcaagtccaaacagcacagcaggtaatacagaattttatggctgaagctgcagctgcagctgcagcaccagcacagccgcaaacaactgtgcctgctgcagaccaaggatacaattcttaccctgcccatggttctgtctatgcctctcctccttccaatcctggacatgctggaggctatggctcagtttatggtgcaaactatgggtactaagctgggcagagcaactaatgctgctattattgaaatttataatgctgggaacagaattaatgtaataatttaagaaattttagattattgtccgacttccccgttccctatactcctaatcatttggaaa

SEQ ID NO: 10759 - DNA, 359 bp, Glycine max
gtttgcttttgctacccgtgcgtaaaccgataaacctctggagctagctactggggggttgtcatcaaatcgaccatggaaagcattgaaatggaggaagccgcattcggcatagacgaatccaacgatgacttgtgcagttcgatcctctctcgcttcgctaactccaccgacgaaacccaccaacacctctgcgccgtcatcggcgccatgtcgcatgagctcaaagacaacaaccaaccttccacacccttcgcctacttctgtgccgcacgcgtctctctcgacaaattcacctccgaacccaatcccccgagccacgtcatcgatgcgcttctcaccattctctctctcgccct

SEQ ID NO: 10760 - DNA, 242 bp, Glycine max
caaaaataagacattgtttggtttggttacttgctcgaatttcctcgaatcggttagtttgtatttgattagttaaaccgcaacgcggaatctcttttctcgaactggctaactctcaggcaagtggttcggacgctgattccagcaacaagcggctggtgctcgcactgtatgactccctaaactccggcgactccgacgccgtcatcaagatcgtctccgtctacctagagtggtggttc

SEQ ID NO: 10761 - DNA, 368 bp, Glycine max
ctagagaggaaaaattctagggtttgagtttcacagtgagagaagctcgtggtgtcggggagtccatttccagctagaaattagaatggggaaaaaccagaagacaggggtgggaagagcgttggtgaagcagcacaatcaacagagcaaggaaaatgggcgtttacagaagaagaaggttctcgaatccttcacagagatcagcgacatcgacgccataatcgaacaagctgaacaccctcaacaacccctcttctccacccctcaccggcccatcaatctggatctgagctctggcattggcaaaaatgaaatgacacttgaagaaatgaggaaacagctgaagagggaggatgctttgcatgcta

SEQ ID NO: 10762 - DNA, 432 bp, Glycine max
cgtagaaagcaatcgaattccagaggcagctttaatggctcgatcttatctcccaagggaggtctcagagatagtggcaattgggagaaaagacctcaataaggtcaatccaaaagctgctgaatcattggctaatcctgaagaatatccaaatttgtttgaagattggcaagttgcactagctgtcgaatctaaagctgtggaaacaaggaatgtgtaccctcctgcggagcagtacgtcaaccatgctgacaaatcacacattacccttgttgaagcttttagaagcatgcagattgaggaaggagaggagcatctggagaatggggactctactcatgagttgactgaacgaaatggagaagagcactacacagaggagcaggatgaacagaatggataggaatgaagccaagatgaagcagttgtagt

SEQ ID NO: 10763 - DNA, 391 bp, Glycine max
cccacgcgttcgcccacgcgtccggctaaatcttatcttagcaatagctaccggtatgacaacaatactctattaggcaaaaacaccaaatgggagaggaaaaagagcagcctaagaatgaaaccgagaagaagcccgaggaggccgccgcagcccccaagaaagacgacggacccatccctgtcgtttacaaactcgacttgcattgcgagggatgcgtcaagaagatcaaacgcacatgtcgccacttccaaggtgtggaaaccgttaaggcagatctatcgtcgaacaaagtgactgttaccggcaaattggatgccgagaagctgctagataagatcgccgagagaacctaaaagaacggtgacatcatctcaactacatccaaaaa

SEQ ID NO: 10764 - DNA, 109 bp, Glycine max
gctttgtggaaattttgtacaagttcttcatccaaatgtgatgatacaaaacctgtgcgtatttttggtggggatacagttcctattagaaccgttgcctaggctccat

SEQ ID NO: 10765 - DNA, 181 bp, Glycine max
ctagctagtgttctataagttcacagtcagttctgaaaaatgggttccaaggttttgcgggttgtagatatgttcataacggctatacttctgatctctgctgaggttgcacccaatgaatacgaaaattgtaacataaaagatgggaagcatgctccaaatgggttatatgatggcaaat

SEQ ID NO: 10766 - DNA, 80 bp, Glycine max
ggcgtgcacaatcgacttccgctgtcttgacgaaggttttggcggcaagacctggggggtcaatagagagcaagaggggc

SEQ ID NO: 10767 - DNA, 90 bp, Glycine max
ggattctacccgccgctcgatgggaattgcgcttcaaggcgtctcgtagggctaatgggcctcacgagggtcaccaacggcacgtgcctt

SEQ ID NO: 10768 - DNA, 248 bp, Glycine max
gcaaggcaaagaaaatgacagtggacatcattctagattttacaaaatcaaaggagcgaccagacatggctgtcatgatctaagatacttcaacgtgattggatcgaacccaaacatatgactaggagaagctccaaggccactttgtcaagggtctctgcaatgcacctactggtgcatgatttactggaggttgtgcgcatgaatgtgccacacattggtatgggggttggagttgaagcaggtga

SEQ ID NO: 10769 - DNA, 268 bp, Glycine max
cccacgcgtccgaaaacaatcatgagcttcattctgtttccgattctctttgcatttaggtttctgtcctcgcccgtgtctctctgcttcggatctggtcctcgccaaggttgaccgtcgcattgatctgacttcacagattgtgcgcatcactacttcactaaaggtgcagaatacgggatctgatgttgtgtctgagattatgctgtcctttcctgagaacgaggcaagtggcttggcgtacttgaaggcaacacggggggatggg

SEQ ID NO: 10770 - DNA, 256 bp, Glycine max
cccacgcgtccgctctcatcatctacgatcatctgatgatctttttggtcatcatcgtgatgctttcaagagttcactccatggcaacaatggacatgtggaaaatagctggattgatccccgggtgcaaatacagcaacaccttgaagctgtgaggcagagaagagagttaggagatactgttacatcagcagatctaaacttgtctgcatctgctggtgctcacgaagagagttcagcacgaggttttatggac

SEQ ID NO: 10771 - DNA, 157 bp, Glycine max
ggaattggaagggttagggttcgggtttgggcgagttcttcgtcggacgaagcggggagtgcgcagtcgagagggacggagagagtgttctgggacggcggtgttggaaatgcatttggggggcttgagggacgtattgtgattgggcggtacagcg

SEQ ID NO: 10772 - DNA, 164 bp, Glycine max
gggacgcgtgcgcccacgcggacgaataagaagaaagagaaaaaaaaaaaaaaggggggaaaaaagaaggaaggaagggggaagaaagaagaagggaaagaaaaaaaagaaggagagaaaaaaggaagaaggaagaaagaaaaaagacacagagagaagggggg

SEQ ID NO: 10773 - DNA, 131 bp, Glycine max
gagacacatacgaacaggcaatggtccacgcacacgcatacgcggaaaaacacataggagatgccaaacagactaacgcaaaaacatgtagcaaaccacaagaaaacgatcgagggcgtcgagaaaatgaa

SEQ ID NO: 10774 - DNA, 260 bp, Glycine max
ctctctctctctgtttcgctttcaccgaagaataacttgactttcccgaactccacgtgagaaaaagatacccttaattcgcaggcgcgtcttgtgttggacaacaaccacaagatgattaacttcgaagaaaccgagttgcgactcggcctccctggcaacgactcagcactcaagggaagtgctgccaagagaggcttctctgaaactgcttctgttgatttgaagcttaatctttcttcttgcattaacgactctgc

SEQ ID NO: 10775 - DNA, 173 bp, Glycine max
gggagacagagaaagagaaggagaaggagagggaaagagaaagaagggagagggaacgggaacgggaagagagagagaggtctcggaggagcaggagtcgaggccagagagaaagagagagagaacgggattgagacaccatagatagcaggagattaatggacaaaggagag

SEQ ID NO: 10776 - DNA, 70 bp, Glycine max
cagccctatccccatcgcaacttttctgaggaagttgctattcttgatggctactttggcaagcattgct

SEQ ID NO: 10777 - DNA, 243 bp, Glycine max
agatcatagaatatctgatggaaatcataatgtggaaagagcttctcctgagcgagcgcaagatctggattcttccagcccacctgtggtcgcgacctgttagagagatcttgggagaaagtgtagtacctcttcgaataagtgaaccacccaaaacaaacagtggacaggctgctaatggctcagcactcacacagagaactgcatctaccagtagcttagcatcgagcaatgggacccctg

SEQ ID NO: 10778 - DNA, 268 bp, Glycine max
cccactcgtccgaaacaaccccttcttcactttcattcaaaaccaaagtcccacgggcgaaaaaaaccataaaattttagctctccacgtgtatttgaatcaaagtcttttctaatggtttatctgctattattgaaagtgttgggatacaagtcccaagcagaactttatcaatacagctgcttgtagctgaagccatcatcataggatggactggaatcagttgtcaagtttcaacgtaattagttcagcaggattgccttgcgca

SEQ ID NO: 10779 - DNA, 277 bp, Glycine max
attggccaattcggccactcttctctgaaaaagcctccagcctccttcttcatccatgttccctctccaccaaaatcctccgcggttcgttccgttattcatcgaaccgttctctcaagtctcgtacttggcttagttcacaactcgaaacttcaccgaacgcattccattcaccaattcgtccaagtctcgtatcaatcagtcaatccgtctcgtggaggttggagagatcggatgggaaaggatccatggcgcatcgagtggaccaggagtatga

SEQ ID NO: 10780 - DNA, 140 bp, Glycine max
aaaaaaaaaaaaaaaaaaaaaaaaaaaaaaaaaaaaaaaaaaaaaaaaaaaaaaaaggggaaaaaaaaaaaaaaagaaggaaaaaaaaaaaaaagaaaaaagaaaaaaaaaaaagggggggaagggggaaaggaccaaag

SEQ ID NO: 10781 - DNA, 142 bp, Glycine max
atccattcattgtcttaatgttttcaatttcttcctctttctccatccatttctttcggctcctctcaataacccctttctcaaattgttgcttatcaccatctcaaactcccaccaccaaatctcacccctatattctttc

SEQ ID NO: 10782 - DNA, 292 bp, Glycine max
ttcatttaaagctgatacgcctaaccaaagattagctcacacgctagtgttgccgtggggcgcatagtatagtatggagtatggaccctcccttcatttaaccatttaccaacttgaatgaaaatctaatcccaatctcaagtctctccaaaaccaagttttagttagagacttaagactctcctctatctaactttggcggtggcattcaccacacactcactgactcagcatggcaaacgacgccgctctgaaaagctctctgctgtggctggcaacaattatattggtg

SEQ ID NO: 10783 - DNA, 188 bp, Glycine max
tgtactagtgttttgttagttcacacactaagttctgaaaaatgagttccaaagggggtcttattctacttatgttcatggccactatacttttgatctcctctgacgttgcacccgatgatgcataccacaattttgacataacacatgggaagcgtaatgcaaatggtgtagatgatagcaaatat

SEQ ID NO: 10784 - DNA, 86 bp, Glycine max
aagaccgaataaataatgctttggttgtaataaagcattatatatccttatttaggggatttagcgaaggaataataatgataata

SEQ ID NO: 10785 - DNA, 54 bp, Glycine max
ctgaagtttgaatgttcatttgaaagtttgcccaagcccacttgaaagatcact

SEQ ID NO: 10786 - DNA, 391 bp, Glycine max
cccacgcgtccgctttgtagtgttgaatgcaagtgcctctgatgccactcgcttattgcggaacaaaactgcaacaggtaacgtgtccagagagaagattgagagatacttacttgaaaatggactcggccagacaccccccatgggatggaatagctggaaccactttggctgtgatattaatgaaagtttaattcgagaaacagctgatgcattggtgtcatcgggccttgctgctttgggatacaaatacattaatgtagatgattggagggccgaacttaatcgagaccatcagggaaatatggagggcaaggcttgagcgtggccttcaggaattaaggctctggctcattatgttcataggaaaggtttgaagttggggatatat

SEQ ID NO: 10787 - DNA, 217 bp, Glycine max
  modified_base (42)..(42): a, c, g, t, unknown, or other
atttcgtcaattccaacaacaccacaatgggaagaagtaagnccacaacatacctctcgggggctttcaatttccctattatatctgttggaagtaccattgagttaatcttataatggattatgtgttatctttctgttaacggttaaggtgtatgtatattcaggaccggcgagggtgtaccggcagataaagaacaaaccgtacccgaaatccc

SEQ ID NO: 10788 - DNA, 261 bp, Glycine max
  modified_base (94)..(94): a, c, g, t, unknown, or other
  modified_base (159)..(159): a, c, g, t, unknown, or other
gccgtcttaattaagatgtaaaacgaaaaaatgtgtcgcctagccatatccgagagtggaacaagaagggagttgctcgaaaaattggaggtgnttcaagatcgaaaggcgagggacagatgcatggccagcaagatccttcggcattatcagccaaanttcttcccagcacggttaggtgagtgttgaggtgtctggaaaaagtacctgggaggagaagggttttcgccgaagcctgatgggggaagaaggaaattcgca

SEQ ID NO: 10789 - DNA, 87 bp, Glycine max
gaaaggcaagacatgaccactttattctaaggatgtttgtttaacacaaaacagttgagttcatgatgctgaaatgaaagcacatca

SEQ ID NO: 10790 - DNA, 51 bp, Glycine max
gccaattacccattcctgcgattgcgcttgttgaagatgagaatgaatgtg

SEQ ID NO: 10791 - DNA, 160 bp, Glycine max
ctctcactcactttctttctctgtacaactaggaagctttctctctctaaaagcggggaggtcctccagcaccgcgacctccaatctccctctttgacacagagagagatactgtgtgtgagaccagtattcagtttatggattccttttctcttctaca

SEQ ID NO: 10792 - DNA, 196 bp, Glycine max
ccgactcgtccgaatgaagtcccattaaaattctccccttcccaatgccatgcgggggggccatatttaatatagggaaggttgaagttgtgacataacattagattaccatgcaatgcattataatctatttgacataattgcacatccaggtgcaatgccaacatattgctacacataacccttagaccagcat

SEQ ID NO: 10793 - DNA, 234 bp, Glycine max
  modified_base (2)..(2): a, c, g, t, unknown, or other
gngagtcgacaaatatctgatggtgttatagcacatagtgtttctcaaggtacacctggacgcaaaactaggctaacctctaataagacagctggaaaggaaacttctcgaaaaggaaataaaggaaaaacaccaggaagacagtctgaaagaggggatagatcaactagtgtgtctgtgagcccatcacctgatttccaggtccaatcgaatgagatgcagcagtttgggcac

SEQ ID NO: 10794 - DNA, 166 bp, Glycine max
cggacgcgtccgcccaatcatgcggggtattgaaagcacgattcccaatgccatgccgggggcccatattcaatatagggggggttgatgcaggaacataacatgacattaccatgcaaggcattataatcgctctgacataatagcacaatcaagctggaatgcc

SEQ ID NO: 10795 - DNA, 178 bp, Glycine max
cgttttgttagttcacacactaagttctgaaaaatgagttccatagttattcttattctacttatgttcatggggagtatacttttgatctactgggaggttgcacccgatgatgcataccagaattttgacaaaacagatgggaagcgtagtgcaaatggggtaggtgaaagcaaat

SEQ ID NO: 10796 - DNA, 145 bp, Glycine max
gaaacgcatgttggattatgagttatcatcctctgataatcaatcgcctctttttggggtctcacatatcatactcaagactctcatcacaatacatgaatcaagctcatatcgagtttcatcagagtcactataatgacgcatt

SEQ ID NO: 10797 - DNA, 220 bp, Glycine max
caactggctcaaagcaaatgccactaaggcagaaaattcggctgctgatgctagtgctgctttttctgggaaaaagctcttgcctgaagtaataatcaatgaaaataaatcttctggagaaaaaactgggtctactcctgttagtactgctacaaattttactagttcttggagccctggattattgtcaaacagtcaagggatttttggaaattggaaa

SEQ ID NO: 10798 - DNA, 444 bp, Glycine max
ggctgatgatgttctacatgaaggaggtctacaccttctgccacggagtgcaggccggcaccaagctcttgggatccacgccgcacgaccagcttctcatcaagacctccgattccttctacggcttgctccttgtcgcaattgggttcctcctcttcatggtctcttttgttaaagatcgtgactttcaggtcttcttcgccaagggttgcacgctcctccacctcttcatggcgatgtggagggtctactttgaacgcaaggttgaagatctcgcttgggattggcttcgccagactgttggcgattttctcttggccctttcgtggggtttcttccttgggtactcttggaaggagaaagatacgttataaacttgtcaatgttgccttccctgcttcaattacagaaaatggtcaataatcttaccagattatgcctgat

SEQ ID NO: 10799 - DNA, 436 bp, Glycine max
  modified_base (310)..(310): a, c, g, t, unknown, or other
gccacgcgtgccgccaagcgttcggccaagcgttcgtgcacgcgtccgcttttctctgaggctccctttctctctgtctgtctctcgctcttcttctcatccagcaccgagtcacagactcaccgatcttccgattccctttcgtcttggtttatgagctcgaaggagagacccactcttggtggcacgcggattaagacccggaaacgggaatattgctgcgccgctggaccctgcagcattctcggatgcagtggtccagatatatttggataatgctggtgatctggaacttattgctaagagcatngaatcttcagaccttaactgttcaagatacggcgatacctttgttgaggtagttctcactgggggtcgtacacaacctggaactaccaagcctgatgagggggaccgccatccatactctataata

SEQ ID NO: 10800 - DNA, 183 bp, Glycine max
gtctaaggggtgccctgagatcacatttaacaatggtgaaggctgtggccgttcttggcagcagagagggttgtaactggaactattcacttcgttcaggagggatgatgaacaaccaccgacatctggaatctaatgctggagctataactggtcttgaatggattgataaaatgtcttgag

SEQ ID NO: 10801 - DNA, 424 bp, Glycine max
atttccagatctttatattggctgttactcgcaatgccagatatggatctcttatagggagcttcaaaggaaaggacctaacacgcattgaatcagctataaaagctttacaaaagaaatttcaacccagtgctttcattgagacgaaataggatgatgttctaaatgctatggtccatttcttttggatgccaacagaatgaaaacctttcatggctggggtcatatcattctcatattacctacaaatataagatgcattgggataaagatggagagggaagaaaatcaaggtgctgctgtattggtagaagaaagaacaatggcacaaggaggtggctgaatcttcaattctattgccatacacagcacttttaactgcttcatggagcatggacaacctattgattattatggaattatt

SEQ ID NO: 10802 - DNA, 448 bp, Glycine max
  modified_base (184)..(184): a, c, g, t, unknown, or other
gctgagaagtgtttggcagatcatggtgtggataggccttcaatgggagatgttttgtggaacttggagtatgctttgcagcttcaagaggccttcacacaaggaaaggctgaggatgagactaagtcatcatcagcagtccctactgcagctgttcctacttcacctgccccaccaacacctnccatttcttctgatgaccgcccggctgcgcctgctcgtccggaagtgaataataatacttcatcggatgtgcattctattgatgaccattctggaactgcaatgtttgctcagtttagcaatctcaatggcaagtgaaggcctaatttggtttcatgaatggagcaaccatcacctggacagctacaaatttgatcatgtctaggaagatgttatagtagctttctgaaggcttggaccaaaaaattcctgtgtaatggtgtga

SEQ ID NO: 10803 - DNA, 296 bp, Glycine max
  modified_base (22)..(22): a, c, g, t, unknown, or other
cagaaaaataaaattaaaactntgcttcgctttttctcttcattggttttcttcctcttctacccctttgatctcatgcaatctcccctcatggatccctttgatttgattcgcaaaggggtttaattgcttgagatctcgtaaaggttttggctttcgtaatggaagggtttggctgaagctatctggaatatttgtgttacatttttggaggtccatctatgttttagtcattttgtccatattcttgtcaataatgagcttatccaagaaaggttcccaaacagacaccaaac

SEQ ID NO: 10804 - DNA, 435 bp, Glycine max
cccacgcgtccgcccacgcgtccgcccacgcgtccgccccagcagcgtgtgctttcttcgttcgtctcttacatcaggtacattaattaagataatactacttctgaagtgctgttgaggttatggagcgccagggtcatgattatgcaactgcatctgctatggcatatgctcagcaacaacgacaagctgctaatatgcaacaacagcagcagtttggatttcatccccagcatcagcagtttccttcgtcaatgcacggttctccttttatccccccaggtcctggtcctgcacacccccctatgcaacaattcccttatcatcctgccctgcagcagcagcaacagccacttccacaattacaccctcatgcccctcccccgcctcatcttctacttcagcagcagcagcagcagcaccaaggaccacctg

SEQ ID NO: 10805 - DNA, 429 bp, Glycine max
cccacgcgtccgatctaaacttccttgttattcaccatattcagttctcaaatgctattcacagggatgacttggtaagtggtgctggctctaatgctgtagccgttctggctgatgggctcgtagatggactacttgacggaagctccacggacaaggtatccagaatttatctagaaacactgtctttgaacttagctcatggctgcacaagagaaatacaaagctgagatgtcccatgtcatcctgggcaaacattggtgatctgatgaagaattgcacaactgctggagaagacattatactttgctggtgttgctatcgcaatcatggtatgcatcgtcaatggaccaggggagatggctgacgcagactatggctatgctggaggcactctcagtgagattgacctttatgttgggaagactg

SEQ ID NO: 10806 - DNA, 240 bp, Glycine max
attcaaacaacatattgaaatatggctttaactgtatcttgattattttcatcaggttagtttccatagaggaaattcatgccaaaaattacacactgggttcattggtttgtttcatgaacaagacagggttgtagatttgaagtatgctgctgaaacaaatattctttttacgaacgaaaaagaaaaaagaaaaaaacaaaaaacaaaaacaaaaaaaataaaaagaggaagaagaag

SEQ ID NO: 10807 - DNA, 225 bp, Glycine max
aaaaaaaaacatattgcaagcacactttaacaagatttttgaaaataaacaacagggcggtcaacatggaaggaataaatgccaaaaaatttcccacggacgtaattgctgcgcggcacgaacgctctaggacggttgcttggaagtatgctgatcgaatcctacatttgttgaaccaacgtgtgatcgccaatatcgtgcatagcgggtcttgccctgtgtttc

SEQ ID NO: 10808 - DNA, 427 bp, Glycine max
  modified_base (280)..(280): a, c, g, t, unknown, or other
gcagtttattctatcatatccttgttcaaataattttcttttcaattacaataccccaatcccagaaacttatgttcatgaccatcctcaaggtcccaataacatttacttgaagacaattttgagttgaccttacagcctagttccacctatacaaacacccttgatccttcattcttttttgagttgaccttacctagctccaatactggcaacaataatactcttgggcatctgaactatctccattctttttttccccctttctttgcagtggatntgcgaggttttaaagaattaaatggcgttttaatggcctaaaaacctaggaattatagaattcattttacacatacctctttttactaacctttaatctttaaaatttattcttgaattaatcgtgtttaacggagtaatttaatta

SEQ ID NO: 10809 - DNA, 434 bp, Glycine max
gaccgtttgagcttgaggccttgcaagactgggaatacaaatttatgggcaagtatgtaaaagttggaaccgtaacaaagacagttccagtaactgaaccagaatccactgctgaaccatcagaatctactccccatgatgaatcttcaaagcctactgaagatgatggcccatcagaatcagcagctgctaaaaatgatgaaaccccttcaaaggttgatgcagataaagagtaataatcgttggataaagagtaattgtcttgcaaattctcttgcaaacagtggaaacggttacttagaagcttctgagaaatactgagccttgctgaatgtattcagcaaatgtgggacaaagtttgcctaagtattctgtttgataaataaggaaatcttggtatttaatttcagttttcctgggtttatagcttcttc

SEQ ID NO: 10810 - DNA, 432 bp, Glycine max
attccgttcaaagcgttgcgtagaacagagaaaaagaaagtaccaatttcttgagagagaaaacccgaagaagagtcatggcttccaccttcgacgccttcaccgtcgacgacgaccacttcgccgccccctccgccgctgacaccttctccggctacggcgacttctctactttcccctccgacgatgtccccgtcgaccacgccgccaccgcggcgtcgccggagatcttcggattcagcgatcccgatccaggctactccccgtctcccttcgagcaagtgcacgagaatgggaacggaaatggaaccgtaaacggctacggcgacggcgttttcgtctccgatggaccggtgcttccgccgccggaagaagtggagccggaggaaggtcacgcacttcgggagtggcgccgtcaaaatgccattcagc

SEQ ID NO: 10811 - DNA, 351 bp, Glycine max
aacaaattaacaagaaagtgaaattgatttgggttacttgttttcttgagtcattcttggttagggtcgtgaatcacttaagatacttagtacttgaatgtttaatatcctcactttgagagtgattgttagcgtttgacttgcttctttttgaataaataaatctatatagacttttgctttgaaagctcgtctcttaaattttcacatccacttttaagggtgtggctgcaccaaagtggttaataagcatgctgcggcatctaactagttagaaatttgtcctactgcatagatatccctgctgattatgtctgtattaaaagtaaatcattcttttgccaatacatc

SEQ ID NO: 10812 - DNA, 439 bp, Glycine max
gaagatatgaggggggtgtttcttccatggaacccaccttgcttccacgacgcactccatctcccttccgtctcgctcctgccaacgagacccttcttcttcaccctctcagcctcctccaccccctcagcgcccgtggagtccgcgtcgcagctcagcgcgcgcgagaggaggcgcgcgaggagcgagaggagggagacgaggagcggcgcgaagaactggagggaggtggtggaggagaggctcatggaaaagcccaagaagcagaagggctcgtggatggacgagctgaaccttgacaatctcgccaagctgggtccacagtggtgggtcattcgggtctccagggttaagggaaacgacattgcgcaactcctcgctcgctcgctcgccaagaattatcccgatatggagtttaagatatatgctccatctgtca

SEQ ID NO: 10813 - DNA, 368 bp, Glycine max
tcgaaggcaagagaaggggaatgttgggtgtgtaacaaattgttgaccctactttgggatcagattatgatgtggagcagatggagatattgacaacagtggctttggaatgtgtggaggaagagaaagatgtgagacctagcatgagtcaagtcgttgagaggctccaaagtcatgattcttaatctcttgtgcatgtcactttcttgtttatcattgtctattgctagcctctagatattttcatcagtttagataattaaggagtgtttatatttctcatgttgagcagtagagttaaattaataagtgtttgtttagattcacatgtacttaatgtaaatccatcttgaaattaattactcccc

SEQ ID NO: 10814 - DNA, 391 bp, Glycine max
  modified_base (383)..(383): a, c, g, t, unknown, or other
  modified_base (386)..(386): a, c, g, t, unknown, or other
ggcacagctcaatcccgattctggcacttacgcggtgaagccgtgtaaggagcatgctggagcaacgcttgaacttccctccgaagaaattattcggaagtcagcatagggacaagaggcaagcggttagaacaaagtctagatttttatttttgcttaagatcaataagcagtattgcctctgattttatgggggtgtttgattattatttttttgctcccaatcctttgtttcctttcaaatctatttagcggagtagacaggatataaatctgactggcaaaagtttatgatgccctttttttgttgaatgatcacataatgtatcccaagtttttttgtttaatttgccttcagcagaatttcaaaaaaaaaaaaaaanaanaaaaa

SEQ ID NO: 10815 - DNA, 435 bp, Glycine max
  modified_base (406)..(406): a, c, g, t, unknown, or other
gaactctttcggagagagacacagaagtcagcgagtgcaccataaatgtagaaacccctcaaatcaaaacaaaaccatacaacacaaatcgtagattgaaaaaaataataataaagaatcagaaaaaatgggttctgagaacaaagaagccgcaggtggagaacttaacaattcgtctccttcgccctcttcttctcatgcttggaaaagtcgaatcgttattccaacccttctcgcaggagttgctggtgctggagctgggttgatttcaaagcatcgaagaactcttggtcctgcttactgggtggtctaactatgctgtgaatttcaccattgtcaccgggtgctattgtggggcacgtgaatttgtggctgcaactagaaaaacgggacctgatgacatatngaattctgcagtagctggatttggaactg

SEQ ID NO: 10816 - DNA, 433 bp, Glycine max
ctcaagccatcctctcctactatgttctccttaaaaaaaaaacgaaaacagtggggttgaaaaatttgtcttttatttgcagaaacgagccaaggcttagggtttggtcttttggtgtttttgcgaattagggtttgtgattggatcgccatcttcaccaattaccattaccataaaacttaatcttctctctcgccatgacggacggcttctggaatcggcagcagccgcttcacccttcttccaccatgctcaaacgacctcgtactgaatatgatatgtcaccttctggtctgacttcagggggtaatgaaatgcataattatattgctcgaaatgatgaccacaccggtcatcgaatgctaaaggacactaaaacaattggatctgcttatgatcggtaccttcaaagtgcagggcagcttacttcttt

SEQ ID NO: 10817 - DNA, 410 bp, Glycine max
  modified_base (373)..(373): a, c, g, t, unknown, or other
  modified_base (376)..(376): a, c, g, t, unknown, or other
  modified_base (379)..(379): a, c, g, t, unknown, or other
ccttaatttctctctcacacacactttcccacatctctcatacacttcctgcttctctctctctctctcgtcctttttcctcattctcttcttcacaaaacatcactcttttttcatttcaccgacaacacaacaacgtgagttaaacaaaaaacagtaactccacgcagccatgacagacagggtgtacccatccgccaagcccgccgtggttaacggcggcgccgccaacccatctttcccggcgacgaaggctcaactttacggcgccacccgccccacctaccgccctcaaccccaccaccggcgccggagccggcgacggtgctgctgcaccttcttcttctggctgatcctcaccgtgctgatcctnctnctnctgatcggcgtcgccggcacggtgttctacc

SEQ ID NO: 10818 - DNA, 314 bp, Glycine max
tttgaaggatttgttgaggatgctgttgaatccaccacgggagaccattaaagatgatgcaatgattcagatagagatgtctgtgccatggagaggcaaaagtaaattacacagacgaaactccaattctttgccaggtgagaagctcgggtcaaaagggtgcggaaaaactggcaaggtccaaattttgtgaattactaccatttatatacatatctgtggtatacatggaaggaaataagggttctaaatgcaattcagtggggaaaaggcaaatttttagggagtaaaaaaaaataaaaattaaggaaaaa

SEQ ID NO: 10819 - DNA, 440 bp, Glycine max
gtgatttgttacatcttagtaaattgatagatccttcaatctgttcttgttattgtgggtaacatttagcttccttctatggctggatatagtaatgtcacacagatctgtacttttttttctgtttgctttcattcgttttcagttcaatttgtaactaaaatggatagatctgagcactgatgatacagaataggatcaatttttcaagtgggtgctgctgaacagtgtaagtttttcaacggacaattttaatttttccctggctttgatatctcacatttgatagctgaaaccctaaatttcctgcacaataaaccaaacaatgtacaagatgtttccttttgaactctttaagtttcgatgttaattaatctattagctagaagaaccaaaactctatcatttatagttacagttcttcaaggataacctattag

SEQ ID NO: 10820 - DNA, 436 bp, Glycine max
ctcgcactgttatttctgagcatgcacagcagagcggtggtgggagtttcagctctaagtatgggacttgggagaattgcttgaccacatgatgatccttgccgttccatgcaaacaaacatcttttttcttctgaaatttgccaaaacttgtgtcaatcattggaatcggagtttttgggtgcaggtgaaaagcaattttgcatcaggtcaaattggttccgtttcagtgaattgtgtattccgttagtatccattttcttgtttatttatatctcaaattgcgatatttaccgctgcctaagatatgtggtagatttgtgtgacttgaatcaaattgccttcaacaaagctttgttcataactaatatagtagctcaacagtttaggcccgtaatttctgcataagaacaattcttccagatgctcataattaa

SEQ ID NO: 10821 - DNA, 427 bp, Glycine max
ggactaagccctctgcaatctgcagaagtatatgaccctcatacaggcatgtggtccctgttacctagcatgccttttgcaagagctcaagtgttgccaactgcttttttggctgacttactcaagcctattgccacaggaatggcttcatacaaaggaaggttatttgttcctcagagtttgtattgctggccattttttgttgatgttgggggtgaagtttatgatccaaatttaaattcatggcttgaaatgccaattggtatgggtgaaggctggcctgcaaggcaagctggaacgaaattgagtgttacggtcgatgatgatctatatgcacttgatccttcaaattctcttgacagtgcaaagatcaaggtatatgattatgaaggtgatacttggaaagttgcagcaggagatgttccta

SEQ ID NO: 10822 - DNA, 424 bp, Glycine max
cccacgcgtccggagagagaaaagccagatagagaaagacagacagagagagagagagagaatgctccgagtttctctttcagagactagtagacagagaaagagagtgtgtgtgactctgtgagagtgtgcgatgatgatgcgaagaagaaccaaacaacgaaaaaacaaaacgacattcacaaatctgcgcgaacctctcaatctcatttcctgagaattctctctcactgcgctgcgctgcgttttgtctccgccaccgtcgtcgtttcggcttctcaaaagcatttcgcgcgcgagggagataaagatatgagtcgtttagggttcaagcacgaagtttacgacggcgacaagcacgttggcgaactcgacgtgattcctctgtcgtcgtcgtcgacaacgacgccggttcacaatagct

SEQ ID NO: 10823 - DNA, 435 bp, Glycine max
  modified_base (288)..(288): a, c, g, t, unknown, or other
  modified_base (335)..(335): a, c, g, t, unknown, or other
  modified_base (402)..(402): a, c, g, t, unknown, or other
ctctgtctcagtgtgtctattcctttgttattccatgattaaaaagcttcgttttttgcattaatcttattccaactatatctcgactgacaaaataaaacattaatattgctttgaggtcgtggtgcacagctgtggtaattggtgaatcttgcataattggtaattattggtatccgagataatttcttaacattttagtggaaatgctacttcaacctccaatgttactgtaaattagaattatgagcacttatttttatagccaactggttctttagtcaattntagtggagttatccttggaaattttaatgattgtgatgtgatagatntcttggtactgactactgagttgtacatgacgaaaggtatgaagaaacccaatggattatcccacanattacagaatgagatgggaaatattaaagctaa

SEQ ID NO: 10824 - DNA, 341 bp, Glycine max
gccacgcgtccggtttctgagcctcccctcccctctctctaagatccccaaattgcttgtgaatgctagaaaccctagacagattcgattggatgcgctcccatttcacatcaagggcgagcgcattcggttcttgcaagcaagcctggtactaccgctgcctcggcctcgacccctgaatttgaaccattcatcaccacctttcttcattcattcacggttttccttttcgactcgatttgttgttttttttgttttgtttccttgacgatgttgacgatgagcaagcagaagaagaaccagaacgcgaagaggctgttgataagccttaaagggcctgg

SEQ ID NO: 10825 - DNA, 407 bp, Glycine max
gaatgagcccgttcatgctcctctaccaccgaacacaccccgtcaccaccgaacgctaacgtgcgccccttccttaccctgcgcctcggcactctcccttattccccctccttcataagctccgcgttaaccgtcctctctctctctctctctcggatcggagcgagactggcggctccggcgttgggggcgttagggttagggttagggtttccaagagatgtggtatgctccaggcattgatgaatctgttctcgctgtgttggaagccatttggccgcgatgctgctgatcgaatcgattccatcggagttaccggaagagaaggccaaaacggcttgctttggttccgcgacggcggaaaatatggctctggcgatttcttcatggccggcgttcaggccaac

SEQ ID NO: 10826 - DNA, 438 bp, Glycine max
  modified_base (423)..(423): a, c, g, t, unknown, or other
tcggacaatttggttttggccgaacctttttaacatcatttgggctggttttctgccaatacaaacaaacaaaaacttgattctctctattccatggcgcccggaaggaagaagcggcaagggaacacatccattattcctgtggatgcaaaccccactcagcaaaaagcacaatctttggatattgatgctgagtgtgagagtgagaccaaaagaatgaaatttgctgaggaagatggtgatggggcagggggttcttcttctgttgtgaaaaagaagcgtggcagaaaaagtaaaaaaggagaagcatgacacggaaaagatgttagagagcaatttgtcggaaaagaagatactcaaggcgaataccacggtgaaaattgtggagtatgagggtcttcttctgttcaagaaagtgcgaanaagaaacgtggaaga

SEQ ID NO: 10827 - DNA, 436 bp, Glycine max
  modified_base (419)..(419): a, c, g, t, unknown, or other
tctacaatcactccttcctctcatcctctataaagaaagtgcttaatttgtgttgttacttggttcagtttccatggattgggggcttgctatatcttctcatcctaaaccttattcagtcacaactggtggaaatctctggcggagtaaacacaccaccaagaatatttactttgcaagttcttggatatcaaaagcttcacgacacaaaagggaaactcaaatagaacataatgttttgaggttccaacaaccaaatttggatcatcattacaaatgcatcagaggagggtctacatatcaagaatgcaatagaaaatttgttgtgaaggcaatctctaaacaacctcttggttttgaagctcatgcttccaatcctaagaacattttggactctgtcaaaaatgtattgtctgctntctactggttttcctat

SEQ ID NO: 10828 - DNA, 364 bp, Glycine max
ctttttgattcctaaattctctaaaattcgaaattctaatttcgttaggggaaagagattgtttgtgtgtgagtggctatggtggctggcgtggtggctatggtggtgggcgtggtggctacggaggttggggtggtggctttggccctaacgaacataatgaggctgggattgatgctagccctcacaactaagaaggaaacttgctaaagcttatataggatttaagttatcgtaataaataaaacttcattggaagggtagttataatagatgtggagatctttcttcgctctggtcatataaaggaataatacttttctattaatttccttatctttgtatctctctgttcctttttgct

SEQ ID NO: 10829 - DNA, 269 bp, Glycine max
cttgagcttctccttctctctaacctaatttctgctccgacgacaacaccaacaccgaagccaatgacggcggcggcgacaccaccgcaacctgctttcattcccaccaaaggattgggaagtgtagtttgagttgatttcagcttctcctgagcaacaatgcgaaacattcagcctcatcgattttccactcttatcgaaccacccaacaaaaccccaacctcgaagccattcttccttgccatacctcaccgaaccattcccgagcc

SEQ ID NO: 10830 - DNA, 355 bp, Glycine max
cttgagcatttcctactctctaacctttttgctgattcgacgacaacaccaacagcggacctattgacggctgctgctacaccactgaaacctgctgtcattcacaccaaaagataggaaaatgtagttcgagatgattgcagctactggagcgcatcaatgcaaaacattaatcctaatcgacattccactcttattgaaccacccaacataatcacaacctcgaaaccattctacattgcaatacctgatcgagccattgctgatactcgaggccaggaccttaatttcatttgcgtcaaacaccagcacgacatcgactatgactggaacatgcttctcccttgatccacct

SEQ ID NO: 10831 - DNA, 449 bp, Glycine max
cttaaactccttactacattctccttctcacatgaaatggatacatcctagttcttttttgggatcaataaggacaggctggaaggatccaaaaccaaccccactcaccattattattattattattatcagggcagaaacaaacacaacactaccctctccaataaagtgtatttctgtacacaaaactcttcagtcttaaccaaggtagtagctagcagcagaaaaattaaaattaaaaattaaaaaaattaaagagacttacaaaaagcaaaaaaaaggacgaggattgaattctttcttgccttttctttttccttgcagactctgctaagcatctttggttcctcacttttccattcttttatctgccttcccactccttcttcattcctcttcgaattttctcttcttttttttcaaccaaattatcttggtttgagcttctc

SEQ ID NO: 10832 - DNA, 434 bp, Glycine max
gcgtgcgtgggatgggggcgctaaggaggcgttcaatgtgctcagaagcaccgttgaccggagttattttcctgatgggcagacgttttgcacccttgcgagtgctttgtgcagggagcgcaagattgatgagatgaggagttgttgtatcttgccgtggggcggaatattgtgcctcctacgtcgatgtatgacaagtacatatcggctctgtgccgggctgggagagtggaagatggttatttggtacatggggaacttaagagtgttgctgccaagacgtcgtatgttaagatgattaagggttttgttaagtctggtaggggagatactgctgctcggcttcttgttgaaatgaatgggaagggtcatacgccgattcctcggttgtgtagatatgttatttgcagcttgcttgaaatggacaattcaag

SEQ ID NO: 10833 - DNA, 429 bp, Glycine max
  modified_base (418)..(418): a, c, g, t, unknown, or other
cgcgcttccgccgccacactcgtcggagcacactcgccggaaaacactccccggcaaaaaaagaaaacctcaaagactaacccgagtcgttatagtgggttggagtgaacgaaaagaaacaaaggcaatacaaaaagggcaaacacgaatacacggttttcattctttcaccactcttgtttccttttacgacgtcgttatggaactcaagtttatgcagttttcgcaacacgttcttcctcattccccttcttcatctcaaaccctcgcttctgcactctcttccccttcatcgtccaaaacgcgaaccctaatgtgtcgtttcgtgaatcgctcgagcctctttccgaccaccacccgccttcttcggagaaccaaatcgtttgagcaccacgcgcttttcacgcgcagggggagnttgagaagggc

SEQ ID NO: 10834 - DNA, 280 bp, Glycine max
agcacaacatgacgtgtacgattctatgtccgacacgagcctatttcattcacagtaacttctaacgacgattagctactattcattgctatttccagattctgattcttgacgtcagactatggaatgggaacccatgtgatgtgacatcaagactgcttggtagatcgtattatggatcttacaactgtatcttcctgccgcacgagttccggcacttactgtaattattatgactacgactacgacagctaccatgttgtctcttgctggtggctct

SEQ ID NO: 10835 - DNA, 430 bp, Glycine max
cttaccccaagacccaagttttctcttttcctcataaccccctctctccctaccaaatttcaatttcctctttcctcccttaggttatggatccattggggaaacgccctgccgccgaggacgattccctaatttccgattgcgagagcggggtttccgctggagacacgccgccgccgttcgtcgaaaacgccgacctcgtccggaccagattcgttcgtggcctcgtcgcgcactgcttcaaacccgaggttctggcagttcgcagaaacgtgtgttcctccgtcatggccctggcgccttaaccattcctttaacgttttggcccgtgcctgggccaaattgcccggcggcaatgccaacgtgaagttggcctgttacggtccgtccagtaaggaagagttaaatgacttctttcagaacggtttcg

SEQ ID NO: 10836 - DNA, 410 bp, Glycine max
cggacgcgtgggcggacgcgtggggtgatttgcagaggagaagaggcaatggcttacatgtgtgcagacagtggcaacctgatggcgattgcgcaacaagtgattaagcagaagcagcagcatgagcagcagaagcagcagcagcagcagcagaccaatccaattccatggaacagcactcctcctctccctcccaccgatttccccgaccccttccaatccgatccccccttccacttccaacccttccgcttctccgacttcgactccgacgactggatggactccctcatcgccaccccctgctcctacaccaccgattttccctttcccctcctccgatctcaaccgcctcatcttcccgccccaatcccccgactcggactccccacagcagcctctcctaaaag

SEQ ID NO: 10837 - DNA, 446 bp, Glycine max
cccacgcgtccgtgcagtttattctatcatatccttgttcaaataattttcttttcaattacaataccccaatcccagaaacttatgttcatgaccatcctcaaggtcccaataacatttacttgaagacaattttgagttgaccttacagcctagttccacctacaaacacccttgatccttcaaagcctctcatagttccaatactggcaacaataatactcttgggcatctaaactatctccattcttttttccccctttctttgcagtggatttgcgaggttttaaagaaattaaatgcgtttttatgtgctaaagagctaggtaattatagaattcatctcacacatacttctttttactaccttttatcttttagattttatttttgaattatccttgtttaatggagtaatttaattcgttgaagggttgtggaatttg

SEQ ID NO: 10838 - DNA, 54 bp, Glycine max
ctttttttttgtcatcttttaaattttaatcagtgtgaattttgaattgactcc

SEQ ID NO: 10839 - DNA, 408 bp, Glycine max
  modified_base (374)..(374): a, c, g, t, unknown, or other
cgtggaagaaggaggaactcgaaaggatcaagaaagaacgcgagcttctggctcaggaaagatcaattgctgctgccaaagacgaagctgttcttgcttttcttagaaagtttgcagaagcagaagacacggtgcagttactcgagaaaattcaggttcaaaacgacaaacagaaaaacatgaaacaaaatggcggtaatgataatgctaatggaggtggtggtgtcgcagttgtcactgatatggataaacaagaatgtggaaatactaatgttcgtgttagtgttgggaattttgtgcacatgagtagttctcgttggccgaaggatgaagtggaggcattgataaagttaaagactcaaattgatgtgcangcacaatggaatagtaataacaataacaataatg

SEQ ID NO: 10840 - DNA, 428 bp, Glycine max
gagcgtgaacccaccgtgcttgactctgttattaagagtttcgaagaagaaatactttctccggttccgaacccgaacctagcatccgaggcagatgtgtttaagccgaacctagggtacttattggaagcatccgacgacgagctagggttgccgccgacggtggcgccaagcgaggatgtgttgaaacccgaaacagttgattcggatcgtgttggaccagaaggaatggatctgactgggtttttggggtttgaagatgatattcgtagctacgaaggttttgggtttgtggggtatgatgtgggagataacggtggtggttatgtgacgatagatgggttgtttgactatgcggaacccggtgccgatattttgtggcggtcggagtcgttgcaggctttgtagttggttgggaagattaatta

SEQ ID NO: 10841 - DNA, 124 bp, Glycine max
cccacgcgttcgcccacgcgttcgcccacgcgtccggttgtaacattttatggcaaatgcagcagcagctttatgattatcccatttataattggaagcaaaccaatccaatccttgatccttc

SEQ ID NO: 10842 - DNA, 399 bp, Glycine max
  modified_base (368)..(368): a, c, g, t, unknown, or other
cccacgcgtccgcccacgcgtccgagaaaccctaggaagcagcagcggcggcaacagggagagaagatgaagttcaatccacgtgtgtcgagcagccgccgcaagagccgaaaggctcatttcacggcgccatcgagcgtgcggcgggtgcttatgagcgcccctctgtcggcggagctgcggtctaagtacaacgtgaggtcgatcccagtacggaaggaggacgaggtgcaggtgatgcgaggaacatacaagggtcgcgaggggaaggtgactcaggtctaccgtcgaaagtgggtgattcacattgagcgcataacccgcgagaaggtgaatggttccaccgtcaacgttgggattcacccctncaaagttgtgctgaccaagctcaaattggac

SEQ ID NO: 10843 - DNA, 402 bp, Glycine max
tcccgatcaatcacaaaaattagttaacttatcggaccttttacttcgcttcaaagaaaaatactcagaataagggcaaaaagaaaaaaaaaaaaaaacgtaaaaagaggtgcaacacgaggacttcccaggaggtcacccatcctagtactactctcgcccaagcacgcttaactgcggagttctgatgggatccggtgcattagtgctggtatgatcgcacctgataagtattgcacaatcaatactatattctttgctgccgacggccgattttcatcgacttttacaccgaacgagccacggtgcccacgatacatttatctcccgatcaatcacaaaaattaattaacttatcggaccttttacttcgcttcaaagaaaaatactcagaataagggc

SEQ ID NO: 10844 - DNA, 406 bp, Glycine max
cccagagagatggcgtcacggaacatgttcaaacagccagatactaatggagttgttaatggagagttggctaatgtaaaagtcacaaatacaagtttgaatagacaggtgactggttcttcacctgaaagtacatcaaaccaatcaagcagagcagctccttctgttgtgcatgggcagggtgctagtgacccagttcagttgatgagattgctcgcagaaagggctcataagcaacacttttctttcaatgatttgcttgttgatactcctccagtgacactgtcaggtccatctggacagagagatgactcgggcaatgcttcagcagcagctgccgaggcatggatgtctgctggggcaggaaggtttaaaacaggacccaaaaattctagttcccccaaaa

SEQ ID NO: 10845 - DNA, 440 bp, Glycine max
cgaagttcaaggtgccggatttcgataagtacaaggacactacttgccccaagaatcacctgaagatgtacaacaggaaaatgggggcatactcaaaaaatgaaaaattgttgatgcatttcttccaagaaagtcttattggggcagtcgtcacctggtatactaatctggaaccttcccgagtccattcttggaaggacctaatgattgccttcattaggcggtatcagtagaattctgatatggctccgaatagaatgcagctaaagaacatgtgtaagagggagcatgaatctttcaaagaacaatgatagtagatgcgttaccagtgttctactatgagaagatggtggattacactccttcaagctttgccgatttagttttcgttggtgaaaggatcaaagtaggcctaaaaagaggcaaatttgattatgctg

SEQ ID NO: 10846 - DNA, 431 bp, Glycine max
tgaaaatcttctttttccgagtcacaatgtcttaaaatatatatttgcaggggtgcttcgctttgtttaggtggtcttcatccagatatgattgttgatcaggaacagcatcttaagactgagaggagagaataccactcacacatacataattatcacaatgatatgataggatttctatctaagttgaagaagagctggcaaagctgtaaagatccagaaaaggagattgcgcaaaagatatggaggtcaaaacatgtagagaaaagaatgccctcaaaagtgattgaatctagagtctatgatcatgatgggaatgttacagggacatctgattcatgctcctgggatgcagaggagaaagcatgtagtagcgacaaccaaatttcctcactgagaaaagacaatatacttcaaagaagggtgcttga

SEQ ID NO: 10847 - DNA, 243 bp, Glycine max
ctcacgcgttgctcaacactccctcccatgcgttctcctgcaatccgctgcaatggaaggtcaggcttccctcaaggctccctatccggccaccaccatactctcttacagacccagaacctctattcttccatcccaagccagctctcgcaaaataagctccacactatccttcactgtccatgcccaattcgaatctgatgatggctcatctagattatccacatcacatgaatctgtgac

SEQ ID NO: 10848 - DNA, 438 bp, Glycine max
gggagcttggcgtggaagcagcttcttctcaacgctctggaatccaacgctcacctcaagcactcttctttcatgcagctcgcaaccctaggaaccaacggaacaccttccaaccgcactgtcgtcttccgaggattccaagacaacactgataacatccaaattaacacccatgcccgcactcccaagattgaagagctcaagctttgctcctctgccgagatatgttggtatttcacagattcctgggagcaatttcggataaatggggatgtagatatcattgatggtttgaatcctgatccgctaaaacttcagcaagagaaaaatcctggtttgccagttcattgagatcaagattgcaatatttgttgcccaaccctggacttccctgtctaaatgagcaagcactgccagaaatatcattagatccttcta

SEQ ID NO: 10849 - DNA, 227 bp, Glycine max
gccacacattctttcaatcctccgaagaatgcacagaccataaggaacctagtttaaataacacctgaacaaattgaaactgtcaactgaagacttgcaaaaaaaggatacacatctgaaaataacattcatgatcatactgaagacatttatagatctatcgacatgccaacattactcagactattaccatttccttattcaggcatgctgtaatgtcatacatt

SEQ ID NO: 10850 - DNA, 391 bp, Glycine max
cccacgcgtccgcccacgcgtccgcccacgcgtccgcccacgcgtccgcccacgcgtccggcttgagcaaggtgatcaaaaggaatgcaagaaacttctagaagatgggaagagtacactcgacagcatgacagatattgatccatctgtatatgctagctattactgggtatcatctcagtttcataagacatgccaagaatttgctgagttctacaaaagtgcccttctctatttggcatacacatcagtggaatctctctcagattcattcaagctggatctggcatttgatttgtccctctctgcccttcttggggataacatctacaactttggagagctacttgcccatcctataattaagagccttctggggacaaaggtggaa

SEQ ID NO: 10851 - DNA, 233 bp, Glycine max
accgtccggaaggatggaagaacttacacggagggtccggatggaggacatgctggatcaacgcgcgaacttccctccgaagaaatgactacgaaaccaacatagggacaagatgcaaccacttagaacaaaccctagactattatacccgcttatgatcaataagcaatatcgcctgtgattctatgaacatagccgattctaatgccaatgctgcaacggctagggttctc

SEQ ID NO: 10852 - DNA, 439 bp, Glycine max
gtgagtgaaaagttacaccaacaaacccgtgaaagcaaagcacccattagaccctttgcctaaccgactcactcccatggaatccgatctaaacgacgccgttttccccgaagaagatctcgacgacgacgacgacgacgacgatgaaactccagaggacgaagaggactacgacgacgaaaccgaaccccctcccttcgtcctcgccgtcgtagcagtcgcgccgcccgcttccaccgcctccgaaacactcgacaccacgttgatcccgatctccgccgtcgccgattcctcactgaaaccactgcacccggagctaatcgaggagaaaaaagcgctggacgattcgcggcgactgttccagcgtctgtggacggacgaggacgagatcgggctcttgcaggggtttctggactacacggcgcagcgaggatcctct

SEQ ID NO: 10853 - DNA, 433 bp, Glycine max
  modified_base (347)..(347): a, c, g, t, unknown, or other
gtttttctcagtctgcactttatatgagaacatattttgatggtatagaacatatgaaaagacttaacaccatctgttaaaataatgactcaatgccgacttcgacttacgaggatagtttcagtgacaaaaaataagaagaaaaaaatatatcattgtttgtaatataatgttaacctcccaccattttctggcccccagtgtgcttttcaagtcaaacaagaaaaatgtatatattttatttgaagttttttgttgcttccatttgttctggagaataaagaaaacaagtagtccaacaaatagcacgaggtcaaacaagaatgcgctttgtgggggcgaccaanatctgaacttctattatttctagtttgctaattgtatgtcaagtactttcattcttttctctctgggtataagaatttaatacata

SEQ ID NO: 10854 - DNA, 452 bp, Glycine max
  modified_base (415)..(415): a, c, g, t, unknown, or other
tcgcccacgcgttcggtttcatcatctattagtgaaggtagcatggaaatcgagttgacaacttccacagtatcaatcgatgtcacacctgtcaataattcagtttcacaagttgtttcagaaaataatagtttgacatcacatgagattgtagacattccaccttctagcaaagttgtttccactcatgaagttactagtcacaatgaatttcaagggataactcctgttggatattcttctgctgaggaaaagagagaatttacagcaaaagctgaggaagcatgcacatctacccttgttggatcttctgaactggaaactgctccttgtcctgtcacaagaactgaaaaacatcattcttctgatacttcaaggctattgttacgtgacagtgattgccagcacaatgtanggactagtgctataaagattggtgaaccttaagggac

SEQ ID NO: 10855 - DNA, 432 bp, Glycine max
gtcaggttggtggtcagggaggaggatgatctcattcgctggcgttccgcgtgatgcgtttgtgccgcccttccttcaacgtcgaacctccactccgcctcgaccccaccgacctcttcgtcggcgaggacctcttcgacgaccccgctgccaaaccccactctttctcctgcgctgccgcccacgacgacgactccgatcccaactaccgtaaccgctgcctccttcgtcacttctccgacgccatgggcctctccggcctcctcgttctccctcagtctttcggagccatttatttgggggagaccttctgcagctacatcagtataaacaacagctccaattttgaagtcagagaagtccttatcaaggctgaaattcaaacagagagacagagaatactttttttagacacatcaaaaacgccagttg

SEQ ID NO: 10856 - DNA, 300 bp, Glycine max
cttacttgccctctctagctattgagcttttctttttaacacggaatatgagtgacacaaaagggttttgaggctttctatcactctaaagctcttagctcattcacctcttgggtggtgtggtctattatgtaaattaccatttgtgcaattttttctcagatctatccaacttctcttttttatcctttattctgaatgcaaatcgccatcatcaccatttgatttgcatgaccataattgttctgctttgattttccactctttcacatcatttttcaatgttatttcctatgggtg

SEQ ID NO: 10857 - DNA, 146 bp, Glycine max
gcaagaagtgaaaaaataaaaaaaaattaaaaaaaaaaaaaaaaaaaaaaaaaaaaaaaggacaaaagatataaaagataacaaaattacttacgcttacttgaaactatatatcttgttatataatgtcaccgtaaattgaatta

SEQ ID NO: 10858 - DNA, 241 bp, Glycine max
cccatcgtgcgtcttttataaaattttgacacacactttagggtgataggggcttgatgctgacagaatatgatcaaggatataaacaagaatatgtatgatattgacaccaagtaagtgaacaccttaatcatgtgagtctttatgtagagatgctttagaatttgttgatgatttatattgctaatgactatggcatgcttgcaactaatactattactgagacatacatgtaatgtgc

SEQ ID NO: 10859 - DNA, 415 bp, Glycine max
atcacatctactgctctctgagaacaataccatacactcctaactctctctccgttgacttatcttctcacacctccatggcccacacttgcattacatacgcagatgccggcatggacgctgaccaacgccgactcatgttcgaagacaagttcactgctgtccttattcattcggtgatgaatatacttatttggtgcctgattcattatctgccattgtaattcgcgtcacctgcggttgtgaggattcatagatcgattgatcgatcgatctgcgagacgggtgtagagactggaaatgcggatctgcgtgataagttgggctgatcatttttcggtcaactaattcattgatgatcatcatatcaaaattgactgtcgtcggattgcaatggcatgtgaagcctcgattc

SEQ ID NO: 10860 - DNA, 411 bp, Glycine max
cccacgcgtccggttaaactaataaaataatcataaaggtggtggaggggtgtgtgcgctcacgcgcatgacagagcatacataacagggcataggaaatatcatatatactatatattatagtctagtttgcactattttaatggtggccgactaccttaattccacatgcttaaatttggcacctctttattatataaccgtttcattctgaatagcatgtcaaagggtgttctgagaaggaatcacacaagagaaattgtgcgtggatcttggcaatttacatttggtacaaaaatagtaggaaagaaacccatagttaatatagtaacaatgtcctggctaacgaaggggaaccaaagggggtcaggttagtttatgcggttcacggaaagtcatggcaaccgtggt

SEQ ID NO: 10861 - DNA, 436 bp, Glycine max
aatggttccaagttttccgttcagattggcctcgattccaccgtcagatccttcaaggaggcggttgctcacaattgtgatatatcctctgatcaacagcgcctgatttacaagggtcggatcctcaaggatgatcaacccctccaaagctacggtttggaggctgatcacactgtccatttggttcgtggtttttctccttctaacaccactggtgggactaatagtggtggtggcggtggtggaaataccacaactgccaacacgagaggtgctggtgctaatgagggtgggggtttaggagggccaggatttggagcttcaccgtttcctggacttggtggtaacaatgggatggggggcggtggcctcaatggcttatttggagcgggctttccggatcttgaacaaatgcagcaaccatttttgtcaaatc

SEQ ID NO: 10862 - DNA, 411 bp, Glycine max
tgtgggtgaacgtcttaccctcacagtcacaggtacagaataagcgctaaccgatttccgatatattctcatctgtgactcaatcacactgcaatcacttcatcctcagtacctgttcttcttctcctccttcaatcataacattatataaaatatatggtacactgattacatttataatattatattattatatataacttcacaatctctagctattcattctcatacaagattgatttggggattggacatcatggatcgcctaacatcttcttcccagctaatgatcgtttcggatcttggttcccacaatggttgaccataatgattcctgaaaatggtccctttttaaggttcaaggcctttgggaaagcccattatcgccaagattctctgctggtgttctca

SEQ ID NO: 10863 - DNA, 402 bp, Glycine max
acggtgctcactccgttcactatctctctcctttgcgcttgctttctgaactgtcgatttgcgttgcattcagctcattttcggatatgagttcattgtcagattagctgatttagtttcctctggactaaagtgttgagaacatgcgtgaactttgcctgattttgatttacattgctactgtttatgcctttctgcatgtttcgatgcctacaactgaatctatactgtttcttttaacaggtttgcatgcatgtgttcgttttggactttatgttcgtttgcatgcatgtgttcaaaaacatttacctttgtgtctatctgttatgtgtattgttttggactcttcattgtccttcatgtttaaagctttgcctttgtagttggttttctatgagtata

SEQ ID NO: 10864 - DNA, 183 bp, Glycine max
caaaatctaagttttcatgttgaatttcagtcattttgaagcagccaattagtttgtttttctttctcatccacttccttctaacttattcatgtctagtttatgtttcagtgatggttttgttactagaattctgagaagtaaaaaatatatattttgaatatttatgttcttgtgttccaa

SEQ ID NO: 10865 - DNA, 181 bp, Glycine max
acggacagttatgaaaaacgggtaccaagggtttgcttgatgtagctatgtacatagcggatgatacttttgatctctgctgaggttgaacccaatgcatacgaaaattttaacaaaaaagatgggaagcatgctccaaatgggttagatgatagcaaatggggttacagtggttgaggtg

SEQ ID NO: 10866 - DNA, 431 bp, Glycine max
cggctacccatcagaacactgaggtcaccatctatgctaccctcactcttcccagtggtaccaccactttggtccacctttggaacgatggtcctgtgtcttctggtacccctgcaatgcatgctatgacttcttctaacacccaatccaaggaaagcttggatcttctttctggctccagtcaagcaggaagtgggaattcacttaggagaagaagaaatgtaagtacctgttattctacttgctttttttttttcgccaaatgtggcgtttgttagacaggggattgaacccaccaacctttcctttccccttaaccatcccattcaacctaatatttccctgcatggttatcttgggcatcaaaaccataacggatgttttggaaattcgttttcttcttttttagggacattgattggagagtgtat

SEQ ID NO: 10867 - DNA, 324 bp, Glycine max
  modified_base (300)..(300): a, c, g, t, unknown, or other
caaaatgcttcaacaccaaattgttcagtcccctgctatgctaggccttgcaaatcctaactccccatcaattccgaaccctacccctccaaagctccctccaacacagacccatcacccccaagaccgcaactcttcaaccccttcttcagctctcttgtctctcctcccacctcacctcagagcccaagcacttcttgcccaaatggcttccttagcctccaagctctttgaagtttcccccaatcggtccctttgggtcactgcctttcgtggatcccttccaactttcctctcttnccattcgtctaccccacttgacac

SEQ ID NO: 10868 - DNA, 418 bp, Glycine max
tcgtccacgcgttcggccacgcgtccggccacgcgttcgaaaactggaaatgtgggtgaagggcatcaaaatagcaattggaatacaaccaaggcttctgaaggggagtcttctggttggaacaatatccaaaagtcaaatgaaacttcatcagctggatggggtggtggcaatgggtttaaaagtggatcagatgaaggaaacttgaattctacttggagtggctggaagtctggatcaagtggagtcaaacaagctgggaaccctgctggtacttcagatattgatgctaatcaggatgctgggtggaaaaacaaaccaaataaggatgggagtgagtcatctggttgggaaacaaaaaacaattggaatgctccagtctcttcatcaaatgataaagtggaaaaaggtaatgatc

SEQ ID NO: 10869 - DNA, 434 bp, Glycine max
  modified_base (321)..(321): a, c, g, t, unknown, or other
cccacgcgtccgcccacgcgtccgggaagagcggcagcagcctttacagctaaccgatgctgtaaataacagtgcaaaagatcaccctcattctaagttgtttattgaactactaaaactagcttccaccaaggcagaagaataccccggtagagatgcctcagatttggtgatggcggaggaggttgtggacctaaccgctggaactcatgaagaggttccgaaggctgcaacaaaaaaggaggatgccgatgttaaagcacaggaagattctgtggcagttcctagtccagagcaatctgatgacagtgacgatgactntcaaaaatggtctcagtataaatgtggctattagtgattaatgataaagaatgaaatttaacttaactttaactaattaatttttaataatggtagtttgaaaatctttaaat

SEQ ID NO: 10870 - DNA, 150 bp, Glycine max
cacaactaagaaggaaacttgctaaagcttatataggatttaagttatcgtaataaataaaacttcattggaagggtagttataatagatgtggagatctttcttcgctctggtcatataaaggaataatacttttctattaatttcctt

SEQ ID NO: 10871 - DNA, 395 bp, Glycine max
ataaaagattaaataatcgtggagacgtagcatcaccgttggtggtagctgcacacagcgatattatattatgcagatagtacagtactaataataatgtataaaatactatgtgaagaagcaagcaccaacgacaatacactaattcagaggatgtcagttttcaggatgatgtctcatctccaacatgattaccattcacggagagtacagacccttactcaaaaccgtggaagatagtaaatctgaaacctgatgcattggattcatatacgaaagatggaaccatatggcctcaatcagcaatatgtaacgcgttatgtatcgtggaccagctgaggaaacgggttaggactgttcactgcaaaagcatccatcttgggttgatctgacat

SEQ ID NO: 10872 - DNA, 420 bp, Glycine max
cggacgcgtgggcggacgcgtgggcggtacgcgtgaccaacgtacgcgttccacacaaggatattatattattcagatggaacaatactaataataatgtataaaatactatttcaagacacaagcaccaacatcaatacatctaattcagagactttcagttttcacccatcatttctcatctccaacatcttcactcattaccgagatacagacccttactcaaaaccctttaacataataaatctgaaacctcatgcattggatttaaatacgtataatggaactatcttgcctcgattagcaatatgatacttgataactatcatggaccaactgaggaaactggttagtgctgttcactccacatatttccatcttgggttgatctgataatgccattgataaatattgaaaact

SEQ ID NO: 10873 - DNA, 52 bp, Glycine max
agtctgccccagtcattctccacacctctttccgatacgctaccccttgctg

SEQ ID NO: 10874 - DNA, 227 bp, Glycine max
gccacacgttcggctggccagatcaaagtacaatgtgacgcgttataaacagcttgtacatgtgctatagcttctaaccgatctgagatggctgaataggggatagagtgctatgctgtacttagtgaagaggatatgatgagctacataatcttgaaagttgcctgtgcttgatacaatgcaaggtgcaaggtcaatttgcacgtatactatcaggcgtatacatt

SEQ ID NO: 10875 - DNA, 253 bp, Glycine max
cccacgcgtccgcccacgcgtccgcccactcgttcgatcctctccaatctgccaggatttgggttgagtactctctggttcagaatcaatcttcctccctttgagcttggtagttttggcttcacttggattaaattattggctattattatttttgtatgatctgttatcatggcgttagaaactatctttcaattgctaaacttgtctttcaaaaaggaaaacaaaaggatgagaagcctttgcgcataaa

SEQ ID NO: 10876 - DNA, 224 bp, Glycine max
gattatttgaaaacagaaaaggtgggagtgattgaaggttgatgatggatgagaaagagtggcaggtaaagacaaagcagaatttaggttttagggttagtttatttccaattctcaatggatttgatgttaacattccctcagttatccgtggaaaggcgtagaaacccatagcttttacataccctctgtctgctatctgctatacagccacagattttatc

SEQ ID NO: 10877 - DNA, 444 bp, Glycine max
ctcacccgcacccgctacctccgatctcccgccgtcgccgccgcatcccgttcccgatcttccacctgtttcagtcgcgaaccgtcgcgccaacagcgctttttcgccgcgcattccagcaggtcaccaccgcgccacacaaccatacccactgcgccgcccatttccggagaagtatgaacagaagtctctctggtacacttggagcaaatcttgagagaagaggagctcttaactcttgagcccactttaacgccacagcacggacggtgatagggttttgtggaattttctgggaaaaaatttcctagaaaatggacgatggcatgcaattgcaaatctcccttgacaagctaccaatcaagcgcttggattctattgaagaaaatggaattgaacgattcccacttgacgtggattacgatgagaagcggctctccctaa

SEQ ID NO: 10878 - DNA, 432 bp, Glycine max
gagatgtagccttgggcattcttctcactaagctataccacaattgcatcagttattgttacacctctgttaactggtcttctgattggatcagtagtgccagttgatgcagttgccatgtcaaagtcaattctgcaggttgtacttgttccggtgacccttggtcttcttctcaatacatatgcaaagtcagttgtatctgttcttcaacctgtgatgccctttgatgccatgatttgtacttcactgtgcattggcagccctcttgctttaaacaggaatcaaattttgacaggcgaaggtctccggttggtttttccagtattaacatttcatgttgttgccttcactttaggatattggttctcaaagattccatccttgaggcaggaagaacaggtgagcaggacgatttcactatgcactggaatg

SEQ ID NO: 10879 - DNA, 424 bp, Glycine max
  modified_base (311)..(311): a, c, g, t, unknown, or other
caaggatggaccaaagcggcaaagagaatcttctcctcgtagaaaacctcctccctcaccacggaggagatctcctgtacctagaagagctggatctccaagacgaccagattctccacgtcgccgtgcagattctcctgttcgtcgccgattagactctccttatcgtcgtggaggagacacacctcctaggaggcggcctgtgtctcctggaagaggtcgttctccatctccacctagacgccttagatcccctgcaaggctgtcacctagaaggatacgtggaagtccaggtcgaagacgttcacctncacctcctcccaggcgccgatcaccacctagacgaccacgtagtcctcctagaaggtctccaattggtcgtagacgtactcgctctccaatacgtaggtctgcacgctcacgc

SEQ ID NO: 10880 - DNA, 447 bp, Glycine max
cccacgcgtccgcttgtttataatgtggttattatattatttttaacccaatttttttgtgattatttgaaattgaccaacaactcaagttctattttgtcttgatccttcactcttctctcacgctcagagaatgtgtagagaaattgcagcttttgaaaacacctgaagaacgtcaacgcaggttggaggaaattccagaaatacacgtggatccaaacatggatccaagttatgagtctgaagaagatgcaaatgaagtggatgataaaagacaagaaaactacatgagaccaagagggtctactgcatttggaaggagggggagagatattgtttctcctagaagtggttctatttcaaatgattcttggagtggaacatggaattattctaatgtgaatcatgaactcggcagaaatttgtctaataagggattttcaatca

SEQ ID NO: 10881 - DNA, 420 bp, Glycine max
  modified_base (348)..(348): a, c, g, t, unknown, or other
  modified_base (388)..(388): a, c, g, t, unknown, or other
attcccccagccttgaagagcataacctatcttcatctgttcttgatttgagttaaccaggattcaggcctgaggctgaactaatgcgatttgagtatttgataagaatgacacatttatgacagtgcccaaaaaatatagtaaattaataactagtgttagtaattaataataaaacacaaaaattaagataatattagtctctaaacattgctcggcaagaagttgtgattgtttgtgtataagatggagtttaactgtcatgaaggagacttttaaagtttgtttcattgaatgggagttgatttaatgatagttaaacttagttatactgaaggtacacatctnctttttgtcttgttgatccatctttcaaggtgaaatgcanaacatcctcggcttccaattatacatgtaaaa

SEQ ID NO: 10882 - DNA, 392 bp, Glycine max
  modified_base (327)..(327): a, c, g, t, unknown, or other
  modified_base (368)..(368): a, c, g, t, unknown, or other
cccacgcgtccgcaacaatctcaagttcagcagttgcttcttgaacagtttatgcatcagcagatccctgatcccaattttgggcagtcaaaacatgatatttctagggataacctgttagatcaggtacaattgaggagatatgtgcatgaattgcagcagaatccacattctttaaggcatcccgatccatcaatggaacagattatccaagcaaatatgggcatcaatgctgcccaaagaaggcaagctgatttggcagacctcttgttgcaagcaaggcatggaaatatattgccttccgaacaacagcttcattttcagcangatcagcttcaggcacagcagttatctttggctcttagacngcagttagggttggatggagaaag

SEQ ID NO: 10883 - DNA, 454 bp, Glycine max
ttcagattctcttctaaccaaatcagaggacaatctggcaagaaaaaaacaggatctacatgatctataatgttatgccaacctccttttgcttaatttgggcaattggctttgttcttactcattgttgtttatattttgcgttagattattctcagagttttgtgttttgttaatttgaaagggagttggtcaatatgcacatatcctatcagttgtatgcattcttatcctgcattagaatatccatatcctaaattcttctaaaatttgcgtatggctctgtttgtttaaagctttgtttagcaatggagcataagcttcaagtctttatttatgcttttaaccaacttttgtgttctatttctttgcctttaagaaaaatttgggtgtcatttcctataatccttacgtggggaatacaaccaattgactgtcattaattggaagtaaa

SEQ ID NO: 10884 - DNA, 228 bp, Glycine max
cccacgcgtccgcccacgcgtccggatatagttagttttggtaggaataatatacggtgggagaaagctgggattagcttcactttgaaggctcttcaaactgaaccccttagaaaagaaaagaagccttcttggattggaaccagatcccaaatggcaaatgggttaagaatatttggggggcttcccctaaatgccatttcttaagccttgcatttaattaaccat

SEQ ID NO: 10885 - DNA, 440 bp, Glycine max
gtgttggtgccggtgcaggaagagagggcttgttggtggatccgattcagaaaaaatgggttcaaacccgtcgtttgtcccggagatcggatccgatggtcttcccagacaatcttccgttatcacttacaccgaacagataatcgaagcagaacagcttcaattgaagaagtacattcaagaaaactatactaaaattcgtgatgtggagcgtgagcttgcaaatcttggattagagatgaagcttacatctggaccaaagaaagcagcgctggaacatatgagaaagaagatagaggcatcaaccgagaaaattcgtgtggcaaagatacaggaagaacaggcacgcaaggtgtgggaatcagcatcaaaaacagtgcaagaagaagaggcaataaagcagaagttatgtgaagacttaagcaaactggatggaagat

SEQ ID NO: 10886 - DNA, 409 bp, Glycine max
ctgagttttgacctacaacactctccaatcccctcttgtgtgttgtagccgccccgtgatcatcaatggcggaaactgctgacaaatctcaatctctcgccgaggaatattatgtgaatgacaagcaaacaactgtagttgaaaaagctgttgaggtcaaagaagttgaaaacccaaaggtagctgcttctgaggaaccagttgctgagaaaactgtggaagaaacaactcctgttgcccctgcagttgctcaggaaagcagtgaagtcacccctcctcctgctgaagaaagcactgaagagcaaagtagtggaaatgttgaggaaaactctggcaatgaagatgtagctgaagagacccctgaaattaagcttgaaactgctccagcagatttccgttttccaactac

SEQ ID NO: 10887 - DNA, 415 bp, Glycine max
  modified_base (402)..(402): a, c, g, t, unknown, or other
cccacgcgtccgtgctgattgaccgtatgggccagaaagattcagtcctggaagacgaagttagatatcgttataatagtgtcatcttgaattacaagaagtcacaagataatgctcagcgagtttctcccctaacttttgaacttgaagctactttgaaattagcaaggtttctttgcaggagagagctggccaaggaggtggtggagttgttgaccactgctgcagatggtgctaaatctttaatcgatgcaagtgataagctcatattatatattgaaatagctcgtctgtatggaagtcttggataccaaagaaaagctgcattcttctcaaggcaggttgcacagttatatctgcagcaagaaaatagactggctgcaattagtgctatgcaggttntggcaatgaccac

SEQ ID NO: 10888 - DNA, 438 bp, Glycine max
atcaggttccagttttggccttacattattcttatgatcatcttctgccttgtcacgccagacgttggacgagcttcttatgcctataataaccttatccgcacttgcatctccttaaatccacaagcaatcatatgtaggttaaataactggaggaagttttttgtcaagaaagatgactttttactgcatgtagagagatatctaaacgagaatggaactgaagccttagagaaactcattgctagcaagaacaccaacctattgaagaacacaacttataaacctgatgcagaagcaacaaatgcaattatagcaactgataataatgaaacgcaacagacaaatgagacaaaactccaaacacagcaaaaaaccatcatagatttggaggtgattgagataaaagaaattcttgcaggccagcaagatatttct

SEQ ID NO: 10889 - DNA, 361 bp, Glycine max
ccacgcgtccgcacggatttaattttgagtgacggccttggaccatccaaggtaatgtttcaatggaaatcttaatcttgaaccggaaggtttaaattttgtctcagtcgatggtgtttatttgggttttgtattacctcatcacatcagagagtggtggagtgacagaacaagtgatgtgcatgctttcaatttcgaactccactagggacagatgtgttgaggttttggataaagctatttcaggagtccttttggccactgctgagattgcattttttcaagggtggcttacttggcttttggttaagttgaacaaaatacatttcttgtacatggtaactgtgcttgcattcataag

SEQ ID NO: 10890 - DNA, 444 bp, Glycine max
cgcaaatcacgtgatcgggaacgagtttttagtggtcatagtcgggaaagagatctgagtccgcataggagacatgagcgttctcattcacattcacattctcgttctcgatcttgttcacgttctcgatccccgtctcattcccattcccggtctcaatctcgtggatatgatgaccatccaagatctaggtccccccgaggtcgaagccatggtcgaagttatagggaagatagctatactgacagtcgatatgacaaaagtgaaagacgtagggatcgtgatgataaacgtcagtgggagcattattctgtggccccatctgcaactgttgttgtgaaaggtctttcacagaagacaactgaagaagatctataccaaatccttgctgaatgtggtcccctccgtcatgttcgtgttataaaggagagaaattctggtgtc

SEQ ID NO: 10891 - DNA, 307 bp, Glycine max
aacaaatactatgaacaaacctttatacgagcaatatggtcgaagataacacatgatatgtgaatccaagttgataatgctaatagcggagctaataccttaaaggatgagagtgttatacatcatgattgattgattgtgtgctcaaggtcatattaattaatataaatagttgatatccaatgttgaagaacctgtgattaacttatctatctatttaagcgtagctgttgatgggctcattaaaagttgcttgatgagatagccgatgaacttaatgaacacatagtgaagattttgaaactga

SEQ ID NO: 10892 - DNA, 418 bp, Glycine max
gcgaggttttaaagaaattaaatgcgtttttatgtgctaaagagctaggtaattatagaattcatctcacacatacttctttttactaccttttatcttttagattttatttttgaattatccttgtttaatggagtaatttaattcgttgaggggttgtggaatttgtgtagaagattttcctataagaatttttaattcgctaaagaaatcctcttgttgaattagattattatgagattaaattcttcacaaaattccacaactcctcaacaaattaaagtactttgttgaacaaagttaattcaagagtaaaatataggagatagaggttgtaaagagaagtggtgtgagatgaaatccataattaactagttgtttagcgcacaaaaagtgtttaatttttttaaaatctcac

SEQ ID NO: 10893 - DNA, 426 bp, Glycine max
cctacctacctaccaatcaacacctcgctggttcttgcagtggcgttacacatggatcggattccgatctacacgccgatggtgctaatcggaggattcgaagcctggtgccacggatctacctactgtacagaggtgtggcgatcgtgttcgtgttgctcttaaggtcgctttcggaagatcgtttgttcaacgatcggagattgcagcacagatcgagtgaagaaagcgtggctgtgttcttcgcattccgatgtcggttcatgttgtggtattgaaattatgatggggtttttaatgggggaaattattgtgttgcgtgggttttatgaaacagagaaagttctggtaaactttgttaaccgacctttgccatggcaggtgcgcttgcatggcaggtcaaaaatattaataaaaaatcaaata

SEQ ID NO: 10894 - DNA, 231 bp, Glycine max
cccacgcgtccgcccacgcgtccgacgtatagacatcgacttgaaatgacactatatatctcaagcatttcacacactagcagagccagtctgactatgggagaagagaggaatctacatgcggaggttagaggctgatacagagcctcatcattctcggtgaaccagtaccaatcttctattatcaggggccatgcctcaagacagtactaaccaggatgtcgcatgact

SEQ ID NO: 10895 - DNA, 437 bp, Glycine max
  modified_base (391)..(391): a, c, g, t, unknown, or other
gaccacaacatctctctgaaaatcactcacacgcaaaagagagagagaatcgaaacaccccgtaagcagcacggcacaatcgcaacgcaagagattaataatcaatttgcatcgatcgatcgatcgttggttaggtttttgttttgggggaatatgggcgagttgactcaggcggaggtgtactcgcctcggactcagcaagtgtggagggcactgttgagttggttggccttcttctttcagatcttcttccagattataagagccttaggtcactaccctctactctctttctcttctaattcttcttcttcttcaaacgcttcttcctcttcctcttccttcaaacctcttccctccgttgagattgctgaacacgattcgccttctnccttcgtcctcgatatctcaccacttgattattcccccgccgatca

SEQ ID NO: 10896 - DNA, 437 bp, Glycine max
  modified_base (420)..(420): a, c, g, t, unknown, or other
gttctgctaatgctgattctgattcctttgaaatggaacttgacaaggatgatgagatgactactctttcagaaactggttgcgatactgaagaacaagaaagcactagcagtgaggaacttgatgagttggcaatttctagagacatgcctcacctctatcctcgtccgcatatatcatgcaatgaagctgtatccaaatggaagttaaaaggaaaaaggaataatcgtaatcttgtaaaaaggtctgttggtgctgctgatgggaaaggtgttgttttatatgaaacagatgttgaaggattaagaagccgtttaaatcacaagaggttggtgcctagtatgcattattatgggaatggtattagtgatgtttttgctgacaccgatcaaatgtttgggtttgaagatgaatattctncaacttccaaagcacta

SEQ ID NO: 10897 - DNA, 443 bp, Glycine max
  modified_base (413)..(413): a, c, g, t, unknown, or other
cccacgcgtccgctgcaacaccaaaggatcctactgaacaatgtaaagctgcatggtgcttttcaacaggagatgaacttacaatacaatgggagtcatcacaatcagtgtcaggtctcacctttagtttgctaaatcaaacatctctagagtcatcggtacagttattgagagggaggcagatgcaatatcaagtaaagaaaacaaagtcaaagagaaaaggcgaagacatgaaaatcgagttagaggagaaagagatcgagggagaagaagacgaggagagttttataacagtagtccgtttcacagaagataacccagatggaaaagcaactgctcttctaaattggaggctattggttgttgaagtattgccagaagaagatgcagtactgatgcttctcctttgcctntcaatactcaaaagtgtatcagaaatgaag

SEQ ID NO: 10898 - DNA, 453 bp, Glycine max
cccacgcgtccgcccacgcgtccgctcgtcttcaatcctttcgttattctcttattcatgcttctcttctgaataatccagatctctttctgcccttttctccgtcacgcttttcgtgaccggatctgtatggatttgatccagatctacacgccgatggtggttttggccgggtctttcatagatctggtgcgtagaggctcagatctacggtaccgaggtacaacagagaatcgatgacaagaacgcagatccgacggtagatccagccgattccgcttgttcgatcgctacagacccctgtatcggatcattaagcagcgtgtctcgcgcgttctacacgtgttgccgatctcggatgttgtaaaattagtttatgatgtgaagctatggagtggaaaatatgtggatgtaggagatttcgggatgaatggcctcaaacgctttgtcgtt

SEQ ID NO: 10899 - DNA, 438 bp, Glycine max
gtttgtgtgtggtggtttgatcaacaacacacataaggggtatctcaaaaacacaacaacattggagattatggagctagcgcaaaagaaaggatttctggttcatcatgagtacgatgatcttgttggttctttttattcttcctcgacatcttcttctgtttctggaatttcaagtgggtcatcgttggaatctgattcttttgaagaagtaacatcccctgcctcttcttctccctcatcatcagttgatgatcaacttgtagttgttgctgatccattgagtgacatgtcttctctctttcaacaacttcccatcaagagggggctatcaaaattctaccagggaaagtcacaatcttttacttcactaacaaatgtgaggagcttggaagatcttgtaaagccagagaaccctcacaacaaaagattgaagtc

SEQ ID NO: 10900 - DNA, 94 bp, Glycine max
aaaaaaaaaataaaattaaaaattaaatttaaaaaaaaaaaaaaaaaaaaaaaaagaaagaaaaaaaaaaaaaaaaaaaaaaaaaaaaaaatta

SEQ ID NO: 10901 - DNA, 138 bp, Glycine max
cacacgcgtggcgagtatatgatccggttctaaattatcataaaatataacttgttgaggatatgagcactcgtgaacgagcgaaactatatctcaaacatggatcgtcaccactactaattaactcgattaccataa

SEQ ID NO: 10902 - DNA, 265 bp, Glycine max
gtcttcttttcagaggacttcccgttctgatgggcttcctttggatgagttgcgtcgccggagaatcgacagatttggaggcagctgatcgtggttttcaggtcactgcaggatctggtaaataataccattggatatggccattgagatttagatttcacacatgttagctgttgaattataatgactttgcaatgaatgttttcatgctatgctagattgatttggcattttcttaaataaaatttggatacttttttctatt

SEQ ID NO: 10903 - DNA, 450 bp, Glycine max
  modified_base (415)..(415): a, c, g, t, unknown, or other
  modified_base (425)..(425): a, c, g, t, unknown, or other
atcagaccgaccacgcctaaatcccaattcccaaattcctcccattagggtttctctctctctctctccaattcatgttctcttattcttgattgattctcttctattcgattcgattgttctatggaaccgcagcttcagcccaagctggaccccgcgccggaggttgttagcggtggcggtggggattcggagaagtcgcatgtcagtgatgtcaccgaggttcgcgacgttgacatggcgcaggcaaacggcgcttgttgcccttccgttttgaaacggaagcgcggtcgcccggccaagggaaaccgcattccgaaagggattataccgccgtcgaggcagaaacaggaagaagaggatgtttgcttcatatgcttcgacggtggaagccttcgtctctgtgatcgccggngatgccctanagcgtatcatccctcgtgtattaag

SEQ ID NO: 10904 - DNA, 412 bp, Glycine max
gaaaagttttgatcgagagagatgggattggagtgtagcaaagatacggttccggtgacgcagtggctgaatcgaatggtctcagaaccttactacctcttccatttcttaaccttcttctcctatttcgtcgttcgcagctccgcaacccaaaacttagcgcctcatctcactcaccatctccttcgtcgcgaaatacaaacactgctagtgttcgcgatattggctttcatcaagggaataaaagaagaaacatgggaagcctttatagctgatgtgcttttcctggccaagatttgtctttttctcctagcctttacaatggatcgccgcttagccgtttggtatattcttgtatttttaggtacgtctagcaagctaacaccggtgcatttggaaagcctgcttacag

SEQ ID NO: 10905 - DNA, 420 bp, Glycine max
ctctgacccattctctctctctctctctctctctctgtctctacacagacaccagacaacatatggcacacacaatgaaagaagaaacatggaaactccacgcatccatcatgccatcaaaaccaaagagtccacaccacccaacccaaccctctttctctctcatcaatggcccagctggaccaaaatttatgtagaagatagatatacaaataagaaagaatgggaaaacagatgaaagagaagttagatgtgttcaaatgtccttcaaccaaacccaccttacatctgtctttctctgtctctctctctcatcaaaaccatgttccccgaattgccctgttgcaagcccccaaaaaatcccatcttcatcactggtctttcaaaagaacaatatttttcaccgagttatgtgagctt

SEQ ID NO: 10906 - DNA, 435 bp, Glycine max
gttttgttagttcacacactaagttctgaaaaatgagttccaaagtttttcttattctacttatgttcatggccactatactttcgatctcctctgaggttgcacccgatgatgcataccagaattttgacaaaacagatgggaagcgtagtgcaaatggggtagatgaaagcaaatattggcgtggtggctatggcgactatggtggttggcgtggtggtggttggcgtggtggctatggaggctggcgtggtggctatggtggtgggcgtggtggctatggtggctggcgtcgcggctatggtggtgggcgtggtggctacggaagttggggtggtggctctggccctaacgaacataatgaggctgggattgatgctagccctcacaactaacaaggaaactcgctaaagcttatataggatttaagttatc

SEQ ID NO: 10907 - DNA, 453 bp, Glycine max
ctcgttccaaagaattgtgaatatttgaattgattccccaatttcattcaatctttccctcatcagttttagggtttcgcctcgcttccctttctcacccataattgagtctatatttgattcaaacttctctctttcaactctcggctttgcgttctcggcacgataatactcattttaggatttcatttgattttcctcggatctttctggtctggggtatctgcttggtaggacttcatttttggagagtttagtttaatgtctgaatcagaagctgagcttcctactgcctttgttggtgatgttctattgtggaagaggtggcatgtttccttgggtgtcattgttgttgcaacagttgcctgggtcctatttgagtggaccagtttaccatttttaaccaattgttcagatgtcttgctgattttgattgaacttgtgtttctgcat

SEQ ID NO: 10908 - DNA, 457 bp, Glycine max
  modified_base (442)..(442): a, c, g, t, unknown, or other
attttcgctttggttttggttcagtacgcaaccatggggttttcaggccaatggtacgattttctaatattattgttgttttctaggaattcccttttctaatccttactcaacgttcaacatgtggtgcagagtggtaattggttagcagtgttagaaagagagttggaggaaaggctgcgtacacaacctcaacagacaccaaagatgaaagcgtatgcacctgcggctgattacgggtacgttcaccaccgacaacatgggaagtctgacaagttcatcaagcaatccttcttcaggaaagtggcgcacgtgcaagaccgtagctaccctaaccccattctcagagatgcctatgcttatacccctcgtgtcgatccctcgcacgtgtaactagacaattagtctagtttttgcttttgttacactggataaataaatnaaatagaacaacttc

SEQ ID NO: 10909 - DNA, 447 bp, Glycine max
ctctttgcacctcagcacagtttcccatcgaaaactagcccatctttttccctcgtaccttttgcttcagcaacaacaacatcgtcgtcacaaatctagagatagatagatagatagagagaaacggttgaattgaagatgaaaatcactgtcatgactgctgatgaacaaatcatcacgttagatgtggatccccacgaatctgtggaaaacgtcaaagcattgctcgaggttgagacaagtgtgcctcttcaacaacagcagcttctgtttaatgggaaggaagtgaggaattctgagaagttgagtgctcttggtgttaaggatgatgatttgctaatgaaggtgtctggtgctggcgctactgcttctagtggatctacgaatgatttgagcttaaatgctgatggatctgctgtcaaccctggttctttccagcagcacatt

SEQ ID NO: 10910 - DNA, 442 bp, Glycine max
acaaaaactgcaaaggttgaaatatgattgcggcggctcgcgcttccttctatggaccatttcgggtgtaaactgtgccgatgactgttcttctgagaaggagatcgtcatgcatctgtgtgcacttcgatttgcgttcatgatccggcacctgcttagacgatcctgtaactacttctgccgtcactgcacttgaccctaccgcaccacaattagggttatctatgtattgcatcaaagattgccttataatacaagtacccgattcttattgtatcgcatgccgacgagtcttctttctcttcgaatctttctggctggtacattctgaagcacttcatagttgcgtgggtcatactgatgcatatatcacctggatgatctggatggccaatcccacaatgccagagtataggtgtcaacccactgacgttgagctgat

SEQ ID NO: 10911 - DNA, 283 bp, Glycine max
gagcaaacagcaacagagttatgcggagactgcggcttcgaaaaggggaactttttcaccgagtatcgacctgatttgaaaaaaacgacggggaactccgacgaccatactggccctggacccctacatcaacagcaccattgtttgatttcctcgacatgttcgatctcggtcgctgcttcctcatttgtaaactctggaattgccatcgtgagttccagtcgaatcgaaaattctgtgacacgaagattcacaagtcttgtgctgaatttaccaaaaagcc

SEQ ID NO: 10912 - DNA, 202 bp, Glycine max
gaggaaaagcagtttggattatgactagcctctttttttcaaagctggccatgttgtttatttcatcaaactccgttgtatgggtctcagcagttctcttggtggctgattgttcttcattgcctctttacagggatagatccaaaacaacttctaagattaaaccatggcaagggtatgcacatgcctgtgtaattgactt

SEQ ID NO: 10913 - DNA, 185 bp, Glycine max
gtggatatggagctgcgcctatgcgaagcctcgattttcaagatgaggcactaggtgctcatgcttagaactgtgttgagactgatgcagatggatttttgagtggatattggccttagaaatccacaactaccgcgtgataatagacaacgataaagctttcatcgcggtgaaagaattttcat

SEQ ID NO: 10914 - DNA, 281 bp, Glycine max
ctagtgttctataagttcacggtcagttctgaaaaatgggttccaaggttttgcttgttgtagttatgttcatagcggctatacttctgatctctgctgaggttgcacccaatgaatacgaaaattttaacaaaaaagatgggaagcatgctccaaatgggttatatgatagcaaatggggttacggtggttggggtggtccttggtatggcggctggggtggcccttattatggtggcggctggggtggcccttattatggcggtggtttgggcggtccc

SEQ ID NO: 10915 - DNA, 220 bp, Glycine max
gtgatgattcctataatatacaacatcatctataaagtagatgttgaatgaaataagtgagatacttaggattatgatgtatgctgtcaggatcaaaattgagatcaaagcgaatcatgattctaatgttgcatggcaaatgtgaactaatcgtggtccagatcatatcatggactgtaatgactggaatctttacattgatagaaatgtatgacatcaa

SEQ ID NO: 10916 - DNA, 374 bp, Glycine max
  modified_base (15)..(15): a, c, g, t, unknown, or other
attctttctttcttntgtatttgaatctttttttttcttctctctgaattctcttttgttttctagtgctggtgtgtgatttgaaggaggaattttaaagtggcttgtgggtttagaattctgtgactaacgcgttctgggtcaccgtgccctcccttgggttccgctgctagtgttttttttgtgcaagtaaacagataaagttggtagctttattggaatatgatgaaacttggcactaccctttattgctcttgctaatttttaacctttgctggttctgggtcttcgagtatttcactggaaattttcaatttttggggggcttctgcttctggttttggtaaattctgagttgccttttgagggaactc

SEQ ID NO: 10917 - DNA, 334 bp, Glycine max
aaaaaaaataaaaataaaaattaaaaattataaaaaaaaaaaaaaaaaaaaaatgataaaaaagaaaaaaaataaaatataaaaaaataaattaataataaatgaatgaataatataatattataaatatattgaagtctttaatggtgtatgatgatattatcgactgttagaaattatataagaataatctggatatggtttacagatcatatacacatgtaactgagtgtcaatacttctgctagtacaagtaacaagggtttacggattagaagacatatttactatataaatggtacataaattattcaatttgtaagagaaacaatat

SEQ ID NO: 10918 - DNA, 354 bp, Glycine max
  modified_base (317)..(317): a, c, g, t, unknown, or other
ccgaagctttgttggcggcaaggcaaatctgcattgcgatggcgcctgcgaagctcttcgtctttgcgctttctgtaaccctaattttcgccatcgttggggccgaagccgatatttccatcgaaggaagcactccagagcctgatacctccgccatcaggatccaattagatcaactcaattccaagatccaaattctcgagtctcaaatcagcgaaaagttggaagaagtgaagaagaaagacgaaattatagcagaaaaagaaaagttcattgaaagataatcaattaccatacaatccttgcagaatgagatngcttctcttcagaaaaaaggggcactggatgctgaag

SEQ ID NO: 10919 - DNA, 165 bp, Glycine max
ctcaattcaactcagctattctctcttctctataagttcctctcctgcattgattttccctcccattcttccatttctgttctctcccatccctctcgcgcgctctctctcccatggaatcctccgctgccattcgatcttttaactaatcacgagcttacaatt

SEQ ID NO: 10920 - DNA, 231 bp, Glycine max
gttctgattcggataagagacaacatcatctaggtttttctgttgaatgaaataagtgagataattcgacttaccatgtatgctgacaggatcagaattgatagcaaagcgagtcatcatgctaatgtcgcatggcgaaggtgaactggtcgtggattagatcatatcatggacttttatgcctgcaatctttacattggtacaaaggtgtgacatcaagtggatacaaga

SEQ ID NO: 10921 - DNA, 445 bp, Glycine max
catcgttttcatattttagagagagagatagagagattgtgcgatccacgaaggtgcgttttgataatcaaccaagttgcagaagcgatggatctggaggtggcaggtcggcacgcgatgctgttcgacgacgacggcatggcggcgttcgtgaactcagcggaagctctggtcgaatggaactctctttccatcgaccggtacgatgtccgccatcttctctccgctccccttcccccgcgcctcaagcgccgcccttctccggccgaactcgacctagatcaacatgggtatctggatctcccttcctcttctgccgacgattaacaacaagattatggttcatatccagtgagttcaactggctttcatgctgtcgtctttgcgtatggaaattctaatgtgtccacggagacaaaggacaacgataccaagtctagttttg

SEQ ID NO: 10922 - DNA, 421 bp, Glycine max
aagaaataaaagggaagaagggaagtgggaaaaacagaatagaaaggattggaagagatgagaaaaacagagagatcaaagaactccttccaaaaactacttacagaaagaggatccctatcacttattatctcaactcgtgctccatgaaatctgaagatctgattcatgcaatgttgagcaagtgttgctattggatatggattcgaaagagcaacaaaatgggcatacttgctcttataagatcattgatgacccaaatagtatctttgccatggcagtaaacaaaaattctgggctctatgttatcttctttttctgaaattaaagttttcaatgtttttgaagaaatcttgggggaaaaaggaatattcttggctatcccagctgctaacttctcttttgggctgggatctactac

SEQ ID NO: 10923 - DNA, 411 bp, Glycine max
cacacgcttactgttggacatcaataatttatgtgaatggagtattagttatttagtgtagatcaaatgatgtgcgtacaaagctataggactatgtacgttcaatggccatccatttggtagtccactttcaatgacgaataagtaacattttaataccagattattgtgagttttggttggaatcctgagaagtcttggtccttatagcgttagcataagttagttcgagcattaaacttgaatttaattcttacgtctgcaaatactctgaagcatcagaagacgaatggcatgagccatgcaaattttggccaacatcatatcaccccaggacttacaacattgatggcattactggatttagcgaggatgactcccaatcagttatgaagtttatgcaatcagctg

SEQ ID NO: 10924 - DNA, 448 bp, Glycine max
acagggctgtggatgcagtcatgggtcctcgtaccattcaacatgaaacagttgttacagaggctgctgctgctgcccctgcacccactgcaaatacttttggtggcgatgcatgcagcattcatacaaaggcattccaggattgcctgaacggctatgggaatgacattagcaagtgccagttttacatggatatgcttgcagaatgcataaagaactctggagccacgttgagcatgtaactgctacatttgcctgttttggagtttgcatcagtgccctgtctgctatggtttgaactgataatgtggctaggtattgcatttgaataaaataccatttgcccgaagatgcatacaaactaatataaagtcattttcaattggtactttattatttgatacctataattggtaacgtatttgatctgaataaaaaaaattgaatg

SEQ ID NO: 10925 - DNA, 446 bp, Glycine max
agcgatcgctgataagagagataccaacatgaaaagaaaaaaagaagagttgagattccctttgaagaaaagatggcatcccatatgcaaagctatgaagctggtcaaactaagggccgaactgaggtaacaatcaatcacagtcacatctattattcttttcatgcaaacctcaatgtttcattctttttttttttttcagccaaaaagagataatgaaactgaggtatgcatgataaatgttagaaaacatgttttatctttgaataaaagataataagacgattaatatgaagtgtatgagaaagttctaactgaaagcatgattaattagcccgtataataactatttgagaaaaatgactatatataaaatcatcaccattaaagtcttacgtttgttttttcaaattacataaagaaaatgagtaaccttccttatgttt

SEQ ID NO: 10926 - DNA, 368 bp, Glycine max
tcggtcacgcgttcggtgaacttgtatagattctcactgatggcattattggacttttattagattcttgtgatttcaattcttggttcattgaatgatgacatggtaatgactggacttgcattaaccaaatcctgtcatatttgcacaagtctttttccttaaggtgtagtcccttgttttttctgaatgattgaataagactgacatttttatgccatcagtggccttattctctgctgctcttatctctaaatgcgatgacgtcgtggtaagaattaagttcatgcctttctatctatagactgaaacttggttacttaaggctgtacattggtggattatctcggcaatggaatgccacatat

SEQ ID NO: 10927 - DNA, 95 bp, Glycine max
ctcacgcttcctatactattcaacatattctaacatttggcgttcaaggacattcgtgagatacttgcgatcacaatggatgcagaacagaacta

SEQ ID NO: 10928 - DNA, 210 bp, Glycine max
tagtgttttgttagttcacacactaagttctgaaaaatgagttccaaagtttttcttattctacttatgttcatggccactatacttttgatctcctctgaggttgcaccctatgatgcataccagaattttgacaaaacagatgggaagcgtagtgcaaatggggtagatgaaagcaaatattggcgtggtggctatggctactatggt

SEQ ID NO: 10929 - DNA, 89 bp, Glycine max
ctcacccattgtcttcgtagccttacactttgaaattctcagttatgtcgtggcaagcgtatgtggatgatcacctatggtgtgaaatc

SEQ ID NO: 10930 - DNA, 420 bp, Glycine max
tcgcccacgcgtccgcccacgcgtccgcccacgcgtccgaatttgtccaagtcccgcaagcccaaatatcagttatctcctccacagtaaccctaaatctgaaacaaccttgactccgatctgccacggctgataaaatagcgacgcggaaacacgcccgtattcacgatcctgcgatccagcgcggcgtgtccagcgattccggtctccgacgagtctgcgcaggctcaagagtcgcgaggccagccgccggtgaagaatcgcgcgattcgtctggaaatcgcgattcaagcacgattcatgcccgataaagatattcaaccacgattcatgaacagaaacgagacaacctccgattcgtatcggtagcagctggaatcgtatcgaatcgtgcgatacctatcgggaatattgaaaatg

SEQ ID NO: 10931 - DNA, 439 bp, Glycine max
atgaaattgaaaagtgaagtttacagatggaagaagaaaaagcagcggcgtactacgacgagctggcccgtaagggcgagggagctgcgaggttcaagcaaggtctaggcttttcctcttcagcaccaaacgacgacgttccaaaaccctcctcctccttcctctccaaattcgtcaaagcctcctccgagtcggagaagcaagcgcagctccaatccatccacgacaagctcaagaaaaatccctcttccgagtctagggtttcgagcagcgacagaagcaggagcagagaaaaacgtaggaaaaggagcagaagcggagatagatacagggaaacgcggaggcgaagcaggagtagagagagacatagggatagtgaaagagggagacggatgagtagaagcgtttctcctcgcaagcaacgcaggtcggagaaaga

SEQ ID NO: 10932 - DNA, 234 bp, Glycine max
ctagtgttctataagttcacggtcagttctgaaaaatgggttccaaggttttgcttgttgtagttatgttcatagcggctatacttatgatctctgctgaggttgcacccaaggaatacgaaaattttaacataatatatgggaagcatgctccaaatgggttatatgatagcaaatggggttacggtggttggtgtagtccttggtatgtgcggctgtagtggtccttattat

SEQ ID NO: 10933 - DNA, 447 bp, Glycine max
  modified_base (352)..(352): a, c, g, t, unknown, or other
gctctatgatctatactagaggcttagtttgggttttctgttaccggcatggatttcgagagtaggaggcttcattcgctcatctgcgtggttgccatcattgctcttagcttcacagctgaaaaatgcagggaacttgttggtgaggaggggtcatcccagagtggaaagttgacaatcttaaattgcttagatatgggttctggaactgtagcatgtgctgtcaaggaaggggtgaagctctattgatacaatattaggtcttctcatgctgaatgatcgaggagtcaagcaattgagtctgccctcattgatgctgtttctcatgggatgtccccaacagattcagcanatcatgcacagaaagaaggtaataaggcatcacaattggcttaccgtcatgccaagcggattataggtcccatcatttgctctggatgggacttt

SEQ ID NO: 10934 - DNA, 151 bp, Glycine max
acggcacgtgtagcggattactacgccgtcgatacacgctactgctgaacgacgacaccgctggaatgacacaccgctacttagtcgtgattcttatagttatagcctatacattgaccattacctctattcgacttataatggcgactgt

SEQ ID NO: 10935 - DNA, 447 bp, Glycine max
caaatgcaaaggaccccggtaccctcccaaagaatgttgtggggcttttaaagaatttgcttgcccttatgccgatgtattaaatgatttaacgaatgagtgtgcatcaaccatgtttagttacattaatctctatggaaaataccctcctggcctcttttctagtgagtgtcgtgaaggaaagtttggtcttgcttgtcctgcagtgccaccatcagcagtatcagcagatgacactgcaaatcaagctgtacactgtccatctctattgttgatgctcatagcctgcttcttaatcttgttattctgatatgtttctatacacaacttcattctttttctctcaatattgatgtataatcagttaccatttttctatatgtggtgtgtgaattactttttgcgcataaacaaaaaattggctatgtgcctggtagtttaagaaga

SEQ ID NO: 10936 - DNA, 290 bp, Glycine max
aaaaaacataaaaacacacattaaagattaccaaggagtagatgtatctagcataacgtgcggctgcatgcgaggtataaggtttactagcgcgtaagagcaaatgcatacattagacatgggattgccacagatgagttgataggacgagctggacaacattattatatggcaacgatcagaacaaccttatgtgatgtgccttgatcgcgtacaggtttaagccagataggcttttatagcaagagcatagaaccaatcgcgatttgtaacagttgcggagcttgaag

SEQ ID NO: 10937 - DNA, 171 bp, Glycine max
gtcgagcgatgcaagcacgtgtgccggatcgatcattggagatctcatacctgggcggcgttctcgcacccttagaggctatgcactctggctcaagctcagcgaacctcaacgtgtacgtactactcctctcagttaagatgcagaggatgcacctttacagagcgatca

SEQ ID NO: 10938 - DNA, 449 bp, Glycine max
cgagaaaacaagaagtagtgagaagaaggtagagaatggaggaaaaggcaaaagctgagcagaagaagataggtatgaccgagacttggttgaagaagcaccgtcttctttacaatggagccactagacaccctcttattattagcattcgcgatggcaccatcaacactgcttacttcaaaacatggctcgcacaggattacttgttcgttcgggcgtttgtcccatttgtggctagtgtgctgataaaagcgtggaaggaatcagattgcagtggtgacatggaagtcatattggggggcatggcttctctggaggatgagatttcatggttcaagacagaagccaacatgtggggtatttcactttctgacgttgttcctcagcaagctaacaaaaactattgtgggttgctggaaagtttaatgagtccagacgcggaatatact

SEQ ID NO: 10939 - DNA, 108 bp, Glycine max
cccacgcgtccggaagctttaatatgctttgggctcactcatctatctattataaccaaacactctctttgatagacttaatccgattcttgttcttgatcgatctga

SEQ ID NO: 10940 - DNA, 66 bp, Glycine max
cccacgcgtccgaaaaaaaaaaaaacaatttggctttcaaaaaaataaaaaataaagaaaaaaaga

SEQ ID NO: 10941 - DNA, 112 bp, Glycine max
cacacgcgtggcgtgcatatgatcccgtacgttcttatgataaaatatacctcggcgacgatatataacccgtgaacgctcgggtctctatctcaaactcggattgtctcaa

SEQ ID NO: 10942 - DNA, 83 bp, Glycine max
aaaaaaaaaaaaataaaaaaataaaaaattaaaaaaaaaaaaaaaaaaaaaaataaaaaaaaaaaaaaaataaaatatatgtg

SEQ ID NO: 10943 - DNA, 448 bp, Glycine max
  modified_base (13)..(13): a, c, g, t, unknown, or other
  modified_base (22)..(23): a, c, g, t, unknown, or other
  modified_base (34)..(34): a, c, g, t, unknown, or other
  modified_base (52)..(52): a, c, g, t, unknown, or other
cccacgcgttcgnccacgcgtnncgccacgcgtncggattatttggtgtctntgatgatgatgggatgcttttgctaacctaattttcttcttccggggttggaattggctaatagctccaatgggtcctatggtggaaccaattgccccttttcccagaatcctaggagaatggccagcctttaccaaggcattgggcacctgcctaatgaccttaccggtgtgtggtgggtcacactatataataatggtcttggcagatattggacctttcactatggatggcagtgtgctgaacgctttcaggccaggtgcctgatgtatttgcacaccatacttgttggtgaactgacaggttggcacacttcaagatatggcatggtgctggatctttattggtcgcaatttcattttcgtcagttttttgtggttgtttaccatgcaaact

SEQ ID NO: 10944 - DNA, 171 bp, Glycine max
cccacgcgtccgaattttcaaagccagacttacaaacatgttctagaatattgagtccaacacttcctcggtctacctcattatccgaaaggcatcgagtgctttgaccactgctatagatactggtgccgtgcctatactgattaaagcatttgagtgctgctctagtga

SEQ ID NO: 10945 - DNA, 205 bp, Glycine max
gccacgcgtgcggacctagattgcgagctgacagcccgttgcattgcatgctaaagaaagacagggatacagggagtaggcacgtgagatgatcagatcagatctacagagaagcttgaatggctgtacagaccatatgtaccagatgcactactctagtgtgtcaaaggctcaatgtagaactcggtgggttccatacctagga

SEQ ID NO: 10946 - DNA, 98 bp, Glycine max
tcgcccacacgtccggaattactccgacgctttttggtttcaaccgtatctcatatacgccatcactggcttcgacgacctcaatatgaccaagggtc

SEQ ID NO: 10947 - DNA, 128 bp, Glycine max
tcggcttacattccgggcgaaagtcataatttgcaggttcatactatggagttaataatggaaggcagcgaaagatcctaacaagccagtgtggcctccaagtgcattgttcgtttgcatggaggaat

SEQ ID NO: 10948 - DNA, 382 bp, Glycine max
tgccaactaattgagtaaataactcaggaataaatatggctactagacgtgttcgttactcccctcttgccacggatgaggatgattatattggtgataggaatagaccttttgacccacgatttgattatacaccgaaagccttggataaagttccctggaaatcaattgctctggcactgttcctgttattccttggtacaggacttttgttcctttcatactttatcttcactggtcatatggggggagaaaagtctcaagcatatggccttttagccctagggatccttagctttctcccaggtttctatgagactcgaattgcatattatgcatggaggggtgctaaaggataccgcttttctggcatccatgatta

SEQ ID NO: 10949 - DNA, 329 bp, Glycine max
gcgactcaccaccactgctcagactgctcgccggcctctaatttatcaaagcttctgcgcctcccacgttattttcaatactctcttggggttcgcatagtgagatggggaagaaggcgaagaaagctatgaataatttgaaaagggcttcctttaataataagccatctgagggtgctgatttcttgcccttggaaggtggtcctgctcgtaagctcgccgcctcccagcagaagccgccggagaacaccgccacggttttgtatgtcggtcggattccgcatggattctatgagaaggagatggaaggttattttgggcaatgggaa

SEQ ID NO: 10950 - DNA, 448 bp, Glycine max
  modified_base (307)..(307): a, c, g, t, unknown, or other
  modified_base (325)..(325): a, c, g, t, unknown, or other
attttaaagtttaaagtttctttgaataatgacacaacttgtattttgtattagtacatacatgtgttgacttatgatagtcatctgcttggcacaaccttggattcattacttttactatttatctcttgaaaatgtttaaaactttcttgcacagccaagataccctttccattgacacagaggtttaggtcaatgctacagaatggaatagaccttagcaccgtagatgttagctatgtcagcagtcgctcttggtacttcctcaatctgtttggattaagaggattgtttagtctcatattgngtgaagaaaatgctgtanatgatacacaacgtatgatgcaaatgggtggatttggattagatccctcaaaggttcaattaccaaatttgagtggtttactctagatttttcataattttgaatatcaatcattgaaaatta

SEQ ID NO: 10951 - DNA, 55 bp, Glycine max
tcgaaaaaacataaaaaataaaagaatacaacttataagtttaaaaataaaataa

SEQ ID NO: 10952 - DNA, 421 bp, Glycine max
cccacgcgtccgggcaggcgagtgacgctgtgaatccagaccgacttagagagaacgaaacacagcagtgcgtatcaacacactacaatggagcgtttggccaggtcagctcgaacgtggcgttggcattggcgttcattttcctctttccaaaccctagcttctcgctcctcacctccttcttcctttcccaaatttgcgtcttcttggtctacctcttcctctgtttcgagttccagagttttgcgcgaggattattcgttgcttccggttgtcttagctggtatatttgggacgggattcgtggaagctgcatatgcggataatggtgctgttgatgtccaagaaagtgctaagaaggaacgtgagcgaattgaggagttgcttagaagtagaggaattcgatatggctcttatcctc

SEQ ID NO: 10953 - DNA, 294 bp, Glycine max
cccacgcgttcgcccacgcgtccgatatataaaaaaaataataaaaaataaaataaggggaaaaaaaaaaaaaaaaaaaaaaaaaaaataaaaaataaaaaataaaaaaaaataaataaaaaaaaatacggggtttttgttgtatcgtatcttagtttcaattccgttgattgctatggatttgtttttttttaaggtaggttaaattcattggactgccttttgttttgaactttgtggaatggcaatgccgttacctaacttatttgattggcgtaacatcccattttcttt

SEQ ID NO: 10954 - DNA, 294 bp, Glycine max
gccacgcgtacgaataaacaaatagctttaatttctctatgaaacccatgttcatcggtatgcaacgatccactagaacgaggtcacaatttctacatcttcacatttcgatagcacctgaaatccaaagttatcgacactttcgcgccacacgaaatattgagaaccaatcaaaatatctatcacttacgaaccattatatccaatacccgtgcttatagatgacttgaaaaatgatgacctccaactgctggtaaactcaattcgtatgccatcaacaattgcacatgctct

SEQ ID NO: 10955 - DNA, 416 bp, Glycine max
gttgcttctaatccagctaagatgcttgcaaaaaatttcttggctggcaatatcgttggcactttctgctgagcttagtatctggtaacgggctcataaacaacctgccagcattgctctgcatgtaaatagcccaggttaaatccagtcctagtctccaagactttccccatacatcgcttttgatcagactttttagatagttcataccacagtacctcactcattaaatctcttaattcaaaaaaaaaaaaaaaactggaaggaacagtttcacaaagttgctgttggggttcaatcttctttatgatcatgacataggcatgcacagatgctggtgaatggcagttttagagtgagcaaaagatttccatcgtctaagttagttttgatcaagtactagtataagataatgg

SEQ ID NO: 10956 - DNA, 383 bp, Glycine max
  modified_base (335)..(335): a, c, g, t, unknown, or other
cccacgcgtccgaaaaagggtttcacactttgtccaatctttcacactgaactctggaattttcaattctctttttcatgcaccactcttctttttcttcagacaccttcatcatctgcataccgcttagctccaaaaactacacacacaagaattctgtttctttctgttgatttgatggatccgcagatctaatggtttcacacactttcttcactacggatcattgtcttcttcatctggggcaccccaatagcttcttctaatcgatagtcaaattttgttggtttgtggtggatcatcttcgtcgttgtggtgactagtgaggagtgcangactatacctatctatatagtgtatgaaaattctggggggtgaagtcg

SEQ ID NO: 10957 - DNA, 409 bp, Glycine max
cccacgcgtccgtttcaattttttttaagtgcttagtttttatttatgggacatggtacgtttgttccttgccatacaataatttctccagatgaccatagcatattgctatggaaagacatcgatagttgtactctctttggctctacgtttgtccccttggttccttttttactttttgggaacataaggaaaccatacatgtgagagatgaaacttgattaaattaagaatgcttatcattaactcattgtgttctagcttgctgccaacttagttgcaatcaatagattcagattatgcagtttcctggtagaatgcaaattctcattctccgatccttttcagatctctttctgatttaaaatgaactctagcatgacaattttcttttctttcaaaaagctga

SEQ ID NO: 10958 - DNA, 410 bp, Glycine max
caaaaaagcttccagggaagcagaatatgcatttcaacccgccagagaaagagattccggacgcggccactctgagggatcaatggaggtatgccattaggcagtacagtaaatggtactctcacgcttggggcactgccattctcgctggcaccgccttcttcgccctcggctggttcatcaaaggagagaaccccataccctctttcaactctaacaaagacaaagacaaagacaaagacaatcacaattctcacccctgatgtcatgtgcccttcacttcttttcaggtaccattcactggaatcaagccacgcaagatctgcttttggttgacaatgccctggcaccttgcttgcaatggtctaataaggaattttgatgtttataaagtctcgtgacacagtggt

SEQ ID NO: 10959 - DNA, 401 bp, Glycine max
gcagtaatggctaccaagcacccttagatcctggctatagcactggtgctgcacgagcatatagtacagcccaaccaagtgggcagccaggttatgttcaacccactcccactcaaactggttatgaacagtctaacacgcaaccagctggttatgcagctgtaccatcaagtgcttcggctgtgtatggcagaacattgtccccccagacggctgcttatcaatacgactccacccaagtttatggtgctcctcgataatgattttgtatgttaaccacatgctactattagcatactctaatcagatggctccttcgacgtaacctgctattgattaccttgatgctgtactgctttaaataatgaacatcaactgataatagatcttagctcgagtgc

SEQ ID NO: 10960 - DNA, 410 bp, Glycine max
gacacgcgtgcgctcacagatgcactattattgatcgagatgaggagtgtgctgagtgtcgactaaaaattttaacatgtgtcaagcaatttcgcacgggccgtggctatacattagtaggccaaatggcacctttatatatctataccatgtggacatgccttccatgcagaatgcctgattggccatgtgactagctgtacagctgagacccatgctgagtatatactggatctgcagaagcaactttctttgatgggcagtgaagcaaggagagaatactatggtaccctttctgcataggagtccattcctagcatgaccactatacacaagcttagatcacaactggatgatgctatagctagtgaatgcccattttgtggtgacctgatgatccgtaagatttt

SEQ ID NO: 10961 - DNA, 338 bp, Glycine max
gggcattgttgccaaagaaatcaatttttgtcacaggaaaacattttggcttttgagaatgctggagaagtcgtcattgcaaatcaatgtttgaagctgactgatattaaggttctccgtgattttaaacgacctgatggtatgactgacaaggaggttgatgctgctggagatggtgatgttctagtgatattggacttgcgtactgatgagtcattgcttgaagctggtgctgctcgagagattgttaataggattcagaagttacggaagaaagttgctcttgacccaactgacatggtggaggtttactttgaatcattagatgattacaaatc

SEQ ID NO: 10962 - DNA, 388 bp, Glycine max
cccacgcgtccgcccacgcgtccgttcactcgtccggacgaagaaagagtatgaggagtagaataaaaagaagtaacaggagcaggaagaagagaagatatagcgattcagatgagagagaagacagcgagagcgatgactctgatagcagtggcagaaagaagaagaaacgatcttcttcctcaaagtctcgatccaagcgtatcagaaggagcagaaagagaacaaatagaagccctgaaacagaaggcgagggttctgatttggaggaggagaatggttctggttctggtgatgctaagagtaaaacaaccgttgatgaggtgatgaagacggagattaacgcggaggctataaagttgaaggaattggttgagtctcagaagaa

SEQ ID NO: 10963 - DNA, 319 bp, Glycine max
caatcaccaagatgactacctcacgttgttttacataggactccctatgaacaagggtgttaaacagtatcatggcagctgatccatcatgccatgcgccactatcagtcaaagcaaaagcacgcagccactcctcggaaacagctgagattccggacatggaagtaccgtagagaatttctcaataagcggcgtcaggctattaaaagacaagctgcttgcaagggcttacaagcacggaagcaatgtcgtaaaatcggatggtcagctggtgtgcttgagacagtgaaccagcgttggcttttaaagagaaaaggct

SEQ ID NO: 10964 - DNA, 400 bp, Glycine max
cccacgcgtccgctcacgcgttcgttagatgtacagatggtcaatagagatccaagtttgagtcctttttaagacttggtgtttgatgcattgttgtatcaggagaagggttttgttgtaattaagcattgagggaattgttggagtcaggcagagagagaggggggaggtttgttgtaagacacctagtattagtatcatgtagtggagaaaaagggttgttgatcctaatagctagacaaggcatgttgtagtagtcatggggtggggaagtccttttgttgtagcatgtaatttggtttagacttgtagtatgtcatcaattagatggataaagagagaatattgttatctacccgaggatgttacaatgtttgtttctctgaataaaaagttcaca

SEQ ID NO: 10965 - DNA, 358 bp, Glycine max
ctctctctctctctcttcttcgccaaatcccaaaccccatttcaatgatccccctccctccaacaatgttcccacacccttaaaaaaccacaaaaaccaaaaaaaaaaaaaaacaccaaaccatgttttccttccctcacaccatcatcttcatccttgtctttccaatcattatttcttgctcctgggcctcgtcgttgggcctgagtagcaatgcgacgaccatctacgaggtcctgagcgagcacgggctgcccatgggcctgttcccgcagggcgtgcgggagttcgcggtgggcgaggatggtagcttctgggtgcgccttgaccaggcctgcaacgccaagttcgagaacca

SEQ ID NO: 10966 - DNA, 254 bp, Glycine max
atcacgcggacgattatcaggactcataccctatatcaatggtaacacatataccagcattgactatggacatagttacaataacagctcacaatcacaataacaattacagctcaaaatcaagattaaatgtacgtatcatcgaatcattgcagatctcgtagaactgagctgaaaacaatggcgaaaccaatgtactctcgtaagtcaccttgcaagtcaacgctgactttcactctgattctgactttgat

SEQ ID NO: 10967 - DNA, 362 bp, Glycine max
  modified_base (335)..(335): a, c, g, t, unknown, or other
cccttgtccctatctcacgttaaacgtcatagccactgctacaagaagcagcagagttcgccgctgctccgcaaccttaccctatcaattatcgtccttgttttcgtaattgcagcgaagaatggggaagcgtaaggagcggattcagaacccggaacccttcgatccgtacggcgccgaccccgcgaaaacgaagaagcgctcgaaggcgccgaagcggcaccagcaggaggagcagttcatcgctcccaaactcagctccaagatcatgaagcaggcgctaatccagcagaaggaggaggagaaggaggaggcgcccgagaacaacgccgcanatttattcgaagaggttccggatgtcg

SEQ ID NO: 10968 - DNA, 410 bp, Glycine max
ccctctcaccaaaccttcatcgatctctttgtttttttataaattataatattgatgacgaagttgtttctgtaaatagcaattcagagaccttaaaggtagtgagtattttcctccttacttaatctattgtgtgatcaaagtcgttattattaaattagataattgataaccatgtcgatgaagctgttattagcttccctatccatttcggtgtggcttttcatggcaacattatcccttgcccaatccaacaaccgctacgtctttgacacacatggcgaccctcttgaaactgacgatgaatattacatcaggccggccataacagacaacggagggcgtttcacattgatcaacagaaacaggtcgtgccctttgtacgtcggtctcgaaaacaccgacacacc

SEQ ID NO: 10969 - DNA, 382 bp, Glycine max
acgtcaagacccatggttcctctactaccttgatccccctctctgccttccaaatttcaggggtctctttcctcccttaggtgatggatccattggggaaacgccctgctgccgaggacgattccctaatttccgattgcgagagcggggtttccgctggagacacgccgccgccgttcgtcgaaaacgccgacctcgtccggaccagattcgttcgtggcctcgtcgcgcactgcttcaaacccgaggttctggcagttcgcagaaacgtgtgctcctccgtcatggccctggcgcgtcaacattcctttcacgtcttctcgcgtgccgggggcgaattgctcggcggcaatgccaacgtgaagttcgtctgtacggtgcg

SEQ ID NO: 10970 - DNA, 300 bp, Glycine max
ctccttctaccttccaacacaagctgtctctgtctttctagtcacagttgggttggttggtaccaaaggtgaggcaggggagactcagaaagagatggctgagctcggaggagttatgccagactgtgtatatgctccaaatccctaccatgaatgcacggaggcttgcgtgcataggatcaaggaagccaagcctggcaagccatctaaaactaaaaagggtaccgctttcaaagattatcgcagaagtgttacagatggtgaactgggcaaaacgatgaaagaagaaaaacgcatgcc

SEQ ID NO: 10971 - DNA, 414 bp, Glycine max
aaaacatccaatcccaacccatctttctctttttctcactctctcccccccaaaccctagctttcaccatgcggttccaatcgctctaaccctaactccctctctccatcaccgatcttcgatccgcaccgccgttcctttgaatcgcttcagattctccgctgcttccaccaggaggaggagtttttcgcgattcgcgctcgaagcttccgttgccgccgatcgaagagattcgctccgaatcccaacgccctgccgtcaagtttttcgccgaagtaacaaatcctgttgttgttcttcttcgattcgattggattgctctgttttgccctaactgttgctgtggcttcttcggatttctgatttgagagggctttgctgcgcttgattcggattcgtcgcattttcatcatc

SEQ ID NO: 10972 - DNA, 339 bp, Glycine max
agccttccaataattcttccattcataatgggtggtttttatcattcgaggatgaaatcaactccgctggggctcctgctactctttacaaggccctagttacagatgccgacaacgtcatcccaaaggctcttgattccttcaagagtgttgaaaacgttgagggaaatggtggcccacgaaccatcaagaagatcactttcgttgaggatggagaaaccaagtttgtgctgcacaaaatagaaagcattgatgaggcgaacttgggatacagctacagcgtggttgggggtgctgcattgcccgacacggcggagaagatcacattcgactccaaat

SEQ ID NO: 10973 - DNA, 410 bp, Glycine max
aagaaagggcgtaaattggagaatgataatttttctgtagctaattctaattctaatgctaatgttaaccatagtggtggtaagagtagtgtgaataataatattgggaaagagaatgagagttccaatgttggggcttttgatgtaaataggcttcagaagcttaaaggaaaaaaagggaatgggaacgggaagaagaaagatgctcttgttgttgctgctgccaagggagagcccaaaaaggtggataagccaaacagggtttgggatcaaccggcgccgcaaaccaaactggactttactgatcacgtggatggagatggggatagaagcgctgactttttggctaaggagcaaggagagagtatgatggataaagaagagattcttagcagtgatagtgaggttga

SEQ ID NO: 10974 - DNA, 415 bp, Glycine max
  modified_base (349)..(349): a, c, g, t, unknown, or other
  modified_base (361)..(361): a, c, g, t, unknown, or other
cccacgcgtccggtcggttccggcatcgtgctctgctctgcacacctttctctttctctctgtctgaggctctgagcagtgagcacaccacaaactgaaacaaatccctttgagcattcagcaagatgagccacgagctgttggagacgtacgcgtgcatgcccacgacggagcgcggccgtgggattctgatctccggcgatgccaagtccaactccatcgtctacaccaacggcagatcggtggtcatgatgaacctccagaaccccctaaacgtgtccgtgtacggggaccacgcctaccccgccaccgtggcgcgcttttcccccaacggcgagtgggtggcctncgccgacgcctncggctccgtcaggatctggggcacgcgaaacgacttcgttttgaagaaggattt

SEQ ID NO: 10975 - DNA, 408 bp, Glycine max
tcgcagaattaagccatcaacaccaacttgttttttaattcggaacaataaacggttaactttccaaatcctaattttggtttgggttgggttaaattttgtccgaaaacatggttttaaggccaatggtacggttttctaaattttcttcctttttcctccgggttttttcttttctaatccttactcgacgttcaacatgtggtgcaaagtggtaattggttagcactgttaagaaacagttatggaggtaaagccgcgtacgcaacctcaacagcaccaaagatgaaagcgtatgcagctgcggctgattacggacacaagcaacaacatgggaagtcggccaaacgggactttgtggcaatttacgtggcgattgggatgatagctctgtccacagggctgggt

SEQ ID NO: 10976 - DNA, 418 bp, Glycine max
cccacgcgtccgggccgatcaaaagctttcagaaccggcgcttaaacgtgagcagcttgatgaattcgtgagtagtctatattttgaacaacgaattcttgaactccgacttcttcaagacctcgagaacaatgatgaatgtaggaaaaatgggagcctgaaaaggttaaatgaccagagtgatgtctgtggatttagaagttgcttcaaaaatcattatgattcgcttccgaatcagaggtgcttgaggaatcgagaagaagtgattcaggagacgatggaaatggagttggaaaatatgatggaactgggcaccctcaagggcaagaaaacatattcttttaagaatggtacaagaagtgcgttgaaccttgagaacaccacaggatcctttctagataacaataaatcaaatgat

SEQ ID NO: 10977 - DNA, 272 bp, Glycine max
gttatacatcgggagctagagctctttaggatgcaagctaacatacacgcgcatgcgaccttgtatgtgatgtatagtgtcacctatagtgaattcactggccaatcgactacaacgtggtgaatggcaaaaccattgcgatacccatgttaatagccatgtaactcatcttgctttagatagctgtcgtaatagctaacaggctagcaccgatggccgttccgaacagtcgtgcaaactgaatggcaaatggaacgcgcaatgtaacgcgc

SEQ ID NO: 10978 - DNA, 92 bp, Glycine max
gaatctgcgtaaggttgagaaagcagtcgaaatctgcatcaaaatcagaaacgatgggggctacaccggaccacctattgaacctccgcaac

SEQ ID NO: 10979 - DNA, 395 bp, Glycine max
cccacgcgtccgtccacgcgtccggttttttcaatttcaatctacactacacaggcgtgaggcccctccttatcccccaccacagggttacccgccaccgggttacccgtcagcgccgccgcagcctccgccggggtacgtgccgtatccgccgccgcagtacgaaggctaccaaggctatttcaatcacgggtatcctctgccaccccctcccaattaccactgccatcacgctcagcaccatcacaatgataaccccggttttacttctttcttgcaaggctgcttgacagcattttgctgctgttgtttgctaaaagagtgttgcttggtctgataatcatattaaaagatgtatctgcaagttggtgtacctgggtggttatagctcttcg

SEQ ID NO: 10980 - DNA, 235 bp, Glycine max
ccggaacctctctgcactgggggtttaagcagccaatattgcatcctaccgttcattatggcaatgtgtggctcctgcagataggcaaaacacaattaatctctaagagtttgctcctatggagttaaagcggcttgtagattgttttcctctgggtctagagtttccttttgtaacttaattttgaaatccattatatagctttacacaataatcacaggttatcatggttctt

SEQ ID NO: 10981 - DNA, 357 bp, Glycine max
cccacgcgtacgctccctgtcattttctttgcatctgtactctccaaaaagccggccttagaggaggagctcttacgttcaaccccaagcaagctcaagatcgagcgggcccaccacatgaaccgccagctctaccgctgcttcgccttcaccagcaccatgttcctgtgggccctctttataatcgccctcaccgcttcatatctcagcttccaaggcttcgttgattccggcagccgctacctctgcggcttctggggcgggatccagtgggagaagcaggtccacacctacggccagatccaccggcaaggcggcatgtccgtccttgtcaccggcgctggcggctacgtcggc

SEQ ID NO: 10982 - DNA, 380 bp, Glycine max
cttctctgctatcttatccctcctttgatgattatcatccctttcgtatctctatactgctgtcatcaccttcagcctgcatttctcactattccccctctacaccaactgttagctagtgtagtatatacttcgtttctatctactggaactataattcatatataaattactttaataagcctgttcatatataataatttgatgttcaccctgggtatttattacctagctagctagttctctcttctaattgcagattttaccattataccatacaaggtttttaaaaaactgctgggaatgcaatttcggccgcaaggtcatatggagtgtcagctactgcatcgcgattacaataggatccacaatttgttatc

SEQ ID NO: 10983 - DNA, 363 bp, Glycine max
ctctctcctactgttaacgtttcctgtttttctttaagatggcgatgacgacaacgagggagtccgatctcgattacgagcttcgctatctcagtctcgccgtaaccgataccttcactgctttccaaaacctcttaccggatgcgatgacttccttttcagcttgtggactaatagaccctctttgttctcaaaacctcactcccaagcattccaccatcactgcaaccattgattctcagtcatcgatttgcgccactagtaatgttgggagcccagtctcagctaataaaccagagggcagagagaatcatacgaaaggagccacaagtggttcctctgagccatctgatgaggatgatg

SEQ ID NO: 10984 - DNA, 358 bp, Glycine max
atggaaatcaagttgacaacttccacagtttcaatccatgtcacacctatcaatagttctgtttcacaagttgtttcggaaaataatagtttgacatcacatgagataatagacattccaccttctagcaaagttgtttccactcatgaagttactagtcacaatgaatttcaagggataactcctgttggaaattcttctgccgaggaaaagggagaatctacagcaaaagctgaggaagcaggcacatctaccctcgttggatgttctgagcaggaaactgcttcttgtcctgtcccaggaactgaaaaacatcattcttctgaaacttctaggcaattgttacatgacagcgatt

SEQ ID NO: 10985 - DNA, 415 bp, Glycine max
cccacgcgtccgcccacgcgtccgttcacgcgtccggctaccttccttcaacgcacaaaccctctctccctctaccacccattctcttttctctctctttctttccccctccctctctcacctactcaatctcatcaccaccaccatcatcatcatgatcttctccaatctctataaccttcaatcactcaaaacctcaccattaaaccaaatgagttgacccatttgtgagaacaattctccctaagaaaaggtcaaaggctgcaactttttcttaaccaatctcacaacattttgcaacgttttttctggttcggattggttttctgggtcgtcttggaattcataaaagattccaactatgaagatgggtaggggcggaaccgacgcggcggcagtggagaacgccgaaccc

SEQ ID NO: 10986 - DNA, 421 bp, Glycine max
cccacgcgtccgcactaagtttattagtattattatcactagctacctgctatcaaagcatcacaaatggcttctacagacaagcctggcggcgaccctgaatacagaacatcttcaactccagctcctgctggtgttgattactttaaatttgatgtcatcctaaggtttctattgtttgcagcatcactggtagctgttgtggtgatcgtcactgctaatcaaacagaggttattcgtgttccacagcctgtgccatggccagccaagttcagatactcaccagcctttgtttattttgtagctgcattgtccgttactggcctctacagtatcattacaacacttgcatcactctttgccagtaacaagccagccctcaaaaccaagttgctcctctactttatcttatgggatgcgc

SEQ ID NO: 10987 - DNA, 312 bp, Glycine max
gtcaatcgtgagcaccaaccgatttttgtgatgagcgcctggaaaagaagaagaaggtgattgccaggaaaaataaaggggtggcgccggaagacgccataacggccattggcttgggttacgatctcaccaacgatctgaagctcaaatcctgcaagaaccactccagattgatcgctattgacgatgacaaccttcgaactgtcgaactccctcctcggatttccatccctaatgtccccaaatccatcaagtgcgataaaggtgaccgcatgagattgcgctccgatgtcctctctgttcagcagatgt

SEQ ID NO: 10988 - DNA, 361 bp, Glycine max
  modified_base (35)..(35): a, c, g, t, unknown, or other
ctacacaccacattttctttcatttcttctctctntagttgctctcttcgaacaacttaaactctttttttcacctaggagtctagctcagttgtgatttcctagttcttgagttcgattccttcgaatcaaaacataaacagtgccattgatctctatcattgttccattccttgatggctcccgtggactctgacactttggggcgccattctctgattccgagctacctctattcctctccctcgccgcagaagaagaagatggaggcttcgagtttcgccattcattctccgagagagaatcgaaatatagagatgttttcgccgtcgttctatgctgcttgcaccgttggtggaag

SEQ ID NO: 10989 - DNA, 321 bp, Glycine max
agccttccgggggaacgtggtggataatggcggcgtccaatgtggcttatggtggcggccgtgggggctatggcggcggccgtggtggcgggcgtggtggctatggtcctaatgaacataacgaggctggggttgatgctaaccctcacaactaagaaggcaactttctaaagcttatatatgggtttaagttatcgcaataaataaaacttcatgagaaggttagttgtaatagaagtggaaaaactttgtaaggaataatacctttcatgaatttccttaactttgtgttggctctggttctggtttgctaaactcaaa

SEQ ID NO: 10990 - DNA, 278 bp, Glycine max
cctattggtaatggagtatcgatgcttcagtttcaacttccaagcatgaatgggagtacttagggtggttaatttggcttagggtatatactgggttggataataatgtagcggctattgtaggtttatattataagttaatttaacttgagttttatgagccatataaaacaaactagagagagagagagagatcatgactgtagcttgtatttttgtgagttttgtctttgaagcttatattaaactgaatacaatactactgctctatatcaaag

SEQ ID NO: 10991 - DNA, 91 bp, Glycine max
aaaaaaaaaaaaatagaaaaaaaaatttttaaaaaaaaaaaaaaaaaaaaaaaaaagagggaaaaaaaaaaaaaaaagaggaaaaaaaaaa

SEQ ID NO: 10992 - DNA, 213 bp, Glycine max
accacgcgtccgcccacgcgtccgtccacgcgtcccgccacgcgtccggttgccttgggtgtgcgagtcccattcccgtcaccgctaccgtcaacaccaccgatcactctctcacccaccccaactgatacccgtaaccctatcacctttctcttcttccctaacctaatttaaaactaaaaaaaacacctaccaattaaacaaatgtcccct

SEQ ID NO: 10993 - DNA, 248 bp, Glycine max
cccacgcgtacgaaaacacttactccaaaatggcacgaggaatttaaagttcccatggtacatgggagtctgataacgtgctggttattgcagttcgtgacaaggaccatttctatgatgatatccttggggaaaaaaactaaaagataataaagaaaaaaaaagggcggccagtctagaagatccaatcttacctacccttgcatggcatgcattagctgttctatagggtctactaagttaaattc

SEQ ID NO: 10994 - DNA, 248 bp, Glycine max
gaaaagaagacaaaggaaatttctgagtctgaggctaaatatacaatcatgatagggaaggcttatgctgcggtgaatgatgaatctatacggaaggaagggtctgctcaagagcaacttgcgggtcatgcatgtgcaactgaatgactggttaatcttatgaagtatccacaatctagtagctcagaacttgtcattacaatcgggagcatgcatttatatgattaggcctatatgtagagtaagtg

SEQ ID NO: 10995 - DNA, 296 bp, Glycine max
gctgactcttgtacacatatacacattttctataattaagtgcatgctaagttcttcaagtaaggagcatgaatcacatattatagacaaatcaacattacaatgctgatgaagagagtgcaaatcttgacctcacttccactggacttacagagcactcacgctatcttcggatcaactatctgttaacctatacacagcacttatattacactcaaagtgctaaacctggtatcctgatcctgatatatataagacttggagtcatagtacgactatctttcctttcagtgatc

SEQ ID NO: 10996 - DNA, 225 bp, Glycine max
cattaatactagcattttcagctatctgtacataattgataatctagttcttagtcttgttagtttttgtttctggtttgaaatagaatgtaataatgcatttgtaggttctgatgtttgtatggtgcattttttgtcagtattgaattctgatgcatcatttatcatctatattattctgtaatgcttttaagctttttcactatacttcttttagagatattc

SEQ ID NO: 10997 - DNA, 346 bp, Glycine max
  modified_base (292)..(292): a, c, g, t, unknown, or other
gaaatagactaagatctggattacagagcacttgaaagtggatatgttgcagtgactgcgctgtctctttctcctgatattgagactgatattcaaatggcagcttctgattggatttctgctgtgcttcctggtgaacaataaatttagtatgattgtgtacatttgagatttatgatgattcttttttctctttttttctaccttaaagcaaaaatggagcagaagcggtagtcacaccaattcaatagtggatttccacttgtactatttttctttttctacattattntgttccctttttcattgtttcagtccctttggtcacttagttatttctgatttg

SEQ ID NO: 10998 - DNA, 424 bp, Glycine max
gagactgcaagactgatgtccgtcatgtgcactaatccgaacatgcatactctgtgatgaggcatggagcaatgtccattagtcatacagcttgcgcaaataaacctcgtaatcagaggtcaataatagacagcgaactacatcgctgtaagacaggagcggtaactggcgaccgaatccattcaatcacaccagcatattacgagcagtctccaatagcatacaagaaactggaccaaatatatctatggaagatcctgatccgcgccaagctcagatactccaacatgatcgtaacactaagctaactgatcgtcaatggcccgtacgaccttgtggaactacacggaatcgccgcaatgttgctatctacaggtgcagtagacaccattcacccgatcataatgctggatacatactacat

SEQ ID NO: 10999 - DNA, 425 bp, Glycine max
acgaggcagggcagaggagaaggccttgtgattcatcatgacgaatgaacccgacaagaggtacgatgtttttctgtgtttagttggcccagatacccgctacaccttcgctggtaatctctataatgctttgcgccgcaacagaatcaatacctttttcacagaagataatcatcatgatgagctactactcatgaatggcgaccaaatttcaccctttgctctaagagcaattaaagaatcaaacttgttaattgttgttctctctccaaactacgcatcatccccaaggaaatcttgatgaatgtgtggccatcgttcggtgtattaaggagaaggagccactggtggttcccgcttttaccaaatggaaccagggggaattatggatgccatatttaatggacctgatcaacaagcgctct

SEQ ID NO: 11000 - DNA, 331 bp, Glycine max
gatgaaaggcctttcattcgtgcatataaaggagagtttcaaccaacatatgggtgtgctaatgtcatatcaaatgtcattagggcaaaatttgatgaaccagctccaagttggttgaaggtgtcagttgaccttcgcgataggtggtttggagagtttaagaaagagtataggtggcacccacaagaagagcaagccattagagctgtttttgagacaaaaggttcacgtattttaaaaagtgcaatgaacaagatcagaaatggtcaagataaaggaaagtggataacaactaatgttcgagtagccttggacgaacattgggggtcta

SEQ ID NO: 11001 - DNA, 250 bp, Glycine max
cccacgcgtccgattaatttgaagcactaagtttgaagaatattgtggccgtttagtcgtaggtctttttatggtggatagggattaatatatgatatatggagctatcatccatttattttaggaagaaataaagatacgtgtattcagtattctgttcttgatttgaataaagctcctaattgttatgagtttgtaattcatttgctactttggttattatatattatacttcttttatttcatcttt

SEQ ID NO: 11002 - DNA, 311 bp, Glycine max
agcggctatacttctgatctctgctgaggttgcacccaatgaatacgaaaattttaagataagagatgggaagcatgctccaaatgggttatatgatagcaaatggggttacggtggttggggtggtccttggtatggcggctggggtggcccttattatggtggcagctggggtggcccttattatggcagtggttggggcagtccctggcgtggcggtagctgtggttgctgaagaggttggcgtcgacctaatggcaacgctcacaactaagaagaagacttgctaaagcttgtttacgggtttaggt

SEQ ID NO: 11003 - DNA, 319 bp, Glycine max
tccacgcgtacgtattgcagatcagattcttaacttcatcatcaaatctcaggtgttgtctaccaatagtcagtagtaatatcaactaacaaagaatactcagttttgaatattatcttaaacaaagcattaacgacacttttggtcactgacctttctttattctttatgccaaaatggtttttaagcatatagtggagctgtctgtgtatactggatcagtggatgagaagaatgttattattattagcgatgagtcatttaactagcctaagacttgatcgattgttagatgatcttctgatggactcagtgcaca

SEQ ID NO: 11004 - DNA, 428 bp, Glycine max
gttttagacttcgcaaaaccctacgccgatcccaaacgattccgatcgcgaaaatggcagccggcgccgccagatcgatattccgatcatgctccgccagccggtcagcgtttcgcgtcgcatcggaatccaaaccggttcgttctccgttccgtatcgcgtccaataagcctctctcgcagtcccaatccactctcaggttccccgtggaattgagttcgtgtgttgaatcgatgatgccgtaccacacggccactgcttctgcgctcatgaattccatgctttcaatttcaagccgcacgagcgcttggattcccgaaggccaaaagcagactacttgaagatcaggaagcatagatgggattgcagggacattctatgatatgatgttcatcttgaaacaagattttgttggtgctaggaataat

SEQ ID NO: 11005 - DNA, 365 bp, Glycine max
aagcaaagataatccaagcccgatttcttctaggcttactatgtcactgcttctgatggtattgtggcatctgaccatccaaagatgagacacaagaagaaccaaagacacagccagatgcctggtgaagaggtggaagtgcggaagcatgattgaagctgccgacactgtaaagactggggacatggcagacgatgacactgccgaagacatggcaaaggatgacactatggacgtcatcaccgatgatgcagatgctgtggtcaaaagggctgcaaatgttgatgaagtttaaaccacaaatatatgaactgaacacactcatatacttgagtatactccatgtaatatctagcatatatcta

SEQ ID NO: 11006 - DNA, 442 bp, Glycine max
  modified_base (401)..(401): a, c, g, t, unknown, or other
gaattctagatcttgttatcggcttcgacgaaggagatctggttgtcgcggatataacgcctgtccgacgcgtcggatgcacccgctgcctcctacaccgtgtcgaagccccagccagtggcagcaccgtccgatgcagtcgcgtatcttcgttaaccacctcccccgcgatcccttcctcgctccttggtagctcttgctcacggacgattgcgcgaaaatccctttctaaacaatagaaccttttcttagattctgtggaaaaagcttctcaagctttgaataagataaacaacaatgtcttcacttgcagctgctagagcagacaacttttactatcctccggaatgggaaccgagtcagggttcgctgaacaagtttcatggtcaacatgccttgcnggagaggggcaagaaaatagatcagggtattctgattataa

SEQ ID NO: 11007 - DNA, 279 bp, Glycine max
ggagatatatgctttaaataatatcttatagaagctagtgttttgtgctgataaaaaagaaatgggtaaaaaataagtaaagaaaaaaaaaaataataaaaaaaataaaaaaaaaaaaaaaaaacaaacaaaataaaaaaaaaaaaaatatgtaccttaacaaaataatccaaaattaattaatagttcattcaaaattaaatctaacggataattgcactaaaatcaattcataagacaatacattcaaatactagattctgtaaaaaaagatactta

SEQ ID NO: 11008 - DNA, 281 bp, Glycine max
cccacgcgtccgagagtacatgccaagtttaactggcagggtgatggatgaaagtggggctacattggagctgatggataggaacatttgcagtgctgctggtggtgttggatcttgcatccttctcacagaacggatagtccaattgtgtaatgtattgatatccaggtattatgatctgactgcaggtgattcgtacgatcggtagcggatcgggcagtcttttgactgttacctggatatggcacagggcacgcaatcattcatgccatgatctataa

SEQ ID NO: 11009 - DNA, 311 bp, Glycine max
acgcccacgcgtccgcccacgcgttcgcccacatcgtacgcacacgcgtacgagactgccgaccgttttgttttataggaaattaagatgaatgatatatcaatgttacagaaagtatatataactgttgaactaaaaatgactcgtatcattctatttgttaattaactataattaacaatagaatggagagaacacaatattctgtagatgttaatgaccgagataactttagtgcgttttattttctgactttaccacaaaataacactctatctatctagaaaatggctgattgcatattcatggtg

SEQ ID NO: 11010 - DNA, 313 bp, Glycine max
accacgcgttctgagatgcctcaactctcaattggagttccggaagcccctattcctggtagggtcttctttctatctatctaatcctggcgaccagagtgcgaaatcgctatgtgtgctgcagattagcaagttcaagatccagcttcaccatccgaagcatgcaatgcacccactcgtaagaagagcagtacctgccaaactccttcccacggatcacgacgccaacgcctaccggtccaacgtgctagccgaccgatagagttccgccgacgacttcgacgaagcacccgttatatccacgagaaatcgt

SEQ ID NO: 11011 - DNA, 102 bp, Glycine max
atttactgtttgattgttacagaaaatcctgataggttctgtctcccaatgtgccgagtgcattatcaaggggcaagggccaatcgatgataaattattatt

SEQ ID NO: 11012 - DNA, 199 bp, Glycine max
atctttttgtgctatcaatttcattattcattatccctgcctagtgagggctcatgaggcatcctttttttccgggttcaagagaggatccaccctgaagtgggtcctgggtggccctccttttatacttgtggtatgtatagtaggatgtcttgaatacatataaccatggattgacaccaaaagctgcaatttatac

SEQ ID NO: 11013 - DNA, 289 bp, Glycine max
aagaaaccaacaatttggatgggagctgagctgacatctccatttatcatagggaatccagtccaccacagttttagtgtgtaaatgctttagcttgagaccaactattgtggaagaaggtgagctactgcatcctttgagtgctctccatacaacatctccgggtcacacttttgtaaattatttaccctgtcaccacatatatacatttttaatatatattatgcatagatcgtaacaagagagggcttcctctctctttaaaaaaaaaaaataaaaaaaaacataa

SEQ ID NO: 11014 - DNA, 340 bp, Glycine max
cccacgcgtccgcatatttcctattctcttaccacccatttactggctaggttgtgagccatttgtaatcagttccatcggtcccgcttctcattcatcactggattgtgtatcatctgattccacctatagcaagtcgactgaactatataattgatgtttttacatcaagacaagcttatccaattggttgatcttgatcattgttggaggcaatgtggcttagtaatgctaggatcttgtcacaacctatgtatatttggcaattctttttgctgtttatttctgtatacacagtgcaactgctgcaagttactattgagtttttgaccccttgact

SEQ ID NO: 11015 - DNA, 209 bp, Glycine max
gtctaaaaaaaaaaaaaaaaaaaaaaaataaaaaaaaaaaaaaaataaaaaaaaacaaacagactgacttctcctttctaacatacacattcatacaccttccttactattatataccatcacctaaattcaatttaaaatccaattactttacaacgctcttaactaaaaaaaccctgtcaaaacccatcttattcccattttaatac

SEQ ID NO: 11016 - DNA, 410 bp, Glycine max
gggaattggcactcgtttggtggatatgtacaaggagcattatgagagcattgagatggccaggtttgttgatacagtaactcctcaatataagcctaaatttgatgcccttttgattgagcttaaagaagcagaggagaaatctctgaaggagtctgagcgcttggaaaaggaaattgctgaagtacaagagttgaagaaaaagcttagtaccatgacggcagatgagtactttgaaaagcatcctgagctgaggaagaagtttgatgatgagatcaggaatgataactggggttattgatttttcaattagcaaaatgtcaggttgatgttgttctggctggtttaataataactacattgatttctttggaactcggttctctttttcagttcaaagggtcttattt

SEQ ID NO: 11017 - DNA, 328 bp, Glycine max
gcctttcaaaagcaaacagaagctagcatcattggctcatttcaaatgcaatatttggagtcagttaccgtatgagttggcttgatgatactgcaacagtttggagggattaatggcatagctttttatgcaaactctatatttatatcttctgggttttcagaaagtattggaactatatcaattgctgccgttaagattccaacgtcatctattggcgtactattaatgcataaatctggatgacgaccacttttagctggtttctgcatgagagaacatgctgaggatgctttctggcattcttgacattccatttgctggactt

SEQ ID NO: 11018 - DNA, 352 bp, Glycine max
atcatatcctcggatcaacatctaggtactactaacgcttatcgaattgaacctactgtggttcgagtctactgtgctagccggagtatggctgaccttgcaatgagccctaaagcgctaacggtacctgtagaacaccgtaatacaactttggccactggctatgctcatgtcactgaacggcatattccaaccattatgtctcgtgaatctgctcatcttgctactcaatgatgaaacattggctctgattaaaatacatttgcctaacaacatttccgatatgttaattacatgctatgtctctggcaataccggtcttaatgaaatatatatataggaatggctctat

SEQ ID NO: 11019 - DNA, 393 bp, Glycine max
tgctagagctatgtctggtggtggcaaagaaagtcagggagaggttgatcgtgtaaaggatacgagaagagggaattattgactcaaaaacttctcattcacattcagtgggcattactaatgagaatggtgaaagcatacatcttgagcagtctctgaaaggtgtggagacaagggccggttatggtggtgataccacggagacctttgccaacaatatggccttgaatgaggaagtgaatggaacagcatatgatgtggaggagaatgatgctgagtataggagtgaatcccgtggggaagatgctggtggagttgacaatgaggatgatgaagaagattacctgcaacccggtgaagcttcaatagggaaagagctttggaattttttta

SEQ ID NO: 11020 - DNA, 187 bp, Glycine max
tcggagcgagaggcatatcataacataagaccacatagctgtgttgcgcgttgaagagcgggtaggtagaagatgtcgggtatgggagatgggtacgttggcacacgccaagactcagttaggattcgacggttggggatgcatagagaagctgatcgtcgcagaatccaagagctgaaaaccaagt

SEQ ID NO: 11021 - DNA, 346 bp, Glycine max
atctgcttctgggagcaacttgtaggaggatttaatagatgttttcacttcaaattggtaatgcactcaggatgatgagtccttgacagttctttcctgcaaacatctgtaccatcctgagtgcattaacaattggttgaaaataaacaaggtttgcccagtttgtagtactgaggtatctgcttctgggagcaacttgtatgaggatttaatagatgttttcacttcatattgaagaagatctatgctaagtcgtcggctactatccctcgatctaatagcattctcacattagggagatagtctctgctattggttccagctctctgatttcaagtatcacatg

SEQ ID NO: 11022 - DNA, 438 bp, Glycine max
  modified_base (424)..(424): a, c, g, t, unknown, or other
agacaccgaagaaattaatgcattgctttactcggacagctatggctattctacccaggatgatgatgatgaagttactagcacagggcactctccgagtacaatgaccactcatgataactgtgaaacctttaggagggataccgcagaagaagttgcaagctctgccaggaaaaccaagaagaggaagctattggatggctattatgatgacatacaactcattgatactgccagttctcagaatctgaacaagtcttctgcaacgggagatgatgacgcagaatcaagatgttctagtaacaacaatgaaggatccttgtctggcaataagaagattaaaaaggagaagatacgcgatgttctgagcattctgcagagcataattcctggtggaaaggataaggatccggtcatgcttctngacaatgccataca

SEQ ID NO: 11023 - DNA, 329 bp, Glycine max
atactctcaaaacttcaaaactatgtagtacgtattatgctgcactcttgcgggccagctctattctaacgcccttactatcacatggtaatttcttgctactgtgcccgctcatgtgttctgtacttcctataggtgtgataccgtcatggaagcctcaagctcatacatatatacctatataagtatgctataatatgtctattatgattacatacagcttagtgaatctgacattatctcatattgctaactagtcttctgccacaggagatgatgacacagaatcaagatgttctagtaacaacaatgaaggatccctgtctggc

SEQ ID NO: 11024 - DNA, 410 bp, Glycine max
agggtgagaaaatttcaagcacaaaaaatggcggagaagaaagtggtcatcctaggaggtggtgttgccggagccaaccttgcaaaaactatacaacatcaagccaacgtcacccttattgatccgaaagaatattttgagattccatgggcaagtttgaggggattggttgagccaacttttgctgaaaggatagtgatcaaccatagagagtacttcaaaaagggtgaccttgttgtatccagtgctgtcaacataactgaaaccgcagtggtgactgcagatggccagcagatagcctatgactatcttgttattgccactggacacacagaacctatccccaaaaccaggagagaaagacttgaccaatacaaaggagaaaatgcaaagatcaaatctgcaagttc

SEQ ID NO: 11025 - DNA, 97 bp, Glycine max
ccccgccccacctctccagcgggccgccagcatgcccgagatcaagatcaacaatccggcacatcttataagttaaaaaagctactgaattgacttc

SEQ ID NO: 11026 - DNA, 436 bp, Glycine max
gcctttgatacgtaaatgctgccttacttttctattgcacagtgatcgttgcgatgcaggactacgccaccgtctaactcctcagcttcgcaatcgcagttcgactattcaaacgcctgctactgctcctgctacttccccgatccctttcaccttcagcaacccgcatccactcactacgctgcgccctacgtcgccgtccactacgagcaaatccccgctcctacagtcgtcggtcccgttgcgcccgcccctgtacccggcgtatactccgccgtgccgcaatatcaggcacagcagttatttgagagggatgcgcagataataacgccggaggctctcgagaatgtcaaggcagcgattgcaagcagcgacgtggagcacataaccgatgccaaaaagaaagcggttcctcgcatagctgctggccacgctt

SEQ ID NO: 11027 - DNA, 422 bp, Glycine max
  modified_base (393)..(393): a, c, g, t, unknown, or other
cccacgcgtccgagatcagcaaacccatttcaaaatccatgccttggatcttggaaacggctgacttagtagacgaacaaacaacaacaacatccatacttttcaaatttgatgaaacaaacactagaccctctcaatcttccacttctgactcttcttcgattttctgaagcattacttccctgagctcctggaacccgaaacacagtttcccctcttcgaattcaactccaaatccaaaatattcaacctcgaaacccgaaacccgaaacccctaacattagttgagaaggaacctcaattgaatcggaaacccaaacctcacattctgagcacctatgtcttggtagcaaccaaaaaaccgagaatgtcgatctcaggtctgcgactaanaaatctcagagctagtcgatgttggctcc

SEQ ID NO: 11028 - DNA, 250 bp, Glycine max
cagaaaggcccaatcgaaggcaatgaaagtagcgaaaaagttgaaaaccagtgagggtggcgggctattccaacgattcgaatccggttggtgactctaatctcaacgagaagtttgtctggcgcaagaagattgagcgcgatgtttcacaaggtgtgtctattgatgcgttttcaatgaacgcagagagcaagaaacagagagacaggtttgctgaatttgaaaaagctactcagtgaagagaggaatg

SEQ ID NO: 11029 - DNA, 242 bp, Glycine max
cacaaacgtccaatcgaacgcaattaaagtagctaaaaagtcgaataccactgcgtagttttctattccaactattctaatccgataggtgactctaatctcaacgagaagtttgtctgtcgcacgaatattgagcgctatgatacacaaggtgtagtctatcgatacgtctgacatggaacacattcatggtatacgcatgccatataggatggcgtgaaattgaaacaatgtataaccga

SEQ ID NO: 11030 - DNA, 401 bp, Glycine max
caaaaatgcaatctatgtccctgacgctgagcaagaggctctccaattcaaagcctcgcttcagaatctcttccaacctcgtcgctcacgcatcctccgccacaacctctccgccgccaccttcgccgccagtcccctctccatccgccctcaacagcctcctcaccgctccgtggtccgccactcagtcacgcggaatcacgctctctggatctgatgttcgagtcgggaatctcattggaaaccgaggacgcgctcacgaggttctcaaactgtatcgccctcttgaaggaacgggcaaagccactcttgaggttccgcctcaaagtgtagctggttatgccacagttgctactacagaggatggcgccgaaagggaaggaaccgaacagtggattgag

SEQ ID NO: 11031 - DNA, 326 bp, Glycine max
cccacgcgtccggatctaactcgtcacagacagatttccccacaatttcttcttaacgattgtaacctgattgcggggaaaaagattgccctttattgattttttttgtcaaataaaattgtgtataaaaccatctgtgatctgggttcttttgcgtattttagtttttaaagggaaattgaggattttggtactgattactgtggaacatggtggtttttcgatctgggttcttttaaaaatgggctctttcgcgcatttagtgactttttgcatggaaaattgacggtaccggtactgattactgtggatcatggtggttttag

SEQ ID NO: 11032 - DNA, 426 bp, Glycine max
cccacgcgtccggcgataataaccagaattttcgagagagaaaaaaatcaagaactcggaatgagggttttctctcagattcgtgaaaatctcgaaagaggaatacgatttaagccttaggtcgattcccttaagatcaaaccctaaatctaatattctcccttcccaatttatttcagagaaaaaaggaatttagggtttcggtctctctttcccggtgccggttttcacgatcagcgatacgactttattctcgaccgttccgtttgaaatcgttatagccggaaccgttaggcctagggtttcgttaagatgaacgaccaatcgcagatgatgatgaatttgaaccagatgagccagcctcagatgatgaatcaggtgcagattataggtcagtcgcagcctcagatgctctcgcacaatcag

SEQ ID NO: 11033 - DNA, 431 bp, Glycine max
gttttcgcattgttatggagaagcagctcagcttcatgggaagtgaaaggaagaagaggaaggaatcacctgggaaacgtggtgacttaccaattcatttagcagctcgggcagggaacttgagtagagtgaaagagataattcaaaactattctaataatgagacaaaagatttgttggcaaagcagaacctagagggggagacccctctttatgtcgcttcagagaatgggcatgctttggttgttagtgagatacttaactacttggacctgcaaactgcttctattgcagccagaaatggctatgatccattccatattgctgcaaagcagggtcatcttgatagttttgtttaaatttcagccaaactaccatgggtgagaagcctggaggtgctgagagaactactgcactcctttcccaacttg

SEQ ID NO: 11034 - DNA, 356 bp, Glycine max
acctttcactccacgaaatcaaaaacaagtgctaagaagctccgtgtctctattctggaacatgtagcaccaaacccaagttggcatccaagttttataacactaatactgcatataatattattataatatacataacaacagttattgatattgttgtgattgtgtgtgattttggtgtcgtccctttttcttatgtttaaggttgtacggagtttatgtgttgattcaattcgtcgataagaaaccttagtttgatattttgattggttctgtggagagtttttttttcttaggtgtggattttggtttgtgctgtttttggttgcgaataacaatggccgatgaaggaaaca

SEQ ID NO: 11035 - DNA, 383 bp, Glycine max
aatgggtcacccatcactttttctcgtgcagcttcttgttacctctctcctctttctggctgttgattatggattcggtagggtggaactgacggagactcatcaggattttcccattcgcacgattgtaaagtatgacattgcggattattctgatccacagccaaataccaatccaaagaatgggtatgttttgagtcctccttcatctccaactccaattcatcctccaagtccttaaatggaagctcaagattggactttcaccacttgtttatgtctttctgaacggttttgtaactggggtagtgtgtgatcgcttccagtttgacacgggattcgtagaattaggatcatgatacttgtgttgctgtgaatttata

SEQ ID NO: 11036 - DNA, 372 bp, Glycine max
ctccgcaatctagccaacacaacccgcaatttctgaggcttactccctctccgctgggcttccttgccttctcaaggatctaagacccaacatcatataccaacacctctcaaccacaccactaaccaacctaccttcattcccatacatctcacaatctcactcctgctcacatcacctctactgccctcgtccctattacttctcttatctctcttgctcatgacaacataccagcgtccagatacgttcaatgtcgctaacgccggttgtcaaaatttcttccggctattccgtgcaagtaagcctatttgtgcccactgaagacttcaacctcgcactgataactcttgatttggaatttgttaaaaa

SEQ ID NO: 11037 - DNA, 314 bp, Glycine max
cttaacccacccaaaccccaaatctgaaaaccgtcctattcgtcgttcgaattaggggcatgtgctgaactggaacaaccagatgccagcgatttgagcgatgcacagtcaagaagaagctgcgtagtgcgtttgcgtttcgttcttccaaatggcggtttccgacagtcccagcggcggctccacgccacctcatcaggaacaacaagccaacagcaagtacggtttcaccaagcccctctctctcgcgggtcccaccgacgctgatctccagcgtaacaacgatttggacaagttcttgctcggatcgggtc

SEQ ID NO: 11038 - DNA, 417 bp, Glycine max
cccacgcgtccgcccacgcgtccgcgggttcttccgatttatatttttttccccaaggcgggggacctccttcttcttctagcgtagtttttctcttccatcttcattcgtttcttttcccttaacttccaatcttttagtttcaaaatctctcttttaatttcgagaattatgagacccgcggttgaaggatccatggccgagaggtttgacgactgcgaaaaggagaagaagaagaagaagcgccgatccaatcgacgatccaagcaaaaccctccctcatcttcagcatctgaagtgaatgacgcccaggggttgtcaccagattcatggaaaattggaacacctactcatgcttctccatccttgggcaattcattgtaccaggtcaatgtgtgttcttctaatgagcaagga

SEQ ID NO: 11039 - DNA, 171 bp, Glycine max
cccacgcgtccgcccacgcgtccgaaaaaaaaaaaaaaaaaaaaaaaaaaaaaaaaaaagagagaaaaaaactaaaaataataacactatatataatctaaaattcaaaattccttacatatacattaaccaaccaatctattattatacctaatactccaatttcaattc

SEQ ID NO: 11040 - DNA, 347 bp, Glycine max
atttgacaacgttacgtggtgccgttccatgatttatgaactatgacccttcttgtggtcgtaatcttgggttccaaaagaacgagaagatgaacgttgatctggaatcattggcagaggcaacttctgtatccataggatcactgatcagcaccactattctctacccacttgacacctgcatgaccaagtaccatgctgaggctcgttcctcaggtcgaataaaatacaggaatctcactgatctattatcggaggcaatatctaaccgtcaggcgctttcactttaccagggccttggaacataaaatctccaatcctttattttacaatcattctacttctat

SEQ ID NO: 11041 - DNA, 422 bp, Glycine max
  modified_base (249)..(249): a, c, g, t, unknown, or other
gggccctggggtttccagctctggttacgggcctctatcagtcctacagggtgcccgtgacccacccggcaaggtcacgtcatcataggtaagtatgcacatcgctcaactgatttctgatttcatcttttgtttgcagggatatcgcctgcaagacacccagtggacccgaagaagtccaacagggtcttggagttgtcaagctctaattacgggtctctgtcagttctacggagtacctgtcacctncagcaagggcatcaggccccctactaatcgagctttcatcaagaagtactgcgtccccagacaggcgcagggcgaaacaccacagcagcattgggatggccggtagcgggcaatagacacaccgtcaccacctctaaagttcacctcaactcatccataaaaagggtagagtg

SEQ ID NO: 11042 - DNA, 396 bp, Glycine max
cccacgcgtccgagcaaactcaaaaaaatcaaaaaccgtaacgaactcttccttccgagttcggagttccgagttgggcgactcagcaccgatggacgagtcgggttcagcctcctctccaacgcggccggtgacaatcgagggcggcgagtgcgacgcggcgttgtcgaagtcgcgggtgctgacgcgggaggaggtgctccggcggcggctccggcgagtgaggcagctggggcggtgctaccgggcccactactgggccctgatggaggagctgaggtcaaagtacagagactactgctggacctatggcaaaagccccttcaaggaggatcacgatgacaacaacaacaacagcgaccaaaacggcgtcgcttctggtggcgactatatcgt

SEQ ID NO: 11043 - DNA, 421 bp, Glycine max
  modified_base (414)..(414): a, c, g, t, unknown, or other
cccacgcgtccgcccacgcgtccggagggagagggcatgggaatccgatcggtattcgatggcggcgagctgagaagggaagtggagaaaagtggaattgacccaaaattcattccaaagatatggaagcatatcctcatctctgccaaagatgaagattgggattgggagaaacaagttccctccttgccctcttcggcctactctctccttcgttccaacttcaaaacccctctctcttcctctattcactccgttttccactctgccgacaacctcaccaccaagctcctcatccagctccaccacaatcatggacctttcgtcgaggctgtcattatgaggtacgatactcgtttgggcaaatatgccggccaacctcgccccggtggtctcagagctactctgtgtatntcttctc

SEQ ID NO: 11044 - DNA, 131 bp, Glycine max
ctttgtctttgtgcacacatgagttatgactacttgtttagtttatgcacaacgaaggaagcaaagacaaaaatcttgattgttgaaattttagatgataaaaaatcacttggacagttatgaataccatt

SEQ ID NO: 11045 - DNA, 358 bp, Glycine max
aaaacccataaatcctctcaccaaataaacctcaatttattgcattgcataataccatgtcaatgaagttgtatgcttccctcacccttacggtgtggcttttcatggccacattttcgcgagcccaatacgttattgacacaaatggcgaacccgttgacaatgatgatgagtattacatcaggccagccataaccgacaacggagggcgtttcaccttgatcaaccgaaacgggtcgtgccctctctacgtgggtcttgaaaacaccgatacgccactgggttatccagtgaaatttacccattttgccctcaacgttcaagatgaggatataaaggtgaacagcgacttgagaat

SEQ ID NO: 11046 - DNA, 431 bp, Glycine max
  modified_base (311)..(311): a, c, g, t, unknown, or other
  modified_base (339)..(339): a, c, g, t, unknown, or other
  modified_base (388)..(388): a, c, g, t, unknown, or other
cccacgcgtccgcccacgcgtccgatttttgattagaggtggctaattgtctgaaatatgctcttattaagtgcaccacatcctgcttcagtgcttccttgggcctcatattttatgttttaatattgtagtaagaggtacaatatttggcgctttatatattattcttggaaagcgaatctggtttttccctaacatccttgccgaggaagcaacactgcgggagttgttcagattttggcctaagaaagatgaagaggaaaagcccaagtggacaacaagacttttctatgctggggtagctgtgctgntcatattattgctgaggcatcatgcacncgatgaagctgccagaacaaggcaggtcctaaatatagtggatggaatntatccatccattttcagcttaaattcctttctagttggatcta

SEQ ID NO: 11047 - DNA, 432 bp, Glycine max
gggaactcgaacaaatttctacaagaacccatcaatctcctacaaaaaacgtttaagcgtctgctccgttcttcagaacctccatgcttacaacatcgccgccggcaatgttcctcccgccgatccaccgcaagcgacttccaccgccaatgttcctcccggcaatccaccgcatctcactccctccgccagactcaaacgcagccggaatcccgagccaccggaatttctacgcgaataccgtgacgatgccccttcctctatgtcacaccacgattacatccaaaacagaaggaaagaagtcgtttcgtctcggaatcacgatcgcgttgaattgactgaagaagttttgggaaactctaattctactcttcccttggtggattatgatgcatgtgatgaagatactccttcagaatgtgaagaaacaca

SEQ ID NO: 11048 - DNA, 437 bp, Glycine max
  modified_base (4)..(4): a, c, g, t, unknown, or other
  modified_base (13)..(13): a, c, g, t, unknown, or other
tcgnccacgcgtncggtgcatctcagacatggatccagtgccctagaaaaacagattaaaggatgtgtgaaggaagttcaagtcgaattgtcaaagccaggttttaattcctttggtctgggagactgtaaagcccccaaagtccttggtgacattgttgaatctattgcaagtgccatttttcttgacagtgggagggacactactgttgtttggaaagtttttcagcctcttttgcatcctatggttaccccagagactctggccatgcatcctgtgcgtgagctgcaagagcgatgccagcagcaagctgaaagcttaaagtataaagccagtcgtattggccatttggccacttgtgaaatattcattgatggggtccaagtaggggctgctcaaaatccacagaaaaaaatggcgcagaaattaactgcaag

SEQ ID NO: 11049 - DNA, 392 bp, Glycine max
gaaagtcaaggcgaaagtagtgaccgaaaatatctcctaggtggtgaaatgtcaaagatgaggaaccatggaaaagaacttgcttatgaaaaagaactttgtcaattgtcttttgcaatatctcttagtttgcaaggtctggattgtgctaaagggaaagcttgggaggttaagagagttatgttgtttttataaatatgaataagggattattgggaggtttcgatgattatctgttatttattttttcattctgaaaaagtatcaatcgtgtaaaaaaaatgtgttttgtttcgtttgtcattattgtagtgtttttgaagagcacggcaaattgttcaagctatatctctattgatatcaatttattttaaatgaatgacatttgcaac

SEQ ID NO: 11050 - DNA, 432 bp, Glycine max
ggtgggtctagcagtagcagcaaggacgcccaagaccttttccgcgctctttggtctgcttatgcttcaaccccaacaaatctcaagatcattgacctctacgtaatctatgccgtcttcaccgctctcatccaggttgtttacatggctttggtgggatcatttccatttaactccttcctatcaggagtactttcttgtgtaggaactgctgttcttgctgtctgtctcaggatccaagtgaataaagataacaaggaattcaaggatcttgcacctgagcgtgcttttgcggattttgttctctgtaatttggtgcttcatttggtgatcatgaacttccttggttaaattggttcgtgtggctgttgttgttttcgattgaacccttgaataataaaaattagtagtatacctagactttttgtaata

SEQ ID NO: 11051 - DNA, 433 bp, Glycine max
caaggacagatttctccaaatttaaaacaagaattggacattgatgattctactgaagtttgtgggcgcaattactctacccaagagaatgatgatttgattgtgacatatttcaatacaagtattgctgattctgaagctagtgaggtctgtagtcattgtatgcgctgtaattgtgtccttcagagggagacaaactataaagaaagcgaagttgcagtgttgctgagcagccataagaagctctatttgctactaatcaacgttgattctaatgggtcaggaacacttttgagtgtattgagttgccacaaaattgaagaagtttgtgaggtgctagtaggaatgggacttcaagtgttaagggtaaattttgagaatggggaaacgtatctttttgtaacaagaagcattgagaaatcaagagaattac

SEQ ID NO: 11052 - DNA, 340 bp, Glycine max
aaaaaaactaaatcccaaaaaactaaaaaaacaacaaaaaaaaaaacctaaaaacggcagtactattaaaatatataactaacaacacctacctaaaaaaacaaaaaacaaaaaaaaaataactcctcctccctgacagacccccattcccctccccgagaaccttctgcataatcatgctccattctcccacttgtatcatcatcgtcccatctacccacaccacactttccaaggaatccctgaaatccccactgtaatcctgctttccgctgaacccgctattcccatcaatgtacttctcagtcagccccctcctgttctaccgttcacatctata

SEQ ID NO: 11053 - DNA, 432 bp, Glycine max
tgtgaaaactgcaagatttaaggagttggctccttatgatcctgactggtactatgggagagctgcttccatggcaagaaagatctacttgagaggaggacttggtgttggtgcctttcagaggatttatggtgggagcaagaggaatggtagccgccctcctcatttctgcaagagcagtggtgctgttgctcgtcacattcttcaacagttgcagaacatgagcatcattgaactggacaccaagggtggcaggaaaatcacttccagtggccggcgggatcttgatcaagtggctggacgcattgtggttgcaccttgatttgaaaacgccataagcatattgaggtttttggtttctggttagagagatgtgatgataacagattatgctaaagttttgattttagactgtcttttatgtatcggaca

SEQ ID NO: 11054 - DNA, 421 bp, Glycine max
cccacgcgtccgcttgaatccctccctctctctctctctctctctgactctgtcactcgctatttctctcttctccacgtctccaaattcttaatgtttatggaatggagtctcactcttgattcctctcactcttcctcctccaccactaaccacaacatgttccccactttaggatttccggtcaaccttagcccctcctccgatcacaatcggacggtcctcggtgaagttgacttcttctccggtgctagaaacatctcatcatctcacaccaacaacgatcatggaaccccccttaagtgtgatccccatgtaaatactggtttgcaacttctcaccgctaacgctggaagtgatcagtcaaccgtggatgatggggcttcatcggatgctgaagataagcttgtcaagatcactg

SEQ ID NO: 11055 - DNA, 433 bp, Glycine max
tgcttgcttactattactaaagtaggggatgactgtattgacttatgtaggccttggcaataatagtgttttttttgtcagtagaagactattgaaccatattagatactctttttcccataatagaagacttattcagcccaattggaacttcattatggtttgaaaattttattaaatcattaactgaaattggtcgcatttatattaataatttatatattacttattttaatgcataggatgatgagaaagggaaatcatagatggtgcttgaaattattggctgacaaaaaacaagtggttgcaacatgcctgagaatatacatgatgaaatgaggcctaatttattgatgcgacacatatggtggttgatctgttccatttccatgtacattttctaaaacttagttaaataatcttactataaact

SEQ ID NO: 11056 - DNA, 422 bp, Glycine max
  modified_base (416)..(416): a, c, g, t, unknown, or other
ctctctcttatctttccatttcgccacttccttctttccttgcttcccatgacttccgaccagatatgctaaacatggaaacaaacttctaacctccttcagatctacaccacccttgtctttttttccagtttcataaattctacaccatgggcacggaggttctacggccacaagattgtttcacccaccgcatcactgttccaccggctatgttttcccagagaagaacctctgggacacacaacaacaattacttcaggggcacgcggaagccggttacccgacccgaacagagaaaacgggttgtggagaaaaggcccagcttcgatgattcgaggttttcgaggttggagatggagaaggtcaccattctccggaagggggagtcgctcgattcgaagctgaaaaccggngctttg

SEQ ID NO: 11057 - DNA, 410 bp, Glycine max
cccacgcgtccgcccacgcgtccgcccacgcgtccgcttccctcacgaagaaggtggaggattgcccagattttgtcttttcctgttcttttatggccaaatgaaagaaagtattctctgaagtaatgaatctgtgccatgtttgaagtagttgatgattatgatatcatacatacttttggatcaattgacatgatcatcaatgcccggcttttaggttcctacaggtcttgatcactaattatctgcaaaatatattcagaaactcaatgactgcaaatacgagtatttggttcatattcagtatccatcggtcaacctatgtatgtactgctatactaccatgacttgatcaataggataggcaatcttgactcaagctatggccattaccttttactggtgcacat

SEQ ID NO: 11058 - DNA, 428 bp, Glycine max
cttcttttcaccactcaagagcttcagcgggttaaacaagaacttgccatgacttgtgatgcgatgaactaggcatggaatcatgctgatgatgcaactaaaattgccgagattcatgcatagaaagcagagttcatatcatctgaatcgttgcgactgaaggccttactagattcaattgtgtaaacagaggcatgagtgaatcacgttatatggaatcttagagcagatcttgtagctctcacggcagcacttgcttaagcagcacgctacaacgagtttaccgcgagacagagagagaaaacatggatgaggtgaataggccaacctgagatgattcgaggttttgaaggttagagatggagaatgttaccattctccgataggaggagtcggtcgattcgaagctgaaaaccggagctttgaag

SEQ ID NO: 11059 - DNA, 414 bp, Glycine max
attaattatagcatcaatggccgacgcaaagaaaattttttacccaaaaaatcgaggcaggaaaggtactagttcctctcatacagaaactacccagaaacaagaacgcaagtttaccatgaaagatgtttgctattactcccaaccaagcaatattcctcctaaggattctgattcttcaagccagcaacagcaagcacgcacctttaccatgaaagacttttgctattataccaaaccaaacaatcctcccagtgtttccgatgcttcaacctctagggctggaacaccattacccactattaaaaagtcttttgctcgcaggacttggagctagtggatgaccacaccaaattattcctcatatctcatcatcaaccttcctagttcttagcaatattcaccacctactcg

SEQ ID NO: 11060 - DNA, 344 bp, Glycine max
ctgccctgtactccgtgtcctgctttactgctggaaaatatgggaatggcaatccgtatccggccaacctaagtgcagctgttggtttaagtggctggcttccatgctcaaagaccttgagtaacaagttacaaggggtagatgaagctacaaggcgtgctcagtcctttcctgttttgctgtgtcatggaaaagttgacgatgttgttccttataagtttggtgagaaatcatcgaagtgcttaagttcaactggatttcaggatgtaacttttaaagcttataatgggcttggacactacacaattccagaagagatggcatgaggttgtgcttggcttaca

SEQ ID NO: 11061 - DNA, 346 bp, Glycine max
gagcactccaagatccctagtatgcatctacatgctgtgcacattcttatgccacagatgaggattacccgtgaccgagataccagtcagcgcagtcgaagtctccgtcggagtgcttgacgtaccggtctccaacaacatacgatagcaaccatggatatttcacatgatgatactgatctccaccttctgacaattacctctagctgcacgttcagcatgatgaccccagaattactacctgctatcaaggctggtacattctgcttaatgataaagattgagcatactttgcgagaggattgttatagcagacttagaagagtatggccaggaaactatgtta

SEQ ID NO: 11062 - DNA, 426 bp, Glycine max
  modified_base (333)..(333): a, c, g, t, unknown, or other
ctaatcttcttctatgggttggcttagtcggttcataactgccgtggctttcttagcgatcggagtgatattctcaccggagacactggggtcaaaatcaaccacactttccacctacctcaaactcgctcacctcctctgcttctccaccgccttcggcgccgctctgtgggtaacattcatcggcggcatcatcatgtttaaaaatctgccgcggcatcagtttgggaacctgcaaagcaagatgtttccggcgtatttctcgatggtgggtgtctgctgcgccgtatcggtggcttcctttggctaccttcacccgtggaaaacttcctncaccactgagagataccaacttgggtttttgctctcttcctttgcgttcaatcttaccaacttggttgtctttacacccatgaccattgagat

SEQ ID NO: 11063 - DNA, 246 bp, Glycine max
acgacagtgattgagcttattactctaattcgactgtactaagatggcatctctggtgcgtctttctactctcatggaaacgggtcactcttccttcgtgatccacaaactggagtctcctctacagccctagtcatgctatactgacgttacacattcatgcgcatgcgtcttggaccatacgacgagactaacctccaactattacagatattctcactgcctccgtagctgcctttgcatatg

SEQ ID NO: 11064 - DNA, 314 bp, Glycine max
gtcactttctggttccctattactcattcttgtcttttctaataattatatcatgtgggtcttacattttgaatatccttattaaaatagactctaattagtcatactgaactcagaatgtcacacattcgctcatgcttgacctgaggctacacagacagagactatgcatcttactaacattaccactctcacttcctaatattacaatatttttactgcatccaaaaatcctactgcatattatacctctaacgcctattgaaacgctgctatgtcaacatattcacatatagaaccagattcttaaccat

SEQ ID NO: 11065 - DNA, 412 bp, Glycine max
  modified_base (240)..(240): a, c, g, t, unknown, or other
ggggatttcgatttccaagaccatgcagttggaaagttctattcaaacccctgggtccagtactttaaccgaaacccctagttctattcacgcgattccgcagaaccagagcgtcttctccagagaattgaacttttctgagtatggtttcgacccaaagactgggaacaatcagaatcaccattctctgaagccggaatccggcgagattctcagcttcggcgagagcaagagaacctnctacggcggcgtcaatgggaattccaattccaattcccattttttctccggtcagtcgccgtttgttgctgctgcggatgagaacaccaacaaaaataacatcaacaacaatgggaagacaaagtcaccgaattcgcgcggtagcaacgacgacggaatgctttccttcacc

SEQ ID NO: 11066 - DNA, 387 bp, Glycine max
gggaaatctcttcttcaatggcggcagagtcatctcgcagtagcgctaaacgcccgtttatggaagaagacgacaatgaattctccaaaaagccaccagaaaaaagggttaggtttccaaagggaaagaaagtgaagccaggagatgaagtggtggtggacaaagcaaatgttgaggagggtgaagttgacttggtgaatgctaaaactgccaccaatgctgcaaaagagcgggaaaaactcagaaggtttctaaagggaaagaaagtgaagccaggagatgaagtggtggtggacaaagcaaatgttgaggagggtgaagaagttgacttgatgaatcctaaaattgctgctgccaaagaacgggcaaaactcagaaatcaaatta

SEQ ID NO: 11067 - DNA, 411 bp, Glycine max
  modified_base (356)..(356): a, c, g, t, unknown, or other
  modified_base (380)..(380): a, c, g, t, unknown, or other
attttagtatcacatagactatccaacgtggcaaattgtcccagattgtgacacgtagagtggactttgatacaaaatttaaaaaattgtcaaatattttcttcttcacttgccatagaatcttctattttattttgtctgaaaaaaatcccatattttagttccatacagcaacaaatctggcttgaagtttttcttatttatttcctataaaatattcattgcctttctccatcatcttagccttgatatatccatgaaaaagggaagtataaatatgttgattaagagtccatccagcttttaacaatgccccaaataattcttctgcctctctcattcttccatcttcacanagaccatccagtaatgcagtgtangtgacgatatttaagttaactccaacctact

SEQ ID NO: 11068 - DNA, 88 bp, Glycine max
aaaaaaaaaaaaaaaaaaaaaaaaaaaaaaaaaaaaaaaaaaaaaaaaaaaaaaaaaaagagaaaaaaaaaaaaaaaaaaaaaaaaaa

SEQ ID NO: 11069 - DNA, 80 bp, Glycine max
aaacaataaaaaaaaaaaaaaaaaaaaaaaaaaaaaaaaaaaaaaaaaaaaaaaaaagagaaaaaaaaaaaaaaaaaaaa

SEQ ID NO: 11070 - DNA, 422 bp, Glycine max
  modified_base (211)..(211): a, c, g, t, unknown, or other
  modified_base (322)..(322): a, c, g, t, unknown, or other
  modified_base (349)..(349): a, c, g, t, unknown, or other
agccttccgccaacccttccgcggagttaaaggaaaaattttgattgggaagaaggaagggttgggttgcaaaattgaaacccaggggaatcaagtgttttgcaccaagggtggtgatatggagttgtggtcggaggttgttatggggtctgggaacagtgggaggatcttcaagaagaacttgatggggagagtgagggatatgggtggngccaagattaccaatttggcctttggagggagcaccatgttcttgactaggaaggatcaacaatgtgttgaagtgtggcagagttcttctaaggagttttgatgagtttgntactttctttcttattttattccaaanaattgaagaatagttaccttgacaaagagggttggtttgcttgcatgcttgtaatgaacctttgctggcgtgt

SEQ ID NO: 11071 - DNA, 411 bp, Glycine max
  modified_base (359)..(359): a, c, g, t, unknown, or other
ctaaccttgggcacaggtaaccaacaatggcggcggcggcggcggcaaagcgttgccacggcgaagtcctcggcctcccccgcgactgcgcccccgacgagatccgctccgcctaccgccgcctcgccctgcagcgccaccccgacaagctcgtgaaatcgggtacgactcccaccgctcccaaatcctcttctccgaccccaacaccgtctccaactccttcgtccccgacctcttctccttcttctccaacaccgtctattccggctactccgacaccgcaaagggattctacaaggtctattccgatgtattcgataaaatccacgccaacgagatcaatttcgcgcgtaaattgnggctgggtgttgatgcggttagacaggcgcctgttatggggaacttggacag

SEQ ID NO: 11072 - DNA, 411 bp, Glycine max
agcgaatgatatactatgtaacgtggatgattattacatactatgaacacttgaacggtgactttaatgaacaagtctaaagcaattatcaaaaatatgcttcttaacttaccatagactcttatatatcatattgtcacatgaacatcccatatcataattccatacatcaacaaatctcgcttgaactttatcttatgaatcatctatgaaatattcattgcatttatgcatcatcttacactcgatatatccacgaaaacggtaagtataaatgagtcgattcagagtacatccatctactaacaatgctccaaataattcttctgcctctctcattcttacatcttcacaaagaccattcagtaatgcagtgtaagcgacgatatttaagttaactgcaacctactg

SEQ ID NO: 11073 - DNA, 415 bp, Glycine max
cccacgcgtccgcccacgcgtccgggaagagtgaaaatgaaaatgagaagggggtcggggggaatattgaacacaacacccactgcacagcttcataactaaaccgccatcgcctccaagactttccgtgcccaaaagatgagaaaacgcagcatttacgcatggctagtagcacttgtttgcttcctcctactcatgatcgtcaccccagccattccccagtcacaagaataccatgatttcgccgaccaccgcaccttcctcggtattcccaatgcacttaacgtgatatccaatttcccttttctgggtattggccctcgtggacttgtactctgtcatcatggaaattactttaggctcagcttgcaggtgaactatggggctggacatgcttctatgttggcgtggctgc

SEQ ID NO: 11074 - DNA, 305 bp, Glycine max
  modified_base (4)..(4): a, c, g, t, unknown, or other
acgnccacgcgtacgaaaaaaaaaaaattttaataaaaaaaaaaaaaaaaaaaaaaaaggaagggaaaaataaaaaaaaaaaaaaaaaaaaaaaaataaaaaaaaaaaaaaaaaaaagtaatgcaagattaaaacatcacaaacttaagtaatcgaaattgcaaataaattaatattgtgtaacaactcaaaaattaaatcaattagccccaaaaatagatggtgctaaatggcaaaacctatacatggccgaacttaaaaggattaaaccaaaatcagtattaggaagctgccgtatttgaaaa

SEQ ID NO: 11075 - DNA, 406 bp, Glycine max
tccaattgttgtcgtcggagattaattctccctaattaaaaccctaaacgcgtcttagattgaactcaatcagagacaaaacagagctgatgattctgttgctaaacatagcacggtggacaaacgttaaagaaggctacagatctttgattcaggtgaaagcagattgaaggggagtaaaacaggaacagagcaacctgcataattactcaatcgaggtgtcatatacttgatgtatttgtgtatacaatctctttgaactgtgagagaacagccatggacagactcacgaacacattcaggccagggtcattgtcttacactgctatcactgccagcaccaccaccactataacagtactgaactctgagccatcatcctcttcatgccatgaggaacaacagc

SEQ ID NO: 11076 - DNA, 408 bp, Glycine max
accaaacgtcgtggtatattctctacaatacttaatcaaaacggtagacacgaggtggagataactcaatcacagacacaactaatctgctgattctagcgctaaacatagcacgctgtacttacgttaagaaaggctacagatctacgattcagttgataactgattgaacgggagtaaaccatgaacatagtaacctgaataattactcaatagaggtgcaatctactagacgtatttgagtatccaatctctatgaactgtgagagaacagctatggacagactctcgaacacattcatgccagcgtcattgacttcccctgctatcactggcaccactaacactaccatatcaacactgaactctgagccatcatcctcttcatccaatcaggatcaacagcta

SEQ ID NO: 11077 - DNA, 341 bp, Glycine max
aaaaaacatacaaaaaaacaaaaaaaaaaaaaaaacaaaaacaaaccataaaaagggctaagatacactaaaattctatctctcattacattataatacaatcagattgacctcttcctttattgcctctatttaacattttagactaataaagacgcctctaaattcatactatatcattgcccaaaatttattcatctctccccattcttattatcttcaaatgtattaccctcctgacatacataccaacacggtgtatttagcacaacttatgtaatcattccatgctgtgaacatatcaactttcaataataaaacattaacatgaatatcgacaa

SEQ ID NO: 11078 - DNA, 286 bp, Glycine max
ggtacacacacttgtacagactttcttacggaacatattggcgctaccatgggcgggaactttcaagtcatggtcaagggaatgtacgataaatgcacaaaataccctgactactcacttgactcaaactttgagggaaatgtatcagattcttcatcacactatgcttgcaccattgacatcacattatacatcacatcatctaatggagcatgtcacagattattatccacatggtgaactgcatatgcaacttcataaacatcttactaaaccagcatcgagg

SEQ ID NO: 11079 - DNA, 410 bp, Glycine max
gccacacgtccgtggaaacgttgcgcgacgcacctacaacccgacctctgctccggcggcaccacactgtccgccaaatggctctgccacacagctcacaacgcgcccccgtcgggcgcccctgatcgacaacaccctatccacaccggcagaggccgctcactcttccgtcgccgacgacggcgacgaagatccctcggaggcggcttctgctacgagcgcccgcgtcttgccggattccctccagtacccgcccagcttcatcagcgcgattcccgcacgctcaccgtccgacggcagcggcgacgggattgatgccatgacttatgtgacgaacattctctcttcgatgtgtatgacgtgcgcgattgagtctcctatgcaattggcgccaaagctctctgcgagac

SEQ ID NO: 11080 - DNA, 407 bp, Glycine max
gcgatgttgtcaaacacaattcaaatgttccatcccaggtgttagacgttgctgggtgtcttgcaaaagttgcggatgtggacagaaatctaggggatgaaaagttagctactgatggatttcaagaagccatagacttactggaatcactcacgttgaaatctgaagctagtgggctcgagcaacggcggcaatcaatgctagacttccttagaagccaacttccagataaacaagaacaagctgaggcaccagtctgagataggtggtccacatgaagaaaggaaacacagattccgatgcaataaggggtttcggtatgccgtgggatgagtttgtaaaataagctcagcttaacaaaggcactactaatggaggaagaggagatctctgagtaatgaatattc

SEQ ID NO: 11081 - DNA, 295 bp, Glycine max
atttatgccataagacgaatctactttgatgttcatacactcgttggacccgtggataagatgaagtaaaagtactattacccttgtaataacacaatctgcacttagtggacactggatggatgctatctcattacataacacgacggctgcgaataagtagctataacccttttcacgaattgcacattgtgttattacaagggtactagctctatgccttcttgcatgtcctgattcacatgatgaatccctcgtcgtggattactggtccacatgctttactgaggcgcgt

SEQ ID NO: 11082 - DNA, 403 bp, Glycine max
  modified_base (397)..(398): a, c, g, t, unknown, or other
gttgaaacctctgccaagagaatccaaccttaatttgaggaccaacaatctcaaagaacagagtccatagattgagggaatatggtagataataatcaatatctcttccagggcagttctgattaggtttacttggttaacagcccctagaactagaagtgtttgttgccaccacctgcaataatgttagtgttagtttgtattctatattgctcaagtgcgcctcgtatttctgtttttatagaaaaacttgtacatcttgattgttattgtggcttgaacgtatctatcttgacttgacataaatacttttctatttttttgacgtatatgtattgtttgattatttctgctgcaaccttttatttatttatttgttcatgtaaaaaaaaaaatnnaacat

SEQ ID NO: 11083 - DNA, 412 bp, Glycine max
cccacgcgtccgcccacgcgtccgcccctgcgtcgcgaacgaatgaacgaagagcggagaacgacgcatatccaagactgaaagtttctagattcgtcacctgcgagaggtggagacatattttgtgataaccctatacccaatttggagcagtggtttgaaaagttttgggattgcggaaagaagtttgattgaaacatgcttcagattcggcttagtaaggctcctgcatcagaagggtcggcaggggtgaagctgtcgccggttgagactgttacagttgcgtgccctgaccatctggtccttgctgatcttcctgttgcaaagggcattggtgcggccactactgcctaccttgttaagactttgggccgtatgtcccgccgccagcttggcgagcgagtccatttct

SEQ ID NO: 11084 - DNA, 379 bp, Glycine max
tatctttttgaccctcaaaacaaagtgaagcatatagtagaaaagaaacgaacacgggaatgcaaacgcgcgcagcgttgacaacaacaacaaaaaccaattaaccgaacatgaattcctattgggacaccggcgccggcggtggcggtggcgcgacgctcatcccgggtctcccaaacgacgtcgcggcgtcgatcctctcgatggtcccctactcccaccacgggaggctcaaagccacatgcaaatcatggaaactgcttctctcctcgaaatttttcttagcctcgctgaacggaaagaaccaccttctctgcatcttcccgcaagatccttcaatcgcttcaccctttctgtttgatccgaacgcgctcgcgtg

SEQ ID NO: 11085 - DNA, 412 bp, Glycine max
acggtcatgcttcttccctctctctgctcttctctgcctctttgtcttccctctctttgcctggtctttgagtctttctcttccctctctctacctctttctcttctcttcatttccgatgttgcctcaattctcagtaaaaggagttcgttggtaccacacatacaaacgacgcatccttctctttctttcggcttcaatttctctctcctcttcctcctcaactcgatcccaattccactagggttagggttccatcaccctttccccttctcaagctttcctcttttatccgctattgttttcgcttattaattgatcattctttctcgttctgctcttttttggtgaatctaggattcaattctgatgcgattccgagcttgctagatccacgacaaggttccatttc

SEQ ID NO: 11086 - DNA, 408 bp, Glycine max
cccacgcgtccggcaaacttcaacttgtaatcaagggagagagaaaatttcaagcgcagaaaatggcggagaagaaagtggtgatcctaggaggtggtgttgccggtgccaaccttgcaaaaactatacaacgtcaagccaacgtcacccttattgatccgaaggaatattttgagattccatgggcaagtttgaggggattggttgagccaacttttgctgaaaggatagtgatcaaccatagagagtacttcaaaaagggtaaccttgttgtatccagtgctgtcaacataactgaaactgcagtggtgactgaagatggccagcagattgcctatgactatcttgatattgccactggacacacagaaccaatccccaaaaccaggagtgaaagacttgaccaat

SEQ ID NO: 11087 - DNA, 402 bp, Glycine max
  modified_base (365)..(365): a, c, g, t, unknown, or other
tggacatatgaatgcaagaatgaacgggtttacatttcgagaccatcccggacccggcaacttaaaaaccctaaattgagggtgaatgtgtctgtgacttatgatttggatgataacattcctgatgctaaggtggaaaaggcaaaaacaagttccaaaaaaaccaaaaggaagcatcggaaggactctgattctggtagcgatagtgaggattctgtttttgagaccgatagtggcagtgggtcatcatctgttacggggtcggattattcttctgaaagtagttcaggttacagttcatcttctgattcagaggaggaacggagacggaggagaaagaagaagcagaagagaggaagacgcangaggtacagttcatcagaatcatctgattcagattct

SEQ ID NO: 11088 - DNA, 343 bp, Glycine max
gtttgccaatcaaaggtgatttgattgaggccaaagttgtgcatgatcaactttggtcaatggctgagagatctgacagtgagctgttgggtccaaacaatcaataccttccaaaaatagtttcagtgtttgctgaggttttatgtgctggtaaggaccttgcaacagaacagacagctggtcgtatggttaatttactcagacagctccagcaaactttaccaccctctacacttgcttctacttggtcatctttgcagccccagcaacagcttgcattgcaatctatcctttcttcatagttttaattgctttgctgcatatccatcattccttaatagca

SEQ ID NO: 11089 - DNA, 394 bp, Glycine max
cccacgcgtccgattttcttctactttatcctcatgaagcaactattgaaaacatatatcatcattgggagagggtgtgccttgttgacattggagaacaagctgttattcccgaaggcatcagcaagcatgtgcacaggagcagatattttattgcaggggggatagcaggagctgcttctcgtacagcaactgctccacttgatcgtctaaaggtggtcttacaagttcagactggacgagcttctattatgccggcagtgatgaagatatggaaacaagatggcttattagggtttttccgaggtaatggattgaatgttgcgaaggtagctccagagagtgccatcaagttttatgcttatgaaatgctgaaaaatgtaattggagatgc

SEQ ID NO: 11090 - DNA, 416 bp, Glycine max
cccagccgtacagagcaccctcagcattcatcctactgaagcaactattcaaaccatggggcatcattggcagagggtctgccttgctgacattggagaacaagctgatattcccgagagcatcagcaagcatgtgcacatgatcagatattttattgcaggatggatagcaggagctgcttctcgtacagcaactgctccacttgatcgtataaaggtggacttacaagttcagactggactagcttctattatgccggcagtgatgaagatatggaaacaagatggcttattagggtctttccgaggtaatgtatagaatgttgtgaaggtagctacagagagtgccatcaagtattatgcttatgaaatgctgaaaaatgtaattggagatgctcaagatggcaagtcagata

SEQ ID NO: 11091 - DNA, 329 bp, Glycine max
gtttcagatggacctaatagcaaaactacattacccatatattgtggagtacaaagatgcttgggtggagaaggatgactacatatgcattataactggctatggtgaaggaggagacatgtaagttgggtaatatctgttagtgacaccatggtttttagcttaaattaagtttgtgagtaatcaataattggggattaaagagattgccatggcctattaatatatgttagaaagtaaatgtgttgtgagagctatgtgtatgaactatattggtatagagtttaacactttgtgtgagatccagagtgtgatttacaaatctttaa

SEQ ID NO: 11092 - DNA, 396 bp, Glycine max
atcactacctgcgtaaaaagtgtacttcactaaccattactctgactattactatgtcaaatctgcttcactggcaagaaacatctactttagaggaggactcgcttttcgtgcctttcataggatttatggtgggagcaagaggaatggtatccgccctcctcatttctgcaagatcagtggtgctgttgctcgtcacattcttcaacagttgcagaacatgagcatcattgaactggacaccaagggtggcaggataatcacttccagtggcctgcggcatcttgatcaagtggctgtacgcattgtggttgcaccttgatttgaaaactccataagcatattgaggtttttggtttctggttagagagatgtgatgataacagattatgctaa

SEQ ID NO: 11093 - DNA, 270 bp, Glycine max
aaaaaaaaataaaaaaataaaataaaaaaaaaaaaaaaaaaaaaaaataaaaaaaagataaaaacaaaaaaaaaaaaaaaaaaaaaaataaaaaaataaaagaaaaaaaatttaaaaaaatttaaaaaaaataataataaaaagcaagaggaatgtttaccgataaaaattagattcttaataaattcagttaactagcccttagaattttaaaacacttgaagaacatgtttattgatgaaataaactcttatttttgggtgaatatca

SEQ ID NO: 11094 - DNA, 329 bp, Glycine max
catactcataccatacaaattacctcactgaatggacgcatacgaggcacttattgtcactacgcatactctgcacactgctcctaatctctctcgtggcgactgagccatacaaagatgctacacatgcggaagaaccaacgacacggacagatgcctgtacaactgccgtaagcaccttacatggcggctgtcgtagatatggcagaagctagggacacgcttcaagctatgcacatcctggacactggccacacgatcctgcacgttgtcatgaatgctcataccatcagccaaaggcttacataacctgctaactaataaaagca

SEQ ID NO: 11095 - DNA, 413 bp, Glycine max
gaagagagaggtttctattttacagagagaaactctttagagatagaaagtcagagacaagcaccacaagaagtgcctagcacccaaaaacgacgccacattctggataaaaatctaatcttgatcggtcttagatccattgagtgtgtgcttgcacattatgattatacgtgggtcaacacccggatgagcacacagcagaacgacaagggtgtgaagagatgggtatgatcatgaccctttagatgagtcacatgcccatctagctcactagttccaatcgagttcattatcatgtatgatatgaactatgatcatgtgggtcatgctagttccatgcgatcgacgagatcgttcacattacggttccattcagacttatggaagatatatattgcgtgatatatgagtca

SEQ ID NO: 11096 - DNA, 433 bp, Glycine max
attttcctttcactttccatcactttctctcgtttccccttcgcaattttcccctcggaagagacatcgaagaaaatcacgtcacggcaatggaggaaaagcacgcagcagccaatgaatctgcacacgccgaatccaacggcgtctctcacggcgccgaccacggttggcagaaggtgacctacgctaagaagcagaagaagaagaccgttaacgccgccaacagcgccgattcccgtgcgaattccaacaagctcgttccgaacggcacgctgtccggcaacgatggcgttttccggtcgctcgagctgcagtcggaggaccggccgccggaaaattgtggaggcgaagaagctggccgatgccgcgtacgacgacgaagacgcgccgttcagatcgaagcagcggcaccacgacgacgacgaatacgact

SEQ ID NO: 11097 - DNA, 432 bp, Glycine max
  modified_base (381)..(381): a, c, g, t, unknown, or other
  modified_base (383)..(383): a, c, g, t, unknown, or other
tcgaacattttgaaggcggtcatgtgaggtactgtggtttattattatcaatgccctcaaggttggcattttattgataaagggaggcaaaaagtattcagtggatgtgaaattaatgatcaacacttcagccttgggaaaatccagatcaaaccagtccattttggtcatttcacctgtgttgattgaaacaatctgtgcttcaaagggttggtcctcgtatctagaccattctttggggagtagtccattttcttttcgtgtagccataactagccttcggtgttgatgaatgctgccacggttgctcaaatgaagagcaaggtccctcaatatatcatgttgagtgacagaaatctcaaagcaactgctatacatgcncncgacacgtgcctctagtactatagtgagaagattcttgtttgaaagctc

SEQ ID NO: 11098 - DNA, 397 bp, Glycine max
gtagaacttgacatgcactcagatgctgttcatggccttaatcagacattaattgaaacggtcattgaaattggttctgttggaaagggtctcagtcaaggtgttaaaaacttttttgctcatacaaaaggggattcttctgccacaaatcagacagtggctgccttgaaacgtgcacaggagtcactgatatctgaaaacataaagatagcatctgcaagtgcctcaaatcctgggatacctccatcctctttaatgtcctttttggaaaagaatcctgcaatctctggtgttgtcctagaagattttgactctgtctttgtcaacaagttctaccatagtcatcttgatgatttatcaaatgtaaattcgtcagctgtagttgctgctgcttctc

SEQ ID NO: 11099 - DNA, 414 bp, Glycine max
ctctctcttttcttcccattttgccccttcctcctttccttgtttccgaggagggccaaccacatatgctaaacaaggaaacaaatttctaacctccttcagatctacaccacccttctctttttttccagtttcataaattctacaccatgggcacggaggttctacggccacaagattgtttcacccaccgcatcgctgttccaccggcggggttttcccggagaagaacctctgggacacacaacaacaattacttcaggggcacgcggaagccggttacccgacccgaacagagaaaacgggttgtggagaaaaggcccagcttcgatgattcgaggttttcgaggttggagatggagaaggtcaccattctccggaggggggagtcgctcgattcgaagctgaaaaccg

SEQ ID NO: 11100 - DNA, 309 bp, Glycine max
gtctttgaccccagcaaacagcaagagagaaatggaagcagcatcgtccacaatgctggtactgatactaattctagctctgatatgctcacggaaggttctgtactggttatggctgagactatagatactagcataactgctcaaatagcaaggtttacgaggcatttcatacacatgcaccttgaaggactacacgtagctcacaggattatgaaatgtatacgatagctcatgaatgtgatggggactttcacaggggcatatggggtttcttgtttgaagtgattggatttgaagcattatgag

SEQ ID NO: 11101 - DNA, 386 bp, Glycine max
ctttggggagtttttcttcacccttcacaagcttccgttccgcctcatcatggttggaggtgtacgccgctttctccacattcatgatgcttctgagaaccgcgatcaacgatctcataccccaccaagttcgcaccttcatagtcacaaagataaaggctttgttctcagatcgccaaaatattaaccaggtctcactccagatcaacgagatttgggatggccaaatcaaccagctcttccaagccgcccaagagtatctccctgctcaaatatcccactcttacaagtccctcaaagttggaaagctcccaaagcacaagaacattgcggtggcagtggatggaacacaagaggtcgtggatcttttccaaggcatcaagctc

SEQ ID NO: 11102 - DNA, 386 bp, Glycine max
aaaataaatgaagagaaaaaggagggtaaggaggtgacaaaagaaaaagactaaggagcgaaagtaccttattttagctgggcatgattctaaactgatccgaaaccaacgaaaaaaagcggaagatcatgcaaacttgcacttaaaagctggtttttgcctcattctcttccttctgttagtccacgcttcatgctattgcttcctatctctttctcatgaccccttcatggagtccactttgctcaccaatctactagtcttcaacaacaccctccaaccagagttaatgaggagtgtgcatgtgtaccgccgaggggatggagagaaaagggaagttgagagagagtttgtgttttcagagagcggctcctatggggaaatgc

SEQ ID NO: 11103 - DNA, 292 bp, Glycine max
catttacagaatacatattcacacacagtctctctggtgtaggtgcgttttgagaccggagttgtcacttgataggtatactgacccattatacaccttcgcttctgaatcgaatgaacctaagatggtaaatgatgcattcgatcagactcgtatcgctcacatgcatagtaactgtgtggaggatggaatgcagaccagtgacgcatgaatgatagtgatctaagagccctatcatgcgtgatctacttcatattgctattggatacacgttgtgcaaactagtaagcgg

SEQ ID NO: 11104 - DNA, 313 bp, Glycine max
ttcactcgttccaaatattgatagtctctaatcgatagatatttatattactaggaagggttagataatgctcattatgtttgcactaaatacattatctcataataaagttaatttatagaatattcttttgagtttgcatatcagaattcagtttcaccatattacctgcttttcaaactgacttttcattttctaacttcttttacagtgaattgcttaatctataacattatattattaattcaactcattatactcaaaatagacttttcttacttctgtttttactatctatccttatcttaatttc

SEQ ID NO: 11105 - DNA, 288 bp, Glycine max
  modified_base (6)..(6): a, c, g, t, unknown, or other
agcgtncgccaaatactaatgttaaataccctgccaatactccatcatatcatgctggcgaattgaagttttgatggggttgagatcatgggctcatggctacctgctgagcatttatgaagaaaagtgatgaccgacagacgatatgtggatcctgagaaccgtgcgattgcttggaagtgttgaagctgtgtaatgagataggggcggcagagtggaataggctatcgcattcgcagaaattcagagtctggagacttaatcaaaagaatggggctttacatgatg

SEQ ID NO: 11106 - DNA, 402 bp, Glycine max
  modified_base (325)..(325): a, c, g, t, unknown, or other
ttcaattcttccttggtattgttagtctctggtcgtttgttatttattttacttgtaatgttttgatgatgctcattttgtttgcactagattcattagctcagaataaggttaatttatagaatattcttttgagtttgcagatcagaattcagttgcaccataggacctgcttttcaaactggggtttcagtttctaagtgggtgtccagtggtttgcttaatctagaagattttattatgaattcagctcatttgacttaaaatagacttttctcagttctgttttgattttcttcccttatctaatctgcacaaacatgtngtcccacttttagctgtagttttgttaactaagcaagaatagttctgttgtgttcataaaaaaaggaaagaaaagaa

SEQ ID NO: 11107 - DNA, 338 bp, Glycine max
cccacgcgtccgcacctcgcgcgatatggtattgtccctttccatttcccattaggttcgtctcctcacgcccgctcatgagccaccatcgcaacaaccacgctgcgctcactgtttcaaccggcgatgcgaatcccgatgactgtcaccaaccggtcgatgctcccctttccgcagcagaacagattagggttagggtttcatcggaggacaacgcggcacccgcatcctccaccgccgatcgcttcgaccgcatcaacatccacgccgcgtcgagcagaacgtctgaattagcaagattcttgaactccgaggtgaaatcgcttgctatcggaatt

SEQ ID NO: 11108 - DNA, 424 bp, Glycine max
ctgattctatgcctacgtcttcctccaaatcacaacacacccaattacaccctctgttctctgcaaatgcggtgaaggagaacacttggctttaatttggatctggatatggcgattgaagcacagttgtatcccaacaatgctcctccgtttccttttcacgtgtcaagggtagacaaatctccagcagcatatagtcatagtcacaggcaacaacaaccaggtggctggcagatgaatcagaacattcctcttgttcctcccaacttttcttgtttttccaattccaattccaattccaattccaatgtcctccaaaacgccttcaataagaatgttgttcagccttcagcctcatatcctcaatgcttggctattgagtttgatcaacagagggagattgatcaccatatcagatcacata

SEQ ID NO: 11109 - DNA, 422 bp, Glycine max
ctcaccctgatttgatacatgcattccaagctgccgcagttgctgggggatctggaagttcaggtgcatctgctaacaaatctctcaatgctgcagtaatgggtgaggcactgcccagaggaaggggaattgatgaaagggctgcacgtgcagctgctgaagtcaggagaaaggctgcagcaaggggcctgatgatacgtccccatggtgtaccagtccaagccttgcctccccttacccaacttctgaatattataaatccaggtgtgacttcagatgctgtggacaatggaaatgcagatcgagtaaagaaggaagcaaatgacattcctccaagtgatctaattgataccaagaaaggccaaacaactcctgtgcaacaacaggaacaagctccggttggtttgggcaagggcttgtca

SEQ ID NO: 11110 - DNA, 378 bp, Glycine max
  modified_base (336)..(336): a, c, g, t, unknown, or other
ctctctcccaacaagagagcgaacgagcccattcctgtttctccaccaccgaacacacacacgccctttgcttccggcctcacctcgcgctaacctgcaccccccttcttatcctgcgcaccccttctttatccaattctttcctcagattcggagcaccgcgcgcgccaccattgggaaaagaggttccggtgctgggggcctagggttagggtttctgagagatgtgggatgctccatgcattgatgagccttatcgcgcgctgttggaagccgttcgggcacggtgacgatgccggtaatgccgccgccggaagagaatgcaaggacggcctnctctggttccgcgacatcggaaagtttgcagccggcgatttc

SEQ ID NO: 11111 - DNA, 392 bp, Glycine max
cgcactcttgcagatcgaacgcacccaaagaaaccctgctactgccaccgctctagctagggtttcattccacccactcccaacaatctcccaatagaatgctgaaagagaattgctgattatcgcttcactcaactctaccaaatcgcatcactgaccaatctggtggagccgattccacagtagatgacatgaaaccgtgcttgcggacaaagcctcttcttcttctgctctctctgctacttctccacaacatcacattcgttctctccgatgattccagcatgaaaaacaccttccgcgagcgcgaagccttcgacgactcacctcgataccccgaaatagatgaggatgcacttgtgaattcaaagtgccccaagaatttggagctc

SEQ ID NO: 11112 - DNA, 420 bp, Glycine max
agacatggcgaaatcggcgtcgaattctctgatgcagagcctgaagcggttcataaagaagccatgggagatcacgggcccgtgcgcggaccctgagtacaaatccgcattgcccttggccgtggagtaccgcctcagctgccccgccaccgtcaaggagaagcccatcatccccaactccctcccggagaccgtctacgacatcaagtacttcacccgcgaccagcgccgcaaccgccctcccatacgacgcaccgtcttgaagaagcccgacgtcgagaagctcatgaaggaacagaccttcgccgtctccgactttccgcccgtttatctcaattccgccgttgaggaggacatcaacgctcgcggcggcggataccagtgactcacaggtttgtgctattgtgggatgacattatt

SEQ ID NO: 11113 - DNA, 420 bp, Glycine max
atcgccagcaggcaaaccctgtcaggcgaaatgactatgagcaccctagatcacatacgtatgaatgaaatcactatcaatgccgtgactgtagttcaaggcatggatatcactcatcatgaaataatcacaacgctaggtccaatacttcacctggattataccacagccaaagcttcacaacctacagctcattagatttgaacttcacgaaacagctagagtcagcacaggcatcattatcagtgttcagccaatcaacattatgtgctagatagaagaggatacatgcatcaacttccaccacctgactacagctgcagatcaatccactctggtcacggaatatcctatcctacgaattgaaaactgtagtaccatatattggacttgcatgcatcctattaactctagtcgaga

SEQ ID NO: 11114 - DNA, 317 bp, Glycine max
cggacgcgtgggtttccggtgaccttgatgttgctaaggatgctcttgtgcaagcacttgcacggctaagagcaaatctttttgataaggagcgtgctgtctcaggattccttccggtgcttccatatcttcctgcttcagttgatggatcagatggtttgaactatgacagtagagatggtaaacgacatggacgtggtggatatggcggcggacgaggtggctatggtggcgggcgtggtggctatggctgctggcgtggtggcagtcgctatgactatggtcgtactgaacatatcggggctgtggttgatgct

SEQ ID NO: 11115 - DNA, 421 bp, Glycine max
ctcaccgctgccgatgaagatctccggcgactccacccgccctctgcgtccatggccgccggccattgcagccccctcgccggactccgatctccagccgctccggagggccacccgccgccatccccgaactccgtccacccgcctgaggcgcgccggaggacacaccggaaaacggagcaggcccgaaacccccttgttcaagtggaagatccacgacggcgtcagggagaggagcgtcggcggcgatccgctcgaggaggtcggccggaagaaggaggcgccgccccatgcctccgtgtcggcgaggaagctcgccgccgggatgtggcggatgcagctgccggaagaggcggcgggtgatagtggaaggcgaaggggttcgagaaagatcggtgaagatcgtttgggagttcagcat

SEQ ID NO: 11116 - DNA, 397 bp, Glycine max
gacaacatagctgccattaaaaatatgaggcagcagcttgaaactcgcatagagtcgcaacacaaggctcacatggagatgcttgcttctatgcaaactgtaatacctaatcttgtttcatcccttgacctttctctcaaggttgtgtcttctttcaaccgtcgtccttttgctcctacaccttctctgcctcagcctgatccaaaactgagtcccaaaaaaccggttgaactaactcaccgtttcaatgcggaaacctgtgctgatggctctattgaggcaaacttgacaaatcccaagaatcaaaagcccaaaacatctatgcattcaaactcagcatttcaagtagagtctgagaaggttagtccattagcggtggttcgatcaatggtcactg

SEQ ID NO: 11117 - DNA, 422 bp, Glycine max
cagaaactggtcatgatgctgaagaacacgaaagcactagcagtgaggagcttgatgagttaccaatttccagtgacatgcctcacctttatcctcgtgacttaataacatgtagtgatgctgtgtctaaatggcaacttaaagggaaaaggaataatcggaatcttgtaaagaggtccgttggtgcttctgatggaaaatgtattatgtatggagcaagagcagatgttgaaggaaggaatggtcatttaaagcacaatagaaagggtccaagtttgcactgctacaaatttgattttggtgatactttggatgatgatgatcaaatttttggactggaagatgaatattctctaataacttatagatctatatcaaaaagtcaaaataaaattcatcatggtgtagcttggaatgatttg

SEQ ID NO: 11118 - DNA, 435 bp, Glycine max
cccacgcgtccgggaaaagcacgcagcagccaatgaatctgcacacgccgaatccaacggcgtctctcacggcgccgaccacggttggcagaaggtgacctacgctaagaagcagaagaagaagaccgttaacgccgccaacagcgccgattcccgcgcgaattccaacaagctcgttccgaacggcacgctgtccggcaacgatggcgttttccggtcgctcgagctgcagtcggaggaccggcgccggaaaattgtggaggcgaagaagctggccgatgccgcgtacgacgacgaagacgcgccgctcagatcgaagcagcggcaccacgacgacgacgaatacgactacgatgacgagaatgtggaccgttctgcggagaacgggaaggccgaggaggcgaagaagtgaagcagaagaagccgaagaagcct

SEQ ID NO: 11119 - DNA, 438 bp, Glycine max
cgattgcaagcaatggactccttcaattccttcttcgattcaacaaaccgatggaatgacgagactctcaaaaacttccgtcaaatttctccggtcgttcagaatcacctcaagcaggttcgctcctaatttttacggttttatgattgattttgattccttcatcaattagcaaagaaattctaaagcgatggattttctaggttttgccatatcgcgttaacaataatgtctcctatttcgcacgtgtcaatttttgtgatcttagggtttacaacaattgaagttatagaatctttaatttgcaagttccttgatatctttaatttgtaattgtgattgattgcaggtttattttactctgtgtttcgccgtggttgctgcggctgttggggcttaccttcatgtcctcttgaacattgggggttttcttactac

SEQ ID NO: 11120 - DNA, 127 bp, Glycine max
aaaaaaaaaaaaaaaaaaaaaaaaaaaaaaaaaaaaaaaaaaaaaaaaaaaaaaaaaaaaaaaaaaatataaaataacaaaataaaaaaaaaataaataaaaaaataataaaaaatatataaattaa

SEQ ID NO: 11121 - DNA, 440 bp, Glycine max
ccctctgccacgttcatctcccatttggtggttccttccaaaaattgagggcattctagtaaaactctaacacaacacacacaccaaatctgagagctggatttatgtctctgtttacttctcattggctgcacctcttcacaaactagatggaatgttattttataatccttctccatcttttctcttgagccttccttcccacaccaatcttctccaccacttcacacaaccttaaatccaacccaaaaccaaaagaaacacacacactcagaaacaccaagagaagaattttatttttttcaagaattcgagaagttggtgtgatctgatgctagtgtttcgaagataatctgagaagaacaaaaagagaaaaaagtttgattggtttctttttccaatggagtcagatcttcggcagcacccttccatgtttttgg

SEQ ID NO: 11122 - DNA, 269 bp, Glycine max
gctaccagtaccaggagctccctatctacagtgtctctctctctctgcaaaagcaacgaagctgtgttctgatccttcaaattagattccactccaaaccacctttcctcatcaagatctattttttattctattctctcaggatcactctcttgcgcctgatgcttctggttgtttgttatttttggagacttaaatggatgctaagccgtggattaggtcaatttgatctcaactgaaactttttagcatttctgatggactcgaaa

SEQ ID NO: 11123 - DNA, 313 bp, Glycine max
gagtttttgtgtgctcttggattggttgttagaatggagggtcagagtaagggtagtgttaatgtgatggaagggagtgagggcaaaggaagggagtttgtggtggaaaagtctgcatcatcaatagtgggaacttgtgatttggttctaaggattttggcctttttactaacccttgtggctgctgtagttattgggacagataagcaaactgccattgttccaatcaagcttgtggattctaatccaactttgtacgttcctggtgccactaaatggcattacttggctgcccttggctattatgtggggg

SEQ ID NO: 11124 - DNA, 419 bp, Glycine max
cgcatttacactttttattcatttctctctctctctctctctccttcccgtgttcatgctgggcgggcgagaaccccacctgctccggcagcagctacagaacttagcggcaggtgaaatgatcgaacttgcagcgtaattatttcagtccagctgaaattgaaagtaactgctttctgagattctgcaaccgcatgaaaccctagaaatgagtgccgcaggtggtgcatttggtggcaatagggggctccgtccagtgccttccgaaaaggggatatttccattggaccacatgcatttgtgtgacctcgagaaaatagaatatctcaattgtctaaagactgctgggcaccagtctgaaaaatgcaggcaattctcaaaaaaatacctgcagtgtcgcatggagaagaacttgatgg

SEQ ID NO: 11125 - DNA, 441 bp, Glycine max
  modified_base (277)..(277): a, c, g, t, unknown, or other
  modified_base (307)..(307): a, c, g, t, unknown, or other
gtttagtatttgggtccatgatgtcaaattcaaatattttttttttcaaatatatatagagtggtggcatgttagtttgaacctgtgacctcctgcccccagaaactaaccaaaccactcaccactaacccaagcacagtggcttagttcaaatggtttttaaatgcgagaattgtaaaacaatgactattcttaaatgtcttaatttccttctagtcttcctgctataattgatgttactcgaaagcagtctaatatataggtgacttggccgtanaatagctgaggaaaatttatttgatgttanttgaacttttctttggcttatttggcaatgaatctaactatcaatttgtcattaaagagattcatatattgtgtaagtgaaatagcttttaataggaaataaggttatggagtaagaaaatgtacattgtgcaa

SEQ ID NO: 11126 - DNA, 386 bp, Glycine max
  modified_base (274)..(274): a, c, g, t, unknown, or other
ccgacctcggctaaggtgcgtaccccttatatgctatacgtcgtttttcaagggtgcgaaatgagattagaatctaactaataaaatagtgaagacatgagtaatggcacaatcaacacaagacaaagatgaaactggagtgttgttgttccaagttgccgccgccgcgttcatcctaggccagaatgaggcggttgcgttgcgttgttgttcctcctcggtgagtattcagtgttgttcgatctggaatggagaacgtgttttatcatgattntcattgttaataattttaaagaagcgtgccacatcatcgtcgacctcttctgaactagacaagaacacgcgtatgtgtttcatttcaaaaaatgtataccaattttattttg

SEQ ID NO: 11127 - DNA, 381 bp, Glycine max
attccaacaacaccacaatgggaagaagaccggcgaggtgttaccggcagataaagaacaaagcgtacccgaaatcccgtttctgccgcggcgtgccggagccgaagatccgaatctacgacgtgggaatgaagaagaaaggcgtggacgagttcccgttctgcgtgcacctggtctcgtgggagaaggagaacgtctccagcgaggctttggaggcggcgcgcatcgcatgcaacaagtacatggccaagttcgccggaaaagatgccttccacctgcgcgtgagggtgcatcccttccacgtgctccgcatcaacaagatgctatcgtgcgccggggccgacaggctccagaccggcatgaggggcgcctttgggaagc

SEQ ID NO: 11128 - DNA, 174 bp, Glycine max
cttagctagatcagacactctgatctgaaaaatgagatccaaagatagactaatgctaggtatgttcatagccactatgctaacgatctcctctgaggatgcacccgatgatgcataccacaattatcacaaatcaaatggctagcgtatgcaaatggtgtagatgaaagcaaa

SEQ ID NO: 11129 - DNA, 224 bp, Glycine max
cccacgcgtccgcccacgcgtccgcacattggcgtagacaacagctaatgatggatgagatatctgctctttcctctcccaactggaaaaattccatgcctaatagtccatcttttcgtgttcctttgaatgatcacactggggagttaaataggctttcaggggtgaagcctgctaaccttgaagatatgtttggatcgctcgatccatcaattttgtctaaa

SEQ ID NO: 11130 - DNA, 263 bp, Glycine max
acagattcagtcacctaccgtcctacccttttctctctcgccgcctcttcttctcccgcgcgcatactcaacagaagcccaaaaaaggggtctttagaaggttctgattgatgggcaggagaggggtcaagctattcgatgaagaaaagaacggtcttttttcaatttccaattttgggtctcaatggggtggtggtggtgttcacgaccctgtgaatttggctgtgatggcaagcattagtcgaatgggaatggggtttggt

SEQ ID NO: 11131 - DNA, 431 bp, Glycine max
  modified_base (395)..(395): a, c, g, t, unknown, or other
  modified_base (404)..(404): a, c, g, t, unknown, or other
agagaggacacagcgccgcgccgcctcaacaactgaaacaaacactatccctaatccgtttcttcctctctgcacgctcttgcctcctccgatctcagtactagcccatgcgattgtaaccgctgttgcacttgcttcttcaccttcttcacactattctctcactcactcttcttcgtttcggttcttcagatctcttctccgattccagaacctacgcactgcattggaagatacaagaatatcatcagtttctcctattcattaactccagttactcactgaagataacattggaagcattgggcaataaaaatgagcaattcctctgctggaacctcatcaaaaccaagagcagcttcctcacaaccatcagaaacttcgtctaagcgcanaagaggagntttccaaaaagaatcacatgatgtatg

SEQ ID NO: 11132 - DNA, 218 bp, Glycine max
tattatacatacacaccttttaaaaaaaaaaaaacaataatctataaatatgcttactttgaaattctatcttacatacaccttcttacaacaacatatctcatatataatattacctaaattcatatcactcaccttctttttaaaacttcttatctataaaaaccctaactttacccaacttaattacctctcaatatattcccatttcaccattt

SEQ ID NO: 11133 - DNA, 426 bp, Glycine max
  modified_base (385)..(385): a, c, g, t, unknown, or other
aaaagattgaagtttcatgtagttactttttcatcatccattgaactgaaccttaaattaattgtagaaccatgtttgcaactaccaattcctccactttgtcacctttattctctttcagtagaacaacagcaacctctctgccttccaaacccacattctggaatttggttccaatgaaacaatcttcttctccggggcacttggccttagccttagacaatccacgtagaacacttcacgtgtcttggggctccacatcaccacatgctttccagagatcatcaattcaagggggtgaagcttttttcaagggtgggttggaaagtatgcaatctggttacttgaacagaaatcgtactgctaaggccatattggaccttgntcactctgctgagaataactcattatgctatgatcatcttg

SEQ ID NO: 11134 - DNA, 448 bp, Glycine max
cccacgcgtccgcctaatataaaatcagctttgcgttccaaattaccaagctttcatgtcgtaaagcagctcaccatatcaaatattaaagaagagatggagaaaacattgcattggctggttctgattgctacaaacacggccaaagcacatcatggttttggttgggtaggggagtgggcaagcactggttctgagctaaataagaagaccatgaaggctgatgtgatgcggattgaaacgcttcaccatgccgataaagctaaagtagaaaattatattcttgaacttctcatatggcttcaccgcttggccatcaaaagtaaagatggcattgataccggagaaacgaggtctaccttaaagtctcatgttggcactgccattcaaactacaagtcaacaatcaacaaaagccttactgccattgttaacaactgacgagcaga

SEQ ID NO: 11135 - DNA, 258 bp, Glycine max
cccagcgtccgcgcagaggaacgggatcgggtctcaataaaaagggtcacagcttggtgtttccagtgataatagaaatatcgaggcactgtttttgtattctagaagtagaaggagagagagccctagttcgcgttctcgtcacacacgaatgcttctttgaccatggcttccacagactcttcgctcctccgagcttctacgtccaaactttcttcttactactccgcttgtctatctagaaccttcgctcgctac

SEQ ID NO: 11136 - DNA, 312 bp, Glycine max
ggataatattccgtgttattaaaatttaattaatatagagagtttttataataggggaggattttgatataataatatatcatatgtgtaggttgttgttttagagaatagagatagagaatggccggctggctggagaatcctgtccagaactcacatcacatgagctgacctttgtgtcgcttatttttcacaatatatggcttactattatttcaatgaaatacagctgatctcattaattatggtcgtgcttacgacggtgacactaacaagcaacatgatgctactgttgcctgtccccgaacacac

SEQ ID NO: 11137 - DNA, 445 bp, Glycine max
  modified_base (279)..(279): a, c, g, t, unknown, or other
  modified_base (431)..(431): a, c, g, t, unknown, or other
tattcaaatttcaaaacaaggaaatggagtcactacttcccaagtcaatctacggtggcatcaagagttacttgagaaggcggcgctaccggcgtctccacggcggcgccaccgtcgttagaaggaagatggcgatcatccgcttgagagggccacgtaggtattggaggatcagagcagttccaaggcttagatgggtgatgagatcaccattgacgattttgacaaagctcaagaatgcttatatgaactttatgttgaagctgtcagggaacgtangtgctatgaacagtgataacatctttgaagtgaaacggattccaaaggctcgtcaagtgtctaagggctattcccgtgatgaatttgaggccaggctcatttttgagatttctaagaccttggttgcttcctatgaacttcatcccatgtangtgtgttctatata

SEQ ID NO: 11138 - DNA, 330 bp, Glycine max
gttatgccagctggcttgcgaactcttgccaagccttacgagttggagcatgccatagatcctaggatgcatgacacacagccacataccgatattggactggggaatgcccatttacaagatccaaagcttgaccagtctgatccaaacactcattaaacttggccctgcacgtgagaatgacaagcaacatcttacatggcaacctaatgcttgcaaaggaatttcacaggtaagtccagcattcttgccaaataacgtgcctactggtgcacctacaggactaccagttgcagtagacacagaattggctatggccatcactgcatc

SEQ ID NO: 11139 - DNA, 265 bp, Glycine max
cttggagatgttcatggtttttgttttgcggaaatgacatacaacctagtggagacctgtagaagctcatacggaacccaagagaaagggaataaaagagggatagaaagaagtctcaagtttaaacttgtactctcgtattgcaaagtatgacactattccgaagatgtttcaatcgggagggatagaaagaataagtctcaagtttaaacttgtactatcttattgcaaagtatgaactattcctaaatgtttcaatcggact

SEQ ID NO: 11140 - DNA, 320 bp, Glycine max
aattccgagccacgcgtacgcattcaaattctataacatggaaatggagtcactacttcccaagtcaatctactgtgtgatcaacagctacttgagaaggcggctctaccgtcctctccactgcatctccaccgtcgttagaaggaacatagctatcatcctctcgagatgtccacgtatgtattggaggatcagagcatttccaatgcttatatggatgatgagatcaccattgaccattttgacaaatctcaagaatgcttatatgaactttatgttgaagctgtcacggaacgtacgtgctattaacagtgataaca

SEQ ID NO: 11141 - DNA, 235 bp, Glycine max
aataaaaatataaataaaaaattaaaatataaaaaatacatatcaaactaaaaaaaacgtgataaaatctcatactcggtcttaaatatccatacttactttcacgttcataacaacatcttaactttaaactaatactaccaaatttcaatacattaccctatttctaacaacattcattctagaaaaaccctaacaattcctatctacaataaactttatactatttcatttt

SEQ ID NO: 11142 - DNA, 438 bp, Glycine max
gataatttcttcctacttaacaaaaagatagtaagagccatacggtatcttatcccataggtcaccatgatccttccattagaagttgcaataacgtgatagaaatggctttgagacactttcttttatggctagctatatattctgaacccgatcccccctcacaagacttttaaatcacacaattcttttttttttttattgtgtatccaattccaaattcacccgtaaaataccttcctttgtctcaccagccatatgtgtatgatggaaggagatgagaatattcaagcatcaacaaaaggaaaaaatgtggaaagcttcaccagcttggaggcaccaaggaagaaaagcaagaagatagaaaacaagaagaggtttagtgatgaacagataagatcactagaatgcatatttgagtcagagtcaaagcttgag

SEQ ID NO: 11143 - DNA, 416 bp, Glycine max
  modified_base (181)..(181): a, c, g, t, unknown, or other
cccacgcgtccgtgcgaaattttgaagattcaagtattcaacgttccagaagagttctttgtttacatttatatatagcacctgaaattggctttggagttcttatactgtttgtttgtttggttttgaaattctggattttggattgtgttctgctcagttttgttaaagagaaagtggngtttgagagttttggcattatttattattagcgtgtttggttccacattccagataccccagacgtggtttttcgcgtcagctaagaagctggtagttgtaactttcacatccctgacgtgatttcttacttctcaacagagaattgagttgatggggggtaacaattctaaggaggataataacaattggaggcagaattcatctgtgcgttcaagttcctctgcgtcttcttg

SEQ ID NO: 11144 - DNA, 412 bp, Glycine max
caacggtggaagaaatgtgtattggctccgaagctggcatggtggtcaaacatggagtcctaacctaggctaggttgcacagattcactgagtgcatgtcgcatgctgccctgtctctacaaaataagagataaaatatttatctttcgatctggcaatcgcagccctgatagccgtcagcacaggtctatggtatacacatgaaattcacgccttcctccaaattcttaggcttttcaaatcacttccactcccttctcgcaccctctttctctccgaccccaaagttctcatcttccttttccgccaccatgtccactctttccactcagaacgacaccgtcacccacaaaacgcagcaacctttgcagattgcaaagcgcttagagaaatttcagacaacaatcttcac

SEQ ID NO: 11145 - DNA, 423 bp, Glycine max
cccacgcgtccgcccacgcgtccggattctgattcatgcagtggcagccacctctctggtcttctcttgtcttttgaatcgaatcaaatcactgatccacaacgacatggcactctcgcgtcttcgtcaccctctcttctctcgctcccttcgcatcctctcttctcccgccagatccctctccagaacttctaattcatccatttttaccctcggaggtgatcatcacaatataataaggcctgcattttgctccaggcttactggaattcatgatagatctttgaagtcaaagtggactgatgtcaaatacttttcatcttcagattcttcacatgaagtccttgggatgcctgctttatctcctacaatgacccaaggtaatattgctaaatggaggaagaaagaaggagaaaagataga

SEQ ID NO: 11146 - DNA, 442 bp, Glycine max
cccacgcgtccggaagcgggatgctcagggatcaggatctgacagtagttcatcagtgaataccggcaatgttgctgctcctgttggtcgtgggttcacctacatcagaacagaatctaagcccgaaggcagcttgggtacgacaacatagtttatttcttaagatggtgttggactgcgatttcatcagagtgctttttcatgtccgatggcctaaaaattggtaaaaaaaaaattattgatgtacgaagatgcctgccctaaattttcgattttttcatatgtacatggaagatattttatatctaagtgtctatgtaagtaaagtaatgacctttctaaaaaaagaggtaaatgacgttcaataatgtttatttttttatgtcatcggttgaagctacaggggaggacattgattttgttagagtgcacagatgagaag

SEQ ID NO: 11147 - DNA, 405 bp, Glycine max
cttgattctcccggcaatgaaagcttcggagagcattttttttccagccagaatgttgagtggatttagtgtttaactttgagatctgctgtgcaaaatctgttagccaaaatccaatattagaacagtaatttattataaatttggagtaagatgtctggtgaatcggctcccaaacccaaaccacgattagtgttatgtcctaaatgctggcaacttcttccagagtctccagattatgatgtgtacaagtgtggtggatgtggcaccactctttaagctaagaaacgaagaaatggggcttgtaactcagaatccaacacacatggaactgaatcatctcctagaaatgcattggacaaggtatccagtacacgtgaaactgatgcatctgctggtaatgca

SEQ ID NO: 11148 - DNA, 438 bp, Glycine max
cccacgcgtccgcccacgcgtccgagagtataaatcctaggttgcctccacctttgttgtcgaaagaagactggcgtgttgcacaaaggtttcatggtggtgggtcttcttcaattgagggatttggggactggaggaagaatgtagctcccaatggcgatagttcgtctctattttcaatgcagccaggattttctgtgcaacaggtagagaatgatttgatggaactgagcaaagccagtggatggaatgtctctaggcagggttcaagtcagatgctcgacagacatatgggtggtttgacaagaatgtcaggagctggtcttggtgggaggagaacgagttatactgacattcttcagcaggaaggacttgagcaacctacaatgttgtctagcaccatgtcacgtccagcgagtcacaatgcatttggtgata

SEQ ID NO: 11149 - DNA, 438 bp, Glycine max
  modified_base (418)..(418): a, c, g, t, unknown, or other
cgaatatctcggtttgagacttcatattggtctccccaatttcttccactatcttgaattaggttaagagccttttcctctagtcattttaatcattctctttgtaaatgatagttgttagatgtggtagaagttgaacaatctcattctgaatttttgccaaacttttctgcaagagtccagcaagcgaaaatatcagtctgagacttcatattggtttccctattttcttccactatcttgaattgggtcatcacaatcgttcactttgtgaacggtagccgttaattgtggtagaagttgagcaatctcattttgaatttttgccaaacttttctgcaagagagtcctacaagtgaaaatattgatttgatacttcatattggtctccctaatttcttccactgtcttgaattgngtcaagagatttgccttttc

SEQ ID NO: 11150 - DNA, 380 bp, Glycine max
acgcgacttcagccttgatcttccaagtaacttaacttccgtaaatggttgacagatacgagaaaaggagaaagttgaaagagagagaaacatcgagctgcagttctgttactacggctacactactcttcattgctagttaagaatctccaatctttcaacactgcgtcactcgctttgttcccaattcagtccacaatttactttttccactttcccctaacctcccactcggaactcgtcgttacctatcgataatgaatttggggttacctcacttacattcatccgtgtttactctgtaattaggaaccatgtcgaggcccatgttgcttgttttcttgctgattatacttataatcacctcacagtttgagtgg

SEQ ID NO: 11151 - DNA, 218 bp, Glycine max
aatgactctcgatgcaatcttcgacagatgtcatattgtagccgagcatgatgggagtgaacctttatcaagctatgctcatacctatgatctgattcacgcgacaagcattgtatgacttataagggatcgcagctagtgtcagatgcagatgtagcctacgagatgtgcgtgatgaacttgatcgaatgatacgcccagaaggcactgaccacagt

SEQ ID NO: 11152 - DNA, 183 bp, Glycine max
ctttttcttcttcgtcaaactcatcaatttgaattcaccatggattcccttccttccgtctcgccctccatggtcctccctccgagccatcctttccgccgcctccctcccagcctcgtctcctcccgaaccagaagccgccgccgccgccacgtgtcggtgtcctgcaccctcgccggcaac

SEQ ID NO: 11153 - DNA, 423 bp, Glycine max
cccacgcgtccgagcaccgcctccactaatggctatgagatcgtgggtgagtcgaggatccgtgactcgtttgatggactcagcaaatcgaggggctttcagtcgcttcttcagcgacaagggtcgcgttctcagcgaggaggaacaggccaaagaaaacgtctacatccagaaatgggagagggagaggttggagaaacagaagcaacaggctgagaagaccaaggcagacaagggcaaagatgctgctgctgataagaaacctgaaagttctcaaaaaggctgagtttatccttcacacaacccggcaaggtcactttgtgggaaataagcatgatggagaataaaacacattgacccttaatgaactttggtctttgtatagattgtgtttcttgtttatttgtaagttcttgacggatg

SEQ ID NO: 11154 - DNA, 439 bp, Glycine max
gtcgacgggcacatgtattttatttccatcaagaagacattgacccacagacgccacaaagtgtgaacgaggctaactttcgtatcagagtacccctcaatttttgcagctgctgcttcctttttattgtttccttcgcttggagaagaacgttaagcagacaaaggatatctctttttctttccaaagaaaatttattattctcttttgcacaattcaactccaaaaccggatctacttcttcaaccgcgtcattcatttcaaccttcaagctacggaagagcgatgaactcatgatattgattagcatctaaaaatgtttattcttcgtcaccatacaaatctcgctatagtcctcactatcttcatagcttgcacaacaagagcacaaaacctcaccacctgcaatggcaaatgcggggagcacacccttcagttc

SEQ ID NO: 11155 - DNA, 53 bp, Glycine max
acgtacacacctaacattatcacaagctatatagttgcaccatgtcattaatt

SEQ ID NO: 11156 - DNA, 444 bp, Glycine max
  modified_base (364)..(364): a, c, g, t, unknown, or other
  modified_base (423)..(423): a, c, g, t, unknown, or other
cccacgcgtccgcccacgcgtccggaaggaaccgtctccgttaaggtcaaatttcctcaaccggcaactaaagcgcgccggagctctccgccgccgcgtacggcgaatcccgacgcctcttattcttatgctatattcgatcgcccgcgttccgcgactctcgtcgacggaattcccggtgactcaccggtggcctgtggaaaatcgcttcgttgaatattattatgaagaatctgagcaaggacaaggattgcagcaggagcaagagcagcaatggattcgttccttcttccttcaagttcatatcgtcttgcattaagaccgccttttccggcgtccgctccgccggagccttcgtcgccgncttcatctccggtgacggacacgaccgcagagaccagttcttgatgtggaagacgcctncaatgtaagggagcttgtctc

SEQ ID NO: 11157 - DNA, 432 bp, Glycine max
  modified_base (350)..(350): a, c, g, t, unknown, or other
gcttctttcaacaacttagcattgtattgtcttcaaactttgcttcttccatactttcttctttttccttagccatcattgattgttgcctttcttggctttaaaatggagttcgaggaccgcttcagacaccaggctcagagaccaaaatatgactgccttctttttgatttagatgacactttgtatcccctcaaatctggtcttgcaaaatcatgtctccaaaatattaaagactacatggttgagaagcttggcatacaccctagcaaaattgatgacttgtccaacctcctttacaagaattatggaacaactatggctggtctaagggcaattggatatgactntgactatgatgaatatcacagttttgttcatggaagattaccttatgagaacctaaaaccagaccaagttctgaggaacctg

SEQ ID NO: 11158 - DNA, 430 bp, Glycine max
  modified_base (419)..(419): a, c, g, t, unknown, or other
tctgttctgagaatatctgaaatgctacatttattatctacagagtcctgaatctgtgtatgggttcaatgttgatgtaacatgttagactgattctgccacacttctgattttatgacattaaaaggagtctacacaattttttttatcacaccagaattttttcatgtattgctggttgataggcttgcagtcatgttattaaatattgataatcatctttcgaataatggggttttagtatggtaaaggcaccattcaatgtaattgctgaaaaaaatcttgattggcctttctgacatcttaattttttttctggtcgaatatttctccttaccaagaattttggaattggtaacacattgatgattgggattcattttgcttaacgtgcaactaacctccagagtccagacctncccttcccctg

SEQ ID NO: 11159 - DNA, 432 bp, Glycine max
  modified_base (388)..(388): a, c, g, t, unknown, or other
atcaaacttgtatattactccaggtgcactgatgctggaccatgagaataagaaggcggttgattccatgactacaagatggttggagcagcttaactcattacaagataagaatggtgaagatgtatcaaatatcaatgttcaagcagaaaaaagcctggttaaagattacttggtaaaattttctttgtggagttttttcatgattccttagttttatttatcttgtgaatttagactagacacatattgtaaagcttgatcttttctttatgaaaaggttgaccataatgcaagatctcagaatagaattataccagttcccagcccagcatccattgaggatatgagggcaacgatcatagagaactcattaaaattgatccanacagaaagcaaaatcacacgtctggcagcatctccaaatagaac

SEQ ID NO: 11160 - DNA, 429 bp, Glycine max
gaattatctgccatttctggaaattttgattccctatgctgatgcaacaagtaccatgaaccaaatccaaatttctcaatggaatgcggctcttaagatacgctggagtagtgccctgaccacatcttctttcttcaaaatcaagggccccaaattttttcaaattaacaatttgcgatttgagcttggtatgaccctttttctttgtggtggaatcctgcgagagagggctttagaagttttatcaaccgatttggttcaatctgccaccattttcagacaagctgctggcatttatcatcacctagcacaagaggttcttccccacttagagcctgaattgccaccagaaaaaccccctgaagctcttgctgcagtatcctccattatgagcctcatttgcttggctgaggcccaggcagtaaccat

SEQ ID NO: 11161 - DNA, 118 bp, Glycine max
accacgcgtccggtttggagttggattgagcgtattgaggcaatgacgcgaccttacggtgtgaaggggggccagaagcgaaagcacgccgaacccaaatacgacggagaagaccaag

SEQ ID NO: 11162 - DNA, 282 bp, Glycine max
cccacgcgtccgaaaaaaaaaaaaaaaaaaaaaaaaaaaaaaaaaaaaagagaaaattataaaaattaaaaaaaaaaaaaaataaaaaataaaaaatcttccatctaattataatgttccatatttcctttcccttgcttgcatcttcataacttttttatagttaaaccttatttcattaacctgctccttaatttttactacgtcttccctgttaaaaccctgcctttatccattttatttcctcttcatttcttcctactttacccattttccttttta

SEQ ID NO: 11163 - DNA, 65 bp, Glycine max
gcctatttgaaaatttccacacctcttttaattgtcgtaatgatgtgtgaagtgtgtgttatttt

SEQ ID NO: 11164 - DNA, 193 bp, Glycine max
cccacgcgtccgcccacgcgtccgggaaaactccggaggtcaactcaagagaaagagagagtaatgagcattgcattgagtctcacacactctttgaacgcatgcttctaatgaagacgacgcatcagcctgaagcatcctaaggcgatccctgtgaaggtgactcaattctttttcttggtatttatgtggg

SEQ ID NO: 11165 - DNA, 95 bp, Glycine max
aaaaagaaaaaaaaaatactaaaatatattaaaaaaaaaaaaaatataaagggtaaatgaaaaacagggcggccgttctacaggatccagtctta

SEQ ID NO: 11166 - DNA, 371 bp, Glycine max
cggtgcttcataattataaattccaacaaaattgagtttcttcttcctattatatacttgcttcatacattctcttaattaacttaggttcctgctttctccttctcggtttggggctaaataattaagcttcgtagatttgcataaacctagttatgggttttatgagcgaagtaaggatggtagcttaaatttaataaacaacagagttggttatggtggggtcatacatgatgtgattgctgaatggatttctagttttatgggaatgttcccgttgttgacatccttcatgctgaattaatcgctttatattaaggttggttattgctgagtctatgaatgtttttcaactcatttgtaaaactgac

SEQ ID NO: 11167 - DNA, 375 bp, Glycine max
gttcaataaaaaaggaagaatcaaatgctaacatatgctattttgatgattcctgggagtttggatatcgagcaatatttttagttaacgtggatagttgaaatacggtgacttgtggtatgtattttctttttgcccacttttcatctgtagctttgattgaatgcaaaactgaatcacccctaatttgtaactcattttgccaggtcatttcatgtatcgaacaggtaagctcccctggctcaggtcatttcgatgcactgttgtgcaaaagcaaatgtggctaacatagatttttctaaatcaaattatgtagatttggatctggtattggatgatggatccagttgagaagtgttttttttccttgtcttg

SEQ ID NO: 11168 - DNA, 423 bp, Glycine max
caattttcccacaaccttttttttcctttcatttttttaatttttttttgtaaattcttccatcgtttttttccttccttcagagaaaataaaccataacgattttgtttcagctcttcttagctcaccccaaaccaaatccaattccatcactgcattgatccgtttccttcaaattattcagcaatggacgagttcggcgttttgaccgaaaagttcggtctcaaaccgcaaggaaaatccgctccaatggcaagggcaaagcgacctccgaatgtcgctgattcccaaacacgctccaatcccaaattcccccttaacggatccccgtctcaccaaaattccaccttcgatttcgattacggagttttcagcaacagcaacaccgacaacaaaacgcagcgtttcgacgacatcttttgc

SEQ ID NO: 11169 - DNA, 359 bp, Glycine max
cccacgcgtccggcgaaggggttgaagaagtgaggcttaggggccaatccttctgcagcatgttgattgatattgttattataattaggcttttagttttcattaaaaaaaacaaaagacaaccaaagaagagttcccccacaacctttgtatttttttggttgagggatacgtcttatgaaccagtgaaaaaaggctaaaggtgtaattaactaatatactgtagaaatttgtaaccgctgattagaattactttttactcttcctttattaatgtatgtttataaatcgttatagaagacatccatctatgaaggaattaatgactattttttttaatagtccatttttgtaatggt

SEQ ID NO: 11170 - DNA, 429 bp, Glycine max
  modified_base (370)..(370): a, c, g, t, unknown, or other
  modified_base (406)..(406): a, c, g, t, unknown, or other
cccacgcgtccgaatgatgagtcagaccaaatcgaatgaaaacggagaggagagctttgaggagttgcaacagttgtttgaagacatgtttgaagcagatattggattggacggaggcccttctcttgcttcttctgattgctcaacttcatctgcttacatgacttatagtgaaagttctagttcaaataaacacaattcctctgagatgaatttcgggaaggcagagaattcttctgtctttgatgctggttaccagaatttctgttttgggacaggtgaaccaactccaagatataaagaagaaaaaggggggaattctaggaggaggtagaagtagacacagatatggcagaaaggcaaatatgtnctatgcccatgatgtttaatcgaatgactaccctgnaaatttcacaaagtaaatgacct

SEQ ID NO: 11171 - DNA, 364 bp, Glycine max
cccacgcgtccgcccacgcgtccgcccacgcgtccgtgactttgaccctcttgatgttactaagacttggcctgaggacattatacccttgcagcctgttggtcgcttggtcctgaataagaacatagataatttctttgctgagaatgaacaacttgcattttgccctgccattgtggttcctggtgtatactactcagatgataagatgcttcaaaccaggatattctcttatgctgattcacaaaggcacagacttggaccaaactatctgcaacttcctgctaatgctcccaagtgtgctcaccacaacaatcatcatgaaggttcatgaatttcattcacagggattgaggaggtaaat

SEQ ID NO: 11172 - DNA, 450 bp, Glycine max
cccacgcgtccgactttctctcgtttccccttcgcaatttcccctctcgaaagagacacgcatcgaagaaaatcacatcacggcaatggaggaaaagcacgcagcagccatcgaatccgcacacgccgaatctaacggcgtctctcacggcgccgaccacggctggcagaaggtgacctacgctaagaaacagaagaagaagactgttaacgccgctaacggcggccccgattcccgcgccaattccagcaagctcgttccgaacggcacgctgtccggcaacgacggcgtgttccggtcgctcgaactgcaatcggaggaccggcgccgaaaaattgtggaggcgaagaagctggctgatgccgcgtacgacgacgaagacgcgccgctcagatcgaagcagcggcatcgcgacgacgacgacgaatacgactacgatgacgagaatgt

SEQ ID NO: 11173 - DNA, 324 bp, Glycine max
gaactagtttgcaattgtttgacattgagttaggaaaaatgggttccaaggctttgctcgttcttgttatgctcttggcttctgtcctccttctttcagcggaagttgcatccaaagatgtagataagaaacttgataaaaatgatggtaaccatgatacaaaaggagtcgatgaaatgaaatattatggtggttgggggtctggttgggatagataccgccgtggttggtattgccccaatggttgttgtcaatggagctactactatcaaaccttgtggaggtgctgctattatcctggtgaacaatgtgatgtgcgtactg

SEQ ID NO: 11174 - DNA, 191 bp, Glycine max
cacgccctcaatcgtatgatggtattcatgcgttactctctcggccaatactgtaaacgggttacctatcttgctcgccatcatccatttgtggcatatatttggcttcagttgaggctgcatccttctgcattaatagaaccagattatgctggtgttgctcctggcaaatctgtgatggtggttgaaga

SEQ ID NO: 11175 - DNA, 424 bp, Glycine max
agaagagaagagaaggatggctgtggtttttcagtgtttatggtgtgctcggagtgaccccttcctcactcttcctttccaacgcaaaccacttctttgctctgtctttctttcctctcgccctcgtaacctctgctcttcaattgtcgctgctgcttccaaaaacaaaaacaagcaaaaaaagtctcgtgatcatgttactaaggacgatgaagatggcgtggacgcttttgagctgctcttcaagcaactcgaagaagatctcaaacgcggtgatttgtcagacgatgatggtgaggatgagataagtgaagaagacatggcattgcttgaacgtgagttggaaaatgctttgggggactttgatggtgaattgttaaactcggatgtaatcgacatcgaaactggcggtgatccagaaaat

SEQ ID NO: 11176 - DNA, 439 bp, Glycine max
cacgccctcaatcgtttgatggagttcctccgttactctctcggcgaatacttgaaactcttacctatcttgctcgccatcatccatttgtggcaaaaattttgcttcagtttaggctgcatcctcctgcattaagagaaccagataatgctggtgttgcacctggcaaagctgtgatggtggttgaagatgaaataaatgctggttacatatccattgcaatgcttttgggtctcttgaaacaacccctttatttgaggagcatagctcatcttgagcagttgctaaatttactggatgttatcattgatagtgctggaagcaagtctagttcatgtcataaatctcagatatctactgaggcagtagtgggtccacaaatttctgcaatgggagtagatgtgaatattgatcagttacatcttctgctcttgacgca

SEQ ID NO: 11177 - DNA, 446 bp, Glycine max
aaatcaggttgggcatccaatcaggcccttgctatttacattggtatgtcatttttccgcactgcagcacacaagttccacaaatttctcaaaaagaagtgccccaccgatgttgccaagtacctggtatatcttgggccgagtgatgaggccatgaggtttttgtttcctatatttgttgagttttgtttggagaattttcctgatgagatcaagaggttcaggagtatggttgagtcggctgacctcacgaagcctcacacttggtttccgtttgcgcgggcgatgaaaaggaagataatttatcattgtgggccgacgaatagtgggaagacttataatgctttgcagcggtttatggaggcgaagtccgggatttattgtagtccacttaagttgttggcgatggaaagttttgacaaggttaatgcgaaggggatttactg

SEQ ID NO: 11178 - DNA, 353 bp, Glycine max
cccacgcgtacgttcagaatttacgtacaacccatcataatcacacatgtaccagcaagtaaactgtgatccaactgaagaaggaagcctctgtgccatcatgtgatcactttgcatttctccaaaaccacagcatattgaatttcaatgattgatgctgtgggaaaatggctcgagatttaggttgacagataacactagatttattgtgaagcgatctgtgttattcacgcttaactggatctcctttaaccttattatgtgtcatgctatgttcatctttatcgtgtctgttataaggaggatgttatatcattttgtgccgactaatagtgtgaagacttataatgctt

SEQ ID NO: 11179 - DNA, 82 bp, Glycine max
cacttgcaacgcaacaacgtaacgttgctaattgcttgcacttcccatggtcgcttctggtgtttcacattagctgcatctg

SEQ ID NO: 11180 - DNA, 442 bp, Glycine max
  modified_base (370)..(370): a, c, g, t, unknown, or other
gggcaaactggagtaatcgcgaatggaggggctcaaggtctccaaagcgaacttaacagtatacattcacccttccaaaagtaaccaagtttcccaagccgttctccgccaactcagctctttgcttttcacgttcagcgaaatcttcgacggcgtcgttttggcctacgatgtcaattccttcgacacgtgcgcaaagatcctctccggcgttcacccttacttcggcgtcaaactcaaggtcaatctgttgctcttttctcccaagccaaacatgctcttagggaaggtggttaaggttacgcatgagtccattcacgttgttgtgcttggctttttcctcttgcgatatatctgagaaagatatcangggaagagttcgggtgcaaaacgaacgaggggcaaaggtgtatgtgagcaggtctcacaagcggcatgtgat

SEQ ID NO: 11181 - DNA, 431 bp, Glycine max
  modified_base (427)..(427): a, c, g, t, unknown, or other
caaaaaggcttggggaagtgaggatggtggtgtagccaatggctccgtggagaagcccaagtccaatgggaatgctgccaagagtccgaatccgaagaagaaggaatccggtagcaggaatgtggcttctgctaagaaaccgaagcctgaaacaaatccggagccggcgccggtgccgtccttggagtttaaggagtctgaaaggatggagattgatcaaaagcctgatggtggtgatgcatgtttgtttttgcgcgaattggttcgatacaaagagggtgccaatgtttctaggctggatgaggatgatgtgaagagggggttggagttgattgaggaatcaaagagggcagagttgagggggaagtggaagaaattacatcatgctgagatggaactgtttgcgaatcgctcagaactgattggngagc

SEQ ID NO: 11182 - DNA, 424 bp, Glycine max
cccacgcgtccgcccacgcgtccgatggccgccaattccagtagccgagggatcaccgccttagggaagcgagtcgccaaccggatctggacttccaacgcacctcctctcacttcaaggaggggagcatacagtagcggctcagtgtacgacaagaaccctgatgatgagatccagtctgggcaggtcccagacgatgtgatccaggcggcaacacaatccggcaaatactgggccccacatccacagactggggtatttgggccccccggaggaggtgaccaaactgcttctgccattcactctgatgcgctggaggagaaagcctggtttcgccccaccagtctcgaggatttcgagaagcctcacacccttccttaacaaccattggaggacatcatattataatactaaattaaataaa

SEQ ID NO: 11183 - DNA, 303 bp, Glycine max
gtttggacaaatgttacaactgcaaccaatggtccttctgctagattttctgtggctggtgactgtttagacccttttaggagtggtgttcttatattcatcggtggttgtaataaaagtcttgaggccctggatgatatgtattacctatatacagggattgctcgagaaagtgaacagagaccagaaaaattatctttaaagaagcaattgaaactgaaatgtctagaacaaaatcccaatcctagccaaaatcaaggtctagttagatatggagtgggttctgatgtgggacagaccatg

SEQ ID NO: 11184 - DNA, 449 bp, Glycine max
  modified_base (425)..(425): a, c, g, t, unknown, or other
cccacgcgtccgcccacgcgtccggcaccctggccattgtccctatggagtgcatttccctttccattcgtcaaaatcatctttttttttttttttctttcttctccttcagtaaaaatcactgaacagttctaaaatcaaatcacctaaatccacatcagaagcccattttttttttcacacccagaatctttcttggtctttttcttgaattcaagtaccaaagtttgagtctttttcgactttggttgaactccattgaaggagtcgcatctgggtgttcgtgtgcatgcgagttttttctttctttccaaagtttgaagtttttccccattctgctgcgacccaattgatgggactctaatgggttccttggaatcagggatcccattaaagaaagggagcttgtttggttctcagttcancagaaaagagaagaaccctttttc

SEQ ID NO: 11185 - DNA, 187 bp, Glycine max
acgtgggcgagttggtgatgcacagacaactcactggaaactcggttgaactcggtgtgtgtagaaatggcgaaacttgtagccaagctagggatgatcttggactcggagggtcagttcttctccggcaaggaccatcttccttattgtgactgtgacttcgtagctggatgggaaagataggtct

SEQ ID NO: 11186 - DNA, 432 bp, Glycine max
gttcttttgtaagataaagaaagtaactcagtttgcaagttaaatgtatgtttttgtttgagttagatacataatacatagttttcttcatttttttaatgtcaaagcaaatgcttcttatcaatgttgtcttcaggcattgctttgtatgatagcatctgggaaatgtccctttggtgcttcatgtctttccagtggtgcctttctactcctgctgtgtctttccagaagtttcttgatagttcttgatatcattttgttattcattttagaaagtgcttttattttcttaaaatcagaaagcattatgtttttgtttcagaaattccatccaactggaatgggtgaggctgaaaaactgagtaataagctccttgagcatagttctgatgctggtagtgacttttcagacaaagttttgaagtcaagaat

SEQ ID NO: 11187 - DNA, 388 bp, Glycine max
  modified_base (340)..(340): a, c, g, t, unknown, or other
gtgggcgagttggtgaagcaaagtcaactcactggaaactcggttgaactcggtgtgtgtagaaatggcgaaacttgaagccaagctagggatgatcttggactcggtgggtcagttcttctccggcaaggaccatcttccttattgtgactctgacgtcgtagctggatgtgaaagagaggtcttggaggcagaaaaacaatcatctcaagagtatatgcaagactgtctcctgcgtttatcatgggctcttgttcactccaaacacccacaagatgtgcaccgtgggatagccatgcttgaatcatctttgcctgctacagaggacccactgcaacanagggagaaagcttatcttctggctgttggatactatagaaatgctgat

SEQ ID NO: 11188 - DNA, 96 bp, Glycine max
  modified_base (87)..(87): a, c, g, t, unknown, or other
cctcaattcatcagttgccaataaaatcaagaaatgaggcgtgtcttccgaattaatcgtgtttcaaagctgcattccaaaaacacncctcaattc

SEQ ID NO: 11189 - DNA, 427 bp, Glycine max
  modified_base (407)..(407): a, c, g, t, unknown, or other
cccacgcgtccgaaaacacatgttttactaaaaaagtcggcagcgattgatggttggtcacaccaccgaagaaggcttcaggaatctacatagctttttcctcagagcgttgaaaattcccacactcgctcgcttccccaaaatttcacccctttcattcaattcttccctcttctctgctactgatccatccctcgttttctccgaacaatggctgctggtgtcactgtcaagtccgaggttctagaatcttctcctcctgaaagagtttgttccaacacggtggaaaaccacctggtccagaccaatttgtctgatgggtcacccaacaagtctgtgccagcatctggacttgatgcagtgattcctagtgcatatcagcttaccatcttctataatgggagtgnttgtgtctatgatggaatcc

SEQ ID NO: 11190 - DNA, 430 bp, Glycine max
  modified_base (238)..(238): a, c, g, t, unknown, or other
gcagaagaaagatgctttagagttgttgaaagccaagggtccatcaccaaaggcttcaaagaagaagaggagcaagaagggtgggctttctatgtttctgagcggcgctcttgatgaagccccgaaggaggtggctccccctccaccaacaccaacaccaaaacacgagggtcctgcatggggtggggcgaagttcacgaagggttctgcttctcttcgtgaaatccaggatgaacanagcaaaattaaaggtaaacaaaccggctgggagcaaagataaggttgaagatctttctaattttggcagtggggcaaaattaaagttgagttcatttcttccttccagcccaatccctgttacctcgtctcgaagttcccaggtatctgatggagaaataagcacccctccttgggctgcttccggaactcc

SEQ ID NO: 11191 - DNA, 70 bp, Glycine max
aaaaaaaaaaaaaaaaaaaaaaaaaaaaaaaaaaaaaaaaaaaataaaaaaaaaaaaagaaaaaaaaaaa

SEQ ID NO: 11192 - DNA, 441 bp, Glycine max
ctcttattcatccttctcttctgaataatccagatctctttctgcccttttctccgtcacgcttttcgtgaccggatctgtatggatttgatccagatctacacgccgatggtggttttggccgggtctttcatagatctggtgcgtagaggctcagatctacggtaccgaggtacaacagagaatcgatgacaagaacgcagatccgacggtagatccagccgattccgcttgttcgatcgctacagacccctgtatcggatcattaagcagcgtgtctcgcgcgttctacacgtgttgccgatctcggatgttgtaaaattagtttatgatgtgaagctatggagtggaaaatatgtggatgtaggagatttcgggatgaatggcctcaaaacgctttgtcgtttgtgggtattgagtcctgagtgatcttgtcatccg

SEQ ID NO: 11193 - DNA, 199 bp, Glycine max
atcatattcatacttatgttctgaataatccagatctctttctgccctattcttcgtaaggctctgggcaaccgaatctgtatggattcaatccatatctacacgccaatggtggttttagcctgttctttcatagatctatagctaggaatctcatatctacagttctaaggttcaacagagaatctatcacaagaac

SEQ ID NO: 11194 - DNA, 408 bp, Glycine max
  modified_base (391)..(391): a, c, g, t, unknown, or other
  modified_base (404)..(404): a, c, g, t, unknown, or other
gttcatagcggctatacttctgatctctgctgaggttgcacccaatgaatacgaaaattttaacaaaaaagatgggaagcatgctccaaatgggttatatgatagcaaatggggttacggtggttggggtggtccttggtatggcggctggggtggcccttattatggtggcggctggggtggcccttattatggcggtggttggggcggtccctggcgtggtggtggcggtggtggctggggaggttggcgtcgacctaatggcaaccctcacaactaaaaagaaaacttgctaaagcttctttacgggtttaggttttcgcaataaataaaactttatgagaagtgtagttgtaataaaagtggaagtctctcttctcttgtgatatanaggaataatagtnttat

SEQ ID NO: 11195 - DNA, 78 bp, Glycine max
aaaaaaaaaaaaaaaaaaaaaaaaaaaaaaaaaaaaaaaaaaaaaaaaaggaaaaaaagaaaaaaaaaaaaaaaaaaa

SEQ ID NO: 11196 - DNA, 374 bp, Glycine max
  modified_base (328)..(328): a, c, g, t, unknown, or other
ctttgaaactccctttcctgttgaccttgttcctcgcactctcccaagctcaaccgcattccgatgatccaccgccgccaccctcctccaacgtctgcgtcatcggcgctggcatcggtggctcctccgtcgctcacttcctccgcaaatactcgccgtcctccactccctccaccaaaatccgagtgttcgagcgcaacggccgcgtcgggggacgcatcgccaccgtgacggtggcgggcgagaccttcgaggccggagcgtccattctccatccaaagaacctgcacacagtggattacgttaagatcctgaagctggaggtcanagagccgaccgcgtcggaggattccctctctctcggcatttgggat

SEQ ID NO: 11197 - DNA, 301 bp, Glycine max
cataaccacatacacttcggttaatccgaaagaagctcatcggaatcgcaagacaccgccgacgacatggccgccgccgtgaccgatatggcccgccgtcacacgattagccaaatactggtcgacctcgtcaagttcgccgtcggttccgccatcgacggctcacgcagaatcatccctggtaggaagcaggtagataagatggtgccagaaggattaataaacatacccttgccaacccctttaaaggccaagaaacaccctgatttaaaggttgcatatgacctcccttttgagacaa

SEQ ID NO: 11198 - DNA, 185 bp, Glycine max
cccacgcgtccgaaaaaaaaaaacataaaaaaaaataaaaaaaactaaaaaaaataaaggactgcgggtcttttatatacattccatcttaaattaagctgcaattaattatccaaattatattgttacctaaagtgaattcactttactgggcatctcatgacatcggcttaactgtcaaaaca

SEQ ID NO: 11199 - DNA, 321 bp, Glycine max
  modified_base (281)..(281): a, c, g, t, unknown, or other
gaaaagtccttcacattggcagaggcctgtggagagaagtggttatgctgctgtttctgaaaataaatttgaggaaaggaagaaaatccaaccatcaaatgcaatttctaccacaagaattaatgttcctgctcctcccacagcatctgagcaggtaactcctattaccaaacctcagcatgtggagaaagtggaaccagtagcaccacaaccaccagcttcccaaccacaagctgaaacatcaaagcaagctacagacacagttcataatatccctccanaagttgactatgctacagaccttttcaacatgttgtctat

SEQ ID NO: 11200 - DNA, 302 bp, Glycine max
tgcatacacagggaaggaactcaattctttgagtcttgctcatactgttgctcaagttattccactgccttatactgattcaactgaacagcgtctgcatctaattatagacacaaaccaacacgcatacctatacccaagaactcctgaagctattggcattctgcaacgtgaattttcaaatgtgtactggtactcagttgatgctgataatggtgttatcagaggtcatgccttgaagagcaattgcattcacaaagtagtggatgaatactgctttgacttcagggattatggtctat

SEQ ID NO: 11201 - DNA, 156 bp, Glycine max
cccacgcgtccgaaaaaaaaaaaaaaaaataaaaaaaaaaaaaaaaaaaagaaaaaaaaggaaaaaaataggtaggcagatatattagttcacatgcttaagtacacttgcatgaaactgtataactctattattgtgtcacctaaatataattgt

SEQ ID NO: 11202 - DNA, 76 bp, Glycine max
tcgaagcaatccggttttgatggcttaatgggccaattaatgcacccagtggagaaccgggtggtcaaggtttaaa

SEQ ID NO: 11203 - DNA, 362 bp, Glycine max
cccacgcgtacggattcacatgcaaaggttttgcttgttctactaatgttctgggccaggatacttctgatctcctctgaggttgcacccgatgatgcatacgagaattttgacaaaatagatgggaagcctagtgcagatggggtagatgaaagcaagtattggcgtgccggctatggtggcggctatggtggtggttatggaggtcgtcgtataggctatcgaggttgtcttgaaagctatggatgaggacatgagaatatggctgctgtcaatgtggctatggtgtatagcatattggctatctcggatggcttagtatgcaatcgtcttggctatggtcctaatgaacataacgaggc

SEQ ID NO: 11204 - DNA, 444 bp, Glycine max
cccacgcgtccgaaaccaactgtttgtgcacatatttgaaaatgtattcgttactaaaggaatgggctgtttggtgaaggatcatgaatgacttttatatctttaagcatctcttcatgcaacaaccctttgggcttaaagtttggacattgtacaagcccactctctagtctctaccttgtgctgaaattcagtttattttatttagaagagtgggagtgacaataattgaacccttgactaattttgcataaagactctgatacatgtcaactaccaattctcctaaaagcctaatgaatttagtaaacgctcattaattggttttaatatcttatctaatacaaattggaaacccaaaaaatatccagcaaaccatatttaagtagcaagaaaatgaaccaacttgaatgccaaccttgtgggtcttcacaagtttctttt

SEQ ID NO: 11205 - DNA, 350 bp, Glycine max
cccacgcgtacggaatcacatgcacacccttcggttgctactatggccaaaactgttcggtctggggccaacattgtctataacggaaatcccttaaatgacctatctatgactgctttcctggacaaattcatggagaagaaagcgaaacgaatcacatggcatggtggttctcagattgaacctgccaagcagatggatgttaacaaccaattgattggagcagaaattctattactagctgaggaagatgtacctcctgacgatcttgactgccacatgttctacacaaacaatatgagttcactctactaaaccgaagaatatgaaaaagacgtcagctgatgaag

SEQ ID NO: 11206 - DNA, 329 bp, Glycine max
cccacgcgtccgctctcaatctcaaacctctccattccttactcagtttatcattgcctgtgtgtagtggagcttttctaccttaaaaagattgcaccttcacccttcttcaggtttgcttaatttctcaagcaaactttgtttcatttccttcacaacttgtgattttcaaccttgcttacccaccatcacaatacgctgctatcttttgctttatttctcattcaatttcaaggacaatcaacaattggggtcatacatatatacatgcataccatctttcattgccctcattgttcttaaaacaaaattggaaccaattccatcca

SEQ ID NO: 11207 - DNA, 422 bp, Glycine max
tgaagtgctgagagaccgtgcacattgaaatgtttaagcacttaaattcattttcatatcagaatctactaggggttacctttaatgaattacctcttcatgctttgtcatctgcagagcccatcttgccacagatatataactcgtatccaataatatgaatctgaaggctgatgggtttaaagcttttggcagttattgttgtaaatcccagtgtgctggacttgtattgtatgagcgtgactctatggatccagatagattacttggatgaaaaagttccttgttctaactttggcaagtatctatagaaaatttcaaaacttgcatttatcaatatttaatttgcttcttgaaaaaaaaaaaagatataaaagaacaaaaattacatacccatacattcaacatcataactattatat

SEQ ID NO: 11208 - DNA, 390 bp, Glycine max
  modified_base (345)..(345): a, c, g, t, unknown, or other
agccttccgcgaaaatcaattttctgtcttctctgcgtcttcttcctctatcaatcgttttccatggctcgtaccaagcaaaccgctcgcaaatccaccggtggaaaggctcctaggaagcaactcgccaccaaggctgcaaggaaatctgcaccgacaaccggtggagtcaagaagcctcatcgctatcgccctggaactgttgctcttcgtgagatccgaaaataccaaaagagcacagagcttctgatccgcaagctccccttccagcgtcttgttcgtgaaattgcgcatgacttcaagaccgatttgaggttccagagtcacgctgttcttgcgcttcangaagctgcggaggcttacttggtgggtttgtttgaggacaccaac

SEQ ID NO: 11209 - DNA, 144 bp, Glycine max
cttcgaaaaaaaaaaaaactaaataataaaaaaaaaaaaaacaaaaaaaatattaaaaaactaggtgtgcataaacaatatactaaaagaaattctataaaaatgaaagggctatatgtttaaaagaatccaggctaaataccc

SEQ ID NO: 11210 - DNA, 441 bp, Glycine max
agaaactggagaaaaccctagaaagcaaaccctgtctcgcaccgccatctgcctccatagcgataacactgtgcttgctacagtcatggcggacgtcatggtaatgaaggagatcgaggacacggcgctgcgtctcggcgtcgatctctccactctcgatctcgacgccattcgcctacctcccggcgaagattgcggcatcgtcagtgatgacgaggtggtttaccaggaggagaatctcgagtatgagtctggatttggtaacatcattgtcgcggataacctgcccgtggttccgaggggagaagttcgagaagcttgaaagaatgggtcggaaaagttatagtcaaaatggggttatcaaagaagatggcctctggatgcccggtggtcctgaaaccgataaaaccctaggttactggttcattggatacaataccc

SEQ ID NO: 11211 - DNA, 330 bp, Glycine max
cccacgcgtccgaaggctttttccttactctcttcccttttcttttttgccctgctttgtggggtttccactctcaaatgctcttcacccttctctctctaatctgcttttttattcttcttcttcttcctctctcagatcctaagggctttcatctgctgctgcaactcagattctcttgcttctggacttattatcttctgcgttcatgcctgctcttgtcaattacagtggtgatgatgagctgtacccctggggttctttttgcccaaatccagtggagttgggtcgcttgtacactactattggctccaatttggatgtgtacta

SEQ ID NO: 11212 - DNA, 377 bp, Glycine max
  modified_base (319)..(319): a, c, g, t, unknown, or other
  modified_base (327)..(327): a, c, g, t, unknown, or other
cactctctgaaattacttccccccagcccacactcctccattatccctccgccggcatgtccccgtcctccgaacaccacggcggaaaccatcgctttcccggggaagaaatcaacggcttcggcaatggccaagcggaaatgtccgctccttccacggcctcctcgtcggcggtgcgctgcatcgtcgactcaattccgtcgaaggagcgggagaagctccggagaatcctcgtcgcctcggcgaagggtttctcaatcggagccggcctcaagggaggcctcgctctcttcgcgatcttggcgcgattgacgcgcanaaagccgncaaggaagggaattgtggtttcgaacggcgaagcgattgtggcggctctg

SEQ ID NO: 11213 - DNA, 204 bp, Glycine max
gttctataagttcacggtcagttctgaaaaatgggttccaaggttttgcttgttgtagtgatgtgcatagcggctatacttctgatctctgctgaggttgcacccaatgaatacgaaaattttaacaaaaaagatgggaagcatgctccaaatgggttatatgatagcaaatggggttacggtggttggggtggtccttggtat

SEQ ID NO: 11214 - DNA, 179 bp, Glycine max
cttcgccgaccccttggttccggccaattacccgattctttggcccggttaactaacctcaggttccttgacctttcctttaataacctttaaggcccaatcccaagttaattttccaagttgtccaacctagtttccttacccttggaccggaataggctcacggccccaatcccgga

SEQ ID NO: 11215 - DNA, 201 bp, Glycine max
agccttcggttttgttgaaggcccgaaccattcctgacttccaaatcgtcctctgaactgggtattagggccaaaggattattcaaaccgtttataacctggttccttccaaagtttccttaaggttacttgaaccccccggccaattttattcgggtaaagccattgtttaaaggcttgggggccccaaggccttgaact

SEQ ID NO: 11216 - DNA, 433 bp, Glycine max
aacaaagggtgcgaacaggattaaccgaaaaagggcatcacaagttggaattacaccaagaagtggggttacaagagcgaagaacaaaaacatttgtgttgtattggagttatttatatttatacgctcgtaactcgcacatagtatccctcagtcattccgtgtccatagttgcaagttatctaagcccagtttgtgtttcactcacacaaccgttccagtaacaacaaaacatcatgctttctcgcccttacattaaatttttctgtttctgaaatccggcctttcttttaacttttcaaatggttctgcctttgtacttcgaattcaaacaacaggaaattttcttggggaaaagttcaatttttcaaattctggccgtgaatcatttgggggaagaagattgaaaggaaggtgattacctttttgaaat

SEQ ID NO: 11217 - DNA, 406 bp, Glycine max
acaaagcgtccggtttgaaaaggacctaccgaaggttaacaggacagaaactccttggtggatggttctaatgcattcaccttggtataatagctacaattatcactatatggaaggggaaacaatgagagtcatgtatgagccctggtttgtgcagtacaaggttgatgttgcgtttgctggtcatgtacatgcctatgaacgatctgagcgtgtttacaatgttgcatacaatattgtaaatggtctttgagctcctgtaaatgataaatcagatcctgtatatataaccattgtggatggaggaaaccttgaaggtttagcatccaacatgacggaaccacagtcaaagtattctgcattccgagaggccatctttggacatgccatttttgacataactaac

SEQ ID NO: 11218 - DNA, 410 bp, Glycine max
cccacgcgtccggcttatcttatctacttgctttcttcagttttcttttcttcatttggggtagggttttcttttaaggtgttaaatgtttgaatgtttattctctctttaatgtttttgtaatttgtacagtaggattggtggtgggagtatttttcttatataaagtctttgtcttcatcatgtagcacttgttttatggtacgtacagcgctgttgctgttctgatcctgcaccggggaacagtgtaaacatcgtgagaaagttttttttattttattttatggggtaccattgacaaggagagtgacaggggtatgcaatgacaccatcgggtttggtattaaaagagagaaatgtgtacgtcgcttataatactatttatgaaaccagagaggacagaagcaacg

SEQ ID NO: 11219 - DNA, 398 bp, Glycine max
  modified_base (298)..(298): a, c, g, t, unknown, or other
gttcttcatcactgcttggaccgaaccaagacggagtatcgtgccgtacctgtctccgagaccagcgaaacgcagcacccattgcatctctctcttctttctttcgaagcaacgaagaaactaaattataatcatcgagttccctttcgacagaaccaaaaccctcacttccgatcgatcaattttctcccttttccgaccaatttcccctcttttccatcggattcaattcggaagaagaaaaggggaacccgcgaatcgatggatctcgggttcggtgtgaggagtggagggttgntgaggttgggcccgtgatgggattgaaatccgttggattgattgaaggaagcactttcgcggtggtggtgatgagaagaagaactgaaggggcaataatg

SEQ ID NO: 11220 - DNA, 371 bp, Glycine max
agccttcggccattaccggcattaagaatggcttggtttattccggccatttggaaaggacccaggcaagggttaccatccgacgccaagctgcaaagcttcgttccattttacaggcgccaaagctcagaatatcccaggaggagatggtgactatacccttgattggttctacttatgacagctatgcggcaacatggagtgataaatacaaggacaatgataaaaaaattagtggatcagtcacgaatcagcttccatcatctaaagattaccttggggactttcttgtatggaaacctcctgtcgggttagggaaaaatcgagctttctgggttggcctaacaatatggttgggattagttggagct

SEQ ID NO: 11221 - DNA, 306 bp, Glycine max
ttcagaaaaaaaagaaacctaatcgccgatcgcgtcgaaagtccctaagcttacatcctgcttctagatagttggtaatcttatctgagggtagtagctagtaccatgggagaagtggcagtaatgcactctgagcctctgcagtttgagtgcaatgacattagtgtgaatatgactgagaaggaagtgtatcctccagaatcaaatgtggagcgcttacctggagaagaatcgagtcaatcaacagaccacaaaaatatcaatgacttgcaagagagaggatatatggaattatgaatgtcagca

SEQ ID NO: 11222 - DNA, 211 bp, Glycine max
  modified_base (196)..(196): a, c, g, t, unknown, or other
gagctgtaaccagaactccaccatctgctgggaccaggggatcactggatcggctgggcctcgggagatactctggtgctttgcctaatacaaaaattaccaacatttttacttccccaaaagtacaagcttgtatagcttcaggtgtgcagaggaagctggatatggcatatgacgatggaattaatagcacganatcattgaagactac

SEQ ID NO: 11223 - DNA, 440 bp, Glycine max
  modified_base (406)..(406): a, c, g, t, unknown, or other
gagctgtaaccagaactccaccatctgctgggaccaggggatcactggatcggctgggcctcaggagatactctggtgctttgcctaatacaaaaatcaccaacaattttacttgcccaaaagtacaagcttctatagcttcaggtgtgcaaaggaagctggatatggcaaatgaggatggaattaagagcaagaaatcattgaagactactcaacaatcaaaatatcgattaccaggaaaaggcagcccaacttctataaacaaggggaggactgcacgtggggtttcagaaacagctgagaagttggtcaatatgtcaatcggtactcgaagactgtccttgggacatacccgtacgccttccatgaaagctggagtcaattggatatctgaatctggaaactngctcatgtccggacaacaaattccaactgaaaga

SEQ ID NO: 11224 - DNA, 149 bp, Glycine max
  modified_base (135)..(135): a, c, g, t, unknown, or other
gtactgttctattagttcatactaagttctgaaaatgagttccaaggttttgcttgttcgacttatgttcttggccactatacttctgatctcctctgaggttgcacccgatgatgcatacgagaattttgacanaatagatgggaagc

SEQ ID NO: 11225 - DNA, 401 bp, Glycine max
cccacgcgtccgcccacgcgtccggtcatttttccctcattttctcgagaaaataaattgccaatctttacactgagattctcttctcaaaatttcttcccactttaattctttccccttctcattgtttgtttccactgatttctccatatccccgtcgtggagaacgctttgacctttcttagatttgttcttccaatccaaagtttttatctttttttcagatttttaagttggagcatggtttttagtcaactgagtctcttccaaatctttaaattgttctaaatcttttctgggttgaaaatttttgcttctttgtgtctgtgtctgtatgtgtgtcgttgttggtggatatggattctaaggatattaatggttgcctcatggataaacataaa

SEQ ID NO: 11226 - DNA, 139 bp, Glycine max
cttcggcgaccgcttgggaaaaaattacctttagaaaaggaaaattcctatgtgcttcgctgggtttctagattgtgccttaccctaaaacctacctttggccaccgctgatacttatttcaacataaatggtgatttc

SEQ ID NO: 11227 - DNA, 312 bp, Glycine max
cggacgcttccgcccacgcgtccgcccacgcgtccgggcgttcaaggtggtggtggacaaggacgccaccactaccacttcctgagcctattccaacgactgagccaccaacaccttttacaatttcactttcaccaccttcttcaaatccaatagatagtgccagagtgcattcgcaaactggatactgaggtatatgcatactaagaattctcgtttcaatagcaacaacagtatctacgcatataccctgatgaatttcttgaccaatctgatgcaatggagaaaggtgattatcagattgactatgtg

SEQ ID NO: 11228 - DNA, 445 bp, Glycine max
agaatggattcctgttaaacctaccccaaatgcatttattatcaatgtgggggatataggtcaggtatgttattagtacatgattttgttaacatcaactcttgaagtattaccctttctcctaaatggtccctaaagtcaaaaaaatacttaagtagtcaagtatttgaaatcattctaattagtcttccaaatgtaaaagaatccttttcaaattggttcttaaactttactcaaatatgtcaacttaaggactaaagtgatacatgttcaacgctttggagattacttaaaaatagtttattactttaggggacaacttagagaaaggattatactttgaagaccaaatttgtggtcaaatgtactaaatggattggttctttttcacaaaataatattctattaattagttcttaaaattagtccttcataagctgatgtg

SEQ ID NO: 11229 - DNA, 380 bp, Glycine max
cccacgcgtccgtgcagggtcagggtgtccgtcttactcctccgcccgctaacatgggacagcaagtccacggggctatagggtaggacagcaagcatcatagggactgataaacaactgcagtagaatgagtccgataaggacttaatgctttgtatggtagaggcatggatacttaaacaatacaccaaattacctgtacactatacctttgtaattgctacattttcaaattatgatgtggaagtatcgagatttcataagaaaaactagttacaagttaagatattaatataattagttacaagttagttattcttgtaaccaattatgcaacaacttattagtattagttatataagatacaatcattacaaaag

SEQ ID NO: 11230 - DNA, 412 bp, Glycine max
aagaaatcagcggtgccatcctcatctagtagtcctccaagaaacttacctgttcaaatgaagtcagaaaaccaaactagagttactggagatcctgttcatgtcaggaaaacatcttttggtgtctcacaatcaactgataaagaggcgtcttcatcttcaacttctgtatcacaagtaacaattggtccaaaaacagaaatccagaaagcttcacccccaagactaaccgaaagatccatggcacaagtggctatgttgtcaaggccatctagtgctccactagttcctggtggtcccaggcccactgctgctgttgtctccatggttcaaactgctccactacttgcacgctctgtgagtgcaactggtcggttaggtcctgatccctcacctgctactcatagttatg

SEQ ID NO: 11231 - DNA, 317 bp, Glycine max
ttcttctattcattcagctggcactaagcggtctgtaagagacagaattggaagtaatgcaaatagttctgggtggcatggaaatggacatagcggcaataaacgacaccgaggagatgtaagcatgcaaaatggactggatggcaatgatctacgattgaagctcatgcgaaaaagtgcattggggcaggctgacagcaatggcagtaagaggcatatggacctccgtgaaaagctgtcaaaggcaagtcaccctctggctaacacttataattcgaagcagcatgggccagattcaaaggaaacaagtttgaagc

SEQ ID NO: 11232 - DNA, 397 bp, Glycine max
cccgtgacaggccttcgattgtatttggaaggaaagagaagcaactgcttggcaatccatgtacagcacctctcttccctgcccaaaactttccaactccaggatgagcctaacgggaatgcgtctaatgactcttcagaacgcaagtactatgagaaggtccagtggaagagtttctctcacgtttgcacagctcctgttgattcagatgatgacaatgctgtcgtgactggtgctcactttgaagttggagatactggccttaagaaagttctattcctaaaacttcatttctgtaaagttgttggtgcaacccgtgtgaaagtacccgaatgggagggttctcctggctggacccagaaatctggattatcttaccatggatcagcactacctt

SEQ ID NO: 11233 - DNA, 63 bp, Glycine max
aaaaaaaaaaaaaaaaaaaaaaaaaaaaaaaaaaaaaaaaaaaaaaaaaaaaaaaaaaaaagg

SEQ ID NO: 11234 - DNA, 441 bp, Glycine max
gcgattccggctccatgtaccgcaacacatttacctcaggtattttcttcttttttccttgtttggctttcacgacagcttcgtatctaatttttttttaaccttccttttctctgcgagtattttccgttatggctgaagaatttgtgaatggctttgttcatcaaaacgacatcgctgtcataacccacaatccccctaaaggcgatttcggctccatgcccacaagttgttgaagacgagtttttaccacaacacattcacctcaagtatttccctccttttttttctttcaacaccgcttcgtatctaaatttttttaacccttcctttcttttgcagtattttctggttttgcccaaaaatttggggatggctttggtcattaaaatggccttactggcataatccacaattcccccaaaagttattgggaagaaa

SEQ ID NO: 11235 - DNA, 315 bp, Glycine max
  modified_base (268)..(268): a, c, g, t, unknown, or other
cccacgcgtccgggaagtgatctaaagaacttgtgcacaactgctgcttatcggcctgttagagagctaattcagcaagagaggataaagagtctggataaaaagcagaaagcttccaggggacagaataaagatgtccaagaaagtcgaggacaatccgtagtaggaaatactcaagatgctctagatgaagaagaggaagttaaacaggaaagagttattattacccttaggccattgaatatgcaggatttcaaagaggccatanatcaggttgctgcaaagcttgcagctgaaggggctggaatgggtgag

SEQ ID NO: 11236 - DNA, 337 bp, Glycine max
tcggccacgcgttcgggaagtgatctaaagaacttgtgcacaactgctgcttatcagcgggctagagaactaattcagcaagataggataacgaatctggataaaaagcataaagctttcatgggacagaataaagatgtccaagaaagtcgaggacaatccgtattaagaaatactcaaaatgctctagatgaacaaaacgaagttaaacaggaaagagttattattacccttaggccattgaatattcatgatttcaaagaagccaaaaatcaggttgctgcaagctttgcagctgaaggcgctggaatgggtgagttgaaacaatgggactatt

SEQ ID NO: 11237 - DNA, 410 bp, Glycine max
aatccgttggatgttgctagtggctgtcttgggggtaagagttaggatggtgtgccaaacttgtaaactctacatggtactggtttttaagttcaagttatttgcttggtgtgtttgagggagtgttgacaaaattgattttaaatgaaattggttttgcaaaattgattttggttcaaattgattttgaagtgacgtgatttatgtttaatagtaaaatttagtgaaaattattttgatccaatgcaaaatctatctaaagtaacttttactcgaaatcaatttttctcaacgtagaatcgaagatgtaaacatttatctaaaattcggttagttggtttttgaacgtgattctggataagtcaatgttaaaccaaacatgcactttgtctgtccctattatttatagt

SEQ ID NO: 11238 - DNA, 333 bp, Glycine max
tccactcgtgctccaagtcgtgcgacctatgtcccatgcatatgcagatgcaacaaacgcgacaggatctgaagaccactgcggcaccaatctggacctatactcattcttctactcctagttcctccggcgactacacctccgatgcaccatcgaatcaggtagctgaagcacctgacaagctcatacaagacgaacgaatcatcggagacatgctaatacggcgcctaccgcctcatcacagcgctctacgaccacgcagcgcatcctcaccaaggcaacacgtctctccaagtgttactcatgcagactcatgcatgcgatagtatctta

SEQ ID NO: 11239 - DNA, 175 bp, Glycine max
aaaaaaaaaaaaaaaaaacataaaaaaaaaaaacaatgacataatcagatgcaacaaacacggcagggatctttaagcaactacggcaccatatatggacctatactaatactggtactccttcttaatggggccaatctaactccgatgcactgccgaatcatacatctcaaac

SEQ ID NO: 11240 - DNA, 383 bp, Glycine max
agacgggcttctgttgatatcttcttaaaggcagctgggtatcttgactgtgctgtaaggcatgttcttccacagttgcctggcgaactcaggagaaatttaccagtagatcttgcagaaggagttcttcgagcactctgtctacaagcattgggacagggtgtagatattcaacttggaatggcaattgatagtaccaaagccactcttgcagtgaagcgtagacttgcatgtgagatggtgaaatattggcaacaggctcaagataatattatgaaccttccattagaaaatggatggggtgaaagccttggccttttgggaaatggaagtatattgaaacgaaagctgcagcatattattatcatggattgagtcttgat

SEQ ID NO: 11241 - DNA, 258 bp, Glycine max
tatactcgtaatacaatacctaagttaccaactctcaaactgacatatagagtacggttatagaaatatatggaatgcataagatatctccatatatctatacttgtcattacactcaataacaagattattttacatcaaaaacatacaaatcctatataccacctacatcaactattgtctaaatttactgcaaatactatttgtacaaaatttattatcatactaacctagactataatgacaccaatgaataat

SEQ ID NO: 11242 - DNA, 391 bp, Glycine max
gtcaagaaataatgacggggtcgtctcattctgactgatctgagtgtgggcgctggtgctcacgctaatgttgggagttatcaggagctggaacgtggttgctatattcaaaggcccttcttcaaccatggaaggtagggttctcctctttgtccgctgtagacggccggaaacaccaccttctggatttgcaggagatcgagacggttctcaccgacgttaaagctgacaacgttaaggttataccagttcccaagcactgcgattgggctgatttcatggtactcgacactggcaggtgcacctggcacgtcaagaacatcggccaagccctaatttacaaggcttagcagacacagagaggagttgaacgaatgatgctaccaagtgt

SEQ ID NO: 11243 - DNA, 245 bp, Glycine max
cccaggcgtccggtcttttaagttgcaaggcaaaccaaagctcaccacagaatggcgatgcttagtccaaaacagatgcatttctgaaactctgaaaggtatcttgtgaatgaatctttcgcgagtggcgatgagactgagtccatgatgcagatgatggatcagtttgtggatgatttcgacgcttcttgcaccgcctctattactttaccaagaaccatgataagttctctgatgattacttt

SEQ ID NO: 11244 - DNA, 445 bp, Glycine max
accacgcgtccggtctctacaatcactccttcctctcatcctctataaagaaagtgcttagtttgtgttgttacttggttcagtttccatggattgggggcttgctatatcttctcatcctaaaccttattcagtcacaactggtggaaatctctggcggagtaaacacaccaccaagaatatttactttgcaagttcttggatatcaaaagcttcacgacacacaagggaaactcaaatagaacataatgttttgaggttccaacaaccaaatttggatcatcattacaaatgcatcaaaaggaggtctacatatcaagaatgccatagaaaatttggtgttaaagccatctctaaaccaccttttggttttggagctcatgctttcaatcctaagaacattttggactctgtcaaaaatgtattgtctgctttctactggttt

SEQ ID NO: 11245 - DNA, 437 bp, Glycine max
ctttgacactgctcccaagaagttgttggcatctgactctcgtctacgtcctgatagaatggcccttgagaagggtgacctatccacatctggttatgagaagagcagtttggaggagaggcaaagagctgagaagagaaaccgagaggccaagggccataagttcactcctagatggtttgatttaacagatgaagtaactcctaccccttggggtgacttggaagtttaccaatacaacggtaaatatacccaacattgtgctgccgttgatagttctgagtgcattgaaatgcctgacatcagaccagaattcaacccttggcaatatgataatttggatgctgaatagtgagcattcttggggaattctttctattttttttaaatatcattttggtattaagtttggaatggaatcctgattggaatgcttg

SEQ ID NO: 11246 - DNA, 423 bp, Glycine max
  modified_base (367)..(367): a, c, g, t, unknown, or other
agccttcggatttttcaatattaatataaaaatcttaaattatgcattctcaaatggaggaaatggtatcttggaagtactttttttgtgtgtgagagatctcggaagtactttctatgtactccactacacatgcagcttattttagcatttaaacttatttatcctagtgacacagccaccatgaaagtcgaaatttcctggaaatttcctttggcaaaatctgatagtcagtctgacaaagacattaataatagatatcaactcaacagccatcacacaatgaagaaattaaaataagaaggaagttggtactatttactatataaaaaatatttaaaatacattcacatttctatttacattntatttttctttcctatttctctccatttattatcacatcatttgtcatatttctct

SEQ ID NO: 11247 - DNA, 408 bp, Glycine max
ataacatccactcataatatgcttaatgtttagatattgatgtgtgctaagcatagttgagcaaaaacaattaaaatataacattgtcggtggattcatggatttttgatgtaaagccaagctaagctaaggttgacacttttttacaccaacttttctctctctctgtgtacagcctaagcttaagcttatccctccccacttgttgcctctgccgtatgttatagccaaaagggtgtgtgagagagagaaacataaacacaaccaaccatcaagggaagttagagagagagttgagttgtgttgagagagatagagagatagaagagaagatgaacggtggtgaatcttacggtgctattgagacacaatacataaggaggcatcacaaacatgaaccaagggaaa

SEQ ID NO: 11248 - DNA, 429 bp, Glycine max
  modified_base (366)..(366): a, c, g, t, unknown, or other
gcgaagagtgcaggcaagagcagattgagatagacgaagccaaagagaagaataggaacctttcttcatcgatgaaagctttaaggaacaaggagcagagaaataataataataaatccacgtcgccaaacaaggcgcaacaagactactcgttccgtacgggggcagttgcggcggcgtagggtacaagtacaacgtaggattcctcgagagaggaaccaacaaatgaacgaacggaactgagggcagtgttcccggaaaaggaaagaaaacatttttagaaaagaagaaaaaaaaagtgtgactgaaaaggaaagtaaacaaagggaagttaagttgcgagctttggtttacttctcttctttngtttctttctttctttccacgaacaaagggtctcaaagagaaaggggatttttgtgagctgtg

SEQ ID NO: 11249 - DNA, 379 bp, Glycine max
  modified_base (1)..(1): a, c, g, t, unknown, or other
  modified_base (133)..(133): a, c, g, t, unknown, or other
  modified_base (293)..(293): a, c, g, t, unknown, or other
nccacgcgtccggcactggtgcaggaccagaaggagaaaggaaaggaaaaaataaaaggagaaggaaaaggagaagggtttggtagttggttacttagtttgtttgattaacgacggcgcactacacgatccncacaatccagaggcttgttattatctccatccatttaatttaattcccacaaccacgctcacctaagtttcaatttcaatcccttttctttttcttttttatttaaaattccaatttcgcgaaccccaaattccctccctccttttccctttctctctgntctgtaacgtagcatttacagcgatcaagttatagtgagtcacttaagagaagtttaggtatcatcgatcatctatggcagggtac

SEQ ID NO: 11250 - DNA, 279 bp, Glycine max
tgaaaatttacagctttgctgtgttcaatctcatttttgttaatgtatagatgttttgcgtccctttagcgattgaacagcgctatagacagatgtattatttaatttcacatagtgaatataccctacaatacataacgagccatggctagtccaacaggattatctgtattatctactgtcctgttttggggaaaaaaatattttattgtaaaatttctggaccccgacacacgaaatggtatgttctccaacaataaatcttttgtttgtgttttc

SEQ ID NO: 11251 - DNA, 138 bp, Glycine max
cgttcaatttacgaaagaggaagaaatacaaagtttttgggacctcttctcttggcttataaaaagtgcaaaacaggagccttcttggtgttttgatgtcgattggaattatatcatagaaaggaagaagctttgagg

SEQ ID NO: 11252 - DNA, 373 bp, Glycine max
cagccatattctatctctacgccgctaactctctctcactctcgcgctctctctgtcacaaccttcactttactctctctgacagctaaaatgcaaggaggatttcaatcatttttgtcacacgggaatgtcattagaaatgctgctctacaacgggtgcgcatggtgaaccccctgttacagccaattgtctcttcgcggtttgaatctgttacacctgctcgcattgacgagcatggttttgagagcaccacaatttcagacatcttgaatgataaaggcaagggtgctgatggctcctggctttggtgcaccacagatgataccgtttatgatgctgttaaatcgatgacccaaaacaatgttggagctt

SEQ ID NO: 11253 - DNA, 349 bp, Glycine max
gctacatcatattctctctctcaccctgttcttctttcaagtttcaatggatcgaacccggatccttctcgttggattaccaatcttcctcttcttctcagacattctcaacctcttctctcctcaaccctctcccaaaccaacccatcatcatctccctcccatccaccccaaaccgcaccctcaaccgcaccttcaacaacccctcgagttccccacgcagaaacaaagtggtattggccttattggaattggcaacaccgtgagcattgacttctgcacttcctgctcttacaagggaaatgcagtaacagttaaaaacatgctggaatctgaatttcctgggatt

SEQ ID NO: 11254 - DNA, 408 bp, Glycine max
cccacgcgtccgctgatcactgcaccagttggtatgcataacttaccaaggttaatgttggtgaaaccaagacttcattgaagaaaggcacgaggagttgaaagctggcaaaaaaaaaaactgcattatcctctaatgctgtgtttggttgagggggaggagagaaatagaaaagttgtgagggttccatgtggatttctcgcttcctacaatatacttaaatttgaatatatcgcttatatttttatcctctattttcattctctggtccaaacacattgcttcaaaagatgaagggaaaagaataaaaaaaaaaaagatggaggcagaagaaacatttttttcctgttgtaaatagtgtgtaacttgaacaatgctgattacatgaaatattgatttgagctttgg

SEQ ID NO: 11255 - DNA, 373 bp, Glycine max
tcccaaatctggaagaatatcttgggaagcaggtcttagaggctgtttcattgattgaagttagaaggcacttcattgaagcattatccagtccgtttggaaggccagttgaagctgatgctgtcttttgcaggaaggcaacttttcttgctgcatctggtgttttcacgttcctgaagcagaagaaataccgtgtgacagaaatgttgggatccaattgcaagatatgggacttgagttccacattggaagtaatgagattctaatgtgggttttataagaccttgggctctctgactacaatgattagcttttgtggtatgattcactcaaagttcttatcaattggtattagagcttttcattatgtctc

SEQ ID NO: 11256 - DNA, 328 bp, Glycine max
cgcatactactacaacatccagtccacgtacctcggcttcattggcggcgtctacgacgcggactggaacgcttccttcgacttctcctaacatgacctttttatcgtacttgaccaagctttagctctcaagcgcaaataatatccttcccaaggccttctacaacccaatctccccaagctggaccaactaatcgacttctacgatcacaagctgtaaccgaaccagcttcgctacttggatgaaatcctacgcctccagggactcaccggtgacattcactgaatctcaaccgattctacggatgaattctattttgacaggtat

SEQ ID NO: 11257 - DNA, 419 bp, Glycine max
gtcaccatgactttcaagcgcaggaatggaggtcgcaacaaacacggccgcggccacgtcaagttcattcgatgctccaactgcggcaaatgctgccctaaggacaaggctatcaagaggtttctggtgaggaacattgttgaacaggctgcagtcagagatgtgcaggaggcttgtgtctacgaacaatacacgcttccgaagctgtatgtgaagatgcagtattgtgtttcctgtgctatccactctcatgttgtgagggttcgatcccgcactgataggagaaagcgtgagcctccacagcgattcatcaggcgcagggatgatgcaccaaggcctggtcagcctggtcaagccccacgtcctgctggagtaggagctcctgcccgagcttaaaagaaaattccaagtttttgggg

SEQ ID NO: 11258 - DNA, 430 bp, Glycine max
attaatttcactgtgctggaatgaattatgatccccattaaaattcattgacagtgccggtagaataattgccacatttgagtgggagtttattaagatgagctgaatggtcatttttcagtcatgaggataatcaatggttattggtgatgtacgtttgagtacatgtgagcaaattaattgtttattttattagctaggtagtcagggggaggggaaatggttagtatcaaaccttcttcctcatccagatacagctgccactgggccatatgcctagctgctactgcctttaaatcatttcagtataaatgatggaatcccaagtactactgccttttctgcttcttgcttattattcttttcagttttgtaacttgagttgtgtgtgtagatatcttatttcttgaactgtacttgagttgtattc

SEQ ID NO: 11259 - DNA, 434 bp, Glycine max
cggacgcgtgggcggacgcgtgggcggacgcgtgggttccacgtttctttctacacactggattttcaaaacaaagatcgtagaaaagcggttgcgttccggctcggttaattaacacaccaaaaccaaaccaacctttctccgtcaacatttaattccttccgtcgctagaaaaatgcccaagccacgtctggatcggaaaaattagggcgctagggttttgttcgcttcatccgattctgcttcggattccgatcggaaatgtccgaacctcattcatcgtcccgaacctccgcgtatctcgacgcgctctctcaggcgatccacatgaagcttcagcgggcgttggctaattcctcgcagaggcgcaatttgttgcaggagctgtttgcggacatagctttagaagtcgatgaccgagccaaagatgtgat

SEQ ID NO: 11260 - DNA, 433 bp, Glycine max
  modified_base (4)..(4): a, c, g, t, unknown, or other
  modified_base (13)..(13): a, c, g, t, unknown, or other
  modified_base (16)..(16): a, c, g, t, unknown, or other
  modified_base (25)..(25): a, c, g, t, unknown, or other
tcgnccacgcgtncgnccacgcgtncgcaggggtcaaaatcgatcgtcatcgagtttggaccaacgtgcattcaatctgcaactctcggtagtactacagtgctatatagaagaaacgaaacgaaactctatggtgcttaatagtggtggttgagtttttaggttgagaaagaaagaaagacacggcgacgaagacggagaacagtggtggttcttcttcgcacgtgcgagcgtgctttaccatcgtctgtgcctgcaggtgtaggttcgtgtgggtttgtggttgaaaaaaaagaggtggttaagatcacggtttttgagtgaaggaacagtgagaatttttggtttttatttttttgaaaaatgcctcacagagcaacttactttttcccgaggcaagttcccggaagaggattggatgaatcttcgaagc

SEQ ID NO: 11261 - DNA, 353 bp, Glycine max
ctcactcgtccgcacatgcgtgctcccacgcatacgatcacgcggataagaggcagactactgatagtccacaatctcgcaagtaatagaacgatacgacggatccatccactagagctgatgccggtctcagaaaagttactgtatcagatcataccctatcacaaactcacttgataagtgatggatgccaatctcgattatattcacatacgataggtcatggattccatcgctgtttatcatactactgatgcaccatgcatgctcattaggcaattcgcattcgctgctagcgatatgcatgcgacagatcaagatatactacaacgtgcactgggacccatcaccat

SEQ ID NO: 11262 - DNA, 318 bp, Glycine max
tcggccacgccttcggccaagccttccgaaaaacaggaagtttccaccattgactaccacccgggttggtatctgactttgctttgcattcctttactacgcggttgaaggagccaaggttagtttcaataacaagtgctcatacacggtatggccaggaaccctaaccggtgaccaaaagccccaattatcaacaactggtttcgagttgggtccaggagcatccaactctgtggacctatcatctccatggtccggtcggttctgggcccgaacaggatgctccaacaacaacggaaggttcagctgcgccaccgc

SEQ ID NO: 11263 - DNA, 358 bp, Glycine max
caagaatcttacattaatgcgacacaaatcttagtctgtttggttgctcgttactaacgctagatccatgtctgggctgaagccataatttataggttctgcatattatttgatgattgatacaataatttataggttctgcatattatttgatgatcgatacaaaaatttggcgcaaaacttgaagtcacaaacgtgtgtttgaaacacggtactaatgccaagacatacaacttcatggaaaactatattgcagatagataaaccaatattgtgatgctcatactagaagctattgatgaggctaacttgggatatagctatatcatatttggaaggagatggtttgccagacaca

SEQ ID NO: 11264 - DNA, 320 bp, Glycine max
acgcatgaatcttacattaatgctactcaaatattagtatcttcacatttccatgacgtcaaggcgatcacatgtatggcatggaccattacatatacttaacgactattatcctatgactgatccaataacctataggcaccgtctataatctgagcattcatccatatttgaagcacacgaatcgagacctaaaccggagagagctataacgctcttcaagcctgtcgtacattccccttgctcattctctctcactctcgattctgaccttatgaaaagaactaggtaacaatcaatatctgtggtccaaacaatgt

SEQ ID NO: 11265 - DNA, 341 bp, Glycine max
accaacttctccatcgtcttcgttggctcattcgattccttagcttcacatctccatggcgctgcaccggttactgaagaggaaaggaggcgtcgatgaacttaacgacgatttccctctcgcttctccggcaaccaagattcgccgtctcgacgctgagttgccgccaattttggaagaggacgaaccgttacctaacgaggagagagctctcgttctcttcaagcctctcgtccattccccttcctctttctctctcactctcgattctgaccttatgaaaggaattaggaacaatcaatatctgtggtccaaacaatgtgagcgcgtgacagagttag

SEQ ID NO: 11266 - DNA, 354 bp, Glycine max
cggacccgtggtcggacgcgtggggctaaagatacctctaaacattcgcgcgcaacgccgttcctgctccatggatgatggcacaatggaacttgctggacactctagagcaagtgaaacatcagcaatatccaagctcaaggtgagagttgaacctgaagcatgtgggaaagggcttgtgccatatcaaatatgcatatctgttgtgacagctgatgatcgagaagagcaatgtatgcatctttccttgtagcttataccccactggattctgccttcaaaaagcgttcactttgacatgatgagctgtcatggatggctaggttgctgctggatgtgagacggtatgatata

SEQ ID NO: 11267 - DNA, 378 bp, Glycine max
gggcccaacaccaatgttgggccagaaccgtgggctaaattggagtggatggatggtggctcctgttaaaggtgaatcgattccaatcaaactggttcctcggtccttatgagctgaccccacacatcgtaacattaataacaaatttagtgtgaagtactttttaaatcttgtgttggttgatgaagaggacagacgatatttcaagcagcaggaaatcacaatgtataagctgcaagaagaaacttcatgattacttatcattcggggagtgagtattaggtttggtaacaaataaaaaagattgtgatggacattcttaaaatggcttagtgttctagcttgctttcatcactttcggtcatgtacatcgacaga

SEQ ID NO: 11268 - DNA, 408 bp, Glycine max
gctgaaggtttcaatggtcctgaaggttgtccaaaaggggttggaaatcgggaggacatgggaaaatctcattctacaaatatgtgatgattatttcttctatgaacaaattgaaaattacaataagccttttcttgatgctctggcccaatatgatgatgggagggacctatctgattatgacttcaacgaagatgaattagtttccccacatgatgatgccaacaaaagaaaactggcatataggcatcgagtcattgcccaaaagtacttacagggtttacggaatattttagataataagaccataaaactttgggatgaattgtatgataaaactgatgaatacactgacaggtggctttcatcagcacggacctttttgaaggagtgttcgggtgaagataa

SEQ ID NO: 11269 - DNA, 292 bp, Glycine max
gtgagtcgcagaaccctcccatggccgccgtggcccctccgcggcgcaagcctggatcagtacgccaaggcctccgtagttctctccgttcttctcgttgtctccgtcatcgctctcttggtcctttcgttgaacaagttgcgtgcgttccaactcgggggatcctatgagacgattactgtcattaacgttatctcttactactatatatccttactctactgcctcgattatgattgacttggcacattatcatagtatactgatctgtattcgatttctaccacttagt

SEQ ID NO: 11270 - DNA, 324 bp, Glycine max
ctcacaattcatttgttacaacttatatttatatatttactggtaaatattaatggacacgttacaaatttggtcattgagcctgtaaactgatcactatctacaatcttatgtcaacctatttacaaatttaattgaatcgactactgttctatcctttgaatctagacagaagcagtttaaatcttatctatgcaatcttgattacaaatatgctgaaatatcatcatgttaaggcctgatgactacacagatttattatttataactttaagtttctgaacaactatttcttcagctaacaattttaaaccatcgaacata

SEQ ID NO: 11271 - DNA, 234 bp, Glycine max
aaaaaaaaaaaaaaaaaaaaaaaaaaaaaaaaaaaaaaaaaaaaaaatataaaagatacgggctacaatactcctgcatcctacactaatatataatgtctcgtaacttcaaaattctgttatctggccaacaacttacaaccatggtaactgctattactaaggcaactctaatgctaattcacttcgtatccctttctcattttgccagctggcctaccaggtttaacccca

SEQ ID NO: 11272 - DNA, 409 bp, Glycine max
cccacgcgtccgcccacgcgtccgggctccaagagaggattttcctgcagaacaaggggaggtggatgttaatgcccgtaatttgctgcccatggataccacaggaaatgctaattttgaattggtgcaacttttgggagatttacaggcccttgctttaaatccttttcatggtattgaaagaaagatcccttcagctgttcagaagttctttctgcgattcaggtctcttgtttatcaaaaaagcttgtttgtatctccaccaactgagaatgaagctcctgatgttcgtgtcactaaacctccttccagtgtcgggatatctgacagtcctgatgagtatgtcaaagcttcaccggttgtaaaacctttgaaacatattgtttggcctgatgatcctacaaaagct

SEQ ID NO: 11273 - DNA, 421 bp, Glycine max
tccacaaggaatccgtcaccaaggtacccaacgcaaaacctggcagagagagtacggatattgaaatatatggaatgcaagggattccaccagatatcttggctgctcattacggtgaagaagaggatgatgttccgtcaaaggcagccaaggtggatattccaccaactcagcttgtaggtggaatgattccacctcctttgggtacaggatatcctccgcgaccaaccttgcccacaatgccaccaatgtataatcctgctgtacctgtgcctccaaatgcttggatggttccacctcgacctcagccatggttttcacagcctccagctgtttcagttcctcctgctgccccatacacacagcagccattatttcctgtgcagaacgtgaggcctccactgccagctactgctcctgc

SEQ ID NO: 11274 - DNA, 432 bp, Glycine max
gaaagagggcactgtagacaacgagttcatgcagaagaagagttccaagatgtgctgtgtctttcataaacagaagccctttgacgaagatgatacgtgatgaggatgaacatcactctgatgaacaccctcacgatagtgggttttgctgcatgaatcatgatgatgctggcccaagcagttagggaactgattaagctgagaggttattaatgaaccatgagaggcatatattatgtagagtaaatgattcaagaaacccttgaacttgagtctgaatgtcaggagatatttataatcgcgacattggaactagaggaacattcagtgtcagtttgagtgtcacaaataattggcctagtttactaccaaattggtttcactaacttatgtcatagatgcagttgttaaaagatctatgatgtaatcatg

SEQ ID NO: 11275 - DNA, 374 bp, Glycine max
tcgagaagcttttcttcgagccttgaatgggatctggtttgctgggaagcacattaagcttggacctggtctttccaagattggaacctggattatgcaacaatcacagaaaggaaaagattaacctgattttggtcataggttgagggacaacctatacttaagggataataaagcaagaatgtcatctggaattaatgcatctggggtcagcttggaaaatggatataatcagggatttcggtctgaaacacagctacctggttttatggataactcactggttcatgtgaattctagcattcacaagaccacaagaggggcatttgctggaaaagtatctggtggttttgaagcctgtaatgctattgatg

SEQ ID NO: 11276 - DNA, 180 bp, Glycine max
cttccgaaaaacaatctggggcgaaagggggagtctcttattccttctagacgcttacattgatcggcgaggtctgatacatggcggagcatcacgaacacatacgaactgaagggtgagtccttgttggaaaaaataagggggaggatcttttaagactccctacttgtcttccccgga

SEQ ID NO: 11277 - DNA, 437 bp, Glycine max
  modified_base (1)..(1): a, c, g, t, unknown, or other
  modified_base (10)..(10): a, c, g, t, unknown, or other
  modified_base (330)..(330): a, c, g, t, unknown, or other
nccacgcgtncgaaacaacctcagttgggattctcatgaatcccataaattatctggaattacttgtggaaattgtcagtatggtggctcaaatcagaacctggagaatatgatcggtacagtcatttgtcagtatggacaagttacaccaaaattatcaaacagtcaatgtggactcttacctgtttctggggttatctccaaccttaagtctgagggacatggtaatgttttcacttctttgttctatgcacaatctggtattcaccctatgtcgagtccaaaacctgtctgccagaatgagagttctccctttcccacaagtacctncacccagtcctatcctgaaagccacaactcagatcaactacatgactgctccaatgatgctacttgtcttaatcaaaatgtaaaggataatactgattcagatcacg

SEQ ID NO: 11278 - DNA, 419 bp, Glycine max
ggcttgggtaactgattagatcgtagccttactctcttactgcccttggaaacagtgaatgcagtggatcctgaggcacccagtgttggtagtactgatgctggcaacagcaatgtaaataagagtgaagaggtcgctggaaattccaaaaataaaaagaagaataagaagaagagtggaagaactgctcaagaggaggaagatttggacaaacttcttgcagagcttggtgagacccctcctgtaccaaaaccctcaactccaccccaggatgataaagttcagcctactcctgaagttgtactggttgctgatgcttcgggggaaaaggagggtgaagaggagactgtagacacagctgctgcaaagaagaagaagaagaaaaaggaaaaggagaaggagaagaaagcagctgcggc

SEQ ID NO: 11279 - DNA, 201 bp, Glycine max
gtaaaaaaataaaaacggggtcgtctcattctgactgatttgagtgtgggcgttggtgcgcacgctaatgttgggagttatcggagctggaacgtggttgcgatattcaaaggcccttcttcaaccatggaaggtagggttctcctctatgtccgctgtcgacggccgtaaacaccaccttctggatttgcagaaatcgag

SEQ ID NO: 11280 - DNA, 316 bp, Glycine max
tcgaattgaaccatttccatattaccgtccacatatgcctcctactggtcttgcaaacccaccacccccagttcctcctggagcttgacccaaaaggcaccataagaatggagatgtctacaggcctcatatgcctgatgcctttattcgtccaagcattcctatgagacctggctttttccctggttcaatggtctatgaaggatattacagtcctccaatgggctattgcaattcaaatgaacgagatgttcctttcatgggaatggctcctggaccccctgtctataataagtactcaaatcaaaatcccccc

SEQ ID NO: 11281 - DNA, 454 bp, Glycine max
  modified_base (70)..(70): a, c, g, t, unknown, or other
  modified_base (79)..(79): a, c, g, t, unknown, or other
gcggaagctcatgattctctctctcgccattttcgccattctccctcccattttcttccacttccgcctncgacgcctncaacagctgcaactcacaaagtgccgttggctcaacgatcctcctctagtctgcgcccacggtggcgattcctccaaggcttctccaaacactatggcgtcgtatttccacgctcttcagtctcgcgtcgactgcattgagatcgacgtttctcgttcttctgacggagttctctttgctctccatgacaggcagggatttgcagcgcttaaatggaaacactagttctaaagttggttacatgaactcagaagagataagaaagctcagtgctttaacatcagtctacctcaaagtttactgatgaaagtatacttacaatccaagatgctctgatgttgactggcaaatcagtacgacagataggtctagatg

SEQ ID NO: 11282 - DNA, 334 bp, Glycine max
tcggaactaacgtgcaagttccaaggcggagtaaaccattatggccaccaaccaagagagggattttgagaaccagaagaatgaaggagaacctgagccttttgggtttgggaaaaatggcgccattgaaggcttaatggggggggccaaatctttccggtttcccaaagcaaaactcggaactttggaaatctgttgttggaaccgtggaaaacactgtaaccaccgttctgggtcccgtttaccacaaattcaacgctgttcccaaccacatcctcctttttgtcgacaacaaggtggatgaagctgctcacaaattcgatgagcatgcacc

SEQ ID NO: 11283 - DNA, 391 bp, Glycine max
gtagatcgtccagccgactgtttattctgagctcctaccctgtgaggcagctggtgaggcacctgactcacaatttgacgaattatatggcccatacaaagaaccacttataaaaacacttacagtcagtgtatcaagatcattacttggagatggcctgacagatgatctaactgtggccaatgattgccataatgaccaatctgatgtctaggccgatgcagtgaatgcttcagaacttgatactgagaatctcactgaaaaagttactgttactaccatcactgacaaatcttctaacgtgtctgatgatggcgaagatgcccaggagaatgaagagaagtctgatgtcattgctaatcagactgactctctaaatcatgtaactaaa

SEQ ID NO: 11284 - DNA, 235 bp, Glycine max
cccacacgtccggagatgcataaagcgcatacaggtcatgtattctcaaattctgaaagagcgatttatcagtccgcaagtgctaccaccactttctcagagataatggatgtgatgcccaaacacgacacaaatctatcacagcatgtgtctaccatacccgtgaaaccccgagctggagccccatttggagagactcttacattccaatcatacccatacctattagtcaatg

SEQ ID NO: 11285 - DNA, 330 bp, Glycine max
cccacgcgtccgctagtgctttgatagttcacacactaagttctgaaaaatgagttccaaagtttttcttattctacttatgctcatggccactatacttttgatctcctttgaaggtgcacccgatgatgcataccagaattttgacaaaacagatgggaagcgtactgcaaatggggtcgatgaaagcaaatattggcgtggtggctatggcgactatggtggttggcgttgtggctgtcggcgtgacggctattgacgcttgcctgctggctatagcatggcccgtggtggctatcgtggctgtcgctcagactatggtaatggtcg

SEQ ID NO: 11286 - DNA, 336 bp, Glycine max
aagggctaaactaatttggcaaatttaacccattcaaaaataaaaatggtaaaaaaacaaatttgggagttttcaaaaagctaaattacaaatcctaacctttggaaaaactcaaaaaaaattttaaattttttttttcccggggggggttcaccacttaccatttgaaattggatatcctaaaataaccaggctaatttttaaacttttttttttcactggtgcaaaaatgaattggataaagggttatggaccaaacacccactttaaaatatttcaaaaaaatattggcatttttggatttaaaaaaaaaaattcccaattttaaaatttttt

SEQ ID NO: 11287 - DNA, 430 bp, Glycine max
  modified_base (10)..(10): a, c, g, t, unknown, or other
cccacgcgtncgcccacgcgtccgctcgatcccaattccactagggattcaattccgatgcgattccgagcttgttagatccacgacaacgtttcgtttcccagattcttttgtaaaaaaaaaataatcttcctttgcccaacaggtaagttggaaaaaaatggaccatgacaagactgggtgccaagctcctcctgaaggtcctatattgtgcatcaacaactgtggattttttggaagtgcagctaccatgaatatgtgttctaaatgccacaaagacatgttgctgaaacaggagcaggccaagcttgcagcatcatccattgggaatattatgaatgggtcttcaagcagcactgaaaaggaacctgttgttgccgctgctgctgctaatgttgatatcccagttattccagtagagcctaaaact

SEQ ID NO: 11288 - DNA, 253 bp, Glycine max
gtgttgatgaatttggctgtgtgatcatttatgtgtaagtagagtggtattgagaagctgttcgaggttggattggatgaaccaatattggcgaataggaacaatggattgatgaacgcattcttatatgaagttgttagtctcactagttcacactgcatagagcgaatgaaattcagtgcctgacatatgctgagggtctctaatgtctgcaaggatgtttacttgagacagatagatgtgatcatgcatg

SEQ ID NO: 11289 - DNA, 374 bp, Glycine max
  modified_base (1)..(1): a, c, g, t, unknown, or other
  modified_base (20)..(20): a, c, g, t, unknown, or other
nccacgcgtccggttaattntatcttcattgtggtttaatgtaattagactacaacatgcatatatacatataattacgttttattcttattgttatacaacaagattttgtcattttggaacttaagggtcttggcaatactcttgtaattagggtgctgagatagattttcgaacttgtcaacttctttctagttgcgttcgtagcaccaactggtattctctatttctctttgtggttgtgcatcttgcgcttatactaatctatttttcttataaaaaattatctataaaaaagaatcacaaaattattattaaatataactttctaatgtaaaattctaggttgcaatagaaaaaaaaaggtgaatttt

SEQ ID NO: 11290 - DNA, 432 bp, Glycine max
cccacgcgtccgcccacgcgtccgcggtctcgtgggtttaatgatagaatgggctcaccagaaactaccacttccagttcacttttaccttagtccaatctcaacaattttccatagcaagcgggctggtactaaaaaagttgatgatgtactacatgatccatcttatctgattgaagttgccaaatgtggacttttctttgttttaggtgttgaagcaatgtccatttgtcatggcactgacattccttctactgttgaacaagtatcattgacatggaagttacattccttatctgtcagtttccttgttggaatggagatacttgaacaagatcggagcatggttacttttgaagctttgcaggatctttatggtgagcttcttgataaggcaaggttaaaccaaagtgaagaagttatttcctatga

SEQ ID NO: 11291 - DNA, 431 bp, Glycine max
ctcgaacatctggtcggatggagctcctcttctgaagaaaataagacatatcaaacttcaaatggagagactataaaagcagatcttcattttctatgcacagggaaaccacttggttcaacatggattagagaaactcttctaaagaatgacttggatgctgatggaaggatcaaggtcgatgagcacttgagagtgaagggcaagagcaacatttttgcaattggagatattacagatgttcaagaaatcaaacaagggatgtatgcaagtgctcatgctcaagtggttgccaagaacctgaagctattgatagagggaggaggcaaagagcgtaagttgggaacatacaaggcacagccaccaatatctatagtttcacttggaaggaaaatagctgttgcacagttcccattcatgactgtgcttgg

SEQ ID NO: 11292 - DNA, 289 bp, Glycine max
  modified_base (1)..(1): a, c, g, t, unknown, or other
ncgccacgcgttcgaagctttatatggtggccccttttctagcatcattgaaatcatggatttcaacacaccaacctgctatggctccaaggcccgatttgcctcttaaaggaatttgcgtgtggaaagcaaaacccggttctattggaagtagctccacagtaatggatatccagccaacaaaacctgaacctgattctcacacccctgacctggggcctggcaagagctttaagaatttcagatttgatactgcctccattttacaaagcatggaaacttgcttttc

SEQ ID NO: 11293 - DNA, 402 bp, Glycine max
  modified_base (10)..(10): a, c, g, t, unknown, or other
cccacgcgtncgatgatcccgcgtttgtttgggtcttttctcaattcttcaaccaacccattcctgtaccacgcgtcattctccggccaccgtccacgacggagcgccgttaccggtttaatatttgcccaaaaggcttcggcgaccgcccgtgatggataaagtcttcaacaagctccgcaatttggacgcttacccaaaagtcaatgaagatttttacaaccgcacgctcgccggctgcgtcgtcaccgtcgtttccgccgctgtcatgctgtatctcttcttctccgagctaagtctatacctctatacagttacggagagtaagcttttggtggatacttaaaggggagataccttgcacatcaattttgatgtcactttccctgctgttcgatgttc

SEQ ID NO: 11294 - DNA, 264 bp, Glycine max
aaactctcaaccgtcactctctctctctcgaaatcttctctctttctctctcatcaaacaacctcttctccggcggccatacttccgcgcgctgcctcgcggttctcccccgaatattctgttgaggtcttgaattcactaataaaggaaagttgatattttcagtaaatctttgctgtactaaaagttttggaagtttttgcaatgggtgcaactgaagatcttgggaacagcacacaaggtgccgcagaatgtcaggaaaac

SEQ ID NO: 11295 - DNA, 279 bp, Glycine max
  modified_base (121)..(121): a, c, g, t, unknown, or other
gatctgcagtttcaccaagctattgttgatttcattcagctaatctgattacaactaattaagtcaccaattataattatgtctcagttttattaattatggtcattttgtgttaattttnttccttcttgtctgtgttgctttaatttccaataaattattgttgactttgcttatgagaaaagttgagatatacagaggaaaataatattgacgcttgacatatcgactgggcttatgatcttagtcacgttggttcatcctcaagacctgtctttt

SEQ ID NO: 11296 - DNA, 440 bp, Glycine max
gaaaaataatcagcggcatcacacaccgtttccaccacgatctaattttcatggacgttgagattgatggctctgttactgtcgaaacagtaggaaatactgctataggtgaggttagtagcatagcggatgacaacagagaaggtggaagttctgttgaaccaaatgacaaccaagatcaacatgataatgggactcaagattcctctggagggatcactatcccatctgcaattcccacagtatcggttgtttcagttgaagagccctatgttggtcaggagtttgggtcagaagcagcagcacatgcattttataatgcttatgccacagaagttggatttatcgtacgtgtgagtaaactctcgcggtcaaggcgtgatggaactgctattggacgtactcttgttgcaacaaagagggattcaaaatggctgaca

SEQ ID NO: 11297 - DNA, 423 bp, Glycine max
gttttcaaatcgctaaacctacattgatacatcactgccttcacaaaacgactgcgcctagcttctagccaccctacaatcttcgtcaacgttacttgtccacctagttcgagggattcaattgagagggatagggactgatggctgacaacacacagtcttactggcaaggctacaaagcgtttaggtcagagaggttttcctttttgagcaactattcgaggttcatcaaccgtgataaacccatcccttcctggtcaagctctgatgtcgaggagttcattgcttctgatcctgttcatggacccgtcctgaaaagtgctagagaagcagtgcaatttggcctcacaggaagtgctttgggagcattatttactgcacgctatgccttgaaatattcaaagagtttacatggcgctggac

SEQ ID NO: 11298 - DNA, 262 bp, Glycine max
gcggaacgtaggtgtttgtaggttttaggacaaaatcaagttgaaccaatcaccttgttattagtggcttcttaaccgtgggattcgcacagtatgttattttttctaacataggattactgttgtaaattcggctggggcgttgcagagtggaggctcattgttattattatttttttctttggtcctacctttatttgtgtagtattttttttaatatatatatatagtgaactagtcgttatagattttttttccagct

SEQ ID NO: 11299 - DNA, 69 bp, Glycine max
aaaaaaaaaaaaaaaaaaaaaaaaaaaattaaaaaataaaaaaaaaaaaaaaaaaaaaaaaaaaaaagg

SEQ ID NO: 11300 - DNA, 274 bp, Glycine max
aaggtaactaacttttgtttggagtctcagtctcagagtatggacactcagaaagggccgtcttcatcggctgcagctgttacttcatgtcgaaagaagaagaacgaagaagccacttttttggaggacttgaaggatcacattgacgagtttattaatgcttctatggatgaacataagacttgcttcaagaaaacagttcagaagatgttcggaatgtccaaagcttgtgcagagagggacaccaatgctggcaaagaagttgagagttctc

SEQ ID NO: 11301 - DNA, 253 bp, Glycine max
  modified_base (19)..(19): a, c, g, t, unknown, or other
  modified_base (49)..(49): a, c, g, t, unknown, or other
gcctgccgtaccgtccgtnatcccggtcgcccacgcgtccgccactagnatctagtgcactcttgttatttcaggccactagaaatctagtgaatgtaagcctgctattgagatttgacaatctatttaaagttttgctgcattataagctgtgccccttcaactagcctctttaccacttcaccagcatgcttacattcactagatttctagaggcctgaattaacatgagtgccacttgatttttagtggc

SEQ ID NO: 11302 - DNA, 407 bp, Glycine max
aaattattgagggacttcctgtacagtcttaggttttattaccctcacattcgttattttcttatgtgtttgctctgcgtttgatggtgtacggtaacctggtagtgtcagagttattgtgtgtgattctaacaggcactataagagtattgggaggcactggagtttttgtggacaatttgtttgcttcatttgggtttttggagaactctgcgacgatgttcagcaggctgtggaaggcagtggccggagattactgatggacttcctgtgaagccttacgttttattaccctcacattaattattttcttatgtgtttgttctgcatttattggtgtacggtcacctggtagtgtctgatattgtgtgagatcctaacaggaactataagtattgggaggcact

SEQ ID NO: 11303 - DNA, 371 bp, Glycine max
cccacgcgtccggtttttgggtataacattgaattagctttgtctaatgaagagacatggaaaaatcgtaataggccaaaacctatatacagcaaggatatcctgtccgatgaaccggctcaacaaaatggaaatttggagaaaaaatatgaatctgatgaattatcagtttccgccatggcatccttgggcatgaagaacccacaggatatttggagtctcaaagaaaattctagaatatttcttgaagcatttagacttttttttacaaaaagggaaaaggagattggcaatctaaagcttgataaagatgatcagttggctgtagaatttgttactgcagcttgcaacataagggctgcttcatttgg

SEQ ID NO: 11304 - DNA, 407 bp, Glycine max
  modified_base (40)..(40): a, c, g, t, unknown, or other
tcggcgacacttggccgacgcgtgggtctgtgtcgtgtantgttattcccaatttgaaaatggtgacagaagaaaaagaacgaagaaaaagggaaagggtttcgatttcggaagaagaataataaggagcttctgaaagaagaggttcaatgttcgaaaatgaagacgacgataggcggcaaggtcatgaaccctaccgatgcttaccgaaaggagattcggaagaaagaattgaaaaggaataagaaagaaagaaagaatgtgagggaggttggggttttgaagaaagatcctgatcaattgaagaagcatattgagaacttggaaatgatgaacgctgatggtgctttggataaagcaagaaagcacatgatgagacagctacgagatacacttaatcttgtcat

SEQ ID NO: 11305 - DNA, 383 bp, Glycine max
cccacgcgtccggggagacggcgaaggacactacgcagaagatcaaggagacggtggttggcaaggatgatgatgatgatgatgatcatggtgatggtcatggtggtcttaaggatgatgatgttgtggagatgaggaggagagttggtaagagattaccatgagaagggttattagagaacacagaatcaatggcttcatttagtacttccatttcttactattatgccgtatctatgtatttatgtttctagtgatgtttttttcttttttttttcaacatgcggataacttggggatatcaaggttgttagttaatatgggcataatctttttgtccagccatgatatcctcttggaataaaagtttatatattaatcat

SEQ ID NO: 11306 - DNA, 428 bp, Glycine max
  modified_base (298)..(298): a, c, g, t, unknown, or other
  modified_base (350)..(350): a, c, g, t, unknown, or other
tccccctctccattcaattttctttctcttgctatctgaaaataaataaatgattattgtgctattcataaattgactgcagtttaatattattcttatatagtgccggatattgttgcgggttttcaaaaattaggttattgttttcatgcataaactcactttctgatatacataattctgttgagtgagccttttgaaattctacactcgctcttgcttaccatggattgtgcgcagaactagatacaaaataatttggtatttgttcccatgagttttacccgctcaacaattngtactgtagaacatcatttgtactttttggcgtgtattaccaaatacagaanaagaagatcgcatccaatcaactggttaattttggtttccatttcacctccttccacttatgattttggtgatatgtt

SEQ ID NO: 11307 - DNA, 427 bp, Glycine max
gcctaaatgtgttgaagtgtcttgttgatatggataatgttgggattccactaccgcgggctgatcttgagcggcttgcgtgggcttgtacccgtgaagatcactacattgttgtgaaagagctgtacaaccggataagagaaaggtatgataagatcagcttgtctgtctgcaaccatgcaatccggttgatgggaaaagcaaagaaatggtgggcagctttggagatatatgaagatttattggacaaagggccaaaaccaaataacttgtcatatgaactgattgtctctcacttcaatgctcttctcagtgcagccaacaggaaaggaatctggagatggcgtgttaagtagttgaacaagatggatgataaaggcctactacctggatgtatggaatggaatgcagttcttgtggcctgttc

SEQ ID NO: 11308 - DNA, 387 bp, Glycine max
  modified_base (1)..(2): a, c, g, t, unknown, or other
  modified_base (13)..(13): a, c, g, t, unknown, or other
nncgccacgcgtncgcccacgccgtccgtggacactggttccagccttttcaattagttgggaatatgcaaataaatattaatgtctgacaagtttaggccttggtgaaacaggagattgaagcttttcttactgctatttcttatgtttctttgatttgcattaatttattctctatgtatactcccagtgtttttgaatgttggtgatgatgagataattgatgatgatgattatcaatcatgtgctgaaggaactaaccttgaaaatagtggatggtcttccaggaccaggtttgtttgtgcaaaactctagtaactaacctttctctgcatagaaagtaattgaactattttttccctaattgtggtttgtaatcattaattt

SEQ ID NO: 11309 - DNA, 457 bp, Glycine max
catgcatccacgcctccgcacctctattctgcaaagtagcaatgatattcctaacactagtgtgccaatagataatggtccacaatccaaggagttaccaaaggagaactttgtgatttctgaggaaagtactcaatctttccgcaacattgatctgaatgctaacttaaatgaaaacgaagacaaaaatgctggcacagctgttccggcttcattgcctgagcccacttccatggacactgccatggagattaaacatgaagaaattccaggctggtccctatctgatgtggacaagatgggcattgacactatgcagcttgcaaacctaggtagtcgactagaagaggacgaagaagattatgacgaggaagggtaaataacatacactttgggggattaactctgctggaagctcatggtaacagtagcagagtaagtacgtactagtgctatt

SEQ ID NO: 11310 - DNA, 445 bp, Glycine max
aaaaaggataagaaggagaaagagaaggatcacaaaaaggaaaagaaggataaagaggagggtgagaaagaggatagcaaggttgaagtttctgttagggatattgatatagaagaaataaaaaaagaaggtgaaaaagaagataaaggaaaggatggtgggaaggaagtgaaagagaagaagaaaaaagaagacaaagacaagaaggagaagaagaaaaaagttactggaaaggacaagaccaaggatcttagcactctgaagcagaagcttgaaaaaattaacggaaaaatacaaccactccttgaaaagaaggataaagaggagggtgagaaagaggatagcaaggttgaagtttctgttaaggatattgatatagaagaaataaaaaaagaaggtgaaaaagaagattaaggaaaggatggtgggaaggaagtgaaagaga

SEQ ID NO: 11311 - DNA, 409 bp, Glycine max
cccacgcgtccgtttccactttgactgtaccaaagtcacgcttgctccctctcttaaccgcttccatctttgctctctctctctctctctatggacacacatccttggtcttgaacaggtttttgggtgaaggagtagtgttggtggctttgtatatcttttagtggataaggatacaacagcatgcggtggtggcttagtctctcagttgatgtataccgcaaagtgatttccttgaatctgtattgcaaagttattctgtaactcttaagtcccttttgatcaaaaacctttttcaatcatctcactcatctattccttgccttgaatcaatgggatccaatttttttggtgttgttccttggtatgtccgtcagattagctgaaaacccccacccctatcttgttc

SEQ ID NO: 11312 - DNA, 443 bp, Glycine max
  modified_base (124)..(124): a, c, g, t, unknown, or other
gcaaaatcttatcttagcaatagctacctctatcacaacaatactctattaagcaaaaacaccaaatgggagaagaaaaagagcagcctaagaatgaaaccgagaagaagcccgaagaggccgncgcagcccccaagaaagacgacggacccatcccttgtcgttacaagctcgacttgcattgcgagggatgcgtcaagaagatcaaacgcacatgtcgccacttccaaggtgtggaaaccgttaaggcagatctatcgtcgaacaaagtgactgttaccggcaaattggacgccgagaagctgcgagataagatcgccgagagaaccaagaagaaggttgacatcatctcagctccgcccaaaaaagaagccgccgccacggaaaatccaccggagaggaagggtgagagaagaaacctgaagagaaaaaaccagaagaaa

SEQ ID NO: 11313 - DNA, 409 bp, Glycine max
ctgctattggagatcatttggatgtagtgaatgcaatattggatgttgatgtgagttcaatgatgatagtaaggaaaaatggcaaaactgcattgcacaatgctgctaggtatggcatccttcgcattgtaaaagcactgattgcccgggatcccggaatagtctgcatcaaagatagaaagggtcaaactgcactgcatatggctgtgaaaggacaaagtacttcagtggtggatgagatattacaagctgatcttaccatattgaatgaacgagataagaagggtaacacagctcttcacatggctaccaggaaatgccgtcctcaggtagtaagcattttgttaacctacacagctctgaatgtcaatgccatcaataatcagaaagaaacagccttggatttggc

SEQ ID NO: 11314 - DNA, 421 bp, Glycine max
  modified_base (378)..(378): a, c, g, t, unknown, or other
accagcgtccggccagcgttcgaccagcgtcctgtccagctaaggaatcattcagaagccaaggtgattaagtactagagagatcatatttcggagtagtaaaagttaatcataagcatgggatctttcaagggtcatgctttgccagggactttgtttactctagtttgagtggggcacgtatggcgctctgcggagagatatgttcgcaatccaatggcatatcaagtcagagcttggaatcctgtgccatggtttgatgggaggctgaagcacctgtagctatatgtgattgcaattggagctctcgttgacatgtgcatcgagctactgtattcaccatacctcacgatttttgtcgatggagtccttaacccncgttaacatgaatgactttgaacactctggaatgctacttatg

SEQ ID NO: 11315 - DNA, 431 bp, Glycine max
aggcgttattggagatcatttggatgtagttttatgctatattggatgttgatgtgagttcaatgatgatagtaaggaaaaatggcaaaactgcattgcacaatgctgctaggtatggcatccttcgcattgtaaaagcactgattgcccgggatcccggaatagtctgcatcaaagatagaaagggtcaaactgcactgcatatggctgtgaaaggacaaagtacttcagtggtggatgagatattacaagctgatcttaccatattgaatgaacgagataagaaaggtaacacagctcttcacatggctaccaggaaatgccgtcctcaggtagtaagcattttgttaacctacacagctctgaatgtcaatgccatcaataatcagaaggaaacagccttggattttggcagataactacgatatgga

SEQ ID NO: 11316 - DNA, 282 bp, Glycine max
  modified_base (139)..(139): a, c, g, t, unknown, or other
cttgtactgttctattagttcatactaagttctgaaaatgagttccaaggttttgcttgttctacttatgttcttggccactatacttctgatctcctctgaggttgcacccgatgatgcattacgagaattttgacanaatagatgggaagcctagtgcagatggggtaagatgaaagcaagtattggcgtggcggctatggtggcggctatggtggtggttatggaggttggcgtggaggctatggaagtgggcgtggaggctatggagggggacgtggt

SEQ ID NO: 11317 - DNA, 384 bp, Glycine max
  modified_base (339)..(339): a, c, g, t, unknown, or other
cggtaggttacatactcctggccatggctattccaggttccctatacattgggtctattttaggtggcatgtgttatggaatgaggcttgccattacagtccctacaacctcaaagttatttggactcaaatattatggtctcatctattacattctcatgcttaacctttctctcggttctttccttttctatggtctgcttgctggcatactctatgatattgaggcaactacaacacatggaggaggcaacacatgtgttggaggtcattgttacaggctagtctttattgtcatgactggagcatgcattgttggattcttcttagacattctgntgtcaatcataaccaataatatttacaccaagaatttcacgagca

SEQ ID NO: 11318 - DNA, 318 bp, Glycine max
tcgtgtcaatatggacatgagtctacattcaatggaaggtgcgaacaggctgacaacagctgttgaactaccatctcaattcattcacatgtacataactaattggatagcatcttgtgtgggcatcaaggataaatacatgccgaacaagcttgtgagacttgtctggggttttctggaaagccttatttcgaacaatattattaatggtgaagaactcttcattgaagttcaagccgtttgcattgaggtttcacgtattaaagaagcaacttggttatttaaggtggtcaagtcatttgaaagaatggtggttta

SEQ ID NO: 11319 - DNA, 414 bp, Glycine max
accacgcgtccggaactgtcacccctttccggacggccattcaaacatttcctctttcgtatatgcttctttttctctcttcactttcaaacacaaaccctaattcactttctaccaattcattcgcaaacaccttttgcaatttccaacacacaccaaccatgggctacgaagacaatccgtatcgtgacgaggacggagagcccttgatggactacgacgacattcaatccgatcgcgagccatctcccgagccttgccgccaggacgacgatttcgatgaggacgtcgacgagtggcgcggccgtgatcggtcgcagacgccggtctatgacaccgatccgtcgcggtcgaagccgcggaagaggctgatcaagaagagcgacgccgggaagcaggcggtggagccggagc

SEQ ID NO: 11320 - DNA, 431 bp, Glycine max
cccacgcgtccgaggaaatggaaaagaagaagagaaggtcctctctagctcctcttttatcgcgatcgtatttgttttgtttttctctctctgtcaaacagtttccctctccgagtcccagtttttctcggtgtgcccaaacacgccctttgtctgaagctcctttcagctgagatctaccctctctttctctcatggcttttgcttttgcactgaacaagaactgttaaaactactgcaaatgaaagcatttggagaggttaaagccagtgctgtatccaactctattttctattctgataagcgcatctcaacccaaaagcctcatgatgaacaacttgaccattgagactgaggattcttttgcaagcttgcttgagcttgcagctaataacgatgttgaaggtttcaagcgaatgattgagagggat

SEQ ID NO: 11321 - DNA, 414 bp, Glycine max
  modified_base (399)..(399): a, c, g, t, unknown, or other
  modified_base (409)..(411): a, c, g, t, unknown, or other
gggagagcattctgccggaactctttccattgtcaaagaaaggatgaagggctttggcaatggaagtaccaatgtcgacacttggaccctctggacccaaggaattgccggtgcctagagtaacaaaagctgccatggcctttaagaaagggcgggaagcagacttaggtaggcaaatggagtttggaggaaaggatcttcttcttggacagcagagtcaaaacgttaacgaaggaggtttatagcagagacgcaataacacctccaaaagtcggaactagtactacttgtgcccatattgtctcaataggcgcttctctcagccatgaagcgccttgattaggaatcccatcccagaacaaatcataaatttcatggaccttatttattacatgtcanaaaaaaagannnaag

SEQ ID NO: 11322 - DNA, 358 bp, Glycine max
gggatactcacacggtaactgtgctcttgttggggatacagaggagtgtactgaattgaacactctgcctcatgaagttgatgaatatcgaattgctaaacaaattccgtgtggatttggtgggcctatctatccctcatgcaaaactatggcacttagtcacacatgaacatcaaacttactgtgaaatatagcatggttgattaaggacacgactgtagacaattctcacagagtgctgacagcttgacacactctcagatatcggcatttagtggactcgctggtatgcaatgatgcatctatcatcatgagaatcctattagcgactatgctgatgtagacagatagcatgaaa

SEQ ID NO: 11323 - DNA, 431 bp, Glycine max
cccacgcgtccggctgttgttgttgttcatggtgttaagtgatagataacagaagggagagcagaacctagaaatcgcgttggttcgttggtttatgacttggagtgaaaccctaactaatattgaagatgagcattcggaggttgagtgccgaagaatcgcaaacactttactctctcctcagagcagagcaacgttcgctccatgagatcctctcccaattcaacgctgcaatcccttccacccgccatttcactctctcttcctatctcctcatcctattgcaggacaataaggtgctcagcaccactgagcggttaatagcttttgctctgctagttgaggcttattcatcccagaaaccggcttcaaatcccttcataagctttattgtaaatgcttcctgtaatgaagggtccgaaaaagttgag

SEQ ID NO: 11324 - DNA, 434 bp, Glycine max
tcgcccacgcgtccggctgttgttgctgtttttggtgttaagtgatagataacagaagggagaggagaacctagaaatcgcgttggttcgttggtttatgacttggagtgaaaccctaactaatattgaagatgagcattcggaggttgagtgccgaagaatcgcaaacactttactctctcctcagagcagagcaacgttcgctccatgagatcctctcccaattcaacgctgcaatcccttccacccgccatttcactctctcttcctatctcctcatcctattgcaggacaataaggtgctcagcaccactgagcggttaatagcttttgctctgctagttgaggcttattcatcccagaaaccggcttcaaatcccttcataagctttattgtaaatgcttcctgtaatgaagggttcgaaaaaagttga

SEQ ID NO: 11325 - DNA, 310 bp, Glycine max
ggatcgagtttcgctgtgtgacaaaaatgttgtaagaccaatcattgcgaaaccacatactgccgacgtgatcgagcagagctactacattattgacctgatactacgaaaactctaacggaatgcgtaactaccccgagactacacgcccatggcagcacctcaacttacagatccctcaaaaccacaattttattcgcgcacagctaccggatggccatcgctatgctgaattgagacctcttcctacagaacctcctcgggaccaccgagggcgtcaccctagtggaacgcctatgatctgctacat

SEQ ID NO: 11326 - DNA, 423 bp, Glycine max
gcgaaaaaccttgagcggagttgaagctatgggaagcagattgggaagaagagtggtgcagttcgcgaacctccccataaagcttctgatgccgaacagcttcaccaacatccacgaaatcgctctcaagaccattccttcggccacgaagatcgagatcaagcgcgtccttcaatccctctacggcttcgatgtcgataaggtcccaacgcttaacattgagggccagaagaagaaaccttgtggcttggtgaatggcaaacccggcttccaaaaaggcttacgtaaccttcaaaacccttttttcaatttcccggaatctttacccgatccgaatcatcgttgaggccaggaagaggttcattaagcatgccaagtccagcctcgttcaggaccacgaggcccacaccgaggcccaccacc

SEQ ID NO: 11327 - DNA, 434 bp, Glycine max
gttgcgtgttgcgatatcataacatcgatggcctccatcatccaaatctcacaatgtcgtcaactcttctcccagtgacagcaactcccattttcactctcaccaaaaccctccctctccccaaaccctacctactctcctataaattcaaattcaacaccctcgtccgccgctgctccctctccgaccacgaggagcagcgctggctccgcgaagagcagcgctggctccgcgacgaacaccgctggctccgtgaggagcagcgctgggctcgcgagcgcgaccaactcctccgcgagatcgccgacctcaagctccaaatccaggcgctggagcgtcgcctcttgacgcgcgatttgtcctctccggcttccatctccgacgccgtcgccaatgtcacgttgctcttgcaggtgctcaaggacaagaatctg

SEQ ID NO: 11328 - DNA, 429 bp, Glycine max
  modified_base (74)..(74): a, c, g, t, unknown, or other
cgccgatgccaaacgattccgatcgcgaaagttgcatccggcgccgccagatcgatattccgatcatgctccgncagccggtcagcgtttcgcgtcgcatcggaatccaaaccggttcgttctccgttccgtatcgcgtccaataagcctctctcgcagtcccaatccactctcaggttccccgtggaattgagttcgtgtgttgaatcgatgatgccgtaccacacggccactgcttctgcgctcatgaattccatgctttcaatttcaagccgcacgagcgcttggattcccgaaggtagctagcatctctaggattccttgatgttctttctacaattaattttcgggccaaaagcagactacttgaagatcaggaagcatagatgggattgcacggacattctatgatatgatgttcatcttgaa

SEQ ID NO: 11329 - DNA, 405 bp, Glycine max
ctcaatcctcagtcgcagaaaagggcgagacagagagcaaaggagtttcccatcttctgctggtcattaatttcacggccttttttcattcatggtcaattattgcagcacagaagacacaggtagttccacttagaagtgtactcatagtctatggaaatgcattcatcaattacatttgatttagcttaaatttttattctttcattattgtatatttggtaaaaaaattagtggcaattttgagtagaataatggctggtttttacgtgaatagtttctgtattataattgttgctgcgctactgctgttattttcagtagaaagcatagagctagtaaaatataaacattccgctggttaaaaaaaaaaaaaagatcaaaaaaaagataaagccaaagcca

SEQ ID NO: 11330 - DNA, 434 bp, Glycine max
ctaactaaagccgagcagcgagagagagtaaaccctagcaaaaatgccggctggtcacggtttgagatcccgcaccagagattccttctctcgtgccttcaggaagaagggtaccatcgccctcaccacatacctcagaacctaccacgtcggcgattatgtcgacgtcaaggttaacggcgccgtccacaagggaatgcctcacaagttctaccatggccgcaccggtcgcgtctggaatgtcaccaaacgtgctgttggggtcgaagtcaacatgcaggtcggctacagaatcataaggaagaggattcacgtgcgtgtggagcatgttatgccatcaaggtgcactgaggagttccgccttaggaagatcaagaatgatcagctcaaggctgaggccaaggccaagggtgagaagatcagcaccaagagac

SEQ ID NO: 11331 - DNA, 117 bp, Glycine max
cccacgcgtccgaaaaaaaaaaaaattttaaaaaaaaaaaaaaaaaataaaaaacaatggcaattatacaacaaaaacaatctcaaaaacaagaaataccactaaaaaggtcgacca

SEQ ID NO: 11332 - DNA, 346 bp, Glycine max
tcgcttctctggtctcagatctcactcagttccttcgccggagccatagttcttgattccctcaccaccgtgattcgtctttccaaacttcttttcacttcgagtgagaatgtatagtaatggtggatcccaacccggagtacagcagcctcaaacaagtttggcttcaaatccttttgggagcgcctttaatggtgctgggtcaagactcattccaagtggattgggtgcctatggagggaaaatattaggatcgagctctgagtatgtcccaagccatataagtcgggatttctctgatccccaatactactttcaagtgaatgaccacgatgttaagaacaaa

SEQ ID NO: 11333 - DNA, 419 bp, Glycine max
tgcacagttatggcatggggtgtcaaagacaatggcagagaagagcgcgtgggccttggcaatggacagaggagtgaacatggtgtccatcaacgcaggcttattgatggcgcatgatctctccgtcaaacacccttacctaagaggagccgcagagatgtacgaggatggggtgttcgtgaccgttgatttgggcttcttggtcgacgcccacatctgcgtctacgaggatgtctcatcctacggtcgttatttgtgtttcaatcacattatcaacacccacgacgacgccgttcagctcgcccgcaagttgacgcctggtgcctcttcctccttgcagcaaagtgatgactacgggaagagttttatcgaacagagaattaacaacaagaagttgaacaaattgatggtggacttcg

SEQ ID NO: 11334 - DNA, 284 bp, Glycine max
ggctggggtggcccttattatggtggcggctggggtggcccttattatggcggtggttggggcggtccctggcgtggtggtggcggtggtggctggggaggttggcgtcgacctaatggcaaccctcacaactaagaagaaaacttgctaaagcttctttacgggtttaggttttcgcaataaataaaacttcatgagaagtgtagttgtaataaaagtggaagtctctcttctcttgtgatataaaggaataatagttttatatatgtattttcttatcttta

SEQ ID NO: 11335 - DNA, 430 bp, Glycine max
  modified_base (410)..(410): a, c, g, t, unknown, or other
gtgtccgccaataggtatagaaggtttattactcaagacttgccaaagtcctgcccattaaattgtagaaacaaggcatgtcactacttattttaagaaagtctcccataagggaaagggagaaaggatacaacgaaagcaactactttagttgttcagtacttctctatttcctgtggttccacgcactttctctatctacgttttcaaatttgaagtcaaacacgtccaatcgtcgtctttgtgattaattcccatattgtttccacggcagctttttctagcagtcgatggaaccatgaaagatggggtggatttgattccaatatcaagccgcaattcaaagcctccaggtgttgaattgtgggcagttcttgatgtccctgacattaggttggcgcttcttgganaaatttaagccattcactat

SEQ ID NO: 11336 - DNA, 438 bp, Glycine max
  modified_base (409)..(409): a, c, g, t, unknown, or other
cccacgcgtccgcccacgcgtccgaaataaagtccactaagttggggcacgtcacccatctcgcccttcccctcgctcatctcaaatccatgcttcggaattagggtttccattcggatttcgtaagtctggtgcccaatttcgtgactccgagcgacgtaaaaggggaagggaaagggatgaggatttggggatcggagatcgtgttcgccatattgctctgtgggaccctttcatgcaccgctcaagctcatcacatcactgccagcacctgcccggctcgctccatcctcgatttcgtgttagggttttcagatttcacatgccaacttcccaattctcttggatccattgccgtcaccgagggagatgaggtttctttgcagaaggttctgaatatggttcacangaacaatcatgagcacgtggctgtgctct

SEQ ID NO: 11337 - DNA, 301 bp, Glycine max
aacactcatacgacaacgcgtatcaactttgtaatcaacatgtacaggaagtgcgaagacctaatagagaaacgtcaagcgtactaggacatttctgacccacaccacttgtggtgtaactatatgattgctacactttgtctattagctgagtggaaactgtcaattgatttgatccggctcatgtttgctgtaaacgcactcatgtatcaattaaatctagtcactgtgacacacgctcgctagcatgtgcatgctgttgatcgatttgtaacgaacatgtatgcttatagtgctagga

SEQ ID NO: 11338 - DNA, 433 bp, Glycine max
  modified_base (16)..(16): a, c, g, t, unknown, or other
  modified_base (28)..(28): a, c, g, t, unknown, or other
tcgtccacgcgttcgnccacgcgtccgnccacgcgtccgggttttagttgccagaccaccttcctctacggtgcgctccaacgcacttgaacatttatcacgcgctttgcttttgttttctttatgcattttctctagcttccccacacactcaaaccatcccttttattgaaatcctcaagcttcaatttgctttgtgctcactcatctatctattataaccaaacactcttcttcatattcttcttcttcttcttgttcttgttctatctgtgacgagcatcatggcctcgagagcagtgctattgttggctatgtgtgtgcttccggccatggttgtggccattcgcccagcaaagaaccctttttgcgtgaagggtcgcgtctactgtgacccttgccgtgctggttttgagacctcagcaaccaccta

SEQ ID NO: 11339 - DNA, 427 bp, Glycine max
gtaccatgttgctgtcacaagccaaactgcacaacaacaacaacatctacaatgccattaacatgattatgaagaagaagggtaataacaataacaacaatcattgttcacctgctatactttatcactacccttgccctgatggtgcttttgctgcccttgctgcacacctttactttaaggccacttcatcattctctcctcttttctttcccaacactgtcttcaaccccctcagtgctgaagatcttcctctgaatgaaattggtgatctttatctcttagattttgtggggcccgatggttttgttcaggaaatctccaccaaagttccaagggtgattgttttggaccatcacacaactgctcttgagaggctaggcaatgaggcttcactttgtgagaatgggttaaggttattgacatg

SEQ ID NO: 11340 - DNA, 409 bp, Glycine max
tttggctaatttcttcagccacacacgaggttttgttacatgcatgcttgttgtgttttagaacgaaagttgtttcaatttggtcagctggaatattgtttcatttcctgcatgttgattgcttatggaagtttttctgtggtgttgtttattttcacaacgatagtgcctaaggtgaccctgctttgcccattcaagggtagcaacaataggattcatagggtggtgttgaagaataaaggtgtcatttttattttcacatatgttgccaccttgctcaattttaattgtatttattttttgtttaattaaagggatttatgaggcccttgaattgagagatggagcagtttcttgccattcacgacgtttcatgacgtttcttatctcaaccggagcagtttcctgc

SEQ ID NO: 11341 - DNA, 429 bp, Glycine max
  modified_base (414)..(414): a, c, g, t, unknown, or other
cggacgcgtgggcaaatacaatgggttctcttatggcaggatgggactctctgatcttggatcctgaatcagctacaatagagaggaatcgatcactcaccaaagaagaaattaatgcttactggagagtaaagaaggagacagagttagaacacctcagagctatgtccaaactatctgagactattcaggcccgaaaatttgaggattcagagaattctcataagtcaagtaccgtgaccttggccagcataaaggagtccttaggcatggacgttgaccagaaaagtttagagcaacttatcaagaaaaatggctggtggaccaaaagcagctgggcatttctgaatgaaccgccagtgatagaagctgcttccaataagtatgcatcacagtttcacgtggccaacttgnggtctacgaaactta

SEQ ID NO: 11342 - DNA, 425 bp, Glycine max
cccacgcgtccgctttaggatggctaaccaacctacaaattttgaaaatgggaaggcaatgctctgacgtgttgttcgaccttaatgttggtgcaggagagttcccacagcttcaagtatttcagatgaggggaatgaaactcagaagctggagattggacaaaagtgcaatgccacatcttcaacatctgctcattgaaggctgtgaatacttgaatgatcttcctgaagaagtatggtccttgactaccttacgaaaagtgcatgttttgtggccttctgaaagattggcaaacagacttcaaaatgtgaaattaaagaatggctgtaagctcataatctctaatgctcctccaaatggtcaatcagatcagaatgcactgacacattctgtatcagttgatgcctgaaacaggatcattcac

SEQ ID NO: 11343 - DNA, 398 bp, Glycine max
ctcttttggtgggaaggcaattgccgagattaagaagcaatatgcagtgtttgatgcgaaggtgttgagcaagatacccagaggacctttgaaagataaaaagaaagattgaagtggcactagattctgacaaatatgttttagtggggtttcatgaatgtcctgttaaatttagattcatcatcagttaaaaccctatcatgtcatattttatttttttagggtccttttactagacattgtggatgaagagtatcttgtatatttttcttctggctttacatgtacctctcagaaatcctatatgcttatggatgacttgttattgtgttgtatttacatcatgaatacatactctgcatttgaatgctatcgtagaaaaaacttgcaataattgc

SEQ ID NO: 11344 - DNA, 425 bp, Glycine max
  modified_base (414)..(414): a, c, g, t, unknown, or other
cttctcggcatcgtcttggtttcaatggataaaggctccttatcgctctagtacatctgctccaggatccagcagtaggatagaaaatattgaagacccttttgcaattccatctgactatacttgggttactgctgaagcaaagaaaaagaagatgcaagagaagaacaagtcaaagaaaggaaaaagtcataactgactagcccacttcataagtaagctctacacttgggaagtactttggttatttagagaacttgggccatttgtctggaaattgaatttgaggctatatctttcatgtaggagtgagtgagtggtcctccaaggagttgtgcgttgacaatttggggcttgtggcataaggaaaagacacattgtgattcttgcaatagttgctggagttttcaactntacaccaaaga

SEQ ID NO: 11345 - DNA, 424 bp, Glycine max
ggaatgggcgttcacagcagttaggttttgggtgaagtggaggagattaaacagaggtttcatcaattctgattctctgaccgccagaacatggtgttttttctgttccctaatgcttcgttagaacccgaaatgaagatggtgatagattggtggacgagaattctattccgaggattctccaagtcttctcttcgcttgaacatctggtgttaattctgcagtctttgaacgagaatgagaatgagagtcagagtgaaggtgtccaagttgaaagtctttgcttctcgatcccctcattgaaatggttcgagctttgttccgatgaacaggagttcaatgttgttgtgaaggcagaaaatcttgtcaactttgtatgcgatcttgagggattgcacaaggttgcaacatgtgaaattacctc

SEQ ID NO: 11346 - DNA, 429 bp, Glycine max
cccacgcgtccgcccacgcgtccgaaaaaaaaaaggatggtgaggagaagcatatcaaagtccctgttggaatgtctatgttagaagctgctcatgaaaatgacattgaactagaaggagaagtcaaaagaagaaatttcaagtgctttgaaggaaaattgatgcagaaactacaagaaaaagccttaaaaaaaagttggagatttggacagctcgcttagcgcacaagatcggcccaacgcggttgcttgcttagcggtcagctcacacttagcgcgaagaaggctgacgagaaagtccaaggttgtgcttagcacaaactccgcattatgcgcatgattacattgtcactcccgctaagcccaagaatgcgcacttagtgcgaagtcagtgtagaaagtaaattaccttaggtctatgagtaggaag

SEQ ID NO: 11347 - DNA, 384 bp, Glycine max
attcatttgttcatggtcagctcctacattgtgggagcaggacgatggatcctggcagtttacgaaacagtcttggctactactctcatgtgggtttataacaaggttaacgttgacctcagagatttctgtgctgtatgatgatgcttatgcttaacattgtggcgacaacttgtggcacttcaaacgatgtgtcaagagctatattttgtcttagattctccattagcctgaacaagagacagtgcgagaatatctacatgtgaaaaaatttcgctagatgtttacatggtggaggcgtaaagcttttttagagcgcaatatgtgctgtgccaggagatatcttgcgttctactggggtagctgttattgtaacagctcaca

SEQ ID NO: 11348 - DNA, 420 bp, Glycine max
cccacgcgtccggttggcttaggatgcatagcaggagtaggagttcaccccagctggcaccatgatcgagttcgaatccttgcttctaaatctgaagaactaacactaaaaaggtggtggtcgtggtcgttgtttccttctgcttctgcacacgagactcatctgtgtcgaattagggcgaggcgtccgcgttgtgtgcctgataatagagaagctggggctggaaaggaagcggaagaagaacaacaactagagttagaatggaagctcctcaccagaaggattggcgattccggaataatatcttcatgcttggtcggtctcctcaccggcgtcgctgtcgtgctcttcaattatgctgttcatgaaattcgtgatttgttctgggatgggattcccaatcgaggcgcctcatggctg

SEQ ID NO: 11349 - DNA, 431 bp, Glycine max
cccacgcgtccggttaccctttcttccctcttccgatttgaatctggttcgggttccctgtgatcaaaatccaaatcatcatttggcgtagcatgctctttggcttcttcttcacctgccaaggcgcttcgcagaatcctggactccccaggggtccaccaaggtcctgcttgcttcgacgctctcagcgccaaactcgttgagaacgccggcttccaattctgcttcagcagcggcttctctatttccgccgccagcctcgccttgcccgacactggcctcatctcttacgccgaaatgctccatcagggacaactcatcacccaatccgtctccattcccgtcatcggcgacgccgacaacggctacggcaatgccatgaacctcaagagaactctcaagggatacatcgcagccggattcgccggaat

SEQ ID NO: 11350 - DNA, 394 bp, Glycine max
  modified_base (337)..(337): a, c, g, t, unknown, or other
  modified_base (360)..(360): a, c, g, t, unknown, or other
gtcagaatcagagtcacatccacaaccaactattgaacaacagcaacaaattctacaacaagccaacaacaataacaagaggaagaccatggaacagggcctttcacctgagactgacagaacaagaccaagatacagtggcatagccactgtggtatgatcataaaaatcattggcaaaaattttcttgaatttcaaaaaatgtaattctcatataactttttttttctttcttttaaaaacaaattaactcaagtgttggttaatataggctctataggagtgtaatagagttgtttcctgtacacattttcctggaaatatttccttccaattntgctaccacccaatataatgaanaggaaaaaaaatattgaattgagtaagaaatatc

SEQ ID NO: 11351 - DNA, 261 bp, Glycine max
accacgcgtccgacgaattggagtatcctgctgatgataatgaaatggcggaggtagaagatgacatgcatttcagtggtagagtgtttggtgattcaaagtccgaatcagacgacgatgatgaatatgactccatggaaaatcggatgacagatacctatgctgcaaaagctaggaaaggaaaggatttccaaggtattccttgggatagactaaccattagtcgtgagacgtttaagcaaactggactagagcagttca

SEQ ID NO: 11352 - DNA, 430 bp, Glycine max
ctggtgtatctcaatgaatacacatttcatattcggcatgcttcaagcatttgaacctccacttgacatgagccaggacgtagattttagtgaagatccacatcctgaatcgacccaaaaagatcatttagtttctgaagggattagtgcttgttcatgtgagtcagtccctgtgagaataacatgttctgtatctgatcaacatcgttgtgtggaaggtggcaatcatacttgcatatcacaagcacaaatgcattccaatgaggaggtggacattgagagttgccaccagtcaaatactgggagccattctccaagcatgatacatcctaaagaaactagtgaatactggtgaagtcctattgctgattccaatggcaatgtaccggtcacgtcatcacaacaacaatggttggatccatctttaaaa

SEQ ID NO: 11353 - DNA, 432 bp, Glycine max
acgttctctttcacacactaagcgtgaactaatatcgaaattcaattataccctgaccctgtgttagtttcgtgtgttgagaagcagagagaggcagagatgcaaggaagcgcagctgacggtgaagccttggatttcgagcctgaggacgatgacttgatggacgaggacggcgcccccgacgccgacgcttctccgcctcaacctaagctcaaatccgccatcaccgccgccgccgcccccaaaaagaccaagggtcgcggattccggcaggacaccgacgccaaccgtgacactcgcctctccggctccgacttcgactctctcaccaccgagggcggccctggccctcaaagatccattgaaggatggatcattctggtcaccggcgtgcacgaggaagcgcaagaagacgatttgcaaaacaccttt

SEQ ID NO: 11354 - DNA, 431 bp, Glycine max
  modified_base (404)..(404): a, c, g, t, unknown, or other
ggaaagtctttcttttttgggtcaactttgtgccttgcatatcaacagaatattagactcttctattttatattttaaaacagaatattagacttttttttagaatattagactttgagtttcatccgttcgacgacatggcctttgcttttagtttattcttaagtaggcttcaagtttttgtgagctaagacccaatctcattcaacgatcataattcacaatatactcctattatttattagggtccatgagagggaatggtgctcatattttcctagaattttaaaaaataaaaataatttagagcagtgagttatccttagacttatgatcaattttattagcttttatgctactaggtaatccttgtttgagtctattataagtgcaaaggatttatntaatgaaccaagctgtattcgactttt

SEQ ID NO: 11355 - DNA, 271 bp, Glycine max
cccacgcgtccgcccacgcgtccgcaaagggaaaaatgtattggaatctcttccaaaaattgagcaattaactcaaggtgttgctgatgttaacatagagtcaggacaagatgatggtgaatgggtggtatatgcaaagaagtccaagaatagagcccgaagcacaactgttaaaccatggagtcctccggttcataattctagacccactggaaatacaaagatggctcacaagccagttactcggaatgatggaggagttggaagggct

SEQ ID NO: 11356 - DNA, 193 bp, Glycine max
cccacgcgtccgactttactagaatctctgtttaggattcttcctaaacttagtggcatatttgaaaggctcttgctgtactttgctgttttgctttattttagggctagggagatcccgggagggtggtggagggtttgggcagtggtttttagcaacagttggggctgctttagcagcaacatcattaata

SEQ ID NO: 11357 - DNA, 430 bp, Glycine max
  modified_base (347)..(347): a, c, g, t, unknown, or other
cccacgcgtccgctcaaacaaaacaaaacaaaacgcgatcatttctccgccgtagcagtggaacaaactccaccgactccgttatggacaactccggaaatcctcaagatgtggttgtgccacctgttgaaggtgttgcaggaggtggtacggcttatgggtggaatgatggtggcacacatggcttgaatgtcaagggaccaattgaccccacagaaattccaactaaggatttagtgcatgtatggtgcatgccaaacacagcaaatgttggacctcaagatatgcccagacatttggagcctataaacctgctggctgctagaaatgagagggagagtgtgcanatagctatccgaccaaaggttcattggggtggtctagtgttgcagggactgtgcagattcagtgtagtgacctatgttccaca

SEQ ID NO: 11358 - DNA, 431 bp, Glycine max
cgaactagtttgtaattgtttgacattgagttaggaaaaatgggttccaaggctttgctcgttcttgttatgctcttggcttctgtcctccttctttcagcggaagttgcatccaaagatgtagataagaaacttgataaaaatgatggtaaccatgatacaaaaggagtcgatgaaatgaaatattatggtggttgggggtctggttgggatagataccgccgtggttggtattgccccaatggttgttgtcaatggagctactactatcaaacctgttggaggtgctgctattatcctggtgaacatgttgatgtgcgtactgatgctcaacctcgcaactaaacatgaacattgtgcttaaagtatacgctattgttatctatataaataaaacttcatgggacgtgtacttcatgagacgtgtactt

SEQ ID NO: 11359 - DNA, 284 bp, Glycine max
cccacagcgttcgaaaaaaaaaataatttttaataaaaaaaaaggtgaattgatatcatggatccacagagacgaatggatgcattctacatcatagctctcatatagctatacgtactttcaatcatataggcaatcgttttactaacagcagtgactagcaaaactatgggatgaccaaacttaatgacttttgtaatattatgaattttgactgcttgactaagatcgtagagaaaagcattgtcgagcattacctgtatctgttcaagatgaacgatgta

SEQ ID NO: 11360 - DNA, 411 bp, Glycine max
gtttttgtagatagaagccatcttttattgataggcttctatcatcgtcttcacggccggcttttacatttctcactcgattcgaatctgcaactgcaagattcaatttctctccgtcaacacgttctcactctcacttgaagcggctctcctcaatttgttgccagcatgcaaatccatctcctttatcctcttccactccctatctcgcttcttccaaccaccccattaattttccattccttttactcttcttcagatccctacacactcgaatcccattctctcaatcaaatcaaaaccggggctattccaaaaccaatggtcataacagctaggacgcttgtaatactttctgctcttgctatgatcttaatccaaccaactattgcaccaccagcttttgcaacc

SEQ ID NO: 11361 - DNA, 431 bp, Glycine max
cggacgcgtgggttggaccttatatggattgattgcatctcagtttggagatataacggaaagaatgccgggtgaagataacaagatggtgaaagatttcgtagaagactactttggtttcaaacatgacttcgttggagtgtgtgctgttgtggttgctggcatcgcagttgcctttgcattaatcttcggtgttgcaatcaagacctttaacttccaaaagagatagatggatagactgaactctttctccaacgtcaaagattctttatattttctctctctctctctttgcttgtttttgttttctctataaacttataatatttgtatctatcatttaatcatttgttcaaaaccagccagtttgaaggttgtcctttataaatgtatgatgaatgtcaaaagaaagatttttgatacttaccaca

SEQ ID NO: 11362 - DNA, 351 bp, Glycine max
cccacgcgtccggatcactccaagcgaaggaaactatgggcaaaacgttcctttttttctattctattgcttggagtgattaaggtttggggtttgttgatttcgtgtagtgattaagagaatggcagaagaaagcgagggaccgatagaggaaagggagatcatacctgtttggctctctggttcgttggtggtgactacccaatgaggactcgaggagacaaagtaaaagagaggagcaaggaatccataaattttctgttggttcttttctttcctcttttatatgttttcttttttaattatggatgttggggacgtgcatgtagccgatcgcaatacgtgcccatg

SEQ ID NO: 11363 - DNA, 373 bp, Glycine max
gtttttgtagatagaagccatcagtcatggataggcttctatcatcgtcttcacccccttcttttacatttctcactcgattcgaatctgcaactgcaagattcaatttctctccgtcaacacgttctcactctcacttgaagcggctcttctcaatttggtgccagcatgcaaatccatcttctttttcctcttccactccctttctcgcttctttccaccaacccaattaattttcaatcctttccctctctttagaatccttccacattggattccaattctctcattcatatcaaaaccggggctttcccaaccccaagggttatcacagctggcactcttgaaacactctgtgctcgcgctgagatct

SEQ ID NO: 11364 - DNA, 411 bp, Glycine max
cataatggaataccaacaacagaaacaacaatggaagaggtcacaaaggacaaaaccctcttcttcttcttcttctcacatcaacaatctcgatgatggttgtcttatgcacattttcaacttccttcctcctattccagatcgctttaataccgccctcgtttgccacagatggaattacttggcatgtcatcctcgcttgtggcttcgggttgatcgatcagttaaagagttatctgaacccggtgttttcccaaacattgaaaccgctgtatctgcttcaagaccaggtgataccattttaatagcagctggtggaactcatcgtgttgcaaacattcaaataaggaaaccactttgcttaattggtgcaggtgaagttccagatgacacaacacttgtttgttctcg

SEQ ID NO: 11365 - DNA, 338 bp, Glycine max
  modified_base (261)..(261): a, c, g, t, unknown, or other
cccacgcgtccggagacggcgaatgacactacgcagaagatcaaggagacggtggttggcaaggatgatgatgatgatgatgatcatggtgatggtcatggtggtcttaaggatgatgatgttgtggagataagaaggagagttggtaagagattaccatgagaagggttattagagaacacagaatcaatggcttcatttagtacttccatttcttactattatgccgtattctatgtatttatgtttctagtgatgttnttttctttttttttttcaacatgcggataacttggggatatcaaggttgttagttaatatgggcataatctttttgt

SEQ ID NO: 11366 - DNA, 150 bp, Glycine max
tcgcggacgcgttcggccacgcgttcggcaaccaccatgggttctctggggttgctccccaaaaaggttatcatcaccaggaccccactcttctactcgcacgtgcgccgcacgagccttcttcccgggaaacaaccaacaccgcattga

SEQ ID NO: 11367 - DNA, 358 bp, Glycine max
agagggacaaatctgaaaagtgaagaaacccaatacataagatgttggaagcgttattatggagttttttcatttccccactgaagattgtgtgggaatctctgagaattctagagagcaacaagctagtatttacttccatcctctgtttcacaacgctccctctctccttcctaaccttcaccctcgcaatctccaccttccccctccaatcccgcgtcctccacctcgagtccgtcgcgcgcgtcgccggcacgcgcgtcgaggcgcgccacgtctggcacgagtcccgcgacgacgccgtctcgcttcttgcgcacgcgcgccctcttcgccctcctctgcttccccctctccc

SEQ ID NO: 11368 - DNA, 418 bp, Glycine max
gacttgtctaagaaaggtataattggcagccaagcaaaaaggcaggtatcagaagaatctgaagctgttacgggaggtggaattgatgttactccagattgtttggctgtgccagaaacggcaactagtgatggggcttcatctttgtgctcttcagcagaagggagtgaacatgtggacagcttgtctgagaaggatttagttggcaaccctgtagcagaacttgacactaaagtatctgaagctggtgtttctgaccaggaaaatcaagtagtgcaagaaaatgcattggaagatatggaacatgaggagaacttgtccgagacgggtttagttggcaacgccgtagcaaaacttagcaccaataaatctgaagctggtgttagtaaccaggaaaaacatgaaaatgctttgaaag

SEQ ID NO: 11369 - DNA, 408 bp, Glycine max
  modified_base (306)..(306): a, c, g, t, unknown, or other
cgccatcatccatttgtggcaaaaattttgcttcagtttaggctgcatcctcctgcattaagagaaccagataatgctggtgttgcacctggcaaagctgtgatggtggttgaagatgaaataaatgctggttacatatccattgcaatgcttttgggtctcttgaaacaacccctttatttgaggagcatagctcatcttgagcagttgctaaatttactggatgttatcattgatagtgctggaagcaagtctagttcatgtcataaatctcagatatctactgaggcagtagtgggtccacanatttctgcaaatggaggtagatgtgaatattgattcagttacatcttctgctcttgacgcatctcctcatgtccatgaatcctccaaacccacacctcccag

SEQ ID NO: 11370 - DNA, 407 bp, Glycine max
cttgctcataaaaattttggtaaattattaatggttttatactttttttgaattccataacaatagtatgcaatataatagtaggtcttacgcaaatggcaatggatcctgacatatttgcacacgtaagaacaatataagattatggcgagtacctgttttgattgtgttgattggttaatgattcatgcgttaggactttgagaactatctcccctgaaaatggaactcaccaaagtggatgttctagttgaagccattagggttggatttagaaagctcgtacgaaacacaaaggagatgagaacagacttcttcagtgtcaatttatcaaaacctatcaaaattttgagactagtcagcacagaatctacatgttaattcaacaagaggcccataacaatcaa

SEQ ID NO: 11371 - DNA, 382 bp, Glycine max
cttgctcataaaaattttggtattttataaatggatttatacttgttttgaattgcatgagcaatagtatgcaatataatagtaggtcttacgcaaatggcaatggatcctgacatatttgcacacgtaagaacaatataagattatggcgagtacctgttttgattgtgttgattgtttaatgattcatgcgttagtactttgagaactatctcccctgaaaatggaactcaccaaagtggatgttctagttgaagccattagggttggatttagaaagctcgtacgaaacacaaaggagatgagaacagacttgttcaatgtcaatgtatcaaatcctatcaaaactttgagactagttaacacagaatctacatgttaa

SEQ ID NO: 11372 - DNA, 432 bp, Glycine max
  modified_base (300)..(300): a, c, g, t, unknown, or other
cttttattcagatagtaacactaacacagcttttctacatacaaagaacctttataaaaaatactagaaaaagaaaagtataatagaaatctatttaattgttattctttttaattttaaccgacatcagattacggtgttggtctaccacggtaggcttgcttgcaaacagagctaggtttctgcgcgggggagcacagctgcgacgaccctgggcacgcctgcaggcaattgtcccccaggctgccggaaaccgctgttccggccgtcaccagccccgacggcggctgtccgacgaanaagttcccgtcgaaggaacagcctcttcatggacttgatctgcccgtactccagcgggatcgcgccacgcagcgcgttgtaccgaatcgacaggaaagacagcgcgggatacgcgccgagattcgcgggcgc

SEQ ID NO: 11373 - DNA, 427 bp, Glycine max
atttccacttgttcttcagcaaactcacaaccacaacccaaccaacccacctgaactactgaacaacaacctcttcttcttctctctctctctttagcataatcattcatcaccacacaagagaaaaaagaaaaagaacaaagaacaaataaacctttttttttttataaaaaaagaaagaaaaggaaataaagttttttgttttttcgatgaaccagaagttcatcggaaagccgccggcgacggtggacctggatcggatgccggagcgtgggtcccaccaccggcgttcccactccgacacctccttccgcttcgccgcgaacttcgacgaccttctcctcttcgacccctccgacttcgacatctccggcctcccgtcgccgctccctctgccatctccggtctccgccggctgggttccgat

SEQ ID NO: 11374 - DNA, 424 bp, Glycine max
cttgcagaatcttttctaaagggtgtgttggctgcacatcgtggaggatatatggattcacagaaggaggaagggcctgctccattgctgtggagattttcggacttcttgaagtgggcagagctttgtccctctgaaccagaaattggacatgctttaatgcgtttggtgattactggacaagaaataccacatgcgtgtgaggttgagcttcttattctgtctcaccacttctacaaatcatcttcttgccttgatggagttgatgttcttgtggcccttgctgcaactagggttgatgcttatgtcttggagggtgattttccatgtttggctcgcttgataactggagttggaaatttttatgctctcaatttcattcttggcattcttatagaaaacggtcagttggatcttcttcttc

SEQ ID NO: 11375 - DNA, 402 bp, Glycine max
ctttctgatcatggacatccaagcttgcacttaactcatgttacattcagtcctgatggacacgaggttctcctcagctatagtggagagcacgtttacttgatgaatgtaaatcatgctggagtgaatgagatgcaatatacttcaggagatgattcaaagctgatgacatactctccaacaattaatgggacagagatgcagccttgtgtatctaatgtcttcccaaatggatttcctattaaaaagaacatcgctgcaaagcttgacaagtgcaggaaactaataaaatatgctaagaaatcattggacaatgggacaccctattatggaattgatgcatgtaatggaggttttgaatggctatagccatattattgggcctgcactgaaacatgaatg

SEQ ID NO: 11376 - DNA, 177 bp, Glycine max
gctaaactcaaaaaaaaaaaaaaaaaattaaaaaaaaaaaaaaaaaaaaaaaaaaaaaaagaaaaaaaaaaaaaaaaaaagggtagaagatataaaagatcaaaaaattaaataaaaataaatgaaaaataataagatattatatagggtcacctaaattcaattaattggccgaaa

SEQ ID NO: 11377 - DNA, 368 bp, Glycine max
cgccaactcgattccactcgcgtccaagaggccatggcttccatcgctgcttctgccgaagctgatcgcaatgccatgcgcatcagggaaaaagaattggctgctgttaagataaatgcagcagatgttgatataattgcaaatgaactagagttggacaaaaaggttgctgaaagaactttgcgtgagcataaaggtgatgcagttgctgctattcggcacttgcttcactagagaggtgggaatgaacaagagtgaatgctttagaaagttatatttatatgtatcagcgtatattgtttttcatcaaaattgaatctcaaatgtaactctgacctaattcattcagaaatcataactgtgttatt

SEQ ID NO: 11378 - DNA, 428 bp, Glycine max
cggaaccaccgtttctctctcacggtgctgccactgtcactcttctctactttctgcttcccagattctctatttttgcgcgtaatcgaatgtggaactttgcatcgaattgcattgctggaactgtgggactaaaaaatgattcaaagcctactcactctgcttcagaatgttctgatgatgagacttctgttataggcagagaggaagggctggaatgcccaatatgctgggaatctttcaatattgttgaaaatgtgccctatgttttatggtgtggccacaccctttgtaaaaattgtatcctcggactgcagtgggctgttgtgaaatttccaacactgcctgttcaacttcccctttttatctcctgcccatggtgcaaccttatgtctttccgtttagtttaccggggaaatcttaaattc

SEQ ID NO: 11379 - DNA, 65 bp, Glycine max
aaaaaaaaaaaaaaaaaaaaaaaataaattaaaaaaaaaaaaaaaaaaaaaaaaaaaaaaaaaaa

SEQ ID NO: 11380 - DNA, 324 bp, Glycine max
acgcgcgtcgcaggtgtgtgactggtgggacttggaatagaacgccaaataggaatagtgagggaaatctcaactcaacgcatctgccttctgcctcgcttgccagatctcttctctctgatggggggttcggtggtggaggacaaccacgacctcgaccacgacctcgacctcgacgatactcccttagcatctgcctcttctaaatcccaccagcaattccatagcttcgatttcgaggatacaagtgttctagatttgcggcgctcatccatctttaacataacacgtatgagcaggagtatttattctgtcttaattaag

SEQ ID NO: 11381 - DNA, 423 bp, Glycine max
tttcaatcctgttgtcagtcgaagttttaccatgtccttaacaagggattgcatatgtcctatggtgcttacccgtggcagtgatcagcttccagtcagtacgaaatttgatatgagaagtgatctgggtgtggtaaggaattatggaagactcttattggaaatggcttcagttgttccagatgggattgtatgtttctttgttagttactcatatatggatggaatagtcaatacttggaatgaaaatggaattttaaaggaaataatgcaacataaacttgtctttattgagactcaggatgtggtagagactacattggctcttgataactaccgcaaggcttgtgattgtggaagaggtgctatctttttttctgttgctaggggaaaggttgctgaaggtatagattttgatcgaca

SEQ ID NO: 11382 - DNA, 416 bp, Glycine max
cccacgcgtccggaatgtggcgcctagtgctaatgctgaatcagaagtggagactgaggttgattctaaggataagaagacaaagccggacgaatttcaggcccctcctagcgtttctgctgggcctgctgataatttaggcttccagaaccatgatagtttgcagtacttgaatccagaatccaacaaaccagattctgtcttcccgtctgatgggaccagaaattttcatcatgtgcctgcttttgatgggctgctatcaaactcaaggagcaactatcttactggaaaactggaaacacctgagaactacgaattataccagccagcaggtgactacaacattgcaggttgacattcaatattattctgatgactgtgattagctgtaaagaattgctggtgtggttttgggc

SEQ ID NO: 11383 - DNA, 437 bp, Glycine max
cccacgcgtccgaaagagtccttagggaaagagttacgggatatgcaatgttatgacccactttaagcaaacatggagcctttatttgttactaattaagtcttttcttcttaaaaggccaatcctcctgtttttggatggatttcagtcgtggcggctaacaatttatttattaataaatgctttaaaattaaaaataaagtcaaggaatgaactcaaacaagtcagtaatacagaagtatgtgggacttaaaatgtcgttttacgaaataaatgtacataacctagaaaatcaagaacgtgagtggtctagcaacatatgattgaatttattccactttattaatgattaaattttatggttatccgtgatattttcggttcagacttcagacatctagttataatattttaaaaacatatctgtctacactatc

SEQ ID NO: 11384 - DNA, 340 bp, Glycine max
gctgggccatatggaaaccaatgatcaaatgtgggaaagtttgttgtgaaaatggatgctgctcttaaacttatgcaacacaaggttgaagcagacctactataatttctacaggtctatatatgttcctcttcatccagatgcttatataatgtactgctaaataatcatccaggaatccagaatttgattatgtgccctgcgagtagtttgaagggtaatcgatgagttaatgcgatcaaaggtgctatttatatatattcccgaggaatttcaatgcataaatcatatgtggatccctacatcaactatccaaggaattttcgaagagcataatatg

SEQ ID NO: 11385 - DNA, 352 bp, Glycine max
tgtactagctagtgttgtataagttcacggtcagttctgaaaaatgggttccaaggttttgcttgttgtactcatgtccatagcggctatacttctgatctatgctgaggttgcacccaatgaatacgaacattttcactctaaagatgggaagcatgctccaaatgggttatatgatagccatatcagagagtgagagaatgagatggagagcgacagccactgcataaagtcggtgcacaaagagaaggagatgaagaagatgttggccctggatcacattgatcaacctcttgctgggaagaagctctgcatgcgaaccctaaaacttgatcgtagagctgccgaacac

SEQ ID NO: 11386 - DNA, 428 bp, Glycine max
gcgtttgtgcgtgttggagttggctatttgaagtgggtgcatgctgaagttatatgtgtatgtgaaagatgaagaacaatagagataaagaaaagggtaacgacgttgaccagaggtacagacagcatcacacgttgtcaatgccaatgatgtttactggtttgaacagagagaaggagatgtaagccatgatctctgctttgacacatgtggttagcggagaagatgagcatcatggtgctgattactctcttattaatcacaatattaataatactaatagtgcacttgttggtgatgatgattttactgtaacatcaaatatggcttgtggttctatgccaccttcttctacttggtcatctcaaggtggcaactctgttctcaagagaagacgggaatatgataatacaaatgatttcttacgt

SEQ ID NO: 11387 - DNA, 428 bp, Glycine max
gctaatgaacactagcatgtaaaaagtatggatttgatacatgggtacaacatattctgggaaggaccacatttacttacacaggtgcagaaattatttttccgttataagaaccgggcagactaccatttacttggggaaggggagtgggatatcataatattgtgcttaccattgaaagacatgtatggatctcgatcagtggatatgtcttttatgaaatttgttatgagcttttgtctgatgaggagttcttgactcacctgattccatacatggtatttggagattgtgcagtcattgagttatgtgccacataaaatatggcttttggttctatgccaccttcttctacttgttcatctaagggtggcaactctgttctcaagagaagacgggaatatgataatacaaatgatttctaacgt

SEQ ID NO: 11388 - DNA, 348 bp, Glycine max
atctatccattcgcatgatcaaacaaaactttctctctctatctcaatctccttctatcgcaagcaccctcccacacactgcataacgttaaccgatcaataacccatctctgtctacctctattcgatccaaattcggcttacacaaacttgtaacatttcattcctgcgagacttacctacaccgatgcacactgatatgcacgaatcctggatgtctgcgatacatagtcaacctatgcatgtgcttatacattctatctctgaagatcatatatgccactcatcggaaacttcactatcgagggatcgtgttcaagcgtaccctgaaacgccagagttgctact

SEQ ID NO: 11389 - DNA, 266 bp, Glycine max
cccacgcgttcgcccactcgttcgctctatttccattccacttaggattcaattcctaagcgattcccagcttgttagatggcccacaacgtttcaatttccagattcttttggaaaaaaaaaattatctttctttgcccaacaagtaaattggaaaaaaatggaccattacaagacttggtgccaaacttcttctgaaaggcctatattgcgcattaaccacagtggattttttggaaattcaaatatcatgaatatgtgttcta

SEQ ID NO: 11390 - DNA, 413 bp, Glycine max
ctctatccattcgctgaacaaacaaaactttctctttttatctcaatctctttctcttgcaagcacggctcccacacactgcacaacgttaaccgatctataacccatctctgtctacctctattcgatccaaatttggcttacaaaaacgtgaaacatttcattcctgtgagattttcctacaccgatgcacattgaatgtcacgaatgctgggtgtctgcgatacgtagtcaccctttgcatgttcttattcattctatctgtgattatcataatgccactcatcggaaacttgtttatcgagtgatcgtgttctagcgtaccctgaattccctgagttgcttctccagaggacttcgtcttttacctggaacgatacactggatgcgtattcgccacgtatacttgttga

SEQ ID NO: 11391 - DNA, 433 bp, Glycine max
cccacgcgtccggaagaatagctagtactagctcttgacccttcttcccacctttttctggtccctgctagaaatggcttccaattccattcttcttctttgtatctttcttgtggttgccacaaaggttttttcctatgatgaagatctcaagacagtggttcctgcacctgctccaccagtgaaggcaccaactcctgcctctccagtgaaatcaccatcttaccctccagggtcagtgaccacaccaactgttaaggtgccccctcctcctcagtccccagtagtgaagccaccaactccaacaccagcccctgttaaggtaccccctccacagtccccagtagtgaagccaccaacaccaacatccccagtggtgtaccctcctgctcctgttgctccatcttcaccagctcctgtagtgaaatcaaag

SEQ ID NO: 11392 - DNA, 436 bp, Glycine max
gtggttgtggatggtggacgagggtgaagaagtggtggtggtggattgaaaaaggagggaagttgagaggttatgattgatggtgaattcgaggaatcattgatcattattgtgttgtggataagtgctattttggtgtgtttggtgatggggatgaggaatgatgcacagaagcaacagcttcttcatcagggtaatggtggtggcagaaccaatggtttcattccaagttctttccgtgctctctctagctacctcagagttgtttcctctggtgcttctactgttgcacgttctgctgcatcggttgcatcatcgattgtggagagggatgatgaccctgaccatgatcaggttatctgggctgggtttgacaagttagagggtgagggtgaagttattcagcaagtacttcttctaggctatcgatctggat

SEQ ID NO: 11393 - DNA, 355 bp, Glycine max
gcgtacggctatttactacatcagacaatttgagtatgtatatacacaatcgatcatactacattcgtaaaattgtacaggaatcttgagacttaaaaattattacacgctattgtagcaatgctgaccatatgaacaccagcaatactaaatgcagaagcatatatgagtagcatatgtcatgagcaagcaataacttggtaatatggcataggacataatgtctatgtagtatctggacatgcgtaacattatgtaccgtaagcgcaagccagaagatgttattgttcgaactgacagacatattatgctgtctgaatgcaagctcttactcctatatgctatgagtatgaac

SEQ ID NO: 11394 - DNA, 267 bp, Glycine max
  modified_base (214)..(214): a, c, g, t, unknown, or other
gcgtgcatttgcagagcacagggttagcaaaatatctgatctttctccctcccttgcactgagtaggcaatggcggaggaagcacagtactcatcgggacccgattccgcgcccctcaagcgcaagtacgaagaccaacccttcggcatcgagcttgccaagcagcgtgctcaggaagtcgccgcacgccttctcaacgccgctccttcttcgncactcgacgccaagcgttccaaacccgacaccggcttcgattctctcgatttg

SEQ ID NO: 11395 - DNA, 394 bp, Glycine max
cccacgcgtacggacacatatatcgctttactggttttgatgtacgcagcattttctctcttcctgctaaattctactatcacggcgcacgtcccagcgccaccatgtacttctacaattccatcctcaatgtctcctttggcaccttctacaccaccaccgtcccggactcttcctgctcctatcaacgtctcttacgccgccacttccatctacagattccgctcccactcctccaccacctattggatttggaggaggaggtggaagtggaattggaaaaggtggtggtggctcaagcgttggaacaggctcatgaagtgttagtggtggcgtacatggaagtataggacacagacctgatgcccatatatgtagtggcgttggcagcggt

SEQ ID NO: 11396 - DNA, 426 bp, Glycine max
gggacctatatttcatgatggaacaaattaatggagttgttgcaagaaaagaagtcatgattttagcttgtttttggaaattccaggatgcaagacaggaaaacatacaacagttaagcaagttattacaccagtgaagaagaacaccatgccctctccaactgctgtttcttctaccaatgcatcatcaaaggagtcttgtcccagatgtcggcagggtttcttttgctcaaatcacggctcgcaaagcaaacctgtaaatgttgttggagacaaggctgcaaatcttgctggagatgtctctgctgataataattcaagtgttgaggctccgaaacctaagaagatagttgatataaatgaagcccaagtatgtaaaaataaaagatgcggtcaaactttcagggaaaggataatcatgacact

SEQ ID NO: 11397 - DNA, 378 bp, Glycine max
cttaaccatcacttatgaaagctctctttaacgattttcaccaatgtcactcacacacgaatcagggttcacacccacattccaacgcattctgtctggattgcatcccaccatgtagcttaaagggcctcaaattaaggcacccattatggtccttaaaacggtccttgttctaaccagtgccacagcttatgacgtcaacgctatataatcacggaaactcgatgagaccactcaagggtctgacagaaaccgtgctgaagaaaagtgagacatcatgtgctgataccgcttatgaggcgtcacctgctactgatctacgagcagaggctccacaaccgactacgacagataatacacctgcatctcagtattgtc

SEQ ID NO: 11398 - DNA, 438 bp, Glycine max
  modified_base (398)..(398): a, c, g, t, unknown, or other
ggaggtttggaactaacagggccgacataacacagttctcctttctctgaatttttcgttagagaatggggaagagtagcggaagagaccgaagacgaagaagatcacatgactctgaatccgactcaccttccgattccgactccgacagacgccaccgtagcaatagtcgccggtcacggcgggactccgatggcgacaggaagatgaagtcctcgaagtctgaatccgagtcgccttccgattccgactccgacatacgccaccgtagtagcagccgccggtcgtggcgggactccgacggcgataggaagaagtcctcgaggagcatcacagaagaggaaattacaaagtacatggccagaaaggcccaatcgaaggcaatgaaagtagcgaanaagttgaaaaccagtacggtatcgggctattccaacgatt

SEQ ID NO: 11399 - DNA, 401 bp, Glycine max
agctacccaaacaaaatccaaaccaccctttcggcctttaccttaccccaaacaacaagctatccccttcctgactgtgcctgaaattgtgaaatgcgaatctagccgacaccaaatcgcggaatcgattgagctgagacgcccaacgccacgctactacttgctggctgtgtgggtgctaccgctcgcttgcaaattctcttattcagaattgcagattgatgtcgcaactatttagttcacagttggctggtgcaagattggtgatgtagactgactgagccaagatgccattctgaacagagataagctggctcgctctttctgtagtcactgtatctatggcatctatcatcatgcatctatctttgacaaagttgtggactgttaacatagtgcag

SEQ ID NO: 11400 - DNA, 152 bp, Glycine max
cccacgcgtccgctcgattgtagattattaaaaaaaaaaaaaaaaaaaaaaaaaaaagaaaaaaaaaaaaaaagaaaaaaaaaaaaaaaaaaaaaaaataaaaaaaaaaaaaaaaaaaaaaaaaaaaaaataaattaaattcactgaccaga

SEQ ID NO: 11401 - DNA, 427 bp, Glycine max
agaaaagcagcaatgtgctgttgctgcttcaaatatcatcaggaacttctctttcatgccagataatgaagttataatggcccaacatcgccattgtttggaaacagccttccaatgcatagaagatcatcttaggatgaggaacttgtaacaaatgctctagagacaattgttaacttagctccacttctggatcttcgaatatttagctcttccaaaccttcatttattaaaataacagaaaaacgtgcagttcaggccatcatggggatgttggaatctgcagtcaaagcatggcattgtgctgctgctgaattacttgggcgtttgatcattaatcctgacaatgaacctttcttgcttccattttttccacagatacacaaacgcttaattgatctcatcagcatgccagctctagatgctc

SEQ ID NO: 11402 - DNA, 346 bp, Glycine max
aaaaaaaataaaaaaataaaatttaaattaaaaaaaaaaaaaaaataataaaaaaaaaatgggcaaatggtattgaggatccacgtatatacacgaaggatatccagttctatgaaccgtatcatcaaactgtaaaattagtagaatgaatatgaatctgatgaattatcaactggcaaaatggtatccttagccatgaaaaacccacaggatatcaggagtcttaaagaaaattctagaatatttattgaatcatttagactgttttttacaaaaaggtacaaggacatagtcaatctaggctttgataaatgatgatcagtattatgtacaatttgttactgca

SEQ ID NO: 11403 - DNA, 312 bp, Glycine max
tataagttcacggtcagttcttaaaaatgggttccaaggttttgcttgttgtagttatgttcatagcggctatacttctgatctctgctgaggttgcacccaatgaatacgaaaattttaacaaaaaagatgggaagcatgctccaaatgggttatatgatagcaaatggggttacggtggttggggtggtccttggtatggcggctggggtggcccttattatggtggcggctggggtggcccttattatggcggtggttggggcggtccctggcgtggtggtggcggtggtggctagcgaggttggcgtc

SEQ ID NO: 11404 - DNA, 241 bp, Glycine max
tcgatttcacctcatgatttgccttcttggccgctgtatattgtagtggagctgtgtctttgtaacatgaattatgtaggtgcgtcaattaaatgcaattttacaaaatcatttgttaaaaaaaaaaaaaagaagggaaacatgcttcaaaaggggatattaaaaagggcggcgtctgaggatcaagtacttctcttgatgcgaggtggacctcttctatagtggcacctaaattgaattt

SEQ ID NO: 11405 - DNA, 225 bp, Glycine max
ttcatccacgcgtacctcagtagatgaaccccaagtataataacaacaatcctatattatgcgaagcgggctcctaatgaggaggatatgatagcaaactgggatacagcggttgaagaagccctatgaatccggggtatggtggaccataatatagggagcgatggtgtggcccacattatggacttggattgcgcgggacccgtcatgaagatcacactcaca

SEQ ID NO: 11406 - DNA, 403 bp, Glycine max
agccttcggttgggtggcaactttggcaagtggatcaaaatcctggggaaaacctttttaggagaagggtaaccaccattactgggtcaaaaaggaattggggttataatgactggccagccagtcagccacctccaaaggaaagaagctctatatggggttgggatctcgaggcaaacaatgatactgaaactctggaggaatatcataaagagagtggcaaggaattaagctatggtaccttgaaggcggtcttcgcaataaaggcttcaagcgaccaccttatattaagaatacactggatgatgtttcatcttcattgggggacacttcagtccagaatgaaggatctttgcctacagcaaggacttcaattggttctgatgctcgtgttcaggacaag

SEQ ID NO: 11407 - DNA, 399 bp, Glycine max
cggacgcgtgggaaaagcacacacactctctctctctctctctccgattcgcactgtccaatctgtgattttattctttccttctctcaagttctattcgcttactgcactatatgcttcctagaaagagagtgagggaaggaggagtggttgtagaagtagacagtgacgctaccaccaccaacaccaatagtgctgcggcgtcgtttcccaagaaggctcggatcgggagctttgctgcctgctcgggtgccggtgctgcggattcgccggtgaacgtcagcggccagggattcagtagcggcggcggcggcgacaacagcctcgggaactcggtcggaggaatggctttggggaattcgcacccggcggagatcgacgaggatctgcacagtcggc

SEQ ID NO: 11408 - DNA, 177 bp, Glycine max
ctggccatctcaggaacatcttagtaactggcgcttcaagtgcattacgtcatgatccgggaacactatcaaaactaggtatcaactataacacaatcacttgatcacctaagcacaatgactcaatacatggctagaaagccgaagatgttatacaatacacgactacacacggag

SEQ ID NO: 11409 - DNA, 341 bp, Glycine max
gttcattttccaacttgataccgcgttcgctcactctcaactcaacttcaattaatcaaatcccacactttctctctctttccttcaaatctcaattctattttgcaaaatctgaatcaaacacagttaaagacgcacaagaaaacatctcgctcaacaccaccaacacttcggatctacgtttccactcttcgaacatcaaaaaaggaaagaaaaaccgatttacagcgacaacaacgaacgaacgatttctcgaagcgctctcaaaatggcgcgtgcaccctttacttcattccccttcgtcctcattacccttctctcaattcttcacctttcgcact

SEQ ID NO: 11410 - DNA, 228 bp, Glycine max
tcggccacaccgagcgaaagatcgtgaaaaccaaacttaccgggttttttttgacatatccacatgcattaagggccattaccggattattgtaaacacctgttaaacccttcaaaaaagtgtgtttgaaaccttcaaccaaaggtttattgaaaggaccccgcccaaaggggttttgatttgaaccctgaattcttttggtcctttgaaaaagggttattaccggtg

SEQ ID NO: 11411 - DNA, 303 bp, Glycine max
aaaaaaaaaaaagaaaattccataattgagaacatacaaaaatggagggaaaacgggaaagataccaaagctaaacgcgctagagtagtagatacgaaagactaaaaattcggcacgcacttgcagtacacgggtggatgggggaacaagtgtgctctgccaaaacttggaggagtgtgaagtaaactgcgttgcgaagccagctgctatagccagcggactgggctatgaaacggactatactattcgacctgcctagcaggggaacggcctgattgagcaattgggacgcaccgtgtagcg

SEQ ID NO: 11412 - DNA, 199 bp, Glycine max
  modified_base (1)..(1): a, c, g, t, unknown, or other
  modified_base (12)..(12): a, c, g, t, unknown, or other
  modified_base (24)..(24): a, c, g, t, unknown, or other
  modified_base (27)..(27): a, c, g, t, unknown, or other
  modified_base (36)..(36): a, c, g, t, unknown, or other
ncgccacgcgtncgcccacgcgtncgnccacgcgtncgggggcttgctatatcttctcatcctaaaccttattcagtcacaactggtggaaatctctggcggagtaaacacaccaccaagaatatttactttgcaagttcttggatatcaaaagcttcacgacacaaaagggaaactcaaattgaacataatgttttga

SEQ ID NO: 11413 - DNA, 121 bp, Glycine max
aattagacactacctagctctaacattctagaccttcggattactatttaccatatggcaaaatctagaatgagaccaacaagggcaacatcatcttggatcaagtcaacagctgtaatat

SEQ ID NO: 11414 - DNA, 323 bp, Glycine max
cacctctattctgcaaagtagtaatgatattcctaacactagtgtgccaatagataatggtccacaatccaaggagttaccaaaggagaactttgtgatttctgaggaaagtactcaatctttccgcaacattgatctgaatgctaacttaaatgaaaacgaagacaaaaatgctggcacagctgttccggcttcattgcctgagcccacttccatggacactgccatggagattaaacatgaagaaattccaggctggtccctatctgatgtggacaagatgggcattgacactatgcagcttgcaaacctaggtagtcgac

SEQ ID NO: 11415 - DNA, 306 bp, Glycine max
ctgaaacggactgattaacgaagtagattccataatttgggatcatacaactatctaggtcttgcggcagcatatgaatgctgcacgcctcgagtagttgatacgttgaagaagtattctacaagcacttgcagtacacttgtggatggtggaacaactgtgcttcaccttgacattgaacgagtatgttgcaaacttggatgataagccagctgctatagttacctgtaatggtctatgtgtcaaactgtgatattctttcaatattgatgtagatcgtaatttcgattaattagttattcattg

SEQ ID NO: 11416 - DNA, 279 bp, Glycine max
cccacgcgtccgatgcagttgtgcagctccgaccaacattacaacatcttaattctggtggttcaaaacggaagaacgctgcctccactggagcaaatgctactgtcaaaattgagggctcaaatgaagagaagtctgttgctacatcaaagaagcagaataagcagacaggaccttctattattgagcaaaagagtgatggtgatgagtgctgggttcctctaaagtaccatagctgcaagagtgatatatcctctagatatttgcagcaaatggtga

SEQ ID NO: 11417 - DNA, 433 bp, Glycine max
  modified_base (391)..(391): a, c, g, t, unknown, or other
agaacacataaccacatacacttcggtttatccgaaagaagctcatcggaatcgcaagacaccgccgacgacatggccgccgccgtgaccgatatggcccgccgtcacacgattagccaaatactggtcgacctcgtcaagttcgccgtcggttccgccatcgacggctcacgcagaatcatccctggtaggaagcaggtagataagatggtgccagaaggattaataaacatacccttgccaacccctttaaaggccaagaaacaccctgatttaaaggttgcaaatgacctcccttttgagacaaaaatggaggaagtgaaggaagacatgaataacctaaagcagcagtacgaagcatcaatcaaacgtgttgaagaatcacagccgncaaacaaatctgatggcggctttaaggaaatcaatcttgtgc

SEQ ID NO: 11418 - DNA, 432 bp, Glycine max
taaaaaaaaaaacactgtaatttgtaacagaaggtggcgtctaccagctacactcgctactcaatcgtgtcacaaactgaaccgagtctcacatgacaaacaccgaagaagaagaagcaactcctccgaaccctaagaattacactcaacactccaccaacgacgatgtggaacctcgtgacgacgaagacatcgaagaagaccaagaaaacgatgaagacgacgtcgttcaggaaccgaatcgcggaattccccaatctgcagcgtccaagttgcgggaacagcgtttcaaggtggaaaccctatcgcggcgcttgtcgtcggagctggttccgatccgagtccacgacgtggtcataaacggcaacacgaagacgaaggattgggtgattgaagcggagctgaaaggcatcgagaacgccaccagcatgc

SEQ ID NO: 11419 - DNA, 403 bp, Glycine max
gcacggaagattcgtggcatgaaagccatggtgaattttcctgaagcatcacgtacttcttctgtagaacgttacactgtacatacacaggaatgtcttacaactgttaagaccaatctgcttcacaagaccatagcatttacacttaacactgcaccagctacaacatagaaccttatgacgacgaatacatagatgaggaccattaaatacgatgaagacgacggctatcatgaaccgattcgtgtgatgacgcaatctgctacttccaagcagatgaaacaacgtttcaaggtggaaacgctattgagatgctagtcatgctagctggttccgatcctagtgcatgacatggtcatcaacgggaccaccaacacgaacgattgtgtgatagaagcggatc

SEQ ID NO: 11420 - DNA, 429 bp, Glycine max
  modified_base (285)..(285): a, c, g, t, unknown, or other
aagaattttaatttataagaattttctgccgctccaaaattccttccagcttcgttccagcttgtatgttcgttgctgtttgctcgatcccctccaacgtgtccctccacccaggcagggtttctatttcacttttccttccaccgatactaccaaagaacaaggagatcgcaatcgcaattcttaattctcagacgcactttcgccaaatcgaagtacattattgattccttccgtgatgagagagcccagagatggagccaataacaagccctctaaagccgncgccgccgccgccgcatcaccgcctcagtccttccctctcattctcgacgtcgacgatttcaagggagacttctcgttcgacgcgttgttcgggaacctcgtcaacgagcttcttccgacgttcaaattggaggaatctgaatc

SEQ ID NO: 11421 - DNA, 394 bp, Glycine max
gcagttacaatgaatcatttgctcagaagtttgaaaattattgtaaagaagtggagtccacgagctacatgggggggacaactagaacttggtgccttgactcactgcttgaagaagcatattatgatattttcagggtccttcccagatgtggagatgggcaaagagtataaatctgatggtggcactggcttgtctaattcgagtatcatgctttcttatcacaagcatgcttttgggctaagagagcattataattctgtggttccaacatgatcaaattgggcatatatatcatcatagggatccttgcctatcatgttgccttctatcatttttaattacagtcaaggatttggctttaagtctcttaaaaccgtaatttgtgaatttg

SEQ ID NO: 11422 - DNA, 268 bp, Glycine max
cccactcgtgcgacttgtactgttctattagttcatactaagttctgaaaatgagttgcaaggttctgcttgttctacttatgttcttggccactatacttctgatctcctctgaggttgcacccgatgatgcatacgagaattttgacaaaatagatgggaagcctagtgcagatggggtagatgaaagcaagtattgtcgtggcggctatggtggcggctatggtggtggttatggaggtggtcgtggaggctatggaagttttcg

SEQ ID NO: 11423 - DNA, 225 bp, Glycine max
agggatcccccaagatggtcctggtatctctgattgaaaacgaaatggagtttaaagcagttcatgctgatctgttcaaagtctacaataaagaacctgagttacctaagctgcatccattaggatcccttcctgttattcaagaccgttattatactctctatgaatctcgtgcaataatcctatacttatctgacaagtataaataccaaaggactgacttat

SEQ ID NO: 11424 - DNA, 342 bp, Glycine max
caaacacgctgatgaatcaatactgggacttcttcaatggcagatgaagctatctcgccatattgaatttgaaaaagccagttagtgctacagccagattgtgcaaaaccttggtgtaaaatctgtgttcaatcctctgttttgttgctgacattgaagactcttaaacaattaatcaagaattgttctagtgttttggttctggcaccagttgatctactattgggaattggtaacaaggatcactttctactacaacattcaactagatttcttgtactttcattttcatcaaaaattacattcttctatggatggtcttagttgggatgcctcacaact

SEQ ID NO: 11425 - DNA, 173 bp, Glycine max
tcattgtcttaatgttatcaatgtcttcctctttctccatccatttcttgctccttctctgaatatcccttttctcagtttgatacttatcatcatcttaagcttccaccaccatatcacacccctatatcctttccattaataatgactcttcatcaaatttatactacact

SEQ ID NO: 11426 - DNA, 399 bp, Glycine max
tcggctcaatggctctatttttccatttcatgatttattgtggcaaattccgaggatgctgtggtatgtgtgaaacttttttgggttgttatatcatgtagtatatgtactgcttacattacaagtactacatatactgtcacttgacgccagtagaatctgttgattggatttaggctctccctttgctaggattctagtttctttgcagagttacttatgctatattgtagctgttacttgcctcacatgaccaaaacacattttttagaattaaacattgtttttaacaatttaaatattagcttcaagttcaaaagcaatatggtcagtgagtcaatcaatgctttgacttaatgtacaacttgtttactaaagtcttaacttgtcttcaatggt

SEQ ID NO: 11427 - DNA, 333 bp, Glycine max
cccacgcgtccggattcttacaaagaatcaaggatgaagaaggtgaaggatgcaatgtgtatggttgcttggaagtaaataaggttgcagggaactttcattttgctcctgggaaaagctttcagcatctggtgtacatgtacatgacctactggcttttcaaaaggattcttttaatttaagtcaccacatcaacagattagctttcggagagtatttccctggtgttgttaatcctcttgacaacgtgcattggacacaagaaacaccaagtggtatgtatcagtattttattaaagttgtgcctacagtatacactgacctgagtgggca

SEQ ID NO: 11428 - DNA, 430 bp, Glycine max
ttctttgaagaagccaacatgtccaacaacaatcatcacatgtttgcaagggaggaaggtcaatttgaccggttcaaagctttgaatgcaccaccctttgagaccaatcacaacaacaacaacttccatttgatgtttggttccccttgtgatttggcatcctttgatttcaaggaggatatgcaaggaggagtagtagggatggatgctcttcagaaacagcctgatatctctatttggtaccagtgaaaatgacagcttaaagcttgaaacctcctcatcatcttcatctatcatggactcttttattttccttctaaaagggttggcacccccctaatcatgtgaagttcctttggccgaataagggtttcactgcaattttcttcacatgtaatcctgtatgcccagtttaaactaataatatttt

SEQ ID NO: 11429 - DNA, 297 bp, Glycine max
aaaagaaaattaacatatgtgaagttgcagaaattcaagcttctcgaagttttactgtagcctagacatgcttctctgtgttcttacctgtgaagattccaattcagtttttttaccttcaatttttccgccattttgctctttgttcagttgttgtttttccttctgaggcttatttgtgtggcttagcagattctggctcattttgcatgtgctatttaccttcaaagttgttgatcagagactgtgcacatgaatcatatcttattgtttattccatgaatttcttttactatt

SEQ ID NO: 11430 - DNA, 418 bp, Glycine max
cttctctcttctctgcattgtatgcagttgtcagattttcacatcttgcagtgagttgcaatctggtacaagacagtatgtaagtaggtacttccgtactgctgttgaggttttgtctggtgatcaagtatcttgttcctaccttggaggctgcaccatcccagcggaatgcatcaagttaagccattataggggttggaacagggattcttgatcaaccaacctgagtacagaattcttctggtgaatctgcagaaaataattactctgataaaaagaagcgcttgagttcatccgcaagttttgtcagtgcggtttgtttgatgtactcggcgcaagggaattaaattgttgcaggtcaattgagatttgaggggcagtcacaagatatttttttaaaccatttaagcttgggttg

SEQ ID NO: 11431 - DNA, 386 bp, Glycine max
gtagttataaatttaaatgtatttgtattagttgttaatatgtttgggaggtaatatgtagtcaatttttggatgtggttatatgataatttgaatgtacttgtgtatgatgcatatgcccttaagatgaacgaagatcaatggacgtatgactatatgatgtcacaagaagttcatatggattatgattatgataatgaataagaatgtggtgtgaatgaaccacatgttgattgttcaaatgcttttaatacgtctcaggtaattggtactcgagatgatgttttgcagtgggctcgaacagttgcccatgaaaatggatttgttgtagtgattatgaggtctgacacagattccggtagcagaggaagaagttcatttggctt

SEQ ID NO: 11432 - DNA, 440 bp, Glycine max
  modified_base (392)..(392): a, c, g, t, unknown, or other
gccgattcgattaccaatttgcttaaactcaatcaagcttcgcagcgtgaatcattctattagaggtgatcataatccattttcggattgctatatttaagtagttgtagtgtagtttgattggtaaatggcatcctccgatggtagagttacgtattcttcactatctaagctagaaaacgagaatacccattttggctacgatgatatgaatcatcatggtgaatctgtgtggtctgagcctatgcctggcaccccgtgtggccaattaggcccaacgttctctaacaaagagtcattgtatcagtttccctccgaggatgatgacttgtttgatggaggttatgaatcaggtgatgatgcacgcggtatcgtaccctctaacaggcctnctgaggtgaacttgaaaaatgtgctttctgggatctttgctattttga

SEQ ID NO: 11433 - DNA, 397 bp, Glycine max
ctttttctatattcaggaacaatatcgtcctcagtacgaggagccccaatctcaaagttcctacaaaccccagaaggtggatgaaggtgaagatggatggcagactgttggtagaaagccttcaaggcatccacataaggtttatcttttaattttaataatcaatatgtcaaatgaaaaaactaatgtggctttttcagtgttttgtatcattttaaacagattgtatttttatgtttaatattgctgttacaggtatatcttctttgaaatctactatatgttaactttgttactgaatttgtgatctaatcagttctgaatgttttatgcttcatccctgtctgaatttgaatgatgaatcttatcaacttgatgtatgttcaaaaggacaact

SEQ ID NO: 11434 - DNA, 337 bp, Glycine max
gtttggtgagatgaagggtgttctttccatcagcttcttgttttgttgcttgctgctgacttttggagtcttcagtttcacttcctctatgcgttgattcaagggcaccctttaccttgaacaagacacttgggttttgtccttacaatggaagcacgtgttgcaactccacacaagatgcacagattgagaagcaattccgagcaagcaacgtttcagatcctggctgtgccttggttttgaaatcaatactttgtgcgaggtgcgacccattttcaggggagctatttactattcaatccttacctagatcattttctgtgctttgctatttcac

SEQ ID NO: 11435 - DNA, 347 bp, Glycine max
ggcaaaaagtgaggcaaaaaatgcgttggctcagcaagggctagcgaagtcagctgcaactaaggttccaagctctggtcaactaaatctaaagcgagtggatggtaccatgcttgaagctcacataaggaaaaagttgaacaaggatgaaaggttggcattggttagagcaggaagggaggaaagaggaaaataccaagctcgaactgctgtgaaacagaataagacgggtgggttaagcaacagacaaaaggaacacaagaagaaaatgcccttggctgcaaagagagataaagtatcaagaactcggatagagaaaaagaggaaaaatcagcgatctggcaaac

SEQ ID NO: 11436 - DNA, 417 bp, Glycine max
  modified_base (316)..(316): a, c, g, t, unknown, or other
ctacgattttagatactctctcattgatattccccttgtgtcaataatacgatccttcatcatcgtctgtgtttatagtttgtgtgatggaccaaggctttcccgtggaccttatttggggatcacgaccatgtgctctgttttgtctctgatgtttgtgtcgttcaaagccgtttacatcttcagtgtttcgggtattgatcgaagtgggtatgttcgtgccaccgaaatagctctgttcgtgtgctcttgtgcgttggccgtggggcatgttgtggtggcctacagaacaagttgcagggaaagaagaaagctnttggtctacaaaattgacattgaagctatttcaacttgcaaaaatgggtatcccaggtattcgaagattcctcatgaagatagaatcaaatgaactcacat

SEQ ID NO: 11437 - DNA, 386 bp, Glycine max
ctttcatagcaagtaaaaacagtaataagaattaacatataagaaagcttaaagttatttttacaaatcatgcaattgatttccccaattcgtcccaattgcatatccaaccgtccttggccattgacttctcttaaattagctggtaggttctcatcaaactctatcccccatctttcacttagttttccattcttacctggtcaattagaaattaaactgagagaaagtataatatcaggaagaatagtggtaagtaactaaactatgttagaaatccctaaaacatgtttggtcattagttgtttgaaaggatctaattatgctatagttcaattgttcatatgaggaagttttaccatacatcttatgcttttgagctttgc

SEQ ID NO: 11438 - DNA, 459 bp, Glycine max
gtactgttctattagttcatactaagttctgaaaatgagttccaaggttttgcttgggctacttatgttcttggccactatacttctgatctcctctgaggttgcacccgatgatgcatacgagaattttgacaaaatagatgggaagcctagtgcagatggggtagatgaaagcaagtattggcgtggctgctatggtggcggctatggtggtggttatggaggtgggcgtttaggcttttgatgtattcgtgtttgctattgttgtttacattatatttttggttttttcttaattatctattttattgttctttatatttactttctttatatattgtttcatttatgatttcttttttttttctctatttttctatttttgtttattttctttttttctaatattttatatttttttgattttttatttttatattttttttttttttttttttt

SEQ ID NO: 11439 - DNA, 409 bp, Glycine max
tggggatgctgagggtgtttcaaaggtgtctgaaggagctagtgattgagaagccaaacctgtcaggcgatccgtgaaaagggcacttggtcagaagtctgatgcgaaaaaaactaatgtggtggattcagtaaaaaaaggaagtgggacagcaaatgatgcagatgctaaaaagcacccagccaagaaattagatgaaaacaaaaaggatcgtgatggatcatcttcaagacaaatggaggacaagaaaaagggcaggtgggggaaggctaactctgaagcaaatgtagtaaagtcatctgctatggatgtggacaaggaaatggtttcttctctgaggtctggtacaaagtcaactaaaaatgaaaattcagaggagactcccaagacaaatgtgaaaaggaaacgc

SEQ ID NO: 11440 - DNA, 367 bp, Glycine max
tcggagtgtctctttggctggtccagatggtctagtaatggtgggcggacttgctgatcggttggtagctgctggtccagtgcaggttgtagtggccagttttcttcctggtcaccaattggagcataaaaccaaaaagcaaaaggtggagcatgtatcaactattaacccttcacctgttaatcttatcactagtgaggaaataaaagtaagtcttaggtggagtaaagcctattatgacccctgctgcttatcaagaagagaatattgcttattttaacaatgttcaagactctaggaactcatctgctgatgacaaagatcctttgcactgaaaaggagtctaacctaaaccaatcaaaatctt

SEQ ID NO: 11441 - DNA, 407 bp, Glycine max
gccacgcgtcgccacgctccggaccattcagaagaaagaattgatggacatggaacctatgctatcctacaccagcatgaaaagattgagtctatatgattgccagagggagtggatattcgggaagatatgatcatagttgcataaattctcacaaaagagctttaaattctttgctgactttaatttgattctatatctaatctagtttcattagatgctttttatttcttttatttttatctttatgttttttttaatatttgattttttttttatgttctttattatatattttattttttttttattttatttttatatctatttttttttatatttttttatagtttttttattttatttcttttgttttttttttttattttttttatttattttttttt

SEQ ID NO: 11442 - DNA, 340 bp, Glycine max
  modified_base (311)..(311): a, c, g, t, unknown, or other
acaagtttgaggctaatgttgtcatttcatggagggattactttttgagagttgtaccaactgcttgtggaactgcaatggatgttaacttgagcaatgtatctctagttttcatctctgtcacatttgctacaatgtgtaaatctgctgctccaatttttctccttctgtttgcttttgctttcaggttggagacaccaagtgttaaactattaagcatcatcttaatcatctctgttggcatattattaacagttgcaaaagagacagagtttgacttttggggatttgtactttgtatgcttgctgcntgtatgtctgggtttcgttggtgtatgac

SEQ ID NO: 11443 - DNA, 417 bp, Glycine max
gcggtgtgccgtcccttgttctttccgttgccttccaaaattccatcgtttgaagatgagctcaggccagagtactacagcgtatcctccaccgtcatctgcacctgctcaaccacctattggttatcccaccaaagaatctccacagtaccctcagaaatcagtggtggaaaccaagtccaagggtgatgggttctggaaaggatgttgtgctgcattgtgttgctgctgtgtcttggatgcatgtttctaaaggctgagagattgcatatacagaatgttttccttcccctttctattttatattattgtttttcgaataaattatgtatcgtttgaatgaataaggcaatactttattacttatttttcagtgttattcattatattttaggtagatccgtaatgtaattatat

SEQ ID NO: 11444 - DNA, 352 bp, Glycine max
caaagatcaattaccttgttcttttttttttttcctttttgctccatctcgactacgttatttatccataccggttctactttcaaaagcggcaatttcataacaatgaacacaaatgaaaaattcaaattgtgcgagacaaacatgcatgggttgagtgatttgatgagttgaagagcctatccaattgagatgttgaggacgatgatggcaaaggatgagcaagttccaaatgtatgcaacaatggtgagagttgaagactcgattagagtgtagagatgatcccaaagagaggcttaaatttggattaaataaactttactacttttgagagtgcttgtatttaattta

SEQ ID NO: 11445 - DNA, 226 bp, Glycine max
tcgcccactcgtccgctgactcgtgtattgcattgcatatcgtttgccagggcctttctgtgtacactgtgacttatattgagtctccacaagcaaaaaaaccaacaggaggaatagttgtaatgattctattgctggtggtggtcaaggcgttataagcatttgtttgaccatgatatgactaatgcgtaattccaatcttttatggataattttttgttcatat

SEQ ID NO: 11446 - DNA, 370 bp, Glycine max
gtcaatatcaaaaatgaattttagaaaagaaggaggctccacttgcagagccagggaggagcgaagggtatctgtggatgaatgacgatcatgccctcgttgttgctttgctcgttgtggaaaagaatataatgaattgcgcaaacaagtggatctgaattcacatgggactcagccacaacaagaaaactttgctttctcctctgctaagagtaagacccaagcacttgttactgcttctatagttattaagtcatagaaagagaaacacttcatcgcgaatcggagcatggcggagctccggcactcttcctcccttggcagccgagccttcaattctccgatgaagcgagacgccggcgccggcgcc

SEQ ID NO: 11447 - DNA, 433 bp, Glycine max
cccacgcgtccgcccacgcgtccgttatcatttcatttgttgtctgttgcgttaacgtcgctgcctccgattctttccacttcttactttctttctagtttctcttttccctctcacacaacacaagagaacacgaataaaacgcactgcacgtgaatcgcaattattagggtttacacaccctcgcagatggtttgagattgcgaattcgacgacgatgatggaaggagcgagcaatggagggatgctgtaccacgaggtgcaggagtcgaagctctgcgcggtgcattgcgtgaacacggtgctgcagggcccgttcttctcggagttcgatttggccgcgcttgcctccgatctcgaccgcaaggagcgtcaggtcatgctcccagcgctcgcgtcggcggatttcgagtcgcacaatgtcttgctcgac

SEQ ID NO: 11448 - DNA, 385 bp, Glycine max
acgctaggaagcagttccaaccttgataatagtggagaactactaacctcaggatatggaacaaatgcatggcctgacttgtctttatccacttcagctaacattgatcagggttccctgggtactgaagtatctaaaaatttaagtgaacttagcaaattcagttcatcaagagaagaaactacacaacatgaaaaggatgctgaaattttccaaactgctcatgaaggtaaagagcaaggtgattttgttgattatggatgggtcaacataggaagttttgatgaccttgatcaaatttttagcaatgatgaccctatatttggccatgcaagtcttgataattctaatgagctttggtcctctaaagatgtgaagtaaaatg

SEQ ID NO: 11449 - DNA, 346 bp, Glycine max
cggacgcgtgggcggacgcgtgggcggacgcgtgggcggacgcgtgggtgacccctaaattcgtgcccattcccacaactgcacattcttctttctatatattccaaatcccttttccgatttccaccaaaatctaaaccgaaattcccaattacccttcccaattttcaccaaaacctaatactcccacaccaatcttcgatcatggacgccgattcacaaccttaacaactcgaagagagaacagaggagcaagaactgaagtacctggaattcgtgcaattcgcgaccatacaggctctgatgcgctgcgccatcctctactcatacgccaaggagcgcgcgg

SEQ ID NO: 11450 - DNA, 370 bp, Glycine max
  modified_base (336)..(336): a, c, g, t, unknown, or other
gggtaagggtcccttttccttccgccgctccgcctctcgccgccgacccaagaagaccgccgccccgcctcctcctccgtctccgccgcagcctccctacgcggccggaatcgccacctcacccgacgacaacaacaaccgtctcattgctgccggcgccggcagcagcgccttgacgaaggcgaagaagaagaccggcggcgcccgcttgtggatgaggtttgaccggtcgggccggtcagaactggtggagttggagaagaacgccatcatccgccacgcagcgattcccgctagagacctgagaatcttgggccccgtcttctcccactcctncaacatcctcgctagagagaaagcaatggtgggt

SEQ ID NO: 11451 - DNA, 359 bp, Glycine max
gaaaatgtgtatgctggtgtgagaggcatggggagtttgggagctgttaacaacagtatcgaggatgcgaaattttctagttcgaggaggttgaagaatcaaccgaactattcttcgtcggggagaatgtcgtccattgctgaaattggggacaaagggtatagagaaagtagtccagacagtgaagcttttgctgatggtaacgattttatggccggtttccaagttggtcattgggatgatactgcaatgatgtctgacaacgttggtggtctcaaaagatttagtgaagaagattcaaaaccattttctggcttaaatgcggttgagactcagaatgaaacgggacagactcatgc

SEQ ID NO: 11452 - DNA, 404 bp, Glycine max
  modified_base (375)..(375): a, c, g, t, unknown, or other
  modified_base (381)..(381): a, c, g, t, unknown, or other
cccttcttcctcgttccgctcctcctttgcatacatggtttgtgagcaaccctaatccaccccaacccaacccaaccctattgaattgaattgggggaagaagaacattagaagaagaagaagaaaaatcggcacaattgttgtaattgaacgatgtctgctgcggtgtgcggaagcaagagatctttgttcgaagagcttcccccttctccgccagtatccaagaggctccgctgttcctcctcccctattcgcctctctctcccttccctcatcgaccaccttcgctctctcttccctcatatggatgaccaggtcctcgagagagcgctccaagaatgtggcaatgacctagatgctgccatcaagagcctncacggnctctgtttgggatctgctgatga

SEQ ID NO: 11453 - DNA, 356 bp, Glycine max
gactcacgtgcgctctaaagagaacttagaagcgaatgtggcagcgactggggcagaatcaccatgccagctacgatgccgacaaccaactccagattcgactctgaggcgttgactcaggcgttgattccggagactgggtcacagactgtatcacaatatatctagattaatgcaaggctgaatacagtgctgcaaatagtcctgtgattcatactgtctatctggataactatggtgatgatgatggctataaggatggcgtataataccatgtagattaccatcttatcaagcaatgcatcagctgatgcatctgctgatattacatttcatatatgatctgatgtcagtta

SEQ ID NO: 11454 - DNA, 297 bp, Glycine max
gcagcctcgtattccttcctctgggttgatgcctgcaagtgatgttcttattcgtgcaaaggaggttagtctactttggtcccccctccctccaaatggttatggttgtttggcaatcaccatgtaatattgcctgactatttttcttgtcgtaaagttacattagaacactattcatgcggaagcttttatagtacttccaattagagttcaagagttttatatatccttttgactttcatattctaaatataatctctccatggaatttcttggttgcagattttgccccaaaca

SEQ ID NO: 11455 - DNA, 408 bp, Glycine max
actctctcagagtttgctcacccctactcttcttccagtctctatctcaatctgggtcaaatttaactatggctactgaagaggttttggttgatgaaatcacttaccctaccaagatcactactaccaagcccctatctttgcttggccatggaatcaccgacatggagattcacttcatccatgtgaaattctattcaatcggggttaattgggagccagaagtagtaggccacttggaccagttcaaaagaaaatctgcaaaaggacctgaagaatatgaagagttcttcaatgcttctcatttctgccccggtggagaagtttattagacttgtggtgatcaaagagatcaagggtgcacagtatggggttcagattgagactgcggtgaggggataggtggca

SEQ ID NO: 11456 - DNA, 413 bp, Glycine max
ttctcttctttttaatttttttttttgttcttctttttcttcaacccctctattcgcaaaggaagcaacggaatcgattctgttcagttttcctcgttttgagtttaaattcacagtattttgaggaaacaaattaaagggtaatcgctcgcttaatccaccgagctcaattcccacatccccacaaaaaaaaaatcaacaaaatcagatttggtgaagaagagagtgtgatttgatgattatgaattgaagtttgaggtggagacatgaacgtgagccatgcttcggttcatccagttgaagaagctccaacgactgaaggtggtggtgctgaccaaaacgtcaacgctcctagggtgaggatgaaggatatccaaggcatgcccggcactgccggtggcctgtctctgcgt

SEQ ID NO: 11457 - DNA, 64 bp, Glycine max
cggaggcgcttatggcgtcgggtcggagttcgaagaactgagccttccatcactccattccaaa

SEQ ID NO: 11458 - DNA, 378 bp, Glycine max
ggatttaaagggctactattcaattgctatcaagacaacggatctttcaatctttgtaactgtctagtatgctttatctggttttgaatgtaagacagtaagagtgtcttcatgactgcagttccccgaaactccaaacttgtatgttaaattcatttttacttgatgtgtgttttgatcagcatcactgaactgtggacgtgtcacacttgaaggtctgttatttatgaaattttatgtgactctcgcagaaatgtgacatagacctctagacgtagaatcaatctgacccttagtcataaaggattggggatctgctttcagttagcattcatagctgaagtgaaatgcatgtctaaatttttcataactaaattt

SEQ ID NO: 11459 - DNA, 368 bp, Glycine max
ggcacagacatacgcgtaggccctcacgtaacccatttgacgttccttctccactttcgaagcggcatctccgactccacctacctttataaaaattcatgatttcaccgcaaactaaacaatccttcggttcactcttcctccttttcctcgtgttgttgcagaagcgattcgaaatgggcgtgatcgtagaaaaccctaatagttccaagccaatcgtgatccgcgaggtctgggcctccaacctcgaatccgaattcgaggtgattcgtgaagtgatcgatgattaccctttcatctcaatggacaccgaatttcctggcgttgttttccgcccccacgtggtggaccccacaaaaccctacctc

SEQ ID NO: 11460 - DNA, 162 bp, Glycine max
gctttctatatttaatattttatatatctttttactaatgttaaaggaattttatttgttttataaattaaaaataataaaaaaacataaatttaaaaagattaaaattcatttaataaaatgatgtactaaaaatttaaaaaatatataagtatattagat

SEQ ID NO: 11461 - DNA, 395 bp, Glycine max
gccctgtccgtggcattttcgtctttctctaatttcttcttctttctttctctcagttctcttttgaatcaatctcatctcatccctaacaaccacacatgcacgcaccaccatcagatgttgttctgagataatccagataccctttaaggttttttacttcatagctgcagaattccttgcactttgcttggtttttgtctctttccttgagggttatcggattcttcctttgccaaatcttgactgctatgttcttcagttgggatgaaacatgatgaagacttcggctcgattttacaataaagggatattggtattcagtgaagtgaagttaacatttgagatacagaacaagagaaaagcaaatttgatgtaactttttctgatttttt

SEQ ID NO: 11462 - DNA, 386 bp, Glycine max
ggaaggagcaacaaaattagcagaatcattgctcaaaggaactgaagagtttgtgaaacttgacctatcatattgtggtctaacatttaactttgttttaaacaccagtgttaattttttttgttctgtcatagagctgaacctggaaggaaatcctatcatgcctgaggtttgttgccttgactagatttctattgctaatattattgtaatgcatgcttcattggctggttttatttgagtgttactatgtattacttcaacactcaaaatagaatctggcttttcatactatttctttacccttaaaacactggcttgcagtttatagatttaggtatagctgtggcattttggtgataattttgagtttaaccagtttctta

SEQ ID NO: 11463 - DNA, 377 bp, Glycine max
aaaaaaattaagttagtatgtatggatgtatgtgttcttagtaatcataaagtgctaagtcaaatacaaatattgtttgtgtgtggtggtttgatcaacaacacacagaaggggtatctcaaaaacacaacaacattggagattatggagctagcgcaaaagaaaggatttctggttcatcatgagtacgatgatcttgttggttctttttattcttcctcgacatcttcttctgtttctggaatttcaagtgggtcatcgttggaatctgattcttttgaagaagtaacatcccctgcctcttcttctccctcatcatcagttgatgatcaacttgtagttgttgctgatccattgagtgacatgtcttctctctt

SEQ ID NO: 11464 - DNA, 256 bp, Glycine max
cgctcatgttgctcgcgttctcgccatcagatcaaaacggcgtcgtttacgcgtcgacgtagcgaaggtggtgggaaaccggatcagccggtgccacattttggggtttcttgaaggttccgatgggattgcttcgtttcatgttttttttttttaagttacggtgttaatatgaaaagggaattaattgtaaaagcagaaagtgaaaaaaaaaaacagaatagaaagggatgaaggattcattgtattgcggcat

SEQ ID NO: 11465 - DNA, 66 bp, Glycine max
aaaaaaaaaaaaaaaaaaaaaaaaaaaaaaaaaaaaaaaaaaaaaaaaaaaaaaaaaaaaaaaaaa

SEQ ID NO: 11466 - DNA, 411 bp, Glycine max
caatgaaggagcatcgttcatctagtccacaacctttaccacttccatcccctcagggaggttgtgcattgaaggctattggcagctttaagtctgtgacatcaggtggctcctcttactatgcttctggacctttgccactcccacctactgggtcacttcggaattttctgtacgaggaaattgctgctgcttgccaccatttctcttctgatagatgcatgtcagaatgtctttcatccaccatatataaggcttccttcggtgacgatgtttcaagttcgaagaagtttgaagctactgtcacacggcttcacccatcttctcagggcttgaaggaattcataaatgaagttaatactcttgcatctttgcaacatccaaacctttgtaaattgctaggaattcatg

SEQ ID NO: 11467 - DNA, 382 bp, Glycine max
cggacgcgtgggcggacgcgtgggcggacgcgtgggttctctcacgtaatggcgtcttgggctcaagtgcctaacctcttcggcggcgccacctcagctccgccgccaactccggcggcgcaccatgacaacatcatgtgctcatccgacgccgccgatgcgctctcgcgcctactccagcgccttccgcccacgctctccctacccacgcgcctaccctcgccttcctccgcagccgccacgtgtcctacctgcctctcccttaacgacgtcctctcctgcgtttccaaactcggttacgcgcaactcaccgatcactcagtcccctccgaactcgccaactcggccgagtcagaagcgctggcactattcgacctttcgc

SEQ ID NO: 11468 - DNA, 412 bp, Glycine max
ccagagaattggttatggaaattaaaaaagatgcacaggtgttgcctcgtataggtgctctgagagagatgaacttggagtattttaccatagacagtcagggcttcattacaaacaatgagagagctttagtggagctatttggggatgaggagaataatcgtaaagctgttgcatgtttaaatgtgatggctactcggattgctacagtttttgcttcattaagagaatttccttttgtccgctttcgtgctgccaagtccctagatgcaaccacaatgactaccttccatgatcttattcctacaaaacttgctgctggtgtctgggactgtcttatgaaatataaaaaaactgtacctaatttccctcagactgagtcctgcgagttgctcatcattgatagaactat

SEQ ID NO: 11469 - DNA, 372 bp, Glycine max
cccacgcgtccgggttggggtcagaaaagcaattggaactctggatctaggagtgggaatgagaaccagaattctcactggagttctgggcgtaatgagcctggaaatcaagattccaacttggacaagaaaagcaattggaactctggaaacagtggaaacctggcttccgatccaaaaagtagcaattggaattctggatctggtaattccaatgaaaattccaactggggaaccaatgtcaataacaaatcttcatggggtactggaaatgaaaacaagaattccagctggagttctgggcatagtgatcctggaaatcaagatgccaatcagggcaagaaaagcaattggaactctgggaacagtggt

SEQ ID NO: 11470 - DNA, 386 bp, Glycine max
ggcattggaggagctagtgtggcttagtcgctaaatttgttacgataaagaaattaattcagcaacaaatacaatgggttctcttatggcaggatgggactctctgatcttggatcctgaatcagctacaatagagaggaatcgatcactcaccaaagaagaaattaatgcttactggagagtaaagaaggagacagagttagaacacctcagagctatgtccaaactatctgagactattcaggcccgaaaatttgaggattcagagaattctcataagtcaagtaccgtgaccttggccagcataaaggagtccttaggcatggacgttgaccagaaaagtttagagcaacttatcaagaaaaatggctggtggaccaaaagca

SEQ ID NO: 11471 - DNA, 386 bp, Glycine max
gaaagagcataaagcctcaggaaaaggacattggacaattttaactttatgcacaatatattgtcctgtaaatatgttatgcagttcaaaggacatccttatgcgcgtggtggctcaaaatctttccccagagtcggctcttctggaaaaggtgatgactccaaatccagaatgtgcatctctagagacaacaattcttgatgcactgcatatgatgcataatgggaagttcttacatcttcccgtggtggacagagatggaaatgctattgcttgtttggatgttttgcagataactcatgctgcaatttctctggttgaaagtagtcctggagcatctaatgatgcggcaaacacagttatgcaaaaaatttgggactcagctt

SEQ ID NO: 11472 - DNA, 415 bp, Glycine max
tgcgtgtgtttttttttttttttttcatctccaaacccaaagagaaccgtttactcggggattttaatccccccaaaaattcccattttactccttttagagagagaaaagaaagattgagctttcaggagagaggaagagagagaaaaaaattggatttttttttggggtgttccaatggttgaactggaaatccaaagaagggtgtgagaaaaaaaaattgcatcttcttttggtgggtgtctctgaaactatgatcttgtgaaaacccagaaaggaaaccttcggtgcgcgttggtagatagatagagagagattattgttgttgggatattctgagaaccgttgattgagaaatgaacggtggtgatgaggtcgtggcaactccggcgagtccaccgcaaccgctggagtg

SEQ ID NO: 11473 - DNA, 376 bp, Glycine max
aacattctttgtttcgctctcgcttttcaggtccaacaacgccgaagaagaagaagattgtgtctccgattattatttgaagatttctgaaacaccagagtgtttctgatcatcgtcgtcgctgatctctggttcctccgttactgtttctgattgcagaggcgaaaaggttttccgcatcaaaatcgaattttgtttgctccatcatcaccatgggtagaatcacgaaactgggttttcttcttctacccagataagtaaaagggttttcttctttctcatttattccgacaagtgcacaaataacaacatcatcatcgtatcaatcatcggacaagtgcacagacaaacaacatttgtgtctgattagcagaaa

SEQ ID NO: 11474 - DNA, 368 bp, Glycine max
gatcaaggtatgctttctctcaatgtagaggtcgaggatggcagcgttgaagaggtagctgaaaaactaatggttatgcatgaagaattcttagaaggtaattttagttcttttgaagatctcaggaaagccaatcttgagcaagctactcttcctcatgtaacacagattgtaaacgaagacgattcagatgaagatggtgatcatgatgaaaaaatgattgtggatgataattcttcaaacatgaatccggagatttcaacatctgattcaaacatgaattcagtgaacaggccagtaaatgagcctctaccaaaggtttcaggcaaagcagatgatggatgggttgtagtttcaaacaaaagaaa

SEQ ID NO: 11475 - DNA, 423 bp, Glycine max
  modified_base (391)..(391): a, c, g, t, unknown, or other
cccacgcgtccggtcgcatgtttcattttccaaaacccaaccggttcgtggggatgtggtggctacttccagtagatcaaacaagagagaggatttctatgcttcagaagaaaatgtggttgttactggcaacgactcacctttgatctcgatacctccaccgccgccaccaccgccgttcaaaatgccggcatggaagttccgggtgcagggtgactttgttagaatagatggcattagtagctggagtagtgatttggaagatgaaattgtggaatcaccgagcagtgaagatggtggagcacctgaaatcttattgttctatcctagtcctgatgttgataccaaagctgatacttttattgaaagggtcagagctggtttaagggangagaagaagggaattcgtacgtccaatctacg

SEQ ID NO: 11476 - DNA, 397 bp, Glycine max
aacaaaaccccttgcgtcctcgccgcacagttacactccgcagcacactgcaatcgccaccacggaccaagctagttccgccgtcgacgtcgtcggccaccgtcacgtctcgccgtcagtttctttaaataattgatatctggaactgtacaagcagaggacatggcaaatcagtctaaagaaaaccagcaagcaacaagttccacaccacctatccagaaaagtgaggaagatcaagcagccagcaccactatgggctttaaagattcattggaaaaacaatatcgaaaagtcaaagagcatgcagaaacatacccttatgtttgggcttcctatattgttgtatatggtggctttgcactctggactacttatagatggagaaagcttcgcaaga

SEQ ID NO: 11477 - DNA, 390 bp, Glycine max
  modified_base (270)..(270): a, c, g, t, unknown, or other
cccacgcgtccgtcttttcattctttctctgttctcatttcatcttctacacgcgtttctaatcattattagactcgatctcaacgatgaaggcaacactgctttgtccttgttcttctgctcctctgattctcgacacgcatagcaaccgaacctcggcaacgagacacgcttccaccgttgtttgttgttcgtcgaggaatcaaccctacatcccgaagctcgagccttttagccgaaccaaatttgaaagggccgttaaggaccctnctttgatcgaaaaatccgagagagagatcctagattattggtcaacgcttggaagagaacccatcttatactggctgcaggcttaatttgagcttgaagatcttgaaaaagagtccccaa

SEQ ID NO: 11478 - DNA, 373 bp, Glycine max
cccacgcgtccggccgcccttcggccacagccatgtaaactacatggtgggggcaccaccgtccgaggaggaggttcaaagcggtgtgaggactcaacaggccgatggggccgcatgttttcagcagaacccaaatgcccgattgttaccgggctcgggcgacccatttgggtttgggttcatcatgggtcagcaagttgagttcgggtttagggactgaaggatctgatagtgttgttctgtaaataattggggattttaatttaaattctatgctcattgttatggaaaattgcaattttggtcattcttttcggctagacacatacaatgaatcggtatgaaactgagcaaggatgacccaatggtgctt

SEQ ID NO: 11479 - DNA, 375 bp, Glycine max
  modified_base (370)..(370): a, c, g, t, unknown, or other
aaaatctgtgcaaatttcaggttaaaagaggctaagtaatgcagtggtaaaagtggcagttgggctaagctcaccatttttgggctaagcgcagcttcagcgtgacagagaagctggcacaataccaatatcaaggccacacgctaagcgcgagatcagtgtgctaagcgcaggggttgtcattagccaggctcaatgcatgactagcgctatgctcaaatccacttactcgcgctaagcgcaatgtcgcggcttcagagcctatttaaagctggtttgtgcagaattatggtaacaatccaaagaatcaccatcacgcatagaagtcagagcacaccacagtgcctatttcgagaaaagaactctgtangcagc

SEQ ID NO: 11480 - DNA, 245 bp, Glycine max
tgaatttttgcgagaattgagatggcgaacgagaacgaactcgcgaagctgcttgcaccataccttcaacgcgccgatgagttgcaaatgcacgaaccactcgtcgcttattactgtcgattatatgctatggaacgggggctgaagattccgcaaagtgagcgcacgaataccactaatgctcttctggattcgctcatgaagcagcttgaaaaggataaaaagtctaaccagttggggctctg

SEQ ID NO: 11481 - DNA, 375 bp, Glycine max
tataacacaaggtgtagtgctacatacctgcctgaagtggccgccaatgaaggttggacaaaaaccgaagccgttgattctttgatacgtaaagcagggtacaatggtccaataaccgatgaacttaggatgcaaatacagctaaccagataccaaagcaccttatttaccatgcactatagtgagtacgtctcctatgtgaaggagagaagaggtgaagctcctattcttgcggctaaatcacccaactattgaatatgttgcctacctttcttgaggctgcataatttctttactaaaaaaaagaattctgttttcaaatgaattacataatataaaaagaaaacccacttgcctagggtcgggaatcaattt

SEQ ID NO: 11482 - DNA, 185 bp, Glycine max
taaaaaaaaaaaaaaaaaaaaaaaaaaataaaaaaaaaaaaaaaaaaataaaataaaaagaaattttaaaaaaataaaaatataaaaatattacttattaattacatactgcttttactttttctaatttctaattttccttactcttatttatttcttctttctttttttttattcacctttaa

SEQ ID NO: 11483 - DNA, 381 bp, Glycine max
cccacgcatacgaattgataaacaacactaaaaaggcatggaaatggaggtggcagtgcctcctcctacaccttcttcttccatggactttaactttgatagcaactgttcctctacttacatcactgcaccttctagcccccaacgctatggcaactcattcttcagtgctcccactagccccactcgcagacactcctgtgcttccactcccaacaccaccgaagacgagtttgaattcgacttcagtggtcaactccagagaccttccctttacgacgaagaactgttccttggcggaaagattaaacctctcaaacccctttccccttcgttcaattaaacaagagagaaaacggttatcgaaaaatcatcattact

SEQ ID NO: 11484 - DNA, 290 bp, Glycine max
cttggatgaatgtttctctggcaatgaagaaggatcctgaaactgataaagcttttggatgggtgcttgaaatgtatgcttatgctgttgcatctgctcttcatggtgttcgtaacatattacacaaggacttcatgattcagcctccatgggacaaagaaattggcaagacatacataattcactacacttatggctgtgactatacaatgaagggtgagctgacctatggaaagattggagaatggagatttgataaaagatcttatgaataagttgctcccccaaag

SEQ ID NO: 11485 - DNA, 359 bp, Glycine max
aaaatgggcatcgtcagattcctgattttgcatactcaccaaatccacactatgggagttttgggtcagagcgcaacaatattgaagcagaacgaaaaccaaaagcaattcctcgcaaagaagctccttcaaaaccatcgccatcagtcactactcctgctcctcctactcaaaacagacagagagaaagcaattttgacccggatagatttgcttcagccagaaaacggcttcaagagaactacaaagatgctgcaaatgccaaaaagcaaagaacgattcaagtgatggatctccatgagttaccaaaacccaagaatgccttccttggaaaaaacaaaagcggcactggtcaggga

SEQ ID NO: 11486 - DNA, 228 bp, Glycine max
  modified_base (24)..(24): a, c, g, t, unknown, or other
  modified_base (27)..(27): a, c, g, t, unknown, or other
tcgccacgcgtttcgccacgcgtncgnccacgcgttcggaagcaatcgcaagtcgtctgttctgtcccgcgggagcagacgacctgtcttcatcggcaaacaacctcaaaaacattcatcaacgttcactattaatccattcatcattaagtaagaaaataaaggtcgatatttttatctttggtttgcttctgatccatcatggaggtgccgagtttctgggatgcc

SEQ ID NO: 11487 - DNA, 357 bp, Glycine max
gcgttcgccacgcgttcggcacttaaagggttctcggcggactttcttcaaacaccgtacgccacggaaattcaaattaacaccaccgctctgtcagcacaaatcccttgccactctctcccacttcggaaccctaacctcccgccagaaagaccagattcatctatacgttgaaactcttctgcaatggaacaagcagttagagaggtgaatgaagggatggaaagacacgttgaagactccgctcggactgcggcgctttgtgcaataagctgagtctcgtcgatgtcggaactggcgctggccattccggaatagttttggccataacacgccctgagtgggatgtaacgctga

SEQ ID NO: 11488 - DNA, 428 bp, Glycine max
gaaagaaatgccttgcgaagagaaaaagaaattctgaaacaagctaagcagagtgattatattaggacattgatgaatgatatggaggaaaaacctgaagagataagagattttgagggagctagcagagaagttgatagatatattgccaagatggacgaacgtgctcggcaagaggaggagctgttcacgcgtgttcctcttacgaaacaggagaggaaacgagaaaagtacttgaagaaatcaagaaatgggttgcaaggtctaacagaaagtttctatgatgaaatcaaaacattaccctttggtgataaaactggagagcaagtaatgggctctagtaatggtggtagaacaaacaatagactgaagaagcgaaagaggaaacattaaaggaagaaaaatttgggttttgagctaaaagggcg

SEQ ID NO: 11489 - DNA, 378 bp, Glycine max
gttttattacacaaataaggaattgattctgagtgcacattttgatttgaagctacttttggataggataaaataaattatactgaattttactactgtttttggttttaaaataaaaaaatgttcaaacataaatcatgttgtttcaaaatcaattttaactcgaaatcgttttcattcaaaattggttttgcaaacattgatccaaaccgagtcttttgtgacgggttgtttattgattagggtattgaaagtaagaagtgggtgattggattttgaggacattatactagctggtcatggatctagttgattataattggatcttgctctggtgcttgtgttttgtttgattaaccttttaatctgtgggtttgt

SEQ ID NO: 11490 - DNA, 355 bp, Glycine max
  modified_base (287)..(287): a, c, g, t, unknown, or other
ctcgaggtctcattttctctctcttttagatctctctctactatacatctgcttggcttcaccattttccatttccatttctccctccctccaaaaatgcattcctcgctctctctctcgttctccgcgacctcctcctccgccgccaccgtttccagatcacgacactcattccactctcccgccgtcgccacgcctctcaatctccgcttctgcggcttgaggcgcgaggcatttgcttcaggtctcgctgcttctcgcaaccgccaccacttccaccttcctcngccgcctcgctccgccggagtctctgccgcgctttctagcaatggcatcccttccaaatcgttcgact

SEQ ID NO: 11491 - DNA, 258 bp, Glycine max
tcgtacacccagtattgttcacaacttggtgtttcccctggtgacaatcttacttgctaattgatcagtatagatggttccatatgatgacatcatacattcatacggtatatcttaacatatatcagaaaataaaccattcaaggcttacagccttattttgattattaatgtaattactacttttgggaatattgtatctgatttccatcgatattgggcatacaatattggataaaaatacgctatttctgggat

SEQ ID NO: 11492 - DNA, 351 bp, Glycine max
cccacgcgtccgcccacgcgtccgcccacgcgtccgcgggactgtaactagccgcagcacgaggagcagcctcaggttctcccatcttcactctctctagcaattgctcatgctccttttctcttcttcgtttgcatttcgagattcgtaggaaaaatgatgttgttgacgatgcagtttcatgtctgttttcgttgtcacatttccgaatccgaacgcgatagtagtgacaatattaacaacgatttctttcctcattttgtcgtgttaaaatttatcaccctgctctcggtttcattacttgccgttaattttaatttttggttttggaagaaggaaaagatgtctcac

SEQ ID NO: 11493 - DNA, 392 bp, Glycine max
ctgatttcagaattttcgctggccggggatactgccttgtccgttgggtgagtgtagattattcaattactaattggggctgataatatttgtaagggattcatgaaggcatctttatatagaatcgcaggatggaagactcgttcctgagtattgatgactccttaggtgacacctccttaacctcgggcggtttgtgcagaaaacccttgtggtttgatattttgtattttttccctcaccaattaatttttagggatattgatgtacaatgagcgcacttaatatatggtttcgtgaactggtgtgctaaaaaaaaaaaagaaagcaaggacaaaaaaagatagaatatttggaataaaagcattaatgggaagaataagaagaagttg

SEQ ID NO: 11494 - DNA, 74 bp, Glycine max
gaaaagagtatttgggttacacctaatctgattttttctttcttttttaaatggagagtgcaattcacttgtgc

SEQ ID NO: 11495 - DNA, 284 bp, Glycine max
aaaattcgccagttagtcactgagttcatccattcatccttcgcttattcctcttgtttgggtcatggcaatttgttcctcactttcatcgtcatcgtcatcgtcttcttcttctacatcgtcctttggttcctcgagcaccgcgaaggcgtggatcatccatggcattgtggccggagtggcgattgctgcggcggtgggtgcacgcgcttacatgactcgattcagcaagtttcggagccgggtcgtgggcatcatacccgcccgattcgcttcctcgcgct

SEQ ID NO: 11496 - DNA, 369 bp, Glycine max
gcttgtgctgcgcgataatcaattgaagaacattcctgatgtcaccgtatgtaagaaacttctggttttcgatgttgcgttcaacgagattagttcgctacatggcttgtccagggtctccgataccctcaaggaactctacgtgtccaacaacgaagttgcgaagattgaggagatcgagcacttccatcagctccagattcttgaactcggctccaataaattacgggtgatggagaatttacagagcctcgagaatttgcaggagctgtggcttgggcagaatcgaattaaagttgtgaatctgtgtggtctcaaatgcattaaaaagattagtttgcaaagcaatcgtctcatttaatgacggga

SEQ ID NO: 11497 - DNA, 422 bp, Glycine max
cttttgacaggattacaaggagaaaccagattatggtcgctgtgttgctattgtagcatctgcgtcgttaagagagatgataaaacctggtgctttggcaatcatttcacctattgtagttggtgggttaacttttaattttacatgtctgcacatatattatcattaataaaaccaggggacaacggcaacagttttgcaaatttttgatgtattgtaaccatgtcacatacatgtgaccaacataattgcttgataggctagatcatatgccaagcaaattaatgtttggaatcatttgagaaacaaattatagatatcgtggtaactttccacccgcaaccaaaaccctttaaaatatatcttcatgtattcataagacaccagtggctatatttagcacatattgttgcacaacctac

SEQ ID NO: 11498 - DNA, 382 bp, Glycine max
gctcgccttaacttccccgaattgctgtcccaggacgacgacgtttcgacccaacaacagggcaagatgtccgccgattcaattcgcaaaaaagcgacccaagtcggcgccagagtcgacgcgctccaaaccgcgcttcagcaatcctcgtcgacacactccattagttccagccacgtcagctatgagaaaccagacttgaacgagtatcccaaacctgaagattagtaatttccttcaaccttcaagattaatattgatccaccaatcatgggttctgatgtgacttatatatagggcttcaacttgccctcttcacctatgttaatttgaaaagaaaaaacttttatatttgtcaaaaaaaaaaaaaaaaaaacataaa

SEQ ID NO: 11499 - DNA, 213 bp, Glycine max
acggctatttctaggtcacactctactaccatatctactaaaaatgccttattcccttggttgacagaaatttgcgttgtctatctactgataatacgtacaatgcaataccaagaaaatacacatgaccctattgttcacaatgcacttcctattcgaaaaaatccaaacccattttaattgtcgtactgatttttaaagcgttgttatttt

SEQ ID NO: 11500 - DNA, 368 bp, Glycine max
  modified_base (325)..(325): a, c, g, t, unknown, or other
cccacgcgtccgcccacgcgtccgcccacgcgtccgctcccaaggaggttttacaaatagacaaattggttcccctccaagcgttgcagctattgcagctgccactgtagctgctgcaactgcatggtgggcagctcatggattgcttcctttgagtgctcctcttcatacttcttttgcctgttctcctgcatcggtgactgcagttccatcaatgaatacgggtgaagcaccggcactgaaggcagagcaagaaaagactactctacaaaatcctcctcttcaagatcagatgctggatccagaatactcggaagctcaacangctcaacattcagcttcaaagtcaccagctggcattgtatcag

SEQ ID NO: 11501 - DNA, 386 bp, Glycine max
attgttggctattcattcattcgtgttcctcaggagagagagggtgcgtgtgatggggattcgaattcgaattagggttttgcgcatcgtcatcgaatttttctcttatgcaaggaaggttttccttctccgatttgaatttgattgaacgagtagtgttaagattatgatattttttgagaagcttcgtttctctcctcacttgagccgcttcattgccggcatcctcctgttaatcttctgcaattcattccagttagtctctaatttccccattcctatacagccttagattcaacgtcgatcgctacactcttctctccgattcgtacgattccgtattcgatattcgtttgtttgattcactccttctctctctcgctttt

SEQ ID NO: 11502 - DNA, 375 bp, Glycine max
ctctctcccaaattgctttgtctcatttctctctcccgaattgttatctccccctgctgtgttccttctttccatttttttcattcttcccgtttttttgtattttcttacatctaaagctgtgattttttacaccaaaattgttatttttatcttagattccatgacaacgatatcatatttgcgttcctctccaagtttgtatttctatttgaccgtgactaactattgttcttcctttgcaacacaaaagcttcaatttttttgtgttttctgttttttgtgttataatgacttttcgcaggacaagaggttaaattttttggtgtttctgagccttctccgacgtacccaaaagctggagctttttttgct

SEQ ID NO: 11503 - DNA, 402 bp, Glycine max
gccgccaccgttgttgcccccaaagtatatatatatttttaatttataattctaattttgtttttatattatataaaaatataaaaattagaggaattgaaagtttgtttttaatgtgctgcatttctaatggtatggaaagggtgagtagtagagtaagggcatgttttgatgaacttattcagaagcccttgtaggagaagaaaatgaaatgagtttcttcgtaagttgaaattagcttatgcatgagtaaaaaatcacctttttgtagaagctcacttgtataacttctctaaattagcttatgagaagttataattttttttcctcatttttttctgcgccaggtgcttcttcatcttgataagtttatccaaacatgccgtaaggttcttaattaag

SEQ ID NO: 11504 - DNA, 375 bp, Glycine max
ggaaacattgaacaaagagctggaatcaaatctggaaagtttggctcagaaagaacaagaggtaactgatatcaaaacaagaattgaagagatcagagagcatttaagcgagcttgagctgaagtcttctgatttggccaagaacatcttgtcaatcaagtccaaggttgataatttagacagcaaatccttgctagatgaactagtttaatgaaattgtttttgtctttgaatttcgtcctcagaattatggtaatgcttaaattgtagaatatggtactgaataaacgcatgagctatatttttaagctaaaaaaaaaatattataagagatagaaagaatacataaatgaagttaatactattgaatatttg

SEQ ID NO: 11505 - DNA, 160 bp, Glycine max
aaaaaaaaaaaaataaaaaaaaaaataaaaaaaaaaaaaaaaaaaaaaaaaaaaaagaaaggaaaaaaaagggcgaccgatctaaaggatccaaagcttacgtacgcatgcatgcaacgtcatagctcgttttatagcgccacctaaattcaataaactg

SEQ ID NO: 11506 - DNA, 300 bp, Glycine max
tcggccacgccttcgcttgtactgttctattagttcatactaagttctgaaaatgagtgccaaggttttgcttgttctacttatgttcttggccactatacttctgatctcctctgaggttgcacccgatgatgcatacgagaattttgacaaaatagatgggaagcctattgcagatggggtagatgaaagcaagtattggcgtggcggctatggtggcggctatggtgggggttatggaggtgggcctggaggctatggaagtgggccgggaggctttggaaggggacatgggggata

SEQ ID NO: 11507 - DNA, 422 bp, Glycine max
ttttgtttccagactagatatacaggctgttcatctaataccaactacgcatcaagaccctgtatgtcctgattcaaaatattcccaggctcggtacttctttggtaagaatctgcgtgcacaaaacttctcccgagaaattaaagaatgcacaatccacacgcttcctgaacgtggttttgtacttggttgattgtttattttgccaatctggcattatatatagagcattgtgctagccaaattttgtgagttgcattcaaagccttagaaattaattttaattacgaagatgagcaagttcgtggggttgcttttgctgcttttgatcactgtggccattgctgaatacgatcaccatcctgaacatgagaaacatgggccatgtgggaaagttcagcacacaaagaatgttgacacat

SEQ ID NO: 11508 - DNA, 364 bp, Glycine max
accgcatccctcattttctctcattcacccaatggctgctacggcttctgggtcctcttctatctgcaacagaatatacaacctttccttcacacacccttccctttcactcaccagcagcaacttccctcaaagacccgtatctcaaaaaccactcagtctcaacctcgagtcccaaagtttcgctctttcctttctcccacttcaccgtcttcccccacctttcgctgcctttgatgggttggaagtagctcaagataccacagagtcccaacaagacgaaccagaaccagaaaccgttgaaaaaacagaacaagaggaagagcaaaaggtttcagactccaatgatgctgggaggctctat

SEQ ID NO: 11509 - DNA, 354 bp, Glycine max
tctcaaatgcccccatttaaaaggagccatagtcacactgatgccatgtctggtatgttccataagggggtccgctgtgatggctgtggtgtctatccaataactggacctcgtttcaaatccaaagtaaaggaaaattatgatctttgcaacatttgtttcaatgaaatgggtaatgggacagattatatcagaatggaccgccctgcatatgcgttggcccctcgatacttacatggacatacacaaaactctacaacattacccccacatatttttaagaaaagtgcccttttgaaacatgcgcagccccaactcgatagaatgtgtatattggatgtgaaagtgatatat

SEQ ID NO: 11510 - DNA, 300 bp, Glycine max
tcgcccacgcgtccgtccacgcgtccggttttggttcacagtggaggtgtgcatggtggacattattatgcttttatcaggccaaccctctctgaacagtggtacaaatttgatgatgagagggtgacaaaagaagataataaaagagcattagaggagcagtattggtgtgaggaagagttaccacagacaaatcccggattcaataacaccccatttaagttcaccaaatactcaaatgcttatatgctggtgtatatacgtgaaagtgactaggtcaaaatcatatgcaatgtggat

SEQ ID NO: 11511 - DNA, 403 bp, Glycine max
agcaacaggggatctttgccatccacggttcatgcgaattgcaaaaggacaaaaccataaaagaaaaattcgcaaaagttggtatcttcattcttccttctttaaacgcaacgaagtttctttccactttcaaaattcccaacccctcctttgttcgctctgtacatctgggtcatttaatccccgaatttcttcgcatcttgcctcatattccatccaattctcgctgtttcaacgatcacggtgttgatccttgatgggtttttctcgtcgatcataaacatacccgggtttgtgaaaaaggtttttcctttccacgcgtcgcttcacttgtcatcgatcctgagctccatagcttgaaacgctgtggaactgtgaactttggtgctccttttcttttggt

SEQ ID NO: 11512 - DNA, 383 bp, Glycine max
aatcaactcaaatattacctgtcaaaatcgagacaaattcagatccatatgaatggtgttgtcatgtctactttaaatgaccaacacacacacgtatgtcaatcttgcccatgatgcctcgatcaataattatgtgtggccaacaattacattaccattttgtgtgggagcaacagcctggtcgatgtagttggatcattattatttgattaatgacgatggtacatttgaaaatgattattgtatatttggaaaatgttcatttagcgtccactcggataaatagttaattacatacatacatatctaaatataattaattggttctaaaaaaatctaaatataattaattatatatagttcataagtggttaagagttttt

SEQ ID NO: 11513 - DNA, 388 bp, Glycine max
cttcatacaagattctattgagatgggtgctaggcatgttggtgctgcaccattggcaggttcacatatataccgaccccatagaggcagcacacatgagactactcttagacatcgaaatcttcctcccgtgacttttctccaagttgatcaggtttcattggaaaggtgatcgtggtgacgttgtgttgtggaggctgcaagaaatgccattgcggccaccttgcttgtcgtgcatcttgcgtcacagattgggtatggcagagcagtgaggtttcaaccatcatttgcaaagcagagtcaggatgttactttactggttgaccatcataatgatatgcgcttggacattgaggatatggcttatgagtcttgggagtggaaaaca

SEQ ID NO: 11514 - DNA, 182 bp, Glycine max
cccacgcgtccgaaaatcttaattttctataaaattgctcaacaaattttgcagcgaagatgaggctgtgcatgacttgtggatacactacaccctattaacagtgtctgtagttcttaaaaattcattcgctatgtaaacgttttgcccgagaggacaagatcctgaaatttgtgagattt

SEQ ID NO: 11515 - DNA, 430 bp, Glycine max
cggacgcgtgggcagctctagagaattatcatacccttcaagatgaaaccgtacctacgtccaatattcctattattccttatccttctcgaccaatccatttcggcgagtgctgctataaatattaatggtctgagaaacaaaattagagaagttctaaacaagcacccgagcatcaatcttccggcagataaactgaagaaggtgaagagaccactgaaggcactggattatctgcttggcgaatgtaaggacaggccgcctcaagaatttcaagaattttgcccgaaatttaagaacgattatcaacaaaattgcccgaatgccgcgtatgaagcagtttgcccgttactgaagcaagcgattcaaatatgttgccagaaacacgcataactctgcaagccacggtgggcgtttggatgtgctttta

SEQ ID NO: 11516 - DNA, 285 bp, Glycine max
acacatactacaaaggttttgaaaatttcaaatggtggtgcttatctgggagccagtaaacaagttactgtggcaagtaagaagtctgctaaatccaagccactgaatttgtgtcctagatctgatggatgtgccaggacttctattgatggctgggaatggcataaatggtcccgaagtgccagtcctgcatataaagcacgtgttaggggtcttccatgtgtccagaacaagtgcatagattctgaaaataatttatctcagttgtcaaatggcaagggtctt

SEQ ID NO: 11517 - DNA, 374 bp, Glycine max
cccacgcgtccgcttctaacacatacactactctctctctctctcttattgtatgggggccaattccagtagccgagggatcaccgccttagggaagcgagtcgccaaccggatctggactttcaacgcacctcctctcacttcaaggaggggagcatacagtagcggctcagtgtacgacaagaaccctgatgatgagatccagtctgggcaggtcccagacgatgtgatccaggcggcaacacaatccggcatatactgggccccacatccacagactgtggtatttgggccccccgtaggaggtgaccaaactgcttctgccattcactctgatgcgctggaagagaaggcctggtttcgtcccaccagtc

SEQ ID NO: 11518 - DNA, 263 bp, Glycine max
cttgtactgttctattagttcatactaagttctgaaaatgagttccaaggttttgcgttggtctacttatgttcttggccactatacttctgatctcctctgaggttgcacccgatgatgcatacgagaattttgacaaaatagatgggaagcctagtgcagatggggtagatgaaagcaagtattggcgtggcggctatggtggccgctatggtggtggttatggaggtggtcctggaggctatggaagtgagcgtggaggc

SEQ ID NO: 11519 - DNA, 339 bp, Glycine max
  modified_base (45)..(45): a, c, g, t, unknown, or other
agcaaattaaacgtactgaaggagtttccagtacagatatcgtangaagaatactggcttctttaagagatcaaaagaattgtgacgatcataatggcactgaggtaaaacctcaagaagaaaaccagtcacaggctttccacatagcccaattcctaccaacttctcgacgtattgtccagttttcaaatggcaagggtcctggaccaaattcacgtattgtatacattgatggggcatttgatctcttccatgcaggccatgttgagatacttaagagggctagggagcttggagactttcttctagttggtatccactcagatgagacagtgagtg

SEQ ID NO: 11520 - DNA, 339 bp, Glycine max
gtaggaataatcaatcatggtaaaaaaaaaaagcaccttctctattttaagtagttcaatggcttacactgcaagtcttgtgttcttagcttccactttccttatcataaactttcctcttctggcaaacgctatcggatgcaatggaccatgcagaaccctcaacgactgcgacggccaactcatttgcatcaacggaaggtgcaacgacgaccgcgacgtcggaacccacatctgcggcggcggaatgccgccaaatccgccaccaagcggcggaagctgccagtcctcgggaaccctaaattgcggcggaaaatcgtatcctcagtaccgttgctc

SEQ ID NO: 11521 - DNA, 361 bp, Glycine max
cccacgcgtccgcaagggacccctagtgcccccgctgaaacagaagagacaaagcaggcatcacctgttggtagtacttcaacaaccataaatttatcagagcgagcacgggaaagggctcaaatgagacaggctgggttggtttcttctacccttagaggtcgtggaagaggcggtgctccccgtggtcgagttggtcgaggtaggggagtagtacgccgaccacctccaccacctggcagtgatcaatgaacaacaaattcaccgtctgtgatttgacttagggttgtaaacttctcccttagtctgacgaagacagtatagaccagttaggtgcaaattggttatcagttttcgtcat

SEQ ID NO: 11522 - DNA, 334 bp, Glycine max
cccacgcgttcggatgcccaaaccgagaccacttcgaaagagcgaaacgcagtgttagcattgatcctcaacaaaaaagacatgaaaagaagaaaaaagactcagttgtgtatcgatgcagctctactagctagggattcgcaagtgcgatcgaagaagaacgatggcgatggctgctgctctgcgtcgcgaaggaaggcgtttgacccaaccaatcaacgccctgcgttcctctctcatctctcaagaccaatcccctcatggcgcgcgcttcatttccactcacgtggtgagaaaccgaatgaaaagtgtgaggaatatccagaagatcacc

SEQ ID NO: 11523 - DNA, 304 bp, Glycine max
tccacgcgtacgcccacgcgtccgctcattgtgtgaccacagttattattacattgcgggatgaaccatgttaatgcagatgtgcgcttaccttacctttgcggagcgggttatcatgggcacatcggacttataccaattcgttctcgacacaaaccgtatacgcgtgacctgcgatgatcagtactacatccggccagacctaacgcgcacttgaaggcatcacacattgatcaacctgtacaggtccggacctgtgtacaactgactcgtaaacaccgactcgtcactcagctatactgtg

SEQ ID NO: 11524 - DNA, 228 bp, Glycine max
cgcacacttgccaacacgatctaagtctacgccattattgttccatactctctagtggcgcgcttactcgccgtactcatcgccagtaccgtcaataagatgctcctactcagctccacctacgacctacatggctaccttatgagcgaaatgagcatttaaattgtggtatacgaggacctagagaggttccgctgagatgccatcaagcttgtatacgctactcat

SEQ ID NO: 11525 - DNA, 262 bp, Glycine max
gcgaccactgcgtccgtccactcgtccgcacactcgtccgatcaaccgcaactgtgatctacgctcgttgcatgccataataataaacgatcaatatttaaatattgacatcataaatgtctagaataattgattctatatctgattggtaatgagaatcgagtctgtttcagatctgagaactttaggttatcattttcaatgctctataaactaggattgggtataaaatgtaacattctatggaacaatatatctcata

SEQ ID NO: 11526 - DNA, 370 bp, Glycine max
atggtgtgtgtcaggtctcggctttctgctagggttggtattcattctctttaattaggggcaagggtgctaagacattactggtttaattctgacatttttattatggcatgattgtcaagtgtcatggcactcgcttgtcgtcactaagaaaaagacttctgcactgagaccgaacagatcgacattaactgtcgttcataggatctgcatgcatcattcatttccctgggcattccattagcttgagcaaggaccctaatatgatgctactgtgaaatccgctcctttcagcctatgctaatttatgatgatgatcatgccactttgacactttacgggctaggtcaccactacatcaaattgacat

SEQ ID NO: 11527 - DNA, 348 bp, Glycine max
cccacgcgttcgaaaaaaacgaaatcaatgggaatctgcaggaggaagtgggaggaatggaatcaatcagaaatcgaatcacagtagtgatgatggcaaaccttccggtggaagtagtgaccgaaatcctgtcccgtctaccggtgaagtcggtgatccggctgcggtctacctgcaagtggtggcggtccatcatctacagcgggcactttgtgctctttcacctcaacaaataccactccagcctcattctccgccaccgctgtcacctctactccttggacctcaaatcttcggaacagaataccgtggaactgagccaccccctgatgtgctacagcaacagca

SEQ ID NO: 11528 - DNA, 304 bp, Glycine max
cacgatcagatgagaatgattgataacattaatgcacttatttctgagctgtcattggagaaagaagaattgattaaagccttgacatctgtattatctgagtgttacaggatgaaggatataaacaaggagttgtccacaaagctagaggtccaaacacaaagattagagcttacgactgctcaaagcatggactatgaaaatgtttatgctgagcaactagattgtaagtgctatgtatgagaacaccccatatgcagagtaaggtgattaggctctggaaagggtgctaggatggattatg

SEQ ID NO: 11529 - DNA, 167 bp, Glycine max
ggtcacttctcttactttgagcaacatgcaaaagatgagcatttcacccctttgctggagcagattgggaagttggaggaagctctatacaacattcagtttgaacagcattggttagaggctcagactgaccgccaagcaatagtgaacgatgcaatgagcagaag

SEQ ID NO: 11530 - DNA, 349 bp, Glycine max
atcagaggtaccaactttatgtttgtcaatttccttcttgcttcattgtttgcagtggggagcgaacaattggttagtgtgtactagttttcaatcacagatgtcatactatgatgcttacacgacatatagtacaatctattactgtggatatgcatctaatataaaggatactggaacctggagagcttgcccctatatgttatgaaacgtatgatatgagagattgacttattatgggatgagcacatacttggtgctgtatttgatgaaccagattaatgactataccgctactgcttgcaacaatgtatgtaattgcaatgaaacttgctatatcacaccattg

SEQ ID NO: 11531 - DNA, 423 bp, Glycine max
cccacgcgtccgcaaaaatgcatgatatttttcccccaaccaacattctgatgatttataaattgcggttatcatcaggcggatattgcctatgtttcatttcttgaaaggttccaaattgtcttctctgaaatttttaagcacgacatcacagcaggaagacccaaactagccacatggattcaggttcgtagttctgtgcaatccaagaacatagtaatttgaaattaattaagttcgcattcatctataagatgaaatggaatggtctatttgaataaggcccgaccatcctcctaattttgatttcgttagatttttcttttccaaaatatgtacatgattttgtcaattgttaatgcatgaagggaataagatcgatggttataagcagacacaagttgacagggaggaatatctgga

SEQ ID NO: 11532 - DNA, 439 bp, Glycine max
cgccgcaagcattgcagagtgacagcagcggcagcttggcctgaggttagagatggtgagccaaaggcagcgactcgctcggaagcgatacaaatcggaacaccctgagctctttccgaagcccaagcccacaccccccaaagaccccgacaagaagaaaaagaagaacaaaaacagcgctttcaagcgcaagaggcccgagcccaagcccggctccagaaaaagacaccttctcagagtccccggcatgaagcccggcgagagctgtttcatctgcaaggccatggaccacatcgccaagctctgccccgaaaaggccgaatgggaaaagaacaagatatgtttgcggtgtcgacgacgcggtcatagagctaagaactgccctgaggtactagatggcgccaaggatgccaagtattgctataactgtggggaaaat

SEQ ID NO: 11533 - DNA, 445 bp, Glycine max
  modified_base (328)..(328): a, c, g, t, unknown, or other
gaggctgattgcagattcagctacaatatgtcaaggaatgccaaccaacattgctgtgcatcaagttttgcaaatattggatttaattttgatgttgcgggtgattgtggtgaaatattcaacagactagttgacaggcctgatttcggtgatatacattcttcaaaaaggtcagatattttaaacgaggagcctgactggctgttgtccaagtcatgtattaaaagctgcaagagacctaacaagaacaaaggcaaaagggatcgatttagaaattcaactttggaggagaatcttgaaagatctagaagaaagctttccgctcctncttttcatagaagcaaaaagaggtttttctctttagatcatccttcagagatgatagccaaaagacagattggccgagtgtccaaccctgctttcaatcatcaagaagctagtaatt

SEQ ID NO: 11534 - DNA, 434 bp, Glycine max
caaagaaaaaaagaaaaactatatcagcgattctcgtgatcttcggcctcgaatcgaggaggtaaaagacccaactccgactctgtttttgtgatcgaaaaccataaaaaagttgtttccgatcactgccttaatcggattcagctgttgttcctcctactcaatttcgaatattgaaaggctttagttgttgattttggtcaagtctctagtcaacctgtgaattttttattcaagtttaaaaatatatagagcaatgagttttgtttttcgaggaacaagagcagatattgaaaatgggtttccaggatttatacctgagaggcgagcattgcgcgttcatgcaacacgtcctagtaattccaattcactcacttttctcgtgacagttcttctgttattcatgatactgaactctcaccagatgtccccaa

SEQ ID NO: 11535 - DNA, 295 bp, Glycine max
ctgaagtttcctattctataccaagaaggtgtgcaaatgtcctctttagctggcgtctgatacttagctggatgcttaatggatttattagtgccacaatgatattcttcttctgcacaaaagcgattgagccacaggcctttaatgaggagggaagaactgctggaagggatatgctggccgtgacgatgtacacttgtgtggtctgggttgtgaacttgcagatggcgcttgctatacgttacttcaattaatattgaaaaaaagaaagaaaaaaaaaattaactatagtagg

SEQ ID NO: 11536 - DNA, 232 bp, Glycine max
gtactgctctattagttcatactaagttctgaaaatgaattccaagggtttgctttatggacgtatgttcttggccactatacttacgatctacctctgacgttgcacccgatcatgcatactacaattttgacagcatttatgggaagcctaatgcacattgtgtagatgaaagcaagtcttggcctggcagctatggtatctgctatagttgttgttatggacgtcatcg

SEQ ID NO: 11537 - DNA, 265 bp, Glycine max
acgactcacatgtctttttccaatttctagtctctcacttactcattatcttacgctctataaacaaacttcatcatcatatacaaatggtatttttatgccatcattacactctatgatcctagatccttactcacttatacttcacaatactctcacactcaccctataataactacactcttactctctagcaaaataccttacatagttacaacatcttacacctatatcctaactatcttatactatcaatacccgacac

SEQ ID NO: 11538 - DNA, 429 bp, Glycine max
cccacgcgtccgcccacgcgtccggcgggtatgagcttaacctatcctcctctaaccggaatatatcatccatcggttcaaaatatgggaaatccataaagcgaggcattatatcattcctcaacgttgatgacagcagattcacccgcgccgatgaaattgaattcgccccatatttttcaaagcacaagtggggtttgttccgccgaaaaaccaagcttctttgtcgcaagtgttgcaaccatattggatatgcctacaacgatcgcacttcatcattttttcccttcgtatcaaacagaacagaaccatcaccacccaccgaagcatcaaattcaagtccaatgaaatacgatattcgcattcgtgctttacaaccttcatcttctcaagaacatggaatcactgtgttggcttaaaatttcaaat

SEQ ID NO: 11539 - DNA, 431 bp, Glycine max
gactctaccaagactagtggatacaccgagtttgaaaaatttgcatgctaggaatatgggttgcggtgctcgccacactgctttagtaacagagggcggaaaagtcttctgctggtgatggaacatatatggacagctgcgcctcgatgacatgattgaccgtatcattccttctgaagtcactattgaaggttgtgtccctaaaaatgttgctcgaggtcggtggcatactctgcttatggcctagtcccacacttgatgccatggtgctactgacccaatctagtttgttagcagatctattggaaggcaatgtctatgtgtacatacagatgttgtgctacagatacatacttgtacggattgttgcatggtgtgcgaatgaccatgactagctatagcatgtaacaccacagaagagcgatatttgg

SEQ ID NO: 11540 - DNA, 320 bp, Glycine max
tactcaacacgatgggcacatcgatcttcagcacaccctctgttgagacagatttcgggtagtctaatcatgggtctgaaatcgacagacaactcaatttctgaaggtaggccatcatttgtactctcaacttgcagcaatgaaatggcagctggatccatatgcggatcatctgatggctggtcaatgcgcaccttttatgagctggttgcatcatcacaaacggaaaggtggtcctttgatagtgagtgttttcgatctggtcgtcacaagataagtggatccaagtgcaggttctcgtattctccctacatggaacc

SEQ ID NO: 11541 - DNA, 422 bp, Glycine max
caaaatcatctcccatctaaaacaaaagtcacaactcctctgcaatcttctaattcaccctttgtgggacctaccccttcacctcccctggctccatctcctatgccaggagagtctgagaagtctattccttgtgtttcatcaatatcaaatgctgcaaatattggacttcaacaaacagggggtgcagtagcaccagctcaatcccttgccattgggactcctgggatatcagcctctcctttattggcagaattcagttgtcctgatggtgcgcatggtaatgctttagctgccacttctgggaagtcaactgttacagagcagcctcttgaacgcctaattaatgcggtgaaatcaatttcgcgtaaagcattaagtgctgcggtcatggatattggttcagttgtcagcatgaatga

SEQ ID NO: 11542 - DNA, 80 bp, Glycine max
cttgatctgacagtaatgaacagttcacttatagatgtcaagtcccatagataacttacgggacatcacttcaataatga

SEQ ID NO: 11543 - DNA, 357 bp, Glycine max
cgcacgcgtgcgtgcaactattcccggatcacgaatctccataccttagatatgtacgtggatgcggatatatactattataacgcatgtcgctcaggattataaataaatatatactgatatagctgcagagcgaggactcttattagattcttcatttgcactgattaacgatggatatatagagagagagaatcagatgctgattcagatgaagtcacttatcttatctatatacagtctctgacatactggtttgtcaaagacatacattcatttgaagctaaagctgcggcttagttatggatatggactgatgatcgatccgtatttcacacacgttggcgtcaacggatg

SEQ ID NO: 11544 - DNA, 405 bp, Glycine max
cagatcgtaagtgtgatcctgatatacgacatgtcgatattgacccagatgctgagctttcgatactagccagggatagtgtgtagaaggtaatggcaaaccaataggctaacacatatttcactaaagataaaagatccacaaaaggcatctaaacaactatttgtcgagtcattgaacagagatagttaggatgatattccaagcatcgtagttcctttcaagggatgaacaaggcaaaccaacgcaacacaactactccatacattttcttcgtatatataatatcaatatgcactcccatctgattggagatctcgtgaaatccattctctacaacataggtttagctcattactgtgtaaaactgatactcttcagattagactgtgccaatctaatatc

SEQ ID NO: 11545 - DNA, 440 bp, Glycine max
ggcaatccgctgcttttcgcctcatgaagcaaatggggtgggaagaaggtgaaggtctgggaaaagagaagcaggggattaaaggacacgttcgagtaaaaagcaaacatgacactattggtattggcctggagaagccaaacaactgggccttcgacaccactcaatttgataatatccttaagagattgaaagttcaagctccgcaatcccatgacacagtggaaaccaagcctagtgttcctgttggtaatgagcattctgtctccaaaactacaagaccacaaggaagatacacgagaagagagagggggaagcttgtctcgcaatattcctttgaagatcttgaaagaattcttgttaaaaaggtgacatatctgggagtactgaaaatctaatggtgaactggacatgttaaatacatctgaaattcaaaattt

SEQ ID NO: 11546 - DNA, 444 bp, Glycine max
tgtcgaagaacaacagcaacagatgactctccagagtcttcgtacaatggtggatgctgagagatcctatcatcagcatgtccttgttattctagagaaactatatactgagataattgaagagagacaaccaaaagaggctacatcatttccactgccaaaagatggatataatcaacctgcagatgagaatgctaattcaaatggcatcgattataaacacaacagtcaaacaggcacatacttttttgcaaaggtcatacatccatttgatgctcaagctgagggggagttaagcctatcagttgatgattttgttgtagttcgtcaggttggccccaatggatggtctgaaggagaatgcaaaggcaatgctggatggtttccctctgcttatgtacagagacaggacatgataccagccagcaagataacagaataact

SEQ ID NO: 11547 - DNA, 345 bp, Glycine max
gagattctagctgttggtgatgttcggttattatgtgtatacactagctaatcctgagggacattccgctgggaatggatcgaatcacttgaacagcaccacaataatcgacaattctcaattctgctgaaggatattaacgaaatagagagaaagaactgaagttggcagaagttcatggaagggttcgcaagtgctcatcctatcagtagcatcaggtgatggtgatcgaacacggggagtacgcaaatggaagtatgcgggatgagcacagagaataaattgcaacataaagtagtatataacgtgagtggaatgcaagtgccaagctgcatatgttactac

SEQ ID NO: 11548 - DNA, 404 bp, Glycine max
cccacgcgtccgcccacgcgtccacccaatcattctatggccagtggtgagaaaggaagcattggttcctgtccggaatcttgcattatgccccgccttacttcccgctcgtcaccttacgtgttaccctctctatcggcaactcctttagaccatttccctgaatcttcatcttggaacatagacaaactttccttcttccttcgacagacaactaactcggcgcaatggatgaccgaatcgacgaggacgagaaggacaaggaggaggaggagtccttggccggcttgacctctcttccacctcaccgcaaagcccattcctacagccagcagctgcgaggcacctgcacacacaaacgccaccatcaagtccggaagcacagtctggacgacagccgtata

SEQ ID NO: 11549 - DNA, 426 bp, Glycine max
cgagcaagtcttttgagaaaaaaataaaatcaaagagcatttctcattttccatgcaatttctatgtgactgcaggatttctttgagggaagaagaagtagatcaagttaaaagattgcagatatgcttatgtggcttgttttgatgtttacttagttatgagggaaaaacactattttcaagggaagagctgaacttgcggaaagagtggaacaaaatttgccgagagattttctttcctttgacttgacttgcaagtacaatacaaccaatttggttgtttgctacataggaaaacgaggggcttgtttggttttttcttccactgcatcattttcagtttttcactatttgtaatgctctcattctcataccttgttctgcctcattagctttgtgtgtgtgtgaaacccttggtagagacat

SEQ ID NO: 11550 - DNA, 352 bp, Glycine max
tcggccacgcatccgaccacgcgtcacgttgaatccataccacgttatcattgggacctatgaaacaaaccgatgatgtctcaactccttcagcttctgctactctacacagtcaccgcccgcacttttttctaatgcataatatttccctctatatctctacctccatatgttgctctttcatattcaccctcgtggttcctatttcgcatacatatataaatcaatataaccaccatgagcgttcctccaccgcctacggcggcgatgtggacgccgttcaacgcagcgcactggcactagctggatcaccaggccctcatcttcaagtacactcaaggcgggtctctcg

SEQ ID NO: 11551 - DNA, 246 bp, Glycine max
cccacgcgtccgcttgtccttgacagctgacatgaaaataattttttaattcattgatgccaatgttaaccgtgtgctttattggccatgtttataaacattttaattactatgaacatttcaattattatgaacattttaattattatgaacattgtacaaaaaaacagactatataatctatactctcacgaaaagctaaaagttgctattgatccagagaagtttataggcatgcattctgct

SEQ ID NO: 11552 - DNA, 360 bp, Glycine max
cccacgcgtccgcccacgcgtccgctgagaaaagaaaaaagtctgaagcttctcaaatggaaattagatgaagagttggggatgaagatcttggaattggaggctgagttacaggctgtactttctgataaacgcaatttgttaaatgcttatgacctgctaaaggctgaaaaggagtgttcagtgataagccttgaatgttgtaaacaagaaaagcaagagcttgaagcttctcttgtaaaatgcaatgaggagaagtccaaaatcgaagtagagcttaccttggcgaaggaattggttgagacttcgggatctcatgtgaattctctgaatgaagagaatgtaccattgccctcattc

SEQ ID NO: 11553 - DNA, 400 bp, Glycine max
gcgtgctatgatagttactggtggctcattcaagtctgaaataactcgttgcagattgaaagaggttatcaagggttctctttcaagtgttccgggtagcaaaagcgacaaccgtctggagactcgtaagcatattttatctcttctcaccaatccacagaatttccgagacaggtgtgagcctttggctgcattaagattccaatctcatcatgctgctgtagaaaatatattgcgtggacttcaaaaattgccatgtcaggccttgattgcaatgcgtagaaaacttaaaggagtgaaagcatcagtacctcagttacaacctcgcagacatggatggacacgggaccatctaatcaaggtagtgaagaaaatcagtatggaaatgctttcacaactt

SEQ ID NO: 11554 - DNA, 381 bp, Glycine max
cccacgcgtccgcccacgcgtccggaaataaccatgcgcagattaggatttgttcttcgtccaatttttggtagttggtgtgctctttagtttttatgtaatcaccgtctatgtgtttgtcatttccatgttttatacctttgtgagatgagatggatacagaaacaggaaaacaaacttcgctcacacttgctttcgatggtctgctcattctgaacttaattgtgatgctatagtagattttcctcacctgatattgttgtgccttccatcaggtattgactattggcacatatgttgaacagtatgcacggaaaatttaggtgtaccttttttttaagcgcaatatcaagcagagctgttgtaaaaaaaaataattat

SEQ ID NO: 11555 - DNA, 432 bp, Glycine max
agtggcacatggtctctttgaaagagtgggttgggtctctgatgcatacagatatggttgcaagtggggtgctgcgtgaaaatggtgaatggtcattctcatcagagccttttgaaaagaatgtgcatggaccattatatgaaggtgcacgatggggacctgcaaatttctctgctgatctcattgcagctcaagcagtttcatcactgcagattgctgaggaggcagatgaagataggattctctttcaagttcttgattaagggcatgctgaggtgatagaagaataactgtttgtggtggtgactggatgaagtcttttgctattcttatcgaagatttatatgcgagtatatatattataattataaatatgagtcttgtgcatgtcaaacactttctgctacagttgtgattgaacgtgtgacataa

SEQ ID NO: 11556 - DNA, 410 bp, Glycine max
acttaatcgctgatgtcatcatatataattctacctcacttatgttgcactaacaatcgaagatgaataccaacagcgacaccgaataaaaccaatcatttccagaagcccacggagcatcatcatcatcatcttctccacccaatgttgggactgagaattggggaactcacataatgggcacccctgctgctccaagcagccacccagataacacaaaagcagctttacaaagtggacaacctcaaccagttcaatactaccatgaccaacatcaacatccctacgtgcaacatagcccagttgacaaaccaagcaacagtcccatggagtcaatccttaacatgttcgattcatggagcaaaaaagctgaagccaccggacacaacgtgtggcacaaccttaaaact

SEQ ID NO: 11557 - DNA, 340 bp, Glycine max
tacgactctgagcatcagcaatggcaaatgcaagtgttggtaaagaactgtccctgtaggcgtgtagtaggagctgttgctcccaccgaatccaaatcgctctacaacctccaagggcttacatactaatactagcccgatcatatggtcaaggcagaacaatctagccctgagttacttgagctcaatcctgttggttgtatcctcgttctagaggatgaccacgttgttcatatatgactctttcaccattattatgtattgtggaagatacgtatcgctcacaatcctttgctcactcatgatattgacaagagagcaatcaatttccaggctgcta

SEQ ID NO: 11558 - DNA, 204 bp, Glycine max
cccacgcgtccgaaaaaaaaaaaaaaaaaactaataaaaaaaaaataaaacataaaatgggacatggtgaaattgaaaaatatgattgtgcatactttcgagctcaccctatcgtactccatctatcatggtagtacctttcatttcaatggccctgctttcaatacgatctacgcatttttacactgccgtatactgacaaaa

SEQ ID NO: 11559 - DNA, 441 bp, Glycine max
tccacgcgtccgcgagatcgcacttctaccccaagactagagcatcttatgaagctcgattcattgattgctctaattctgcatacttccagctgagcagattgtgtttcatctattatggttgaccttaacagtacaaggggaagctcaacgcaggaactatgcattgttttgctgcaatatttgtacgaaagaggtttaggtattatggctagctgtgatgtagtaggtggtactattagcggcttacttacgacacgacacccttctgttgttactcgagccttgtgattctctgatttggcatccacttaaagggagacataattcatcaagggggatctatgcatcccataatatttccttaaatgtactactttatgtaatattatatacgcttctgtacgtgacattatttttaatcgcttgaattttgtccca

SEQ ID NO: 11560 - DNA, 371 bp, Glycine max
tctattagttcatactaagttctgaaaatgagttccaaggttttgcttgttctacttgtgttcttggccactatacttctgatctcctctgaggttgcacccgatgatgcatacgagaattttgacaaaatagatgggaagcctaatgcagatggggtagatgaaagcaagtattggcgtggcagctatggtggcggctatggtggtgggtatggaggtcggcgtggaggctatggaggtgggcgaggatgctattgaggtggacgtagtggatatagcggcggacgatgtggctatggaggctggcgtggcagctatggcggccttcgtagtggcaggcgtggttgctattgccctaatgaacatatcga

SEQ ID NO: 11561 - DNA, 344 bp, Glycine max
gttatgtggtccttgcacattgtgaagttgcagttcaattgggggagaattagtaaggagagatagtatgctcctattgagcagtgctacaggcaattctgaacgggtcgttttggattatcctatgcctctaatgtgggcggaaaagaatgtatattttttattatatcaaagaagaggcccagagagccttctttccatgagtaatggcacgagttacaatattatgtttactctggaccactggataaggtgttgagcagaacgttgacattgatgttggcttggttccactggatgcaccgacaatggtgaatttgaatacctgcattagagatcttgtg

SEQ ID NO: 11562 - DNA, 389 bp, Glycine max
acgcatgcgttcactcacgcatgagagctcatgctgatcatcatcctttcaacactactcgtgtccaggtcatttcatgactactcttccaacccttaaaaactacatatggaccatcttgtcacgatcctttcttaactgcatcaataacagcacccaaaaggggtcacaccatttgatctcatattcttcatctctcatggcgacgagcactgctaattccttcaactttgacaacacttctatgcgcgtgcaccgtcggacacgtgctccagcacgtgaggaacacgagcgtgctatactacgggaattcaacaatgatcaccgacatcggtgttaactactacgctctgagcttacccgagacgctgttagcattcgacagaatc

SEQ ID NO: 11563 - DNA, 443 bp, Glycine max
  modified_base (418)..(418): a, c, g, t, unknown, or other
cccacgcgtccgcttcctctcatcctctataaagaaagtgcttaatttgtggtgttagggggttcagtttccatggattgggggcttgctatatcttctcatcctaaaccttattcagtcacaactggtggaaatctctggcggagtaaacacaccaccaagaatatttactttgcaagttcttggatatcaaaagcttcacgacacaaaagggaaactcaaatagaacataatgttttgaggttccaacaaccaagtttggatcatcattacaaatgcatcagaggagggtctacatatcaagaatgcaatagaaaatttgttgtgaaggcaatctctaaacaacctcttggttttgaagctcatgcttccaatcctaagaacattttggactctgtcaaaaatgtattgtctgctntctactggttttcctatccatacac

SEQ ID NO: 11564 - DNA, 393 bp, Glycine max
aacacgattacacgaccgaatcaaaccctctctttctctccgaagctgcgtataatatcttactcgccttagattgttcttctctttcattatactgttctcttttcgatttgagggaacagtacaagagtgtgaggatcggttaacccaactgcacaggtagtcactaaaataatggagtctcacgatgagactggatgccaggctcctgaacgccccattctttgcattaataattgtggcttctttggaagagcagctaccatgaacatgtgttgcaagtgttacaaggacatgctgttgaagcaagagcaggacaattttgcagcatcgtcggttgaaaacattgtgaatggcagtttcaatggcaatggggctgtgactactggtgct

SEQ ID NO: 11565 - DNA, 324 bp, Glycine max
cccacgcgtgcggataggcaaacagacaacatttggagtgatcgaaacgctctgggagcattggtactcaacgcaaacatggcgagtacaagaaaatagactgattatgtgtatacgctgcatcactactagctcaggtttcgtaagagcgaacgacgcatatcgattgggcatactgaggctctggatcacaagcgaggacgtcggatcaaaccaatcaacgcactcatgtactctattatctgtcaagaccaatcccgtgatggcgcgcacttaatgtacactgacgtgatgcgataccgcttgaaaagtgtgcagaatatc

SEQ ID NO: 11566 - DNA, 355 bp, Glycine max
cgtacgcaaaccctcgaggcccgatcacagaggctccattgcccatcgctctctctatgggtgcacgcgcggtaataggagattcacgcgccaccatggcctatgcatcgagcctccctatatgctgccaatcaagcgcttccagcgacggcacctcgcaatcccagtctacgatcgcgacgccagcgttccagaccttcatctgacgcatcttctagtcgatccgccacgccttcacgcagcgccgcacgttgacagagctcatcgaccggagctccatgtaccgacacgacaccctagtcgaagcatactctcagatccgtaagaacttcgactacttacgcgtcaattacct

SEQ ID NO: 11567 - DNA, 426 bp, Glycine max
caaattttcagttccttcctcgcttttctgcaaaatcatctaaatccgtgagtttctggtttctctttatacttttgcaattacccgtaactgtccaatcgttcagtggaatatgtactctaccttcttgatctgcatatgaatttcttcctataatatttctgaagaaaaccattgattattctcttcttcttaaatgtatgtaccaaaccaatatgttgtatatatgtgttacatttctgttgattcatagaccaaccaatgttgctctattataggttataattcaatttaataatttcgagatgcttaggttagatgatatggattctgctgaaatacatcacctatgggttcgcaattggctagtcaatgatgaaaacaaaagttctggttttgcatgcaggatcagctgggggattgggt

SEQ ID NO: 11568 - DNA, 304 bp, Glycine max
cggacgcgtgggcggacgcgtgggcggacgcgtgggttcgcctggtcttggcatctgggcagcaccaccacccaccaccctgcttagaccaggtcctctctctctctagagagaaagagaagcaagaaaaaacagaacaactaacattaagcttttaatagtaagacatggctcaacccagttccaacggggatctgaataataaccagcagcagggtcaggttcagcaacaacagcagcagggtcagtgggcggcggcggcgcagccggatcagtatcagcagcaatggatggctatgcagta

SEQ ID NO: 11569 - DNA, 322 bp, Glycine max
atgtactagtgttttgttagttcacacactaagttctgaaaaatgagttccaaagttggtcttattctacttatgttcatggccactatacttttgatctcctctgaggttgcacccgatgatgcataccagaattttgacaaaacagatgggaagcgtagtgcaaatggggtagatgaaagcaaatattggcgtggtggctatggcgactatggtggttggcgtggtggtggttggcgtggtggctatggaggctggcgtcgtggctatggtggtggacgtggtggctatggtggctggcgtcgtggctatggtggtgggc

SEQ ID NO: 11570 - DNA, 376 bp, Glycine max
cccacgcgtccgagtgatcaatcatcaacacagagctgagtgtgttgctctgtgaatccaccttgggcttccattggaggaccatttcctcctggaatagaaatactaccacacttttctgtcttcacttctctaagttgctaacttaattgctccttcattttttcactcttcgttctcgcgtacccgtgtcacggtaactcgaggtgaagtgttcgaaaatgactgtcacacctaagatctcagttaacgatgggaaactagttgtccatggtaagaccattctgactggagtgccagacaacgttgtgctgactgcaggttctggaaggggtcttgggactggtgcttttggtggtgccacagcttcacacag

SEQ ID NO: 11571 - DNA, 258 bp, Glycine max
cccacgcgtacgcccacgcgtccgcaaacatggaattgtttatcaggctccaagaattggataagaagtgtttacactaaagcacttgatatatatgttatgagtcatgaatataatagtatttaaataaggagttattcttccaattatgttatttgattgaaaataaaaacatgactataagaaatttgatttttcttatttgtaattatgttatgcactgcaaataaatatacaaattgagtgtttcattttcaa

SEQ ID NO: 11572 - DNA, 305 bp, Glycine max
cccacgcatacgagcgtattcaaacatttcaatgacctcatatgagctttctcatggcgaaacatttaaaattggagctcacagatttaggataccacatgatcttttccaatccattcctggttcaaacaaattctggcatgtagagctttgcaagaacttgctcattcaattcttggactgccccaaatggggattgatagcattaataagtgtgacgtacacattctaagacagttgtttaatacgctactgcatgctggtggtacagcttcaatgcaacaactaaaggaacaccttgataa

SEQ ID NO: 11573 - DNA, 260 bp, Glycine max
tgctatctcatcttgaacattaagcatcatcatcatgcacgagtagagacggagcttgggtcgtattctctttgtgcatgaatcaactacctactgagatcctgtaagcaagccatcatatgtactgcttaaattagcgctatcaaatagctgatgtgatccatatacagatcatgggctgtctcttcaaatgcaccatgcttatgagctcgttctttcatcacaaaagctctggtatatcttacataattcgagttcac

SEQ ID NO: 11574 - DNA, 238 bp, Glycine max
cccacgcgtccggatgtgattaagaagggagaggaagatagggagaaatgaagggtcagatgaaatgagtgtttaggtagctatgtatcattgttgtttttatctgcctttcatttgtattcattgtatgttattattcattattgtgggggagtaacgaaatcttcttttatttgtggctgtcccaaaatattttcattattattaaccattaatgttaattggtgatgctctttaa

SEQ ID NO: 11575 - DNA, 395 bp, Glycine max
atgaaatgcagagtaagcaaaaggatttagagttggaggacaatgcattaatttttgtgggaggaaaagtttccgttgatatattactattgatgaagctgctaagctttgcggtgggtgttcttcctgatcatgttcccaaggtggagcccagatgcaattgtttttaattccaatcaggtttatgaaactcccagctatagggtgcagtttatgtttagagagtcaaatggagcaacatttttaaaatcacaacttcaaacgcctgaccctgattcagttgatgcatcagcaattctttggaaaaatctccaagataaaaaaacttacttaaaaataaaggggatccaatgaagatggcatcaatcaatattgaaaataagctttcttctggc

SEQ ID NO: 11576 - DNA, 367 bp, Glycine max
  modified_base (324)..(324): a, c, g, t, unknown, or other
cgcaaggacacctgccaccacaagctctccgctgcccaccgcccgccgcctgtgccttggcgtgttcagccgccatcgccgtccctgcccactgcttctgctggaaagcagcatctaagctctccaccgcccttagtcttgttctttcttgaaaataattctggtgctatggactttgacgacttacaagaagcgccgataaaggccacgtctcgagtctccaagttcgcgccaaaatcatcaaagctcaaacctaaaccaaaatcagaacctgccccgcgcatacctgaaccccaaccacgcatctgcaaaccagagcctcangaaattcgtgcagcaactgtcagaaagaatgaagatgatggcg

SEQ ID NO: 11577 - DNA, 233 bp, Glycine max
gtactgctctattagttcatactaagttctaaaaatgagttccaagggtttgctcgatgtagttatgctcttggccactatacttatgatctactctgatgttgcacccgatcatgcatactacaattttgacagcatatatggcaagcctactgcacattgtgtagatgaaagcaagtcttggccttgcagctatggtatctgctatagtggtgattatagacgtaatcgtg

SEQ ID NO: 11578 - DNA, 321 bp, Glycine max
atcgactcagaaagacattggacaattaatagtggcttacttactaagtatgttacggtctataaacaaacttcagcatcatatacagagggtactcttatgccatgatgacactctatgatcttagatcctgactcagttgcgcttgagaggaatcgatcactcaccatagaataacttcatgcttactggcgagcaaagtacgagacagagttagaacatctcacagctatatgcaaactatgtgagactattcagacgcgacactgcgcggattcatagtattctcataactcacgtgctgtgactatggccagcata

SEQ ID NO: 11579 - DNA, 234 bp, Glycine max
  modified_base (64)..(64): a, c, g, t, unknown, or other
gttggcaacaagttggatcatgaattactgtccaatgctccccatggctgctggcagagggtgnacggcgcctttggcactggcccaaccctacctgccggcactgctctggatgtacctggcgtactggcactcacagcatactctaggaagtcgatgaaagcaaggcttaccaatgcttaccatgtaatgtcaaccaataccttacgaacatgctgtacggaccactctcac

SEQ ID NO: 11580 - DNA, 68 bp, Glycine max
cacgaacgcgactaaaaaccgcaggcacagaccgaaaaccacgagggagaacacgcaaagaaaggggg

SEQ ID NO: 11581 - DNA, 416 bp, Glycine max
  modified_base (324)..(324): a, c, g, t, unknown, or other
cgggaaacctcacacacatcacaaccttcaaaacaatactatccccacaaacaatgctggcgaaagatctaaagactaaaactaacataattattataaaagtcgtaggtcactgacagtgagtgcagggaaagtgtgattgctccgaaaccgaaaccacgaagcagtcgcaaacatgaccgaaaagaagcggaaggagagggacgaaggtaaccgccgaagactgaagccgaagaagaagtcaaacactcaatggaagaagactggccctcgtttgccctcatctctgcaaaaacatattgaccgtttaaaccctaccacttncttcgacagcgccgattccgatgacgacaatgacgtttacgagtacgaggaagaacgggccgaagaggagtccaagaaaaacaagcgttacg

SEQ ID NO: 11582 - DNA, 178 bp, Glycine max
gtacatatattttttcactagtactagcgttcgtatctacatgaatactataatataggatgcgaagtattgaaccaattaatggtgagcttcgttggtctctcgtccgtgttgtaatgatggatcgggtactagctagttctgcagttccactgtgttgtaatgtctggttttgttt

SEQ ID NO: 11583 - DNA, 208 bp, Glycine max
tccgggcctcaacaccaagagtgcctccactttgtttcggagcattaattcgaattgccggaggaacaagctctgtctctcctaccttctaaggcctgcacatctggtcaaggacagggtctaaccaatgctactccatttcacacacacaaatagtttcgtggttggacgaatagaaaagaatccttgattcttcaccaaccaagtg

SEQ ID NO: 11584 - DNA, 197 bp, Glycine max
attctatcctattgtaatcacctttgagtgagtgtagtaatgactagttctcgagggcgttcgatgaatgcggctaatcacttctaaggcgttcagatcagggctttgagagaccgttatggacactgcatcattgccattctagacttcccgattaaggttgactagtatacttgaactctcgactatgacattgc

SEQ ID NO: 11585 - DNA, 423 bp, Glycine max
accacgcgtgcgatcctcctgctctgcaacctccatagcttaccttcctcaattgggggtacactctattccattcccgacgccaccgacaccgacaccgacaccgacaccatcaccaccaccgtacaccagtccacccgcaccctcgaccaatgcggctccggcaaggtcttcgtctacgacctgcgccaaaccttcaacaacgaaatcctactgcattgcgacaacctcaacccctggagctcccgctgcgacgccctctgcaacgacgccttcggccgaaacgccgctgcgctcgccggaaatcgaccggaagatctcctagcggcgtggcactggactgaccagttcgtaaccgaaatcatattccacaacagattaataaaccacaagtgtagggttatggaacctgaatccgctacg

SEQ ID NO: 11586 - DNA, 353 bp, Glycine max
  modified_base (4)..(4): a, c, g, t, unknown, or other
ccgngactgatcatcagaggcaatggcgagcaggtactgggcagtgtctcttcccgtgccaactcggcatcatctcagctctggaaccaattgcaggaacgaatctccaagcattccttcgacacacctctctacagattcaacattcccaacctccgcgtcggaaccctagactctctcctctccctcagcgatgacctcgccaagtccaacaatttcgtcgaaggagtcacgcacaagatcaggcgccagattgaggagctcgagagagtttccggcatcgacagcggcgccctcaccgtcgatggtgtccccgtcgattcctacttgaacaggtttggttgggaagaggc

SEQ ID NO: 11587 - DNA, 417 bp, Glycine max
cccacgcgtccgcccacgcgttcgtgagtagtattgcagtttattctatcatatccttgttcaaataattttcttttcaattacaataccccaatcccagaaacttatgttcatgaccatcctcaaggtcccaataacatttacttgaagacaattttgagttgaccttacagcctagttccacctatacaaacacccttgatccttcattcttttttgagttgaccttacctagctccaatactggcaacaataatactcttgggcatctgaactatctccattctttttttccccctttctttgcagtggatttgcgaggttttaaagaaattaaatgcgtttttatgtgctaaagagctaggtaattatagaattcatttcacacatacttctttttactaccttttatctttt

SEQ ID NO: 11588 - DNA, 317 bp, Glycine max
ccaaataaaaagtgaatgcttggaaaagtggaggttgtggtacttattagccaagcggggaacatgcaaagtcaacatacagtgaaagaagaaaatcattaatgtccacctccatgatgtcaacctattcccgatcagtcaccattatcgacacatccattcggatgggctcatatggatcgctattcttgtcgtcgcctgctttcatattcacgatgtgccaaacatgtcatatgttcatgctgacaaactgtcaacattgtattataagctgatcaagttttgcaagttaaatttatcaattgtgcagtattgct

SEQ ID NO: 11589 - DNA, 342 bp, Glycine max
tgctgttctaacttctaaacaataataatagaaaagacaatacttgatattattggatgctttactaatctcctctgaaatatgcagaatgcaagatgtggtgcagagcatacccaaactgttactcgccaggctcctacaattactcatgttcctggcaaggagaagtcaccacaactcgacgatggtggaactggatttccgactcgtgatgatgatgatggtggcggtggaggaggtggatgcggaggcaactgggctggcggatactactgatatggctctctcgctatacttggcttcttagaggataaggaaactgaagacacatacatggatgac

SEQ ID NO: 11590 - DNA, 397 bp, Glycine max
gccagaggacccttatccccctcactgtattgaaggctctgatgaatcaagtctggtgccagcattaagatggctagagaatgaacctaatgtaacaatcaggcgaaaggattgttttgatggatatttgggctcaatacaagaagatggttcaaatgtttttgtagattgggtgaagaagaataagataacaactctgctggtagtaggtgtgtgcacagatatctggggtccaaaatttggatgctccacaatgtcagctaaaaaccgtggttttctggagcctctagaaaatgtggtggtgtattcccgtgcctgtgctacctttaatgtccctctggaggtagccagaaataccaaaggagctttggcacatactcaagagtttatgcatcat

SEQ ID NO: 11591 - DNA, 345 bp, Glycine max
gcttgattaccgatcagctgacattttggtcaacatcaactctcaggaacgcagttggggggtttgggttacggatgagaaggaacctattaatgttgaggaattgagtggaattgatgatgagaattacttggtcatcagtgaggaacatgtggttgatggtgttgccaactttatggccagatgcattttgtcaaacccgaaagctctgaaattttctccagaggaactgcagaaagcgctatcaaaagcattgcgtggtacaagcaaactggaaaagattatggatatttgggaagctggaaagttgttttattgtctgtctacctggggacttgctttggc

SEQ ID NO: 11592 - DNA, 367 bp, Glycine max
  modified_base (9)..(9): a, c, g, t, unknown, or other
cacatacgncatctcttacctcaaggcacacgtctccacacattccaagtccaagcaatgcttcagtcagctatatgcatacatccagtcgtgaacaacatcctctacgtaatagtgagtcggctgcaagctactacccattcgcatcgacacactcccttccagaatgctaaatcgatcaattgagcatatcatatgatagagacgtccacgcagctgaactagttatcgccaagacttgaactaaaaggtggccatgcgatgaccggtggtctagttgaatagtcctatgtgatgctcggggcactccctacctctgtcatttgacttccgcctcggcacctggtgtacattggagctactctct

SEQ ID NO: 11593 - DNA, 269 bp, Glycine max
gtgatttgtagggtgtaccaaaaggagggtcctggtcctaggaatggtgcacaatatggtaaacgatatgaggagaaagagtgggaaacagatgaggaaattgattctgtacaatctgcccctgttgctgctgttcgtgcacctgttcctatacaacctagtgaaagccatatttcagttgctaattacatccatccctctacaagtggatgtgctggattgacctctgtatcatgtgtatcagaattgatgccatcttgctcgacaca

SEQ ID NO: 11594 - DNA, 229 bp, Glycine max
cccacgcgtccgcccacgcgtgcggtttggttggagggttggaagttggtaagttcatgacgtgggggtacaaattgtatagagagaaaataaagacttatttctttctatgttttcctctaatgtactagtactactctggaaaaccaaaagtgtaaaacgcttatttaaatatgatggtgtacaagttgctcactatcttaatcaagacattgtttgttttggttgg

SEQ ID NO: 11595 - DNA, 412 bp, Glycine max
cccacgcgtccgcccacgcgtccgcccacgcgtccgggttcaaaataaatagttagcagagttagttttttgtttcttttccctaaagagttaggctctattggaccgtacgattaagatcgttcggtgaaattgatcacgctggtgccgcataccctagcgttcctgttattctattgtggctgaaacaaaacagtgttgaacggcgaggtagaacgacgacccccttctgcgttttgaccttcaatctcgtaagttcttctatttattaatttattttcaattgaacaccgtgtgttcagatacgtgaaaagattttagtgttgattccatgttgaaagttaggcactgcgtgaatggaaataatctaattgatggatgaggttctgtggtttttgagtttggtggatat

SEQ ID NO: 11596 - DNA, 335 bp, Glycine max
gtggaagtagcttgtcacttgtgttgggaataagcaacatgttttggatcggctgatcggatactatgtggatattgatacattgttttacataacatccatctactcaccatatgacctgtcgcggcactgtgactgtaatgtcactggaatagacggatgtgctgaaccggcatactcaatccaataggttataaggtcatcctcatgatcttgcttaactaggtctataatgccaatctgctgatgctaggacctaatgcaaaaactgtgagcggtcatggatgcggacagaactatggcaactctactaacagaggagtatcataattcag

SEQ ID NO: 11597 - DNA, 392 bp, Glycine max
cctactactccacgattagtgagagcaaagctttttatgtttttcggatttgcatggagatattaccatataatatcgcggaaaaggaaaaaatggaggcacccattatgttaccccttgaaaggacttcgtcaattgaaagagagcccaggactcttaatatcaaccaaatccaatccgctagggagttagcaatatatatattgaacacaaagaccatagaagaagcgtccagaattttcacggaagggttgcagccagtggttagtgctgcttgctgcatgagatccggcacaacaatggacatggatttgggtgaagaacttgaagtgttgaactccaaagacgcaacaacacaagtagccccagcagcagcattcagagacatagca

SEQ ID NO: 11598 - DNA, 309 bp, Glycine max
gtcataccaagagttaaatggaagggagcttgcaatgattatgatgcggacacttaagagaccggcctgttatttagatgaccgacatacctagcatagatgtgtatatttataatagagaaccaacctaggaatggaaattcttgcttgctatgtttcagtagacggtcggtcatattggattttagtatgcatttaaatttgaatgtgattagatccataggctgtgctgtatatggatattctgcatgttaccttgtttgtagaggtttgttcatcaaacagtacaacgagaacgataatgcatgc

SEQ ID NO: 11599 - DNA, 359 bp, Glycine max
accacgcgtccgcccacgcgtccggccacgcgtccgaaatcttatcttagcaatagctggccctagcacaacaatactctattaggcaaaaacaccaaatgggagaggaaaaagagcagcctaagaatgaaaccgagaagaagcccgaggaggccgccgcagcccccaagaaagacgacggacccatccctgtcgtttacaaactcgacttgcattgcgagggatgcgtcaagaagatcaaacgcacatgtcgccacttccaaggtgtggaaaccgttaaagcagatctatcgtcgaacaaagtgactgttaccggcaaattggatgccgagaagctgcgagataagatcgccgagaga

SEQ ID NO: 11600 - DNA, 388 bp, Glycine max
ggcaactccatcggactttaaggaacaaaaagagacgataatttgacaattgcagcaggtgcaatgctgcattattctttgattgattccttgctcatttttatgggtaccaatccatagccatacacatggagtaaatacatcaacctcataattaattgtaaatgaatatcaatttctcctagcttagtatagtggaacagatcacaggttctttgggcggcaaatttatagttccagctggtagagaggtgtacttattattattatttatgaggcctgcttctgttctgaatagggtttcaccattggtaaattgcccaatttcttcgcctccatcggaatgaatcattctgaaacgtgtatccagccaaaagaaataaataaa

SEQ ID NO: 11601 - DNA, 415 bp, Glycine max
ggaagagaatgtgatgaaaaaggattggtatattgaacatgtaggcaagtgtctgatcgggaactttatcaacatatatgcctcatttcacaatacagccctcttcaaaccaaaacaacaattgcagcagtgtgcctgtgaagtcaatggagaagatggatggtatgaaaaggccaacaccataccctttctccccggattttcctcatgtccctgctttcaattgtatatcgtccctctttgctgaagtaggaactaatgcaaaaactccgtgcggtaatggaagcggatttaactttggcaattcaacttccagagaagtatcatcatcctgtttagcttccaactctgagccaaagtcaaagaaaagaagagaagataatgagaatttcaatggagattttctcacgttggc

SEQ ID NO: 11602 - DNA, 405 bp, Glycine max
gcactacgctgtcgtttgcggtgttagaagacctagtcgggcgtgatggcgaagaagcgatcagcgcccgagtggcaggtcgtcgggaaaaccgagccgaatcatcttcccgacggctcaactcagcttccggtcgcagaaaactcgttgcgttcttcatcgtatcggccatcatcgctatcgtcacttatcgttatcgcttcagacaatcttctccttcgcaaggccttgtcacaactcatgctaattgccaacatatactcgccgaaaattcaaaagtatcaggaaattcgtctcagcgccattatacttatcctgtgcttggctacattactccctggaattctcgaggttatgaattggcaaaaaggttcaactctaagttcacacatttatcacccattt

SEQ ID NO: 11603 - DNA, 395 bp, Glycine max
gtgcttctgaaggaaaatgtattttggatggagcaggagcagatgttgaaggaaggagtggtcatttaaggcacaatacaaagggtccaagtttgcaccgttacaaatttgattttggtgatacttttgatgacgatggtcagatttttggactggaagatgaatactctctaacttctagatctatatcaaaaagtggaagtaaaattcatcgtggtgtagcttggaatgatttggcctggggtgaccatcttgcttcaaaaggatattgggatgttaaagcatattctccaatgcatggtgatcgttatgattttggtgggaaggtgaggtcgattctggttgatgtagatttgaaggttcaagcaagctataggaaagagcatgtacctttc

SEQ ID NO: 11604 - DNA, 418 bp, Glycine max
cccacgcgtccgcccacgcgtccgcccacgcgtccgcttatctcagctccttcatcatgcgaggccatatctctttgcctctccaccaccagtgcctcaccaatcttcgcaacagtaggccaacagtatgtgtcgtcgccaccgcagcctgccatgtcagccactgcattgctgcagaaggcagctcaaatgggtgctgctgccacaaacgcctcccttcttcgtgggtttggtattgtgtcatcatcatctttggcttcgacctcatcggggcagcaaaatggcctgcaatggggccagcagcagttagaatccgagagcggctccgttcctgcagcagggctaggacttggtcttccatgtgaagatggtggttctggactaaaggaattggtgatgggaacacccttaatggttg

SEQ ID NO: 11605 - DNA, 380 bp, Glycine max
cccacgcgtgcggccacgcgtacgccactctctcacacactccacacaagacacaaccgtggaggagccaacgttgttgttccccgacaccgacctcgatctcagcttcaccagcaccaccactgaccgcaccaccaccaccaccaccaccagtgcaagaacaagcctcgcccgcactagcagcctcaccctcagcttcaacgaccgtttgtccacattctccgcctcggaaaccaccaccgcctcccttatcagccgccgtccccaccggagcggcgatcccaactggtccgccattcaggccgacgtcaacctctcctgcgacggccgcctgcacctgcgtcaccttaagctcctccgacacctcggctccggcaacc

SEQ ID NO: 11606 - DNA, 418 bp, Glycine max
aggcctcgtggaacacaacacctttcccttttcccttccgttggtgccattcttgcagcaccggatgctctaatttttccggggataactttcccttttccggcgaattcaccgtttcctcgatatgaatccccagtatgactatctgttcaagctccttctgattggagactctggtgttggtaaatcatgccttcttctaagatttgctgatgattcatacattgagagctacataagcaccatcggagttgattttaaaattcccactgctgagcacgatgggaagacaattaaactacagatttgggatactgctggacaagaacgatttaggacaataactagtagctactatcgtggagcacatggaatcattatctgttatgacgtgactgatgaagatagcttcaattat

SEQ ID NO: 11607 - DNA, 251 bp, Glycine max
ggcagtttcgtcctttcgatccaattctgtgccctagcaatccaacacgcgcgagtgagtcagtgttattatagcgcaaacaagcaaggaatcgggcccgcgcagtagaaactcgaaaggaatcagtgtttgtgtgtttcgcatattcttctccgttttagatttgagagagaagaagaaagagaaatcatgcctaattctaagataagctgatgattgatacattgataagctacataagcaccatagga

SEQ ID NO: 11608 - DNA, 404 bp, Glycine max
tgctatttcattccagagagtggttcaacttctgctccagctagtactgcatcagtttctgctggtcaacagccggtcaacatttctgttggcaaggaagtggttgtcaatggcgagaatggatataaggaaggcaatggcaagcagagctctagtcatgacgattgtgatttgcaagaatgtttggagcataatctccctgatagcccttttgcttccccaacaaaaggtgatggagacttcctggttgccttctccaatggacctaatgaggccaatgatgcagatgcctcagctgcatctgccaactccaaatttggtactagcacattacttcctgcagcatctgctcttgacatgggaactttcaaatcctttaattgccaaatacccaggttctcttc

SEQ ID NO: 11609 - DNA, 304 bp, Glycine max
attggattaatggctatgggagaaacaagtgacactcctgctaatgctgtctcagtcgctgctggtcaacagccggtctacattattgttgccctcgttccggttgtcaatggcgcgtttggttataaagcatgtacctcccatcagagctctggtgatgtcgcttgtgctttacaggaatgatcgtcgcattctcttgatgatagccactctgatttcacagctctttgtgacggtgacttgctggctgccttctaccgtggtcccaatgacgccgatgatgcacatgccttatctgcatatc

SEQ ID NO: 11610 - DNA, 306 bp, Glycine max
atcggattaatggctatgggagaaacaagtgttcatggattgtgagcaaccctaatggggtcgggcccatcccaaccctattgaattgaattgggggaagaagaacattataacaagaataagaacaatcggcacaattgttgtaattgaacgatgtctgctgcggtgtgctgaagcaagagatctttgctctaagagcttcccccttctccgacagtattcaagaggctccgctgttactccttccctattcgcctctctcttcccttccctaatcgaccaccttcgctctctcttcccttatat

SEQ ID NO: 11611 - DNA, 410 bp, Glycine max
gttggtttgggtaagttttgtgagcgtgagatcttggttaactagttttcgtggtccccagtgacatttttactaagtttaactccgtaactgatgtcgtgtgggtcaggtaaggtaaggaacgagaatttgttcctctttgaatgggtagggagacctacccttttgattaacaactacaattacatgcatgtctcaccatctgatgaggtggttacatggaatctatatatagacatagattataaaatccgattctcactttgatattaggtgggggccaggcggtgaggttggtgttcttggaatgcaaatttagagagaggagttaacttatagaaacatgaactgtattgattcttatattatcaatatataattatatagtattacctaaattatgtaataac

SEQ ID NO: 11612 - DNA, 330 bp, Glycine max
ggtcaaacaatgctcccagtagagatgtgccaagcagggatatgggaggaccacctggtgggaacggatattctgcgtgagatcactgccatatttttctagccaatgtagataacgaggaattgtgcccaagacaacatagagtttatgccatgtttctcaaggaattagaatttattagtcttacatgttacaactatttctaatgaacctgcatgttgtgtatccgaagtccacaatatttaaggctagatacgatcgttttgtattgtttgtgaaaaaaaaaaaagaagaagaaaaaaaaaaagaacaaacatgcttactatgaat

SEQ ID NO: 11613 - DNA, 285 bp, Glycine max
acccatcaatcaatcttccatactacatcttccaagcaatcatattatataaccaccttcgggcaactgataaactctctgataataaaagccattcttaacacctaccattcctacaaaatctcatcaaaccaatactacattaaccttattcaaactatttattcaccattacactttattatttcccacttatttagaccttttaatattccacatggttccaaccttttttaaaaaaactccaactttttcaatatacattcctcatttaaaaccatcctt

SEQ ID NO: 11614 - DNA, 383 bp, Glycine max
  modified_base (312)..(312): a, c, g, t, unknown, or other
  modified_base (318)..(318): a, c, g, t, unknown, or other
cggacgcgtggtttgaatattctaattcaactatttgtcactatcttatctgaggaacagtttgcatgttattgtgtgctgctgttttgatatcctgtaattgttgtctcttaaatggaacttatgaagcattttgtctaactgccagtgcctttttcatcattgaagtatttatctaatgcaggaattgagatgaaaatgaattcttttgcagataccaggaacagcatagcagtataagctgcaattttggttttggatgctaataacttattaacacccatcattaagaatatcaaaataatttagttntatatntgttatttttctgtaagaaagcttcagaatttgagttttttgttttttgcagatcctttgtatat

SEQ ID NO: 11615 - DNA, 433 bp, Glycine max
acgctcaattctcaacattcttagtcacctgcaagcaaaacgcctgtcgcttattatagcaatccacgccacttctcacatgtcgtttgcgcacccgatctcctttaatcgacacctaatactctccaaacacgcttggtgaaaagccttcaccctgaaaaaaaattccgaaagaaagagacacccctaaagatctggtctcagcttctcaccttttcctcaaaaatctcatgtatttcactccaatcgctgttctcttaactctttcctctgtagctctttctcaaaaaatacacctattcaaattcaaactcacattctgacgctgattcacattctgggtgctttgaattcataaaggcaggttccagataaagttttagctcaattcatattctgggtgtgtgaaataggggagaaaagaattcaaatt

SEQ ID NO: 11616 - DNA, 340 bp, Glycine max
cttaaaggtacgttttctctgaaattgtttttgaattaagaaaaattaattagatgcccttgcttacataaagtagttattatttactactagcaaaattaattaaaattttatgagatggttgttttatattctgaactctccaagagatcttacaagtaggtggttttttgggctttctcgaacagatatccctagatctgcaactcgcaaggctggaaggagcatgcctactttggtttacgtctactgtgtgagcagaacaacattcagaggacatatgcttggagttgcagcatcatggcttgtccaagtaggcattgatttatatcgattcttt

SEQ ID NO: 11617 - DNA, 257 bp, Glycine max
aatacgacttgccaggcacctggtgtcaatgggtcatcaagctggtgtggcactatagctatggaactacccagagaggctgatagaactaggtccacaggatatatatagcgcaggtaggcctggtcatgtggatctagctgctatagacagtatagtaaactgtaatgtatcataatcttaaccactgtgaattagactatgtgcacaagggaccaagaagtcaggactaacagaatcatgtgatgtgggcggtt

SEQ ID NO: 11618 - DNA, 138 bp, Glycine max
gccacgcgtacgatcacgaagtgcacctagcaattccgctgctcacatacaactttggtctattccgttcgtattgactggaccatcgcatcaacacatcacgtgataaatcaaggaaactcataactaactaacaca

SEQ ID NO: 11619 - DNA, 441 bp, Glycine max
gccttccacacattcaattatctggatgatgattgtgatgatgatgaacctcatcatgatttccgctcgttctcttctagttcatcgttccaagaatcaatgtcagatttagtcggcaaagctgaggaaatatcaagtggatattattggctccatgatgatttgcatgatgataccagttcacgatgctcttcacaagggacatattccaacttgaattactattctgtggatgatcatcatcaagagtacaacgtgccatctttgagaaaagataaacttcccatcacaaagagtcacaacaagggcaaaaaggtttcctcaggcgaagacttgagcaatttcaaccaatataaactcatggtaggatcacaggttcctctcactagtaaaagcaagatgatgatgaacaatcatcatagattaacaaggaacaggtca

SEQ ID NO: 11620 - DNA, 276 bp, Glycine max
agaaaatgaaatgtctagaaatggctcttgtctcagtcaccaccgcaaattcttcgaagttcattctcttacgcactctctctcgttctcacgctttctccttcgctctccaccgtcaattccaactactctcgtcttcctccgctgtgctccgccgtcttccccggttcctcgccgcctcccccggttctccgctcccaccttccgaaaacgattccagcaggcaccttgaaaggacttttggggctaataaagtttctgaagagataagatgat

SEQ ID NO: 11621 - DNA, 402 bp, Glycine max
  modified_base (361)..(361): a, c, g, t, unknown, or other
cggacgcgtaagaaggggtagaaagaatcaggagaaggaaataatcatcaaccatggcagggagattgacgaacgcagcatcgaggatcttaggcggaaacggcgtcgtttaccgatccgtagcttcctctcttcgcctccgctccggcatgggcctccccgtcggcaaacactatgttcccgacaaaccccttcccatgaatgaggaactcctgtgggacaacggcactgcatttcccgaaccgtgtatagatcgtattgctgacactgtcggaaagtatgaagcattggcctggctgtgtgggggattgagttttttcgcgtcgctgggattgttggctgtgtggaatgacaaagcctncaagacaccgtttgcacccaaagtatatccatatgacaatc

SEQ ID NO: 11622 - DNA, 385 bp, Glycine max
cggacgcgtaacaaggggtcgaaagaatcagtggtggggaatgttattcggctgtgtctgagtctggtgttaacttcactggcaggatcgagcaccatcgccgaagaagggcacagagttgtcgtggttgaatacgaccaaggtggccatcagaacaccaaaatctcaatatcaccagaacaacctacgcatgctaatcttatagatcccatttgcgacgcctatggaaaatgcaagcacaaaatcgtggatgcaatggagaagtctcaagaggtcatgcatgagaagaaggactagattgccgccaacaaggaggcagcacgccaagttgctggtaaaaccaaagagagagtgtatgataaagcccgtcatgtccacgaatacg

SEQ ID NO: 11623 - DNA, 447 bp, Glycine max
atcacccaattccgagctctactactccgcggcaccaccaaccagcgctcccctctccgccgccccggcgtcgccgattcttcatttgcatcaaaaccctcattctctaatgccgccgcgttccgcgcctcttcgcctgtgttccacccgcaacaacgcctcggcaatagcaccttccgattcttctcatccaatttcgacaaaggctttgcgcagaaggtatttgataaaccggccgccgcggtgacctcggccttctcgcgttaccgcgaggcaattgggctgcaaatcgaggcgttcttcaagaggaatactctctttctgtggggcgccggtggcgttgtcctctgcgcttttctgtggaggatccttttcgggatcgctaacctcttcgttggactctccgaaggcatggccaagtatggcttccttgccctttcatctgct

SEQ ID NO: 11624 - DNA, 368 bp, Glycine max
catctttgtcatctcttaactcaaggtacatgtctccacacattccaagtccaagcaatgcttcagtaagctatatgggttcatccagtcatcaacaacatcctctccgttatagtgagtcggctgcaagcttctccccatttgcatcgacacactcccttccagaatgttaaattgttcaattgattatatcatatgattgagacgtccacgcagttgaactagtaattgccaagtcttgaactaaaaggtggccatgtgatgaccggtggtctagttgaatagtcctatgtgatgcttggggcattccctacctctgtcatttgacttccgtcttggcacctggtgtacattgtagcttctctctg

SEQ ID NO: 11625 - DNA, 433 bp, Glycine max
ctgttcgttatttttctttttttttttgtttcgtttcgttcggaacgctgaggctgtgtcgttgttttagtgggtggatgggaacgacgtcgtgtgagaagaagagcgtcgtgtacgtgagctgggacgaggtgttcgtgtcgaacgacaaggggaggagggaggttcattacttgcttaaacgaagaggcggtggctcggatctggccgttttgggaaaagagaagagcctcctcagacacatgtcgtatcgctacgccattcgaaacgccgcgttgtttaagccttacttgaagctcaggtcgcgcagagaggttgttgattggctggattcaattgtttcagggcgagatttccgctggctggatctgaaattgaatgattcgtcttcaggggatgcggttatggtgggaaaacatggttatgaacctga

SEQ ID NO: 11626 - DNA, 267 bp, Glycine max
aaaaaacgtacggtctaacattgtcttttgtgcaaagaacccaacacataatctttaaggcgcaatacatacactgactaactaatacactcagcaacatacaacaacgctctaaaagggcagactcccattgaggatccaggttctcatacgcgcacattcgtcgtgaacgctttcttatggggacaccgagcttcaatgatcgggctttcgttaaacaacatcagcacggataatgcctggactataccagctttaataccttat

SEQ ID NO: 11627 - DNA, 409 bp, Glycine max
catctttgtcatctcttaactcaaggtacatgtctccacacattccaagtccaagcaaggcttcagtaagctatatgggttcatccagtcatcaacaacatcctctccgttatagtgagtcggctgcaagcttctccccatttgcatcgacacactcccttccagaatgttaaattgttcaattgattatatcatatgattgagacgtccacgcagttgaactagtaattgccaagtcttgaactaaaaggtggccatgtgatgaccggtggtctagttgaatagtcctatgtgatgcttgtggcattccctacctctgtcatttgacttccgtctttgcacctggtgtacattgtagcttctctctggtgttagtttcgtttacatgtgcttggtgaagttcttacat

SEQ ID NO: 11628 - DNA, 429 bp, Glycine max
  modified_base (391)..(391): a, c, g, t, unknown, or other
  modified_base (396)..(396): a, c, g, t, unknown, or other
  modified_base (410)..(410): a, c, g, t, unknown, or other
cccacgcgtccgcccacgcgtccgaagatctcctccagcaaaaactccaacagaaactgtctgaattcaagtaggcgatgatccaaaatggcccatataaagagggtatgacacttgcgttgaccagcattttgcacaatggtatcctaatttccattggtatggtatggttatcactaacctttttccttttggtaataaaggctggctaatttgtttgtacatccattttgagtgctctgtagcaatagttgtcaaaatgttatagtagcaatttgttgaagaaaatgttgtcaaagattttccatggatggaaatattttgcaatttcttctgtgttgatttattgttctgctattttagccaggtgtcaaaagtattgcatagactntactncaaattcatcgcanataattacttggttttatt

SEQ ID NO: 11629 - DNA, 318 bp, Glycine max
cccacgcgaccgcccacgcgaccgaagatctcctccagcaaaaactccaacaggaactctctgaattcaagtaggcgatgatccaaaatggcccatataaagagggtatgacacttgcgttgaccatcattatgcacaatggtatcctaatttccattgttatggtatggttatcactaacctttttccttttggtaataaaggctggctaatttgtatgtacatccattttgagtgctctgtatcaatagttgtcaaaatgttatattagcaattatgatgaataaaatgatgtcaaagattttccatggatggaaa

SEQ ID NO: 11630 - DNA, 410 bp, Glycine max
  modified_base (387)..(387): a, c, g, t, unknown, or other
ctcacgcgtccggtcgttgaccgctcgtgtctgaggactcagcttgaatggggacagtagaatggagaagaacgagaacagaagcggaataacgttgtcacctgcctcgccttcacagggttacattggttcttacggaatttcagaagctgagtctcaacaaggtcaaggaacaacacctatggatgttagaagccctactagtgctaacttgttgccagacagctaactgaaatcaccagcatgtgttgctgagaacaacacatgcaagaatgctgctgctgctgctgcagtaacaatgagaagtcaatctaacaaatattcaccaccacaaagcagaaccaaagacattgtgaggaacttgttggaagacatgccctgtgtctncaccaaaggagatggccctaatg

SEQ ID NO: 11631 - DNA, 411 bp, Glycine max
cccacgcgtccgcaattttcttcgcctctactttaggatcgaaaaaagctgatttttttttttctttagtccctttgtctctatgtccacctttttgtattttcgctatcgttttgcccaatttttttgtatacaaatttgataagttgtttattgtactgggttaattagtttttgcagtctacaaattttgtttggggctctgggattggagagcttttgggtgtagggttttatgttgctgtatagaaaacagaatatggatttgtattcttattgtattgataagagggtaggggtctaggggataagggttttttttatcatttatttttaagtttgttgattttgatattgtctttggtttgtggaactgaaattggaaattggaacaggctacaccattggtgc

SEQ ID NO: 11632 - DNA, 376 bp, Glycine max
ctttttctttctctctcctattctcccctccttttcagatctgagatattttcccattcttctcctcatctcctcatccaaaccaattccatcacaaggtttttcatcaccgaagcttttgaatatgagtagccgccatcaaaatcggcatcactccattttagatttgtgttgcgagatgaagttgtggtggcttgagactgaacacggtggatgactatgaccccaccccaaacaacgacgacgtgtagggatcaactcagtggtgttgatttgtggttgttagtgacaagtttgttggagcataagatgaagagcgtcatggcatattcttttgatctcttttcttgcagtcgtggatgaagaagagggcatg

SEQ ID NO: 11633 - DNA, 313 bp, Glycine max
cccacgcgtccgtgcagctcagaagtttgtgaggaatgcgtttgccaagtcctcctgttctgttgatgaaacacttcgggcaagttaccgcggttctactcctgctttggctacacctacaagtgttagtagaagtgtgtcaaggtttgctagagatgggagcttggcttccaggtctccatctgttagagagggctccaatcctcccttgtgatatgttgtaacatattttgaaacaatgataaagtgactatgttgtaattcttcaattgcatttacttgctctaaataaaataaacgattaatagcaaaa

SEQ ID NO: 11634 - DNA, 426 bp, Glycine max
cggacgcgtgggcggacgcgtgggcggacgcgtgggcgcccacgaaagcctctctctcgttcgttgcttcaaacttcaaacttcaaactcctccgcggcttcccttctcgttcttcttcacagaaatggaggtagcagtggccaaagcgttgaaaccgagtttaaggagtgagttcatcgttcagaaaatgcactgcgaggatattttcagcctgaacgcgaacaccgtcgccgtcggcgaagatttctccgtggacgacctatttgacttctctaacggctctctgcacaacgaacaccaacaagagtgcgacgaagagaaacaaagtttatctgcttcgtcgcagtcacaggaccgtggagaagacgatagcaactccaattccaccggcgtttcctatgattcacttttctccaccgaattag

SEQ ID NO: 11635 - DNA, 271 bp, Glycine max
gcttccgatctcgaagcaaaagccaatttgccttcgtcgaagaccacttcgaactcggcgtggaccttctctctcaggccattcatctcgaacccaacaaagccgaattctacgccgaccgcgcccaagccaacatcaaactcaacaacttcactgaggctgtggctgatgctaacaaagcaattgaattgaatccttctctaccaaaagcatatttgcggaaaggtactgcttgcatgaagctttgggaatatgaaactgcaaaggctgc

SEQ ID NO: 11636 - DNA, 411 bp, Glycine max
  modified_base (1)..(1): a, c, g, t, unknown, or other
  modified_base (10)..(10): a, c, g, t, unknown, or other
  modified_base (192)..(192): a, c, g, t, unknown, or other
nccacgcgtncgaaaaaaagactaccacgtattcttctctctccgtctctctctctctcgctctctcttcacagtgccaatggcggatccaatcgcgaaggttctgatcgcgtttgcgctcttagcttccctcttgctgtgttcgcacgcttcctccgacgttcccttcatcgttgctcacaagaaggcctncctcaacagactcaagtccggcgccgaaagggtctccgtcaccatcgacatcttcaaccaaggaacctcgacggcctatgatgtaagcttatcagacgatagctggccaagtgatgcttttgatgtaatcagcggtagcacttcaaagtcatgggaaaggcttgatgctggtggcatcctttctcacacatttgagctggaggcaaaatcaaagggagt

SEQ ID NO: 11637 - DNA, 375 bp, Glycine max
accacgcgtccgaccacgcgttcgcccacgcgtccgtccacgcgtccgggaaattaatactagatcggtaagcagtctgcagcacatatctaacttgagtgtggcctgcacttcacaatgagagcccctgtcgttcgacgcatttcagaatgcttcgataagccccagctccccaaccaagtttcagaccagatctgcagtctaacacattgggatattgctatgttgcctaccaactatatccagaagggtctactcttcaagaagcctgcagcaactctagttgatcaacaccatttcatggagaatctgtaggagaagctcaaacactctctatctctcaccctcttgcattgctatcctttggctgctcgc

SEQ ID NO: 11638 - DNA, 284 bp, Glycine max
cgtcgcttaagatacgactataacaacagcctatcgcattggactatatatatcatcggataggctctacgattcagaaacatacatatatattcacacaaatatccatttatatatacatatatatagtgctatatggcaatgaccacggtggtgcatgtcttgagcatgtatgcagtgatgaatgcaagtgcctctgatgccactcgcttattgctgcacaaaattgctacaggtaacgtgtacagagagaagattgatagatactcacttgagaatggact

SEQ ID NO: 11639 - DNA, 399 bp, Glycine max
accacgcgttcgctcacacccgctttgtccttttcccgcgcattcttctgtcaaaaccctagatatcaaatctggggtttagtattcttagttgttcagacacggatctgggaactgccagcttgcaagtctgagctttatggctggaatccaagcttctgatgctcccacattgtttttaagccacatcatttcccagcgagctttctcatgggtacctgaatggtgacagtcttgagttcctttctactgggtaggggtaggggtatttgatccttatatcctagatgtgatctagcagattcatgtagttcatcaaggccctcgcgtaatcctgtttgcgagtcacactctgccaatgctgtaagcttgtgactgatatatatagagcttctgtgc

SEQ ID NO: 11640 - DNA, 443 bp, Glycine max
attctcctgtctaatttgctggcattattgccttcttgttgtttttgctgccaattcccttcccttgcgatgacaagtttcaatatttccaatttcaagattccaaaaccccttattattatttgtttatttttatctcttttgtactttgttctctgtagagtaccagatctttgcattccctggttataattccgaggctggtttcttgttaggaccgttaacttcttctcatggctcatcgctacgatagtaaccccttcgacgaagaagaagtcaatcccttctctgaaccagctgtaaggggaaaaacatcaagccaatcaagttatagcgggggtgcattttacactacaaatcctggaagtgttgcccctgccacaaattcaaggctatctcctcttaatcctgaacccgctgattataactacggctttggtgcg

SEQ ID NO: 11641 - DNA, 423 bp, Glycine max
gttctataagttcacggtcagttctgaaaaatgggttccaaggttttgcttgttgtaggtatgttcatagcggctatacttctgatctctgctgaggttgcacccaatgaatacgaaaattttaacaaaaaagatgggaagcatgctccaaatgggttatatgatagcaaatggggttacggtggttggggtggtccttggtatggcggctggggtggcccttattatggtggcggctggggtggcccttattatggcggtggttggggcggtccctggcgtggtggtggcggtggtggctggggaggttggcgtcgacctaatggcaaccctcacaactaagaagaaaacttgctaaagcttctttacgggtttaggttttcgcaatatataaaacttcatgagaagtgtacttggaataaa

SEQ ID NO: 11642 - DNA, 333 bp, Glycine max
ggaagccacaatcaagagcttgggcacagaataaacatgattgtgaaaagaggaaaagggatgctgataatgatgatactgatgatcgctaactagcacatgctattgctgatacaatgtgatgacagcaaagatagggtcatttgcttcagggagagcatagacttctaagcgaatcactgcttgtgatgtcttcttctgctgggtaaggatcaaacacatgagataattctgttaatgtgtggttaatactcatggtgatatttgtaagcaacctttgcttgttattgctataaatgggttaggatccatcaactacaagatgtgttaagg

SEQ ID NO: 11643 - DNA, 350 bp, Glycine max
cagagatgttaaggatgctagatctgcagcaaaggtgcttactgaagaagcaaagaacaggaaaagctcagatgatatctcttgcgttgttgtgaaatttcagtgatcagtaaactcacatagtatatttttatctacgaacttgaaagtgtaacatatactttagtgtaatgttgataccttttaggtgttattatgtcatgccattcagtgtgtgatatttaatcttctttaatttcatacaaatgaaactgctgagaacgtgttgtttgatgtaccaatgttcaaaaggatttagttttggattgtgtagaccaaaataattcgtatgaatgcaaggaagtttggtc

SEQ ID NO: 11644 - DNA, 346 bp, Glycine max
gaaggaccttgtccctttaatttcagcagttatattgaatgatagctcggtattgaatgggacccataaaaatatgcttatagacttctacaaactcatgcaaccttgtagaattgaatatgtattttgactttgtggtattaattggtgttgaagtcctctagtcaacatagaatcagaactgaggaattccttatttaaagaactcaattatgaacttattgtgaaacctccaggggttgcttgtcattcttttattgctgcttttaggtttctgaagagctcttggaaggcaaggagttggagttttacaaatgggaaggagatgtacctgacttgttgaaag

SEQ ID NO: 11645 - DNA, 432 bp, Glycine max
  modified_base (393)..(393): a, c, g, t, unknown, or other
cccacgcgtccgatggatttctctaaatttggtgggatgggtgatgcaatggatgacattgatgagagtgacgatgaagagcaagaagtgtcaaagcctgttgaacaagatgcaggcgaggggtcgaccgagaaaaaagaggctgctccaagcacataatgttgttgcaatcaagacgctaccctagaatatgtgcatgaaaattctcgagtgaaattttctctatccttaccattaattggtagttttttaagtagagacgttcatgtgtctctcccgtgttggctagacttttagcacttattattttaccaccaaaaaaaatctcctttagaatattgtataattgagatattttcatgcttgaatggcggtatccggatttctacattnttatgtgttatgtatgttttgaacttgtttggatggatt

SEQ ID NO: 11646 - DNA, 422 bp, Glycine max
gcagcctcatccattttcctaaatggctcaaagacatcaattaaaaaaccccccatgtggggatcaaccaaagtcggtccaactcatttctttggatatgtgtgtgtgatagaccatcctgatcgaccacatattaatctcgtactcaaagtcctaatgccaaacaacacccgactaatgacttcatgtcgcctcgctggcataactcatgttgtctttaagctctttcatcttcatgaacgtcgtccacacaacatcctcgtgaatgtcatgggcaattactacctcggatgctgcgatgctgccttctcctataagaggatagaccacgaatgtatgtagatggaagacacatcctattcaccatactcacccaaaacaagcactgtatctctttttagatactctacccaccattgaaa

SEQ ID NO: 11647 - DNA, 410 bp, Glycine max
  modified_base (350)..(351): a, c, g, t, unknown, or other
caactcatctttatataacctaattgcaaagatgaataccaagcccgttttcttcttgtgcttcctctgtgcactgcttctcatctctgttgtggcaactgagccatccaaagatgagacacaagcagaagaaccaaagacacagccagatgcctggggaagaggtggaagtggggggcatgatggaaggaggacacggtggaggacatggcggaggatgcagatgctgcggtcgaaagggctgcaaatgttgctgaagtaaaaatcacaaatatatgaactgaacacactcatatacttgagtgtactccatgtaataactagtatatatatttctaaaaaaaaaaaannaaaaaaaaaaattaaaaaaaaaaaaaaaaaaaaaaaaaaaaaaagggccgcccgtttaa

SEQ ID NO: 11648 - DNA, 388 bp, Glycine max
cccacgcgtccgaccacgcgtacgtaccctcgccctccacaaggccctcatgttcttgagtggccagacgatcgctgaagttaccgaattggtggacgaatacggcatagtcgttggcgacgaatgcaacgtttccatttattcgactaattacccattttagaaaatttcctcggtggataagtttgtggaatgactagtgaattgtctaatcttgctattatgattcttgaagtaagttaagtatacagtttcatgaatataaatgacggttatgtgaactgaacacactcatatacttgagtgtactccatgtaataactagtatatatatatctaaaagaaaatatatatttagttattttaatatattaaatgattaatacat

SEQ ID NO: 11649 - DNA, 417 bp, Glycine max
atgagttggtcgagtatagcaacatgggattttgcatatgagaggtaacaggttcgaagtcccactcatatgcttggggagaaaggtcaaatcacatgtttaaatttctattcattgtccttactttcttggatccctgtttgtgaagaagcatcagggtcttcctttctttatttctttcgctgatcgaataaaatttccccatttgaaaccccacaagagtgcaattgacaaatagccacacagaaagatagggttttgagatattgcgaacgatgttgagactgttggatgcacactgtcaccttcaggacccgagaatcttaagcaaggcaccccatctcatcaaaaccgcgcaagacaccggcgtcgcgtacttcgccgttaacggagtttccgaacaagactggcactccg

SEQ ID NO: 11650 - DNA, 427 bp, Glycine max
  modified_base (364)..(364): a, c, g, t, unknown, or other
cccacgcgtccgcaagtttactgttatttgatactcatttttattgatttgttttccaatggaaaataaagtcatgtttttattgtggtatcaactatcaaggcaagttactagtgtgtactctgtactctttaatactttcgattgtgccatgtttttagaagtcatatagttgttacttgctacttgtcaattacctgtttggatataattttttccataacatatagggcttcattattctaattcgtacaacctattaaatgttatgtgccacattttcttattttaagttcttaaattttaacctattatgtgtgcatatacaatcttgtgctttgcagtcaatttccattcgagattntgatcatcatgccacccgcattgttggaaagtatgaggttggattaacctaaaatttttaata

SEQ ID NO: 11651 - DNA, 312 bp, Glycine max
ctcgaatccacagagtgagactcatcgtgtgaacaacgataacggcatgtttgagcgtgcttgagaaatttgagcggccatggacgaaaccgccgtaacgacgaagcctgattggctcaacaaccgcgcgagggtcgccggagagagaaccgaagaatttttctgtggcggcgacgacgaagaggaatgcgacgacgaggcttgggacatgttgactcggagcttctggcaggcgcagactgtgctggacgagaaccgtgcgctgatcgacgaagtgaacagcaaccacgagtcgaagattcctgacaacat

SEQ ID NO: 11652 - DNA, 416 bp, Glycine max
cccacgcgtccgcccacgcgtccgcccacgcgtccgggagaaagagaaagaatctaaggggaagaacaagatcttcaaaatactgccaaaagcagcggctgcagcagtgagcatgacattccaaaaccctcccttcagcccaggcagggatcacaagttcaaacaccatggcggcaaagggttcttctctggccctatgattcccgttgaagccagaagaaaatcaaaggatggttgtgttgaaactcaagaacccacttcccccaaaatctcctgcatgggacagatcaagcacaagaggaagaaaaaccaaatcaaaaaagcggcaaagaccatgtccatgcctacagaagaaaggaaacaagcttccaagtttcaaaggatgatgtcgttccactcggggaaaccaaaacgac

SEQ ID NO: 11653 - DNA, 419 bp, Glycine max
gttgtggttgtcaaagggttgtgtgacggtgaattgggtagaagaagatgagaggggtgaagagagcagtatttgtaggcagagccctaagaagcaattccaacaccgccgtgtacggtgttggtgccacccttcatcgagatcgaatggctccccatggctgcttaaccccatcaaatccaaatccttctgtttctgttactgggtttagatacctttctgcttctgctgctgccacgtctcttgcccaagacgctcagaccaaggccttcaaacccaaggaacttgtcctctttcagtaccaggcctgtccattctgcaacaaggttgcagcgtttctggactattatgatattccattcaaagtggttgaggtgaatcccataaacaagaaggagatcaaatggtccgactacaag

SEQ ID NO: 11654 - DNA, 265 bp, Glycine max
cccacgcgttcgcccacgcgtccgaaaaaaaaaaaaaaaaaaaaaaaaaaaaaaaaaaagaaaaaagaaaaaaaaaaaaaataaaaaaaaaaaaaaaaaaaaaaaaaaaaaaaaaaaaaaaaaaaaaataaaaaaaaaaaaaaaaaaataaaaaaaaataaaaaaaaataaactttataaaaaaaaaataaaaaaataaaaataataaaaaaaaaaaaaaaaaaaaaaaaatgtgaattttttaaaaattaaaaaatttttaaaa

SEQ ID NO: 11655 - DNA, 422 bp, Glycine max
ggtaattgaccttacaggatcaaaaaattggattggaaaactaacagtacttgggcgaagtccattggcacattggtatcaatcgctggagccttaataattactctgtacaaaggccaagcagtcataaagaatcatccatcaaataaattgttccccaaaaaacatgtttcatctgaacaatttgactgggtattaggggcagtgttgcttgcgggtcatagctttgttctctcattgttgttcatagttcagacatggataatcagaaattaccctacagagcttgtgataatgctcactcgcagtacattagttgctatgctatctatcccaccttcactgatttcggtaacagatccaaaagctttgagattaggatttgatgtgaatttgatagctattgcattccaagccatttt

SEQ ID NO: 11656 - DNA, 410 bp, Glycine max
cggacgcgtgggttcgaaggcagcaccgcacttgttctgctccgccgcgattgcaatggtttccactcccgccgctgatgggtttctcaaaggaacagcttcttgcgcggttaaaggagcttcaggttccattttcccagtatgagcatcctgttgttttgaccgtcgacgctcaggctcaatatgttggacatttggggggtggcctcagcaagaattcgtttctcaaggacaagaaaagcaggttgtatattgcttctgctttagctggtaccaaagtagatctcaaagtgttatctcagcggcttggtttgggaaaaggtggtctcagaatggcacctgaggaggctttaggtgaagtacttcaggtacccttgggttgtgtcactccatttgcacttgtgaatgaa

SEQ ID NO: 11657 - DNA, 357 bp, Glycine max
ccggaaccttccctctactgtactacatcatgtcgcgccttccttccctcactcccaggcccgccgtcccggcacccttcgattccgaccaagtccacatcgaacagccaccggagattgtgggccaaatgccgcacctggcggacccggagctggtggcctctatgggccgtgccgcggcacatgtgacgcatgcccgctcggtcctcaccctcatcggggagcgacccacgcacgaggaggtcgacaatgcccgggcaaagttggccgacgtcgaggcccagctctcccgagaactggaagagatcgtgctgcaagcccggcccgcggagatcgagatccaggggtggcgggccc

SEQ ID NO: 11658 - DNA, 394 bp, Glycine max
gtggcgctgaaaccgacttcaactatgactcagagaccgggttgacaaccttctccattgcagttgctccagaggagatgtacagatggtcaatagagatccaagtttgagtcctttttaagacttggtgtttgatgcattgttgtatcaggagaagggttttgttgtaattaagcattgagggaattgttggagtcaggcagagagagaggggggaggtttgttgtaagacacctagtattagtatcatgtagtggagaaaaagggttgttgatcctaatagctagacaaggcatgttgtagtagtcatggggtgtgggagtccttttgttgtaacatgtaatttggtttagacttgtagtatggcatcaattagattgattaagagagaata

SEQ ID NO: 11659 - DNA, 433 bp, Glycine max
aacggtgatgagtccttggccttcattttggagttgtctcacatatctccatcccaagaacaaatcttggccactgctccatttgtcggagcagaacaggacaccgccgcctccgcctcccatgacattgacatgctgtcgttgccggactccgtccccgaagacgtattccacacgccaccggaggagtcctcgcttccctcctcctcctccgacaaccattgcgtcgttaattacgccgtcgtcgacgtggatgatgtgaatgctgggaccgatttggtgaaggattctgagttagggttttcggatgttcacatggaagaggttaacggagaggacatgggaaatttggaaacccttgttggggatgtgagcattaaggtgtctgaatctgctgaagtaagcaagtcaagtgatgtggctgcggaatccc

SEQ ID NO: 11660 - DNA, 417 bp, Glycine max
cccacgcgtccgcatctttctcttcaaaatcttcttctcttttccttttattctttttggttcttgcttcatgcaggcgattccggctccatgcccgcaagttgctgaggacgagtttttaccgcagcacattgacctcaggtatttccttcttttttcctttctttttcttgatatctattttctttaagcttccttttctctgcaagtattttccgctatggccaaagaatttgtgaatggctttgttcatcaaaacggcatcgctgtcatatcccgcaatccccccaaaggcgattccggctccatgcccgcagttgttgaagacgagtttttaccgcagcacatggacctcaggtatttcctttctttttcccttgtttttcttgatatctaaatttttcaaagcttcctttc

SEQ ID NO: 11661 - DNA, 345 bp, Glycine max
  modified_base (9)..(9): a, c, g, t, unknown, or other
  modified_base (61)..(61): a, c, g, t, unknown, or other
ccacgcgtncggccaaattacccacacgcaaacgacaacaaccgcgcgcgtttcacacctncatagctcggagtagcatacgcagcgtcgttgactcgcaactcgtaacttggcctcgcgcgccgatggcgtcggtccccagcaccgtcgctccccgcaccttcctgccgtcgattcccaagccgagagctcctcttcacgccgcgaaatccgtcgccagcgccgcgcgcaactttccgagactttcgcacaacctcattctctccggaaacaaacgcgcggtggcggtgaactcggcgtcggaggagttcgacgtgatatcggtgcagagcgaggacattaccg

SEQ ID NO: 11662 - DNA, 373 bp, Glycine max
atttattatctaggttcttaaattcattttatttgaaaactagagttgatgaaaatatataatactacatagcctatgaaaatataatattacatagcctgtgaaaattttaaaaatcaacttgtttttgttacatagcctgtgaaaatatgatattacatagcttgtgaaacttcttattgactatgtcccaacttgtcatttcaattgttgatttgtaactgctatttattatgttctttttctccagtttgctttgatgcaagtgtgaatgtgaagacatttataagactaatacttgataagttgtaaatcttggggtttgttggcatttcattagtgaatcagtgagtctatgcatgactatgaattt

SEQ ID NO: 11663 - DNA, 327 bp, Glycine max
  modified_base (296)..(296): a, c, g, t, unknown, or other
  modified_base (306)..(306): a, c, g, t, unknown, or other
  modified_base (312)..(312): a, c, g, t, unknown, or other
ctaaaaatcaaaacccttttcattgcaacaataacaaatcatcaaacccctctctctctctctctcgttttaaaccattttcctctgcccatggcggctgtcccagcatcgcggaccgatccaccaccggcaatggtgcagccgccgctgctcgtctctgaccccttcgccaaggacgccattctcgcctggttccacggcgagttcgccgccgccaacgccatcatcgacgccctctgcggccacctcgcgcatctcgccgccgcatcctcagactacgacgccgctttcgccgncatccaccgncgccgnctcaactggatcccc

SEQ ID NO: 11664 - DNA, 378 bp, Glycine max
  modified_base (278)..(278): a, c, g, t, unknown, or other
aagcctgctagtgaaagcacttcaaaagccaaaagttgcttcaaaaatcagattccactagtcactcatctggtaaccgtcatcaggcagctgttgagatgcaacggcagaagcttaaaaagatgatggacgagcttaatgaggagggagatggtcgtgcacccattgtcaagcttggggatgcctcaatggcatctccattcactgctaagcatgcatctgttgctcccaccactgatataattcgtcaaggtaggagtaccctagtgacaaccctncagatgtttaaaattctgggtctcaattgtcttgctactgcaatatgtgtgagtgttatgtatctaaaaggtgtcaagctaggtgacatacaagccacaa

SEQ ID NO: 11665 - DNA, 385 bp, Glycine max
ccaacgcgtccgcaactctacaccagctgacgcgtaaactaagattcaacgtctgcgctcttcaggcaccataccatagatccttcattctctgcaacgatcaaacccaaaaaacactgcacctcttcttctgggtacgccactttctcttctttttaatttttttttgttcttctttttcttcaacccctctattcgcaaaggaagcaacggaatcgattctgttcagttttcctcgttttgagtttaaattcacagtattttgaggaaacaaattaaagggtaatcgctcgcttaatccaccgagctcaattcccacatccccacataaaataatcaacaaaatcagatttggtgaagaagagagtgtgatttgatgattatg

SEQ ID NO: 11666 - DNA, 429 bp, Glycine max
cccacgcgtccgtaaactaattgcaaagatgaataccaagccctttttctccttgtgcgtactctgcgcactgcttctcatctgtgttgtggcaactgagccatccaaagatgcgacacaagaagaaccaaagacacggccagatgcctggagaagtggtggaagtggaggacatggtggaagtgggggacatggtggaagcgggggacacggtggaggctggggacatggtggaggctggggacatggcggtggacatggcggaagatgcaaatgctgcggtcgaaagggctgcaaatggtgcctgagtaaaaaaaccccaaccttgaactgagaccccccttacgtgtgtactccatgtaataagtatagtatgtagaattaagaattaaaagcatggaatctatatccgtgctagggctgtcatag

SEQ ID NO: 11667 - DNA, 338 bp, Glycine max
tcggaccaagccttccgttcgatttcgttccttaccctcgggttgatctgtgagaggggattgatagccctctctgtctctggtgctgcaattcagatcgctggcaactatttgttatacagaccatctgtcttaacatggaagcattgcttgcttgacggacacctttgtctcaaaggagttggaattttcgggtctgtctgcggattggagatttacagagcgcccttgcactacctgtttgatctcatcaccatgagacatactgatactatagatcgagctacacaacctaagatcaggttcttaacctgaacgatacaaataggttctgcaca

SEQ ID NO: 11668 - DNA, 435 bp, Glycine max
  modified_base (238)..(238): a, c, g, t, unknown, or other
gttaactttgggttgccaaaccttccaacaggttttaaagccatgggcatagtagttactaccggtcctaaggaacctgaagttgaaaaagttagatgcgtgcaaaatgatctaacagaaactttgtgagacttttgatctgttactgactgtaaagtcaaaatttgcaaaagattcatttcaggtttggaacacacaaccctgtgatagaggtatgttagctagaggtgtagatgtngggacattcttctgtggcagtacctattttgattctgaacaagtggtggatatcatgtgcctggagaatcttgaatctttcctggattccaatgccaattagaacccgattcatgcacttattcaggatttatggtcccactggatactttcattctgatgagaagtacttgccatcatcagtgcaatggtttttta

SEQ ID NO: 11669 - DNA, 425 bp, Glycine max
cttgctggtcttagggtgaacttttgatgccataaaaaaccatcccatattagttctatttctctctctgcctctccctttgtttcaagttccctctgcttattctgcacaggaacgatgtctgagaaaaccacagctgagaaccttattgaaaaccttgtggacacatttgttgataagaaaaaatctgtatcattctttgaggatgataagtcagactcagtgagttctcagatcaatagactgtttggacgccagaaacctgtgcaccatgttttaaggggtggaaaatctgcggatgtcttgctatggaggaacaagaagatttctgctagtgttttaacatgtgcaacgattgcatgggtgcttttcgaatggcttaattaccactttcttactatcttatgccttgggttgggtcttgt

SEQ ID NO: 11670 - DNA, 401 bp, Glycine max
gaaactcaactttgagtagataatactgctggatgtctcgtctctaattattgtatttggaaaatagttttgagttgaggatctaatcattaccagatttaatatacttggcaaatggggtctgaaggtcctacgacaccgacaacaacaattcatgtgacaggatttaagaaattccatggagtttcagagaatccaacagaaacaattgccaataatttgacggagtacatgaataagaagggtttgccaaagggtttagttattgggagctgcagcattcttgagactgctggtcaaggagcacttgttccactgtaccagagattacaatccgccgttattgccaaggacactgaatcttcaaattccaatagaattatttggctgcattttggggt

SEQ ID NO: 11671 - DNA, 391 bp, Glycine max
caaagtttagcacatctttacgcagtttatcacaacctatgtcacttggggagatagcaaggacttgggatgtttgtgctcgccgtgttatttctgagcatgcacaacagagtgggggaggaagcttcagctctaagtatggaacttgggagaattgcttgaccaccaactaatgttccttattgttccatgcagacctttttgtttcggcccaaacatactgtttcggttaatataagtaatttattggatgtagataaaagcctagttatgaagtagcagaccatggagtttgtcaatttctatatattgtttttgcattttgcaagggaataatcattattaagccgtaagggtgaaattatataaagcataaccacatattaagtgg

SEQ ID NO: 11672 - DNA, 431 bp, Glycine max
tcggccacgcgtacgcttttctatcattaccttctctctctatatatactgccctttctttgtgcgtctttggtaatcgtccgttcctctctctttctctgccttgtcttctcctcttttgttccgcttaagggccttctttgatcgatttttttcgctttgattcttatattgctttggatagaaaaaaggtgtgaccttttggctattgtattccttgtcttgtctaatttttcgtggtgatttttgggacaagctaacggcggtgctgaaagtcacagcgctttgcccatgcaagggccttctttgctcgggtttttccctctttggttattatattgctttgtacgggaaaaaggtgtaacctttgtctgattccgacgaggttccacgcataaaaggctaacgacgatgctgaaggtcacaacgct

SEQ ID NO: 11673 - DNA, 434 bp, Glycine max
gccacgcgtccggaccagcttgcgaagctggtttgcaattgtatggggggttcagctgctgtatcgtaagatgatctttttgctatctggagggagcgcattaatgatctacgagattgcttaggatctgttgttgtaccaattggcagtctatctactggactttgcaggcatcgtgctgtattattcaaagtactagctgacaccattgatttgccttgtcgaattgctaagggctgtaaatattgttcaagagatgatgcctcctcatgtcttgttcgatttggacttgacagggaatacatggttgatcttattgggaagccgagttgcttatgcaagcctgattacatggcccaacggttgattaacttaagaaatgcctaatggctactcaaaggtcatatgggttgagcatgtacaagcggatgaca

SEQ ID NO: 11674 - DNA, 407 bp, Glycine max
  modified_base (304)..(304): a, c, g, t, unknown, or other
  modified_base (333)..(333): a, c, g, t, unknown, or other
gatcaaaagaagatagattatcggttaaatagatggtttgaaaaaccttattctacgcgacccttgtggattagcataacagagacatccatcctcagtcattcgcaatggcccgacgactccttccactcacctccctccgccacctctccatcgccgcctcgcgtcgcctcctctcctctgcactccccgtcgctccccgcccctatccgcccctcaccgcccgcttcgccgtcgtccggtgcctctgcaaccgccccggagactcggcgtactcgcccctgaacacgggaaagcccacctncatcttgtcgtcgatcacggagcgccctncgacggacatggcgcccctgttcccgggctgcgactaccatcactggctcgtcgtcattcacaagcccggcggc

SEQ ID NO: 11675 - DNA, 433 bp, Glycine max
gaaagaaggaaggcgaagcccacaaagaaagaaaacaatagtttcagaagcagaaagaggttttccgttccgaaacgatgtcctccatggccatcaccaccagagacagagatcgagagcttctcatccccgtcgccgacacccccgccggcgatgccgccgtctccccttcccccaagccatcgtcgtcggcgtcgtccccgcatcattccggacgcgagactttttacaaagttgttagaagctgggcatcaaaaaagtttatgactggatggtacgctattctttcttctgtccaattatcttgttgtcaagtatggatatataatacctattgtgtattcatacacatgatcttgtttgtttcctgaatgaatttgccctttgtatgccttatattctttgaagtgttggtttattttcttaatttttt

SEQ ID NO: 11676 - DNA, 77 bp, Glycine max
aaaaaaaaaaaaaaaaaaaaaaaaaaaaaagacaaacaatataaaaaaaaacaagcaaacggacacatgcatacaaa

SEQ ID NO: 11677 - DNA, 334 bp, Glycine max
tcgttgaaatttcctggcttgcggtagcaactccttttgcaactcaacagtttatttatcggatgaattttttgaattttatagaatttagttagatgacaattcgcaaaagggatcttaaaatagcctaccaaggctatatgatgtagaagttggtcatgaagcaagttttctgcttcagtaactcattgattacatttttttttcctgatctattttctttcttatatgttatattgagttgtaagtaggaactttccattgactgaattacaccattgtagtggggatatagtattcaatataatgagactggagatgtaataattttatt

SEQ ID NO: 11678 - DNA, 244 bp, Glycine max
  modified_base (193)..(193): a, c, g, t, unknown, or other
gagatctcgacggtggctttccatccgcctccttccaatctcctcctcctcctcctccgggtcagacgacggcgtttcgagatctgacatctctctctcgtaacagaatactggacagatatggaagtcaacaattggcataaggagcttaaatatgatgagtgggtaccaatcactgtatctggtgcacgtncagctgctcgctacaagcatgctgcagcagtaagtgatgaaaaattataca

SEQ ID NO: 11679 - DNA, 337 bp, Glycine max
tcgaaaatatgttggaaattatgacttcccggggtcacttgaggattatgttcatcgcatggggcggacagggagggctggtgcaaaaggaactgcgtacacatacttcacaggtgctaatgccagattcgctaaggaacttatagccatactcgaagaagctggacagatagtgagtactgaattaacagccatggggcgtggtgcaccacctccaccttcaggtccgcgaggcttacaagaccgctggaggggttatggcagttctcgtacatggagctgatgggacggtgcagacacaccaacttgattgacggaggaaactcccaagaattat

SEQ ID NO: 11680 - DNA, 400 bp, Glycine max
gaaaaccgaaaccctaatcacgactccgagaaccctaaattcgcccaatccaaagtcccgaacctctaaaatcaaaccatgaaaagcgtagaggtggcgaagacggtgctcgaggtcgccgacgtggcttggaccgccgttgaacacacccaccatctccgccaccgcagtcatcccgtccccgctgcccccgcagccgatgtctgcccatccgaccaagatttggagtctctgcgatccgaaaatcgacgtctcaggaacttactcgaccagaatctgaaattgctgcaaaacctctctgaggcgacttgcttcgataattgccctcccgatttgaatgaccggttagttgctaccatgaggtctgatgagtacttgactcggctcaagtaccttcaac

SEQ ID NO: 11681 - DNA, 322 bp, Glycine max
cccacgcgttcgcctaggaggtggtgttgccggtgccaaccttgcaaaaactatacagggttaagccaacgtcacccttattgatccgaaggaatattttgagattacatgggcaagtttgatgggattggttgagccaacttttgctgaaaggatagtgatcaaccatagagagtacttcaaaaagggtaaccttgttgaatccagtgctgtcaacataactgaaactgcaatggtgactgaagatggccagcagattgcctatgactatcttgttattgccactggacacacagaacccattcccaaaaccaggaatgaa

SEQ ID NO: 11682 - DNA, 274 bp, Glycine max
acggtgacaaaacccataaatcctctcaccaaataaacctcaatttattgcattgcataatgccatgtcaatgaagttgtatgcttccctcacccttacggtgtggcttttcatggccacattttcgcgagcccaatacgttattgacacaaatggcgaacccgttgacaatgatgatgagtattacatcaggccagccataaccgacaacggagggcgtttcaccttgatcaaccgaaacgggtcgtgccctctctacgtgggtcttgaaaac

SEQ ID NO: 11683 - DNA, 364 bp, Glycine max
tcgcccactcgtccgatgactcgtgtgaacaaataaacctaaatttattgcattgcataatgccatgtcaatgaagatgtatgcttacctcaccctatacagagtggcttttcatggccacattatacaagagcccaataccttattgacacacatggttaacccgttgacaatgaagatgagtattacatcatgccagccataacctacaacggatggcccttcactttaatcaaccgaaacgggtaaaaccctgtctacccgatcttaaaaacaccgatacacaactcggttatccaatgagatttacccattaaggggtcaacgctcaagatgatgacataaaggtgaacagccactttgg

SEQ ID NO: 11684 - DNA, 417 bp, Glycine max
gtttaatattttcacagttcagtatgaaaaatcccctttttatttaatgttctatcttcagttgcctgatgctgctctatctttttctctcacctcctcctaactttctgccttccctcattctcggtctcacaaacttaaagtaatatccagaaaggaatgaagaaaacctgggctcttcttcttatgtgttttttcttgtttgaagatggtgtgctttaaactagaactaatgagatatatcctgtaaatgttgatcacactctattggtttaaactaattataataaccttctagaaattgctaatttgtttctatggttcttatctgtggaataagctcctcttctcaccctttttattcaacattgttgcagggaactctctcacattgttctcgtccattatcgacaagtg

SEQ ID NO: 11685 - DNA, 416 bp, Glycine max
caaagttgtgattttgtgaactgggtatgctcaaagttgagattttgtgaactgcggatgctcaaagttgtgattttgtgaactgggtatgcggctgtgttgaacttgacttgatcctgttttagggtgtttcaccgtgttattttgatcaaattattgtttttgaaattgtgttgttgttgatttttggttgacttgtttgatactgtaattggatgtggctgaggaaaccggttttggggattgtttgtgtctatctgttttaatttagttatagattttgttctctctgtttcttcatgtagcatttggtgtttttttttttttttaatttggtttatgatgttttggccttaagaagttgcctttagaattaagctcaatatttctggacgaatctcttgcatgttcttgag

SEQ ID NO: 11686 - DNA, 355 bp, Glycine max
tcgcgactttgaagccctatctgccgcaacgcgacgcgacttccttcgacgacgcgagccgagtgctcataaaaggaatagtagtaagcacattcatctcccctagatatgaactcagttgcaaggcgtttatcaagattattcagacattcaggtttcacgcctgaacccttcaataatggccatcatcaaatgcagaagcttcagcaatgcagaggcataagagtgaaggtcataggtgggaacttggaagcagcattgggattgatgcagcgtaagatgcaatcaagtgggattgagaggatgataaagcaagagcaaagattccatatcaaaaactctgagaagcgtgttt

SEQ ID NO: 11687 - DNA, 342 bp, Glycine max
gtaatcctcacttgatgatactactagtcctgagatgataacatcaaacttggcaatggcaacgaagcttccttataatatatctttctctctctctttctttcttccttccctctcttatattctcttcttgtctttacatcacaccctctttccccctttgccaaagctctgatcttttccctctccaatccccgtttctccacttttcttgatcagggtgcctcgttttctcagtttctgaatcattttttgttctgggcctctctccacttcggaaaaagatctgatttttcgccccctttttttcgattcgaatccctcgagaaccctattttctcg

SEQ ID NO: 11688 - DNA, 405 bp, Glycine max
ggaaaagcttcagtctctgaccatggcggatggaagcagcggggaaattctaatgctggaagccccagcgtcttacggtaggtctagcgattccgacgcggaaataatcgacgcattgccttatatcgacgacgactacgcagaccccatagtcaaactggaggttgaccgtctcgtggaggatgagatgcgtcgcagcaccaagaagcccaccgatttcctcaatgatttccctcctcttcccaactccattttccagaactacccaatgattgccagagagtacgaacgtgtgagagctggaaggccttccgttgctcttgatagatcgcgctacgatttggaaatgccgtcgcccaataaaaggaacgacgaaactgcttggaagcaagctctttatagagc

SEQ ID NO: 11689 - DNA, 334 bp, Glycine max
cccacgcgtccggttccgagttccctctccgctatctgtgatcctacactgcaccctgggcgctcctgttcgaaccttgccgccgtcatcgacgagaaggaagaaatttgaatttgaagaaagatgggagagaggaaggtgttgaacaagtattacccaccggactttgatccgtcgaagcttcccagagcaagaaggccaaagaaccagcagatcaaggtccgcatgatgcttccaatgagcattcgatgcaacacttgtggtaattacatctacaaaggaaccaagttcaattccagaaaggaagatgttattggcgagacatatctgggaa

SEQ ID NO: 11690 - DNA, 343 bp, Glycine max
tggtactttatctaatgcggatgagatgctagttattaccttcatactgtcgatgctgtgtacttctggtcagtcgtattcgcaactaatttagagtactgatatatggatattattagaaacatggtattaatgacactgttggacactgaccatccatctatactttatgccgaaatggttttaagcctatagtgccgctgaacgtgtataccggaggactggttaagctgactgtgagcattattaggctcattgatgtaactagacttacacttgatcgattgtcagttgatcattggatgaacttattgcacatacatatatgggtaaccaaatccta

SEQ ID NO: 11691 - DNA, 270 bp, Glycine max
aaaagacgtggtggatatggcggcggacgaggtggctatggtggcgggcgtggtggctagggcggcgggcgtggtggcgggcgtggtggctatggtcctaatgaacataacgaggctggggttgatgctaaccctcacaactaagaaggcaactttctaaagcttatatatgggtttaagttatcgcaataaataaaacttcatgagaaggttagttgtaatagaagtggaaaactttgtaaaggaataatacctttcatgaatttcctt

SEQ ID NO: 11692 - DNA, 440 bp, Glycine max
  modified_base (388)..(388): a, c, g, t, unknown, or other
cccacgcgtccgaattcaactccctcctccgccgcaaaaccctaatattcccgcgctggggcagtttcctactccggcgccggtggccgtgcaccacacgccggtgacgctcgatttcacgaagccgcacaacgcgcttctgagctccaacgccaaatccgtcgagctcgagttctcgaaggaaaccttcagcgtttcctctaactcctctttcatgtcctccgcgatcaccggcgacggcagcgtctccaatgggaagattttcctcgcgccaccggcgacctccgccggaaaacgtccggcgttcaagaagcggtgccacgaacaccgcgaacacttcgacgatgtctccggcaacaagcagtgccactgcgttaagcgaaggaanaatagggtgaagagcactgtgagagtgccggcgattagttcaaaagtcggcg

SEQ ID NO: 11693 - DNA, 341 bp, Glycine max
accgtacgcgtacgcgaaatggaagataggatggacatgggcgcacattctggaaaaggtggaccggccagcctggaccctcgacacgctacgtgaccacatctgcaggcgatcgaacacttactgcgacttcatcaacctgatctgcacccgcataattctcatagacgacaccgttccgacgcaaacccttgcccaactcggcgtcaaaagcaacgccaagaccctcgccactggcgcctccactgctcagcacggacactccttcctagtccaggaagaacgctgctacagactcgcgcgtatcagggcggctgccaatgcaatggcagaaaggcatg

SEQ ID NO: 11694 - DNA, 386 bp, Glycine max
ccagactccacctgctcacctggatacgtgttttgctttcttttcaacaacaacacatgttttgctttttttccaaaacagcaacatgtcttctttttcttaaagcaccaaaacagctggtgccggagcaagccaaaagccatccctctaaattaggttttccctttcttcttcttcttcttcttattaccctaaccctaaccttagctattcgaattccactcctcttcgcgaaatcatggcgacgactttggtgagctccgcgggtgggatgcttgcgatgctggacacgctctctccaacctcaacaacttagttttttattatggtctattgtcgattctaaaatcctagctgatgaaactgatgacaacaattgatgtata

SEQ ID NO: 11695 - DNA, 448 bp, Glycine max
cccacgcgtccgaacacttagaaaaaaagttttcaaattacttgaagatgaataagtcgtctaatttcttgaagaagatgaataagtttttaataaaatagtattattatctgtttattttcgtattacttattttcttctaaattcgctcttgcagtcttgtgtcgcgagtcgcaatcccattcgatcttgaagtctgcaaccgccggacaccgtcgatctacaaccgccggacgtcgacgtcgttgcggctctgtgttcgagcattcaatttcattggaagttcaaaaggacatgatttccatcaatacagcctccatattgggttgaaaattgagcaaattctgtttgagtgtacaaaaccagccttgttgggtttcagcattaaatacagcatctacattccttttatttcttctatcactcccaaattctggcatgggaaaag

SEQ ID NO: 11696 - DNA, 451 bp, Glycine max
  modified_base (231)..(231): a, c, g, t, unknown, or other
cgaagccccaaaagaggagagaaagaagaagaaacactcgagaaatttctcacataggggtgggatttttcgagcaatcttctctctccgccacttcacctcacgcgatctggttccgatcgcacacgttttaatgatcgtcgtcttccgcagcctctgattcggctctgatctctctcgccgcacctctccgccggaaccatgatctccgcgcagggcgaccaccaccgncaccaccaccactaccaccaccagccgcagcttcccggctccgccgacacctctcggcagcagttcaccgcggatcgcgtggagcccttctccgtcaagcaggaacccgcgtcgctcactcttctgccgttacgcggtcatgattctagtgaagttgatgaagatgtgtacttgtctcttgcacatcaaatgtacaagactggcgattataagcaagccc

SEQ ID NO: 11697 - DNA, 423 bp, Glycine max
tcgggaagatttcattgctctcatggaagctgggggagaggagcagaagttgaatgacttgagatgtggcttttgagatgtatgacactgaaaggtgtgggtttataacccctaagagcttgaaaaagatgcttaagaagatgggtgagtccaaatccattgatgagtgcaaatctatgatcaaacagtttgatttgaatggggatggtgtcctaagctttgaagaattcagaattatgatgcagtgaggcatgtatatataaatgttgattctgtatagtgtgtatttgaaatttgattgatttgtttgcacatcctatgtataacactataactactgatagtactattttagcagcttctcgatagtgatcaaaataactatcggattttgccccaactgtgctatttcaataattattc

SEQ ID NO: 11698 - DNA, 374 bp, Glycine max
cggacgcgtgggtatatttacaagttgaataccattttatcacataaggctgcgggagtctttcaattgcagtcacagttggctcaatttcagagacgtttaaacgagtataatgttgtcgtaacttctggtaattgatggtggtaatgagcatgactgatgtgtcgtggatggtaggtattgcatgactgatgcgttgatgctatcaagattattcgtgggttctggagtgcagaagacatagcaatcatatccatctttgctctacactcaattcagcagattgcttatacaagccactgttgtgacttgaactgaattgaatcacatattcatatgcatgttcactcgctcatttgacatactattatcac

SEQ ID NO: 11699 - DNA, 198 bp, Glycine max
ttgactcgttcgtacacttacacgttgaacaccattttatcactaacggcttcgggaaggtttacttagccagtacagttcgctcaatttcactgacctttaaatgagtctaatgtagtctcaactcgtgctcattgatggaggcaatgaacatgaccgatgtgttctgactcgtggtactgcatgactgatgcattg

SEQ ID NO: 11700 - DNA, 452 bp, Glycine max
gggaatcgagcagaagcatgcactatgatcaaccctctgggcttaatgatgttcaaaatgatgacttgtacaggccagtacacagtagatccatgggcaatatgtcaaccgagttcccagcctgcacatctgggcgtcagaaccaagggtatttggtggatgagttcccacacattgatatcataaatgacctgcttgatgatgaacaaggtattgggaagacggccaaggcaagttcagcattccagtctctgaataatggaccacagttgctgaatcgacagtcacttttcctggggatctgggtgcagatgatgatttgggatcttcaaccagttcttgcaggtttgagcgatcacaaagttaccatcatgaccatagattccaaggaaggtatgacttgtctggtgggcattatgattcactgagggattatattcaaccgatgagta

SEQ ID NO: 11701 - DNA, 371 bp, Glycine max
tcgaccacgcgtacggggtgctgtcagagttcaacattttctgagttcactcactttttcgcgcttggaaccttgcttttctctgcgagcattttccgctatggccgaagaatttgtgaagggctctgttcatcaaaacggcgtcactgtcataaccctcgatcgccccaaagctctcaacgccatgaacctagatatggatgtaaagtataaaagctatcttgatgaatgggaatctgacccaagggtcaaatgcgtactggttgatagcagctcggctcgagccttttgcgctggtatggatattcaaggggttgctgctgaaatacaataggacaaaaacacttctttagtgcagaaggtctcatatt

SEQ ID NO: 11702 - DNA, 299 bp, Glycine max
aaaaaacatacaaaaacaaaaaaaaaaaaaaaaaaaaaaaaacaaaaaataaaaaaaaaaagaaaacttaaaaaacctcaatcccatcttaatacatctaatatactttcacctaaattcaattacttaacatttttataacaacacctaatctatattaaacccttaatttaccacactttattaacttataaaacattctctttatctcacttaatttattttcaccatcataccactttcaccattcttcccaataactaacaaacctcaatccctcaatctaccctaactttacc

SEQ ID NO: 11703 - DNA, 436 bp, Glycine max
atttgaagcccaaggatgattctgatggcttgaaacatatttcattttcaagtcctgaggagattgttggtaattctgatgtcactggcatcaagcatgcgcatgatgaaaaagatgagaaaattgctgttgataaagaacatatttcttctatcttaaagattggttcagtcactattgcccccaaacaagttgaggctaagcaatccgtcagcaatggtaataaagaaccagttgatgttcttacagtaggctcaatgcaggtcaaagttaatgggtttccttcgtcttctggtttcttgaaaggtggcagtaccccatttgatgcaagagcattgcaaccgggaaaaggagatgctggcggtaaaaagggatcacaacgttaaattttgctttgctttgcatttgaggcacatttgattttagtcttcttttg

SEQ ID NO: 11704 - DNA, 345 bp, Glycine max
ggcacacgtgcgttctcattcaaggaatgatagcttgatagtcagcatgaacttggatgacgtgatgtgaagaggcaggtgatgcagctgatccagctgctgacataccaggcgagcctatagacatgacgactgacatgaagactgtgctgaaaatagctctgacttatggtgttgctgcacgaggccttgaccaagggccacacgtgattgcaaaacatactgaacagctttctgctctagcataagactgagaccagcactactatgagaaactcgataatgcactttgtacagagctcaatgctaacctgattacaagtccgagtgcaaagaccattgcaa

SEQ ID NO: 11705 - DNA, 330 bp, Glycine max
ctcgtctcccgcacgtgccttacttccgcggcgccactgccgcacgtgccgcgccatgggaccctcctcatgacgcccccggaggcctcgaattccgccgcgtctcgaccgccaaacgccgccgcgtcagcctttccgtctgccacgcgagtcgcgtcaccgccgcctcgaatcccggtggttccgacggcgacggcgatactcgagctcggagcagccggcgcggcgtgctgatggcgccgttcttagtcgccggcgcatcaatcctgctctcggcggcgacggcgagggcggaggagaaggcagcggaatctcctctggcttcggcgc

SEQ ID NO: 11706 - DNA, 390 bp, Glycine max
ttctaacctaaccctaacataagtaacggattcagtgtctcgaacaagcagaggaaggggccttttctaaagactctacaaggtgcttatgctccggaactgcgtctacctcaaatcgatgatgggcgacgctttccttgtagagcgcgctgcgcattaccgacttctcaagatctggtagcacaatcacctacggaaacgctataactacattcatgcactacggcatactcattgagccgagcttacatgacgagtcatataatgtgctcagctctagcaacttgataactgctgtaagtgcgtaaaagcttgatctgaatgactattcggaaatctacagaatcgaattagtatacagttgatgattgaatgatatcatggaacatt

SEQ ID NO: 11707 - DNA, 62 bp, Glycine max
aaaaaaaaaacaaaaacaaaaaaaaaaaaaaaaaaaaaaaaaaaaaaaaaaaaaaaaaaagg

SEQ ID NO: 11708 - DNA, 400 bp, Glycine max
gctaaaaccttttgtgtttgcgccgctctaaagccaagcctgagactcgcgactcaccggcagtgctcgccggcctctaattttgaaagcttctgcgccttccacgccatttttgatactctctttgtgttcgcatagtgagatatggggaagaaggcgaagaaagctatgaagaagaatttgaaaagggcttcctttaataagaatccatctgaggatgctgatttcttgcccttggaaggtggccctgctcgtaagctcgccggccagcagaagccgtcgccgtcgccggagaacaccgccacggttttgtacgtcggtcggatcccacatgggttctatgagaaggagatggaaagtgcatgtttttggattttgttacatgatttttgtggggtgt

SEQ ID NO: 11709 - DNA, 434 bp, Glycine max
accacgcgtccgctcctctcttgtttggcagctattctttccggtggttccatagttcggggtgacgcctttccttagttcctctcattcgaagttgtagggacagctgtgcaaggtggatatggaatgcgtggttcagggaattatagagacacagcatgttgaggcctaggagattcttcttcaaggactatgtggcgttcagagagaacgattgaggatccatgaaatatgcctcacgagtggtcatcatctaagtactgtgccctgagaggttcgactgttgagtgacctatagcaagctgaaccttcgtggactgttaaacatgtatgtcgtgcaatgaggggagcatgcgcaaagcaaatctctgatctggataggtcaatggtggaaagcagatctagcaggaatgcactgcgcatgctttatacac

SEQ ID NO: 11710 - DNA, 381 bp, Glycine max
cccacgcgtccgcccacgcgtccgctgaatttgaagaaagttgggctgttggaaaggtgagagggatgggaaaatgacaatcaggaaaatggacatgtacttgctgagcatgctaccattgatcttgattattatagtacagttgaagagctgatggaagtcggtcctgaaaggttaaaggaggcactggctgccttggggctgaagactggtggtactgttcagcaacgtgcagagaggctcttcctcacatagcacacacctcttgaaaagttggacaagtcaaagcttttgcttttggaggatgcttctagtgaaaagaggaaacgcgaggcaattagaaaacacaatgaaatgttaaaggcttctgaaactggtgct

SEQ ID NO: 11711 - DNA, 341 bp, Glycine max
cagaaatggccttagggaacgactcagaagcagaagttgattttgagacttggtatcggtgattgttaagagaatagtgagattttgttaatctatagtggtgcttagactgaagtatgagtctattttgttgggcaaggccctgagtttctactcttggattgtattcgttagtttctttatgtcaaagcttgtgtttaatttatttgcagaatacttgtagtttcattgcaggtaatgatcttgttaaggttgctgctactagtatgttaaatagagttccagatctttgcagaatacttgtagtttcattgcagactgaagtatatgcttttcttctc

SEQ ID NO: 11712 - DNA, 329 bp, Glycine max
tccacgcgtccggtgcggcagacgagtgtctcggttatggaggatcaaagcggggaaggatgggtaagggtcccttttccttccgtcgctccgtctctcgccgccgacccaagaagaccgccgtcccgccttctcctccgtctccgccgcagcctccctacgcggccggaatcgccacctcacccgacgacaacaacaaccgtctcattgctgccggcgccggcagcagcgccttgacgaaggcgaagaagaagaccggcggcgcccgcttgtggatgaggtttgaccggtcgggccagtcaaaactggtggagtttggagaggaacgc

SEQ ID NO: 11713 - DNA, 299 bp, Glycine max
gtgacacgtacgagaactatgggtagggtatatttcttaaaacggcaagatctacaagggtgtatgtgttgccgtgaataatccttcacttgtggagtcttcaactgagcccaaatagtgttgtgatggatagttgtccgttctatcacggataggtgaatacggtttctggaatgtccattaatggatcgactacgacaataatgtcatggctgcctattctttcaaaactgacttggcaagggcactgaggatgaccggcatgaattgttaggagttgatgcttgaccatacacgga

SEQ ID NO: 11714 - DNA, 352 bp, Glycine max
tgtgaagcgtgcgatgacccagagcattgtctactttctaactggtaaggttcgggcagggttggcatcaacagaccggtacgcttctgatagctctgtcaacgcctacgcaaatgtgaaggatatggagatgaatattcgtaatcatgcagaataatctactcgtgcttatagcacgttctttctgagacatcaaggacattgaaatgtatagttgtgccttcaacacttactgatcgagatcattaatcatactctgctgaccaggattctattgcacctcaatctttaatagatgtaataagaactccagcaggttcttatgctgtggcatcaggtatcaatgggtccc

SEQ ID NO: 11715 - DNA, 443 bp, Glycine max
agttaaacttcaggcccccacttcagtattctacttttcctttcatcctgagacctccgggacactttcatttcgtcgcataacccttaaggcgccgcacacaccggcacggcctccctccctcgcgagtctcaccgccatcgttaatcacggttgtcgtcggagctctcgtagttgctcctcacagtcccagattgtcaaaaattgtggcacatcatggaaaatactgcgggccataacgatgatagcaagcaaaaagaagcgcctaagcttgcggcgttgttgaaagaaatgaaggaaggacttgatactgtaaggcgtaaaattcaatctttaactgccacggtgaacgaaggccaatatcctacagcagatggatttagctatcttgaagctaacaatctgctgcttttgaattattgtcaatcccttggttattattt

SEQ ID NO: 11716 - DNA, 357 bp, Glycine max
acgaaactgcctctatctggcactgatttggctcttcaggcaacctttatgcttgttgtgctaagggaatcttcctcaaagttttcaacattggcagatgctaatggtcaatcagtgatgttagaaccatttgattttcctggaatgaatgtggttaaccaaggagcagactaacctgttctcatcatagattcatcccatggcgggacatcttctgattttcttgtagtttcgggactggatggactaaatgaaaccatatctttagaatcccagagctacaatggctgctatgtgtatagtggtatgagctctattgcaggagtgaagctcagttgcaaatctggttctgatgct

SEQ ID NO: 11717 - DNA, 355 bp, Glycine max
attatacgttggcggaagccatttttcgatctgttggtgtgctttctggaaaggtgggggatggcaaaaaacaacaagtacgcctctattaacttaaccacatctacgaaaaaaccaacaccaccaacccacacaacaagaatccttctctctcttcttcttccgcttactattccgccgtctccgcccccaacaaaccccatggccgcatcctcgtcctaacccgacccactcccaaacccatcacgccctccaccccgcaaccgcaacagcaacaaccaccaccgtcgaccccgatccagcacaaccacccccggtccgaaccaggatcggacgcgatctcgctccgacccct

SEQ ID NO: 11718 - DNA, 389 bp, Glycine max
acggtcacgcgtgcggcggatcaaaatatcccttctgataaattgcaccagaaagtgagtcttgatggtgatactacattgtcacaaggtcatgatactaaaaatgatctgtccaaaccagaggaagcaagtattctttctattgtagttaaaaatgaagaagggaaggattctgatgctattgcttgtgccttggaatcagatcaagaaggaagcacatgctctttaccacttgagaaacctttgcagaaccctgatactctttcgcatgagttgcctcgattgcagtccagtcaggaatttccctctataatacgcgaaaaggtatcaaaagatggctataactggcgaaaatatggtcagaaacatgttaaagggaatgaatttat

SEQ ID NO: 11719 - DNA, 428 bp, Glycine max
  modified_base (404)..(404): a, c, g, t, unknown, or other
cgtaaatgcgctttcttttcttataacaatcatagctaactagtagttttcctgtttctaaaaattagacgttttggttatatatcgttttactattctgtatttaattttattagctgagttggggctagtgcatgtttgaatttatcgaatgtaatatattatgtgcctagtcgtaacagaattctgttaacatattaacttaaggaattatacaagagttgttacattcttcaaggttgagtttagtggaataaggttttccgtttgaattttgtttgtactgtgtttttaatagatacatcgtttaacatgcagaaaccagcgtcgaaggatgcccaaccgatgaatatcgacagcaaggcataaacatcatggaaattcagctaatttcgagggtctgntatttattattatttgtggacatt

SEQ ID NO: 11720 - DNA, 168 bp, Glycine max
cccacgcgtccgaaaaaaaaaataatttaaaaaaaaaaaaaaaaaaaaaaaagaaggggtaataaaaagggaaaaaaataaataggaaaaatgggtgtgaggctatatgggttcaaggatttggttcctgatgttgggatgtaatttttttttgttggagttggttta

SEQ ID NO: 11721 - DNA, 396 bp, Glycine max
tcgggatgggtttctgtgctgccacacgtggactccattttggtcacttttggtgacattgctcaggtgtggagcaatggcaagttaaagaaagtgagaggtagaccaatggctacagtgggagatgaaaatggttcgcgctgcataacaatgtcattgctgataactcttcctacagatagcagagtggctccactccttcccaaggtaacatgcaacaaggaccaaaaggaagaagaaattgaaggagaagaagaagaaaacaatgatggtggtgatgaagaactagagaagagggtgttcaactcttttgactttgaggactatgcttggagagtttaccatgaacgcatccttttcaaagatccattggataggtaccgtgttgtttgatct

SEQ ID NO: 11722 - DNA, 203 bp, Glycine max
  modified_base (10)..(10): a, c, g, t, unknown, or other
  modified_base (119)..(119): a, c, g, t, unknown, or other
cccacgcgtncgggctgcagcagccacacttaatcaaaacagacaagtgactgatgcgtgaagatctcaagtttccatgcatccagtggagttaagtgccataccctgtggctgctggngcatccatggcgatagtgtgtatgtttaaataaatcaagtcactctgagtttgactaataaaagtacaatagtcttagtgtgtc

SEQ ID NO: 11723 - DNA, 234 bp, Glycine max
cccacgcgtccgcccacgcgtccgagatcgcaccgcaccgcaccgatggaaacacagtgatccaaccctaacccaagcgcctcttacctccaagttttgtgattgaagctgcgatggaggaagagacctccgatgcaatgaaccttgatttgaatctgggcccaggcccagaacccgaaactgggcccataagcaatgaagctgtgaacttggacgattggataggggagcctc

SEQ ID NO: 11724 - DNA, 405 bp, Glycine max
gtcgttccgctggaatgatttattgagagcagattctttaactttggaaaaggaagttagtcaacaggttaatgttgttacgtcaataaccccaccagttcaagcaccatacttgttgaaatgtgtgcctgatcgagtcactgatgattctggggctatgatatctgatgtgattctgaagatgaatagttatcgtccacaagaaggccgatggttgtctcgcacagttcttgatcatgcagggagagtgtgttttgttattagaattagggtaggaggaggattttggagaaagaggggtgaagctccttcagctgtaaaatgggaagataggattatagagatacgcgaaggatcttggtcttatgttgccggttacattggtagagcccctgaaaaggtggt

SEQ ID NO: 11725 - DNA, 407 bp, Glycine max
cggacgcgtgggttagaagctcttcagaagatggtccaaggtaaattcaggcacctccctgttgtggaaaatggtgaagtcattgccatactggatattaccagatgtctttatgatgccataactaggatggagaaggctgctgagcagggcagtgccattgctgctgcagttgaaggggtggaacgccaccgtggtagcaatgtatctgctagtgctttgatagaagcattgagggaacgcatgttcaagccttccctgtcaactctaatgggtgaaaatacaaaggttgctattgcatcacctgcggatcctgtctatgtagcagcaaggaagatgcgggacttgcgtgttaattcagctgttattgtgtccttgtcgggaaccaagattcagggtatactcac

SEQ ID NO: 11726 - DNA, 379 bp, Glycine max
attcatttttaaattttttatctcctaaaacggggtccgttctattgaaatttgttgcttgcttacaccctagatccctaatctccttcagcggtgtttatagtttaacccaaaaaatcaccgaattctgatcggatcaccgcagtgccccactctccaccaccgcgccatcgcaaaccctagatggacctactgaagcaagagcttctcaagaagcgccaatccctggcgcaagacaccggcggcaagaaattcttcaagcgctccgagatccagcagaaggaaatccagaaactccgggagcaagagaagcgcgaattggaagccaagtcacagaagcgcctcgcaacgtcctccgacaacgctgccaccgctccgt

SEQ ID NO: 11727 - DNA, 316 bp, Glycine max
gggtaaactaggagtaggagggaagaagggttgaaggaagaaaaaaagaaaaacacagaaatggagggtgggaacaacagcagcagtaacaacaaccctgatgagttggcggtggggtgcttgctttcgatcaggacaacgttgggcgacgaattcgaaggccaggtcgtcaccttcgatcgcccctccaacattctcgtactccaggagccttgcaaacctagccctcgtcgaaatcttaggttgctcaaagccaattacatcaaagacttcacctttctcggccatgcccaagaccctcttgatcccaacacct

SEQ ID NO: 11728 - DNA, 362 bp, Glycine max
ctcaatcacaacatccgatgctgcaaatacaaaccgggtcttggctctctgaaagacgggaggtcgtacggacaagcgtcatgctgaatctgacataggaattttttgacaccttgctcatggggtagcatgtgcaacacatggtggacatgggtacccacctgtggctgacccaccatcatctggggcatacccttcacaacaaggatatcctacagctgggtatgctgcacaacaagggtatgctgcagctgggtaccctgcacatgcaggctatccttctgatggctaccctgcaattggttatcctggatgatcacatgcaccaggatctcatgggcacggcagtattggagcaatgc

SEQ ID NO: 11729 - DNA, 272 bp, Glycine max
attatagacgcctaggagcggcactgattagaaggccgatataaaccgatccaacgtggatgatacacgagactatagactgagcgtttgattactactacagctcatatgcaagaataacgctagtgaatacttatacgctgggccagactacaacgagggaatcctgtagttcggaggttaggaccaaggggagcccggacgtgctaattcgatgcataatacagcactctatggacctgggcttcctccagattaatttggtccaatgg

SEQ ID NO: 11730 - DNA, 424 bp, Glycine max
  modified_base (47)..(47): a, c, g, t, unknown, or other
agaagatcaaggcatagtgataaaaggcactccagatcaagatctancagaaactaggggatcaaactgatgtcagagaggatgaacgtaaaaatcaaaaagtcaaaacatcgggatactaaaagagcaggtcaaatctgtggaaggaacatcgtttaaaagataaatcaggtgaaaatagagataagaaatcaaaacccgtgatagaaagcgttcaaagtcaatatcattagaagataagcatgacaaaggagacacttcacctcatataaattttgatgagagaaactttgaaccgacaaagtcccctgaaggcaagaatcactccagtgataaatatggaagtagaggtgaaaaatcagagcatcaaaagaaaaccccatctaaatcaaaatcagaacaatttgatgggagtgggccctta

SEQ ID NO: 11731 - DNA, 70 bp, Glycine max
aaaaaaaacaactaaaaacaaaaaagtttaaaaagacaaaaaaaaaaaaaaaaaaaagagaaaaaataaa

SEQ ID NO: 11732 - DNA, 398 bp, Glycine max
aatctaagatctgtgtggtgtagttggaaaatttttatatggcagctacgatgaatttctacaacggaacatcacaagaacaagttgagtcagatccattcagaggtgagctcatggaagttctagaaccttttatgaaaactagtccttcctcaacaactccctctattattctctcttcagattcaccttcatcttcatcttttaatttcccttcctcttctttactttctccacaccccaatttctacacacacactccccccccttcctacttactccaaagccaacaatccttaataggctttgagcaaccaccgagttcccttctcgggctcaaccacctaagcccgtctcagatttctcagatccaggcccagatcgaggcccaacagagc

SEQ ID NO: 11733 - DNA, 428 bp, Glycine max
  modified_base (367)..(367): a, c, g, t, unknown, or other
  modified_base (413)..(413): a, c, g, t, unknown, or other
gatatctgctaaaggcttcgtcagtgaggtgagaatttcagccctatctctccttcggggttcaacctccttaagcggtcagcgggcataattgaaaaaagaaaggcactctatgttctcgttctcggtgctccggtcaaggtaaattctctacttgtcttcaccttcggacatcaagaaagccgaactgactcgctggctttgctttgtaagggcttgacctctgatgtatggaagtacgtggttgaagtgaattcctcggaaatgcagccggagggcaatctctcttttgacccggtctggtatgtcttttgcgccagctttctttcctattggttacggttctcttgtctcggtcatctcattntatggtttcagcatatggctatggttcagatacagactaaagactntctttcgtgctttga

SEQ ID NO: 11734 - DNA, 276 bp, Glycine max
tcgcattcaccaaacttcttcactggggccattctctggttgatgagaactgaaggtcattcggaatgccactttttagggggaaaccctttttcttgggcgaaccttcctaggattttaaacccgattaacccggttacccaaatcgatttaccaaagaaatctttcaagaatttcaaggatattttaaaccattggaactataccccccgaagggtttgatgtgttaaagcacctggaaaaactggtttgcatattaaaaaggctttggggttt

SEQ ID NO: 11735 - DNA, 367 bp, Glycine max
gacgataccccctttgtgcagggaatagaaaaagaaggccctctaatcgaaaaaggaggagagaaccacctgaatcttcgtctaaggtccaccttactactatgcatgaaccctccaggttggatcaaacaccgtcatctacttcttacgtcaaatcacctgggacgatgtcattaacatggctgaacaagtctcaaattaagaatatgggatggagatagctcggcaacaaatggtggcaaaaccaaaactgattggagctatgcaccattcacagcaagtttacaaggctcagatgtgactggtagccaagctacaacctcaagtattaaccaaaattgcaattctgataagtactggtggaata

SEQ ID NO: 11736 - DNA, 429 bp, Glycine max
  modified_base (64)..(64): a, c, g, t, unknown, or other
  modified_base (93)..(93): a, c, g, t, unknown, or other
caacttgttggtattcatcaaagcttttgggaaacaagttaaagcagggcatgcagaggggcanaccaaatatttcagactccttaaactttntattatcactgttgcatttatttcagatatttagtatttgggtacaagtttgttctttagtttaaacaccgacgtctctccgtggcggctatacccaatttgaactttaattttcttccctttgtgtgaaaaggttttgtgttggagttggctttttgaagggcgtgcatggtgaagttatttgtgtatatgaatgatgaagaacgatagagaaaagggtaacgaggttgaccagagttacatacagcagcaccactcgttgtcaatgccaatgatgttttcgggttttaacagagagaaggagatgtcagccatgatcactgctttgacacgtgt

SEQ ID NO: 11737 - DNA, 55 bp, Glycine max
gcagtttattctatcatatccttggtcaaataattttctttttaattaccatacc

SEQ ID NO: 11738 - DNA, 412 bp, Glycine max
agccttccatttcttacattttaattacatttgaccaaaaattcctcaatggttgaatgcctgggggttaataccattggtggggggaaatggcctgaaggaaccaaacagatccattggccttactgtggcaaggggtccatccaaaatggggtcccaatggtagtgccagtcaaacttttggttcattaataactgctgtgtatctgttggtccttttctatctacatgcgtatttgagctaattctaaaattggcaaattcaatatcttatttatcaagtcttctagacaaggaagacccgcctgtgcgtattgctgctggcgaaacactggctgtaatttttgagattggaattatagagaaattttctgctgattctaaaggtgcaagtgatatgagtcaagaaaag

SEQ ID NO: 11739 - DNA, 408 bp, Glycine max
ctcgaacctgaccgaaagttgaactggcccagaaccttggcttggcacccagacaggttgggtttgggttccaaacccgtctgcccaaatggaaaacaaaccattgggaaggaaattccggggtcttcaaggccattatgaatcacttaaacttaacctccaaacccttcaacaaggacccgaaaccttacttaaagaggtaaaggaattggaaatcaagcttgtgcaagaaggagacaacaacaacactgaaagcgatgtttcggtgaaagaagagatgctgaccaccacgctctgtgaaaccgccattcctggatcggacacgaaggagttgagttacgagtgttttaacaagagtgatgaagttggaagggggttcttctgtgttccatgtggatttcaaagatg

SEQ ID NO: 11740 - DNA, 353 bp, Glycine max
cttacattattttttcttttttttaaaccattcttttcttttcttttcactgatccttgaatctggtaagactcaacttcaaccatacctggttcaacttggaccttcctccttatcccatccccaaaagggaatttttttttaatttttaaaaagaaccccccttaaaaaaaaaaaaaaggaacagggggcctaatttctttggctggaccacaaaatggtggggtggcttccaaatcattgggttcttacctttggcttgccaaagttagggtctttagaattagcgtttgcacagtccaacttttggagatttatgattagggtttttggaggggagagggattttgggg

SEQ ID NO: 11741 - DNA, 429 bp, Glycine max
  modified_base (364)..(364): a, c, g, t, unknown, or other
cccacgcgtccggccaccctttcacattctaaggtcatattcaatcagaaaagcaggtgcaaatttagttgaagtatgacaggttttgtgatagttgaggggtgggagggtaactttttgtcctacctagatagggatttcgatggaggagatgtcctttgcggttgcagtgccattaagagtaggttcagatgattgtcatgatagtggcaatttggaggatgaagttggtattgcggaagtcataccaccaattcaagatagggaaggagagagtcctatgttggatatgatatcacaaaatagaagcactttggttgctggtgatgaagagttaaccattgaaattgaggaagaattcgtngtcgtttgaaggtgaccagtttgttgatagctcgtgttctctttcggtagtcagtgagaacagta

SEQ ID NO: 11742 - DNA, 395 bp, Glycine max
tcgccaaattggtcatagaaatccaagaaacattagtccaaatagatgtattggagatgggtcaaacttggttggagtgaggcattatgattaatttattagaggcttgccttaagattatatggatgctatggtcacccggtcccaaacattttaaggaattgattgtccgtttaccagagggagtaggaatttttcttccatgcaaagaaagggtccttctcgaattcgttccaagtcacccatcagatctaggaatcggtcaaccggtccatggtcattttcaagaaagatgtcgcctaagagaagatcccctgatggttttggtggacattcagaactatcccatagaagatcaccattttacagggttgacagaatgaggtcccctgatc

SEQ ID NO: 11743 - DNA, 414 bp, Glycine max
gctgagtcattcatctaggtcatctagtgggagtgcacgcctctcctctggactaagtgctgtatctcagcccttcaagttgcggctttgtcgagcccagggtgaaaagtcacttaaggattattcatccaacgttggactggttgatccattagcaagtttagcagcgattgaggaatttgtttggcctcgtatccaacgtagtgaatctggtcagaagtccactgtagccactgggaattctgaatctgggacaactcctgcaggagctggtgtatcctctcctactacccgtcgccattctaactagatccagatcatctgctaatataggtggatccatctagaaaggaaataactcaagataaaagtacaagttctttcaagggtaagggaaaagttgcattaaagcct

SEQ ID NO: 11744 - DNA, 398 bp, Glycine max
aataaggatgtatggaatggcataatccatatatatttcaacttttctctgggccttaattatatctaacacttaaatatccaatgataaagttctaatagtttgcttttgccaaattcatactgaactacacaaagacgcagagctgaattaatcggcattcatcacatcacagcgacacagccctgattaatctttttctgcctttggtaaattactcaaagttaattcgtcagtgtttgagatgatgcatgattgcatgaatatattgtggacatgttcttaagcatttatctgttgttttgttgagtttacctgtttatttatctttattaatgttctattgtgtcactggtaaggcatttcagggtttcaaggcatataattcttcctctact

SEQ ID NO: 11745 - DNA, 296 bp, Glycine max
gttttgttagttcacacactaagttctgaaaaatgagttccaaagtttttcttattctacttatgttcatggccactatacttttgatctcctctgaggttgcacccgatgatgcataccagaattttgacaaaacagatgggaagcgtagtgcaaatggggtagatgaaagcaaatattggcgtggtggctatggcgactatggtggttggcgtggtggtggttggcgtggtggctatggaggctggcgtggtggctatggtggtgggcgtggtggctatggtggctggcgtggt

SEQ ID NO: 11746 - DNA, 378 bp, Glycine max
tcgatctattctacatcgaatcccaaacgttttgaaaccaccgtcacgatgatgctcagaattcgtagccgcgacggcctggagcgagtgagcgtcgaaaacccccacagcacaacagtgtcatacctaaaacggatcatcgaaacccaattgggaatccctgttcacaaccaaaccctgttcacaaaccagaacctcctcttggcaaaatccctagaagatctccaccgattcaccgacatgtccaaccccgacgcgcctctctcgtctctcaacctcggccacggctccatgggcttcctggcctacgagggtgagcgccgcgtggccggccccgccttcaaccccggcgggtccttaggccgtaagatgaccatg

SEQ ID NO: 11747 - DNA, 174 bp, Glycine max
aaaaaaaaaaaaaaaaataaaatctgtttcgttttacaacaaacacgacaacacatcggaagggtcagccgccttaaaggactcaagctaacgaacgcgtgcatccaaagcatcacctcagtaatatagctcctacgtagcattccaacgcccgaactagaacaagccggaact

SEQ ID NO: 11748 - DNA, 437 bp, Glycine max
agaaagtcatgatctgtcaaaccctgttgacctcaaggaccattgggcaaaacatggaacgaaccgatacatcacaataaagtagagggcgagacattgtttctggggcagcattacacgaatagaaactgcttttagtgatcaattatggattctcaagtcgaatgagaaaaataatgttaagtgtaaaggccatccgggaaagctaatgatttagagtatgcccttgcttatatttaggatgcataagcctggtggaggctggctaaatttaggggttgaagaagtgactatatagtcatcctcggcatttgtcgcacttaattttcttagataggctgatggcacccgatggcatgtataaaaagtctgcatgatggatggataaatagctgttagatagtcttggttaatgcatttagtacttaaaccctaat

SEQ ID NO: 11749 - DNA, 441 bp, Glycine max
atttagttcattgcaagaagcatacaaaggtcaaattgttggaattatatactgtcatgtggccactactcaagagtcgggcaagaagtttgatgtgatctttactcctcaccatccgtatgctcgatggttggcagaaacaaatgcagtgaatgcaacattgccagaagtggtgctggttaggagaacccttgcttgggtaacaggaataatattgctcatttcaacctttatggggatatgctacctcatgaatatgccgcttacaagggacacgcttctatattctaatgtcaagcttgattaggcatggatcatggtgcgtacgaagacgaatcttttcaaccaacgaatggaccggtgtagccaattactatattcattataataaggttttggaaactagtccaatcaggatttgggtcttagaggataggggat

SEQ ID NO: 11750 - DNA, 388 bp, Glycine max
cggacgcgtgggtggtgttggtgttcttgtgtcttagtcttagtaatggtgatgatcaagagaagaagaaaccctgtttgtgggagtggaagagactgagtagcgcttactctgcctatcgggcactttttccttcaagtattggtcttgacatgcttaagaaccttgtcactcacacatatgcccgtttctttcctccaaatatagagtaagttatttcttcctcaaatcaatatactatttactaaacactaatcacatgttatgaatcaattaattatttagcttgaaaaagttttagaagagaggaggaagggcaagtcaaagagaatggagctggggaaaaggttagagaagcttttgcgaaaagcctaggaaatagcaaagc

SEQ ID NO: 11751 - DNA, 280 bp, Glycine max
aggacacatgcgttgatatcatttgcttttctcataatcttaataaatctgggtgtggttaaattaaaaggacctaagtatttcactataatacactcaatcacgcttactctatctatcaatcacttcatacttcaaataattcattatacatgcttaaaaaccttgtacctaacacatatgcccattactttccttaaaatatagaatctcatattacatacttatattattttactatttactaaacactaatctcatctaatgaatcaattaatta

SEQ ID NO: 11752 - DNA, 403 bp, Glycine max
caaagaatttatccaacttttcatcaaatttactcagaatatggctctcttcggggcattggtggttttcattgggatgaaaaactctattcctagaaagcaacccaagaagaaagctggcaaaacaaaaacatattaattgaaaggacttctcggattggtcctgggtgctcattatacccattttccatttctccaggatttggctttggtctctgtctggttcaaaacgaatgtaccttctgtccgatggattatgtataatttataattattaatatatgtatgctaaatttccgtttgcttgacattagaaactgtctttcgattactaaacttgtatacgaagagggggaaaaatgatcatagcctgttcattcagaactgggtgtcaatttcggtc

SEQ ID NO: 11753 - DNA, 419 bp, Glycine max
cccacgcgtccgctgttatttattgctaaactaaatatcaatatcaattatcttctggctctttaagtcaaaccataactattccatttctttccaccccacagtttctgaattctgggtgttgagtttcattttctccatttttttttatctcccttggatgtgttattttcaatccaaaagaccatgcaaaaaactatatttgagaatctgaaagagtgactaggtggtctatctgatcttgtgaagtttgtgtttgtgtgaaaggtgtgaggcttattattcagaagagtttgtgtttgttcacataattgaatggggtgtggtgtgtgtcggtggcaatggaagcaagtttggtggaaaagggtagagagagagctggacatgttaaccaaggttggttatgttagaagggtcat

SEQ ID NO: 11754 - DNA, 395 bp, Glycine max
cccacgcgtccgcttttttctaattatggagagcctcccgcttgagacggcggagaagatcatcctgcggtgggactcgacggcgtcggaggaggcccgcgacaagatgatattctccggcggcggtgaccgcgacgaggccgatctctacctccaagctgtcgacgaaatccagcgctctctctcctccgtctccgtctccgtctcctccgacaaagttaactccgccatccagatcgccatggcccgcttagaagacgagttccgcaacatcctcatctgccacaccaaccccttcgacccctcctccgaagaccaaaccctccaaaccctagactctctttgcaccacctcttccccaaaacaccctctcaccaacgaagaaacaacagaag

SEQ ID NO: 11755 - DNA, 377 bp, Glycine max
cccacgcgtccggttgtccatagggggtagtttcgggaaacacacggtggagaagcgcgcaccggattccgaagcgcgtgtttcaaattcggatagtcgcgatggaatgcgcgtggtggtggagccgagcgacaagcacgacattcaggcgttaaggagaatggaggcgaaaaagaagacagagcagaagagggagcgcgtgagggaaccgtccgagcccgaattgaaacgggatttcaagagggagaaaacagaatacgggaacggcgttagtggcgcgtggaatgcgacgactacgcctgtttgacctgcaccaattcccgacggtgcagtacttgccgttgaataacgggtctccgttaccgtgctgggtcgga

SEQ ID NO: 11756 - DNA, 235 bp, Glycine max
atatataaatatatagataaactgtgatcgatgaaggcaagactctgctaacaggcggcgtccagattgcggggggcgtgtttcaaattccgatagtctagatggaatgcgcgttgtggtggagccgagcgacaggcacgacattcaggcgttaaggagaatggaggcgaagaagatgacagagttaaacagggagcgcgtgagggaaccgtccgagcccgatttgatacggaat

SEQ ID NO: 11757 - DNA, 434 bp, Glycine max
ctatctcacttcttagttctttgtggctctttccatgatggcctctcctacatctccgagagttctcttcttgagtctctttgtaactctttccatgattttacatttgagttcagccaggaagttgtctgagtcagacccccaattgcagttccaataccacagaggccctctcctcacaggcaaaatctccgtaaacctaatttggtacggtaagttcaaaccttctcagaaagccattgttgctgatttcatcacctctctctcctcttccaaacccctcaccgcccaaccatccggtgccacgtggtggaaagccaccgacaaatactacaaaaactcgttccccaaacttgcactctccctagggtcccaaatcgttgatgaaaactactctctaggaaaatcactcaccaccaaccaaatcttaaaac

SEQ ID NO: 11758 - DNA, 341 bp, Glycine max
cccacgcgtccgcccacgcgtccggcagaaagcacggtgtgggaaagtgaacaatgggcaaggcatcttgttttaaaaagaataattgatcatgtacttagtcggcatctttctctatccaaggaaaatattgtagttgttgtggatcaacttgatttctctttgcttcacggagctggagatcctatatcatactctggaagtttgcttggggcatttgatgttttatcaaagcgtttgcgtcttattgaagacctccctttgaaggtgtctagtgtacagcctttagactctgctttcaagtttacatcagtcttccctcctgaacctcatcttctagc

SEQ ID NO: 11759 - DNA, 288 bp, Glycine max
gcggaaaaatgagtgccctcatattgtgagttcgagcaccagggaaaaatactagcatggacgtatggataaggaccttggtttaaagaatgttagacatttcatattggatgaatgcgacaagatgctggaatcactggatatgaggaaagatgttcaagacattttcaagatgactccccatgataagcaagttatgatgttctcagcaacactcagcaaggaaattcgcccagtctgcaagaaatttatgcaagatgctatggaaatttatgttaatgataaggc

SEQ ID NO: 11760 - DNA, 336 bp, Glycine max
tctttctctctcactcactttctttctctgtacaacttggaagctttctctctctaaaggcggcaaggtcctccaccaccagcacctccaatctccctctttcacacagagagagatactgtgtgtgagaccagttttcggtttatggattccttttctcttctacaattccaagtatctattcttgggtcgaacaagttttgggcttttggtggtaatgtggtgggttgagtgattccctcttgttgcatagctatggctacagattcgtcttttgagggccttgcacttgaaccttctaagtgcagtaaattgagtatggaagaaaaaagagaa

SEQ ID NO: 11761 - DNA, 379 bp, Glycine max
gaaaaatgagtgccctcatattgttgttggaacaccgggaagaatactagcattgactagggataaggacctttctttaaagaatgttagacatttcatattggatgaatgcgacaagatgctggaatcactggatatgaggaaagatgttcaagacattttcaagatgactccccatgataagcaagttatgatgttctcagcaacactcagcaaggaaattcgcccagtctgcaagaaatttatgcaagatcctatggaaatttatgttgatgatgaggccaagttgacccttcacgggcttgtgcagcactacatcaaattgaaagaggaagaaaaaaaccggaagttgaatgatcttcttgatgcactggacttt

SEQ ID NO: 11762 - DNA, 439 bp, Glycine max
  modified_base (319)..(319): a, c, g, t, unknown, or other
  modified_base (326)..(326): a, c, g, t, unknown, or other
ctagtagtagtgtgtaatacacttctcatttcccttcaatttaacccctttttttctaaggcccgtgcttcttcttttagctaaaagctactcattttcagtttcaaaggagatgctttcacagaggaaaagtagaaagcatccatcgaaagaaaataatatcaaaatatatattctcaaaaattaaaacaccgttttcaggagaataaacataatctatgcgacatcactagttacttgctcttcttccttttgcaaaagaaaaaagggtgcccagctcctcaacgttgattcttgcagaatctaattttcaagattntatacanaactgttatttatgtatctaatcttaatcaactacaactaaacaaccaattgttttgtttttcattagggtttgcagacattcaggtcatattttccacaacattgtttggaa

SEQ ID NO: 11763 - DNA, 107 bp, Glycine max
tcggatatgaattgaccatgcgtgtacttacatatattgcgtttattcatgtatattgttcatattgaatttgttgccttatgttttcaataatatcagattctttt

SEQ ID NO: 11764 - DNA, 402 bp, Glycine max
cccacgcgtccgattctcagagttttgtgttttgttaatttgaaagggagttggtcaatatgcacatatcctatcagttgtatgcattcttatcctgcattagaatatccatatcctaaattcttctaaaatttgcgtatggctctgtttgtttaaagctttgtttagcaatggagcataagcttcaagtctttatttatgcttttaaccaacttttgtgttctatttctttgcctttaagaaaaatttgggtgtcatttccttataatccttacgtggggaatacaaccaattgactgtcattaattggaagtaaaaaaaaactgtggattactgaatttgctttggttgttttcatattttaacaagtagctcatgtcaatgcttgcaaatttttctttc

SEQ ID NO: 11765 - DNA, 327 bp, Glycine max
  modified_base (20)..(20): a, c, g, t, unknown, or other
gccagcgtccgccacgcgtncgccagccttccggcgtctgtaattgtaattgctgatcctgaagctgacctcaaaccctaactgccgcttggctgaaccgcatccgttagtatctcggtatgaataagtgagaatcccaaggaatccgatcgaatcatctcgacgaggaagcaaacaccggctatagttatgtacaaagagcgaggaggcgtcagatccaaatcggaggtaactttcgttgatcgggaagcgaatcaatggccgtcctcgataaacagctcgaacgatccctggcgtccacattcagagccgccggcgccattaacg

SEQ ID NO: 11766 - DNA, 408 bp, Glycine max
  modified_base (149)..(149): a, c, g, t, unknown, or other
  modified_base (297)..(297): a, c, g, t, unknown, or other
tctcttctccgttgcaacggagtcttcctcttccccttacctgcccaacccagacgcggccgcatccttcccaaattctgtctcccccaatccccaaatcctaaaccggcacgcctcctgacggtgcgcgccgaggtgaaagagacctncttccgcggcggcaccaacaccaccaccacttcctccgacgacaagatccgcgaaatccttcgcaaccgcgactacgacaagaaattcgggttcagcgtggacatcgagtctttgacaatcccaaaagggctctcgaaagaaaccatncgtctgatctcgtacctgaaagaggaaccccaatgggatgctcggattccggctcaaggccttcgaaaaatcctgtccatgaaggaacccagctggtctgattacacttac

SEQ ID NO: 11767 - DNA, 418 bp, Glycine max
  modified_base (344)..(344): a, c, g, t, unknown, or other
gtttagtcatatggggaacaacctctcctgtttttttgaaaatgttgggtgaattggcaaatatgattaataagctggatgaattatgtcagggagtttggcaaatctcggggttggcagctttaggttatgattgctgaacatttctgatccaatatggctatcttatataacaatttgacatgatataatttaccagttacctgaattatggaatgaaatttagttatctgtatatattatgactttcttatttgttggtcgtcctgttgaagctgagggagtacgttgatgacacagaggattacatcaacatcatgctggatgacaaacagaaccatctnctccaaatgggagtcatgttgaccacagcaactctggtagtgagtgccttttgtggtgtggcccgtatttttgg

SEQ ID NO: 11768 - DNA, 425 bp, Glycine max
cctactactccacgattagtgagagcaaagctttttatgtttttcggatttgcattgagatattaccatataatatcgcggaaaaggaaaaaatggaggcacccattatgttaccccttgaaaggacttcgtcaattgaaagagagcccaggactcttaatatcaaccaaatccaatccgctagggagttagcaatatatatattgaacacaaagaccatagaagaagcgtccagaattttcacggaggggttgcagccagtggttagtgctgcttgctgcatgagatccggcacagcagtggacatggatttgggtgaagaacttgaagtgttgaactccaaagacgcaacaacacaagtagccccagcagcagcattcagagacatagcatctgcacctttctagaacaatttgaacaactca

SEQ ID NO: 11769 - DNA, 404 bp, Glycine max
cccacgcgtccgggcaattccaaagcttagtgtacatgggatgacttctgcagtcaaagatctgctaaatctggctccattagataaggtgacagtttaagcaatccaaataagtgttcactgagaaatgagaatatcatttttcagataaatgtaccaaggtctaagaagaaaaaaatattcatgtggtatatgtaaataatattagaagttcactactgtatttcccctgctacaggtatactgattgctgagattgaaatttaaatataaattagttatgtatcggatttgaactctctaatctccatataccagttgatatggcatgtctcaatgactaaattttaaagtcaaaatgtaaaaaaataaaaaaattaccattttcttaaaattcccttact

SEQ ID NO: 11770 - DNA, 369 bp, Glycine max
  modified_base (339)..(339): a, c, g, t, unknown, or other
gttatgctaaaatagtttttatccatagaaaattctagaagaatacggaaattggttatattccaaatatacccaacaagggagactatacaaggaatcctttgaaaaacgatggccctccttgagccatgaaagtagtcagataaattttgagaccgaccaattgctaaagaaagtggatcaagctggcagccaggtgattgacaatttcagcagcaatgcagtttctaagtcatttgagcaagaagtacgggaaatggtgtggctgggttatctgcttcgctactgacatctgtgctggaaaccaccttggacgatcttcttgctcttggcatttgntctgctggcgggtatctagctatatcaact

SEQ ID NO: 11771 - DNA, 272 bp, Glycine max
cgaccattaccaacgtaccaatcttaatgcttgtttttctcatttgtcccaaacaaagttagtgtatgtggaacacttgttcgacacccccgaattcccacctgcagattctccccatcaattgtcagcatagtgattgtggaagctcaacagagggattggtactgtagatagggctaggagtccctgaaatgtatatgcctgtggctacctttgccacgctgcgcggcggattgcctactgacagtggggactctggtgaggcattagac

SEQ ID NO: 11772 - DNA, 412 bp, Glycine max
  modified_base (329)..(329): a, c, g, t, unknown, or other
  modified_base (341)..(341): a, c, g, t, unknown, or other
cccacgcgtccgtaacagtcaaccacttaatccaacctgtttcaatttactaagcgagaatcaacttagggttgtcaatacgtgattaggcaccacatacaccagttagcccttcgtccattaagcatgaacgcaagttaggctcagaggcaattaatcgaacacgaagcgtgcactgattaatattcacgaaattgggataactggtgaagggaaaactgccaggaacccacattacaagcgaaacctcaaagagagttgggcttcgtcatcaaaaggaaacaacaccagaaaatctagccttccatggattcaaacagaaaacgcanatgaaacatganacagaaacatagatgaacaggaacctaaatgaacagaaacgtaaatgaaagtagaagaagaagcacaaatg

SEQ ID NO: 11773 - DNA, 331 bp, Glycine max
ggcacgcgtacgggtataatataaatttcacccttctctgtgactcactctgtgacgtgcagcgcacactgagagacacacagtgtgcagcagcagcagcaggagcagcagctggagatgaagatggctctgacactgtgggagacattgaaggaggacatagttgtctacacggggatcttcttgaccatcttgttcatgattctagccctgttcctagccctatactacgtcgttcctgggctctaccactgttacgaccacggctacagcaacttgtagcgcgacttggagcctctgatagagcctgtgcaaatcggcgatgagatcg

SEQ ID NO: 11774 - DNA, 421 bp, Glycine max
ggtttagagagaagaaaacgttggtcgtagaacattaccggaaagagaatctttgtggattccagaaatgtctagcatcgcttcctcacaccaaagcttcctcaccaacgcccttattccactaacgcacaacccaaagttcatgaccactgttactttcccttcttcactcaaaactgtctcttgcagttccccacaacatgaacagcaacaatctccaaggaagaagaatgagaacaagttagcaaagttggcaatagttgcacttgctgctggtgtgttaacacttggggcaagtcatgatgcattagccgccaagactggtggtagaatcgggggccaggccttcaagtcagcagctccgcgctgctcaccaagaatcaacaattgcagagccaatatctatattaatcctcgagtg

SEQ ID NO: 11775 - DNA, 274 bp, Glycine max
aaacaacaaaacaacagaaattttttctgcctgcttaacttctttggtacatctgaattcatactttgagttacaatggtgtttagttttttctgcattgactaaagagaaaaggttaattggccatgaacagaggaagaaaacagggaatttgtataaaaaaaaaaaaaaaaaaaaaaaaaaaaaaaaaaaaaaaaaaaaaaaaaaaaaaaaaaaaaaaaaaaaaaagaaataaaaacataaaaacaaaaaaagggaatccttacaattgctt

SEQ ID NO: 11776 - DNA, 367 bp, Glycine max
tgtaaccctatatcctctcttttctgttacgaataaacaacacttcttaaccgtgtgatctaagccatcccatatccttttgttttgttctcttcagtctgtttgcgagtgcgagtgaaaaaaaatgggtgggggaggagctatgaggtcggcggcgaagatagccggaattggcgtgtccaaggcggcgctccggccttcggcgctccctacggagcagacggtccgcaacgcgtcgcgaccaacggcggtctccggagtgtcgtcgcagtcggcgaaatccgcggaggtggcgccgctgcacacggcagctgcctgggacgattgggacttcgccgaggatggcgaattggtcgtgccgaggatg

SEQ ID NO: 11777 - DNA, 375 bp, Glycine max
ctagtgttctataagttcacggtcagttctgaaaaatgggttccaaggttttgcttggtgtagttatgttcatagcggctatacttctgatctctgctgaagttgcacccaatgaatacgaaaattttaacaaaaaagatgggaagcatgctccaaatgggttatatgatagcaaatggggttaccgtggttgggtggtccttggtatggcggctggggtggcccttaatatggtggcagctggggtggcccttaatatggcggtggatggggcggtccctggcgtggtggtggcggaagtggcttgtgaggttggcgttgacctaatggcaacccttacaacttagaagaaaacttggtaaagcttctttaccg

SEQ ID NO: 11778 - DNA, 349 bp, Glycine max
agagaactcgatcttcttactccattaacattttcaatctttttcacctaacgcaccgtgtactttccattcctgtggtccttcgtcccattctcgaattggcgtgtgcctcttgcaatcccccaaaggttttttgaagcagaagaatggacttctttactagagacataaatgaggattctatgcttagatgcccattcttgaggaacatcaatgagcctactaacttctcattctcttcacctttggctttaccaatgcctgttcgtggagctaaaggtccaatttttgaagatggtgccaattttgatttggcatttaggctttttcacgggagtgatggtgtagt

SEQ ID NO: 11779 - DNA, 408 bp, Glycine max
gaattttataaaaaggcctacatcttctactccatttgaaaacaattgttttgggaggattctcgttttaatactcttaagctaaacaatttgtttccttgttttctaccatgtaccaaacacgaaagtgaaagaattgatggatgggtacaacatttttggcttctcaaaggtaaacttaattaatcaagtagttgtggaattttgtggaaaaaaaaactaggtaagaatttataattaattttacatgtgtaattctcttttttgaagtttattgttttatctatgtatgtattaaaaggggttgaactgtttttacatagttgcttaaatattgaaattttgataaataattatttaatagatcatagatttgacaaaaacaaatatttattaatcaattttttt

SEQ ID NO: 11780 - DNA, 329 bp, Glycine max
caaactctttgggaacatggggttatatagaagcagtacgggaaattgagcagcagattcagaaggggacaggcaatgtcaagtttgatgatattgttgttgcttgtggcagtggtggcacaattgctggtctgtcactaggatcgtcattgagtgcattgaaagcaagggtacatgcattctctgtttgtgatgacccagattacttccacaactttgctcaaggcttgcttgatggactcaaggctggcgttagctcaagagatattgtccacattcaaaacgccaagggtcttggctatgcaatgaatacatcggaggagcttaat

SEQ ID NO: 11781 - DNA, 231 bp, Glycine max
tgcaaagatgggtaggcacaagtgctagcccagaagggtgggtattttatcttgaaaaattgcccttgacttggtagtttatacatgattttttaccttctcaaattcattggtggccttgaacctgaattttgcaccaggaaacacactttctaacgcattatttccagcacattttttttattggttgtaattcatgcgtttctaaataatcaatgaaattctttaaat

SEQ ID NO: 11782 - DNA, 392 bp, Glycine max
gaaatactcttgtgaccaaccaaggtctcttatttctagacataggaggaggagagaagaattgtttctatttcaaagattcagcaaattaaggagcagaaaaaagtcacatattttgttgttgaattcatcaatatggctaagggaatcagaaacctaagttcgtggatggaggttgccccggcaccaataattttcccaacaaagccttctaattcgcctgctttggagaccatcacagaagaagttgctgaggatgatgaagcttccatgaatacccttctcaagtagtagcaaatgttgcaagatcaattatgaagcctcttttgaagaggcttcagcttatgaagattgaagaggatcaatcaagttgtggaaataatcactagttg

SEQ ID NO: 11783 - DNA, 445 bp, Glycine max
cagtaatgatcaatacatggaaactattaatgctattacaaattcaccatccttcactgtgcctaacactggggaggtgatggagaagtctgattcattgtcagtagttgattccaaaaggattgaagagcaagcttatcgtttgaagaatgacgttgactttcctccactttcccattgagtgccagtgaaggatggtgaatttgtaatagcattaacagtaatgatcaatacatggaaactattaagactttgcctacctttcagcaggtgctaccaaaagatggcgattttgtaagaatgtctttggtggagtccatggccattcaaattgccgtgatgatgcccccgagaaacatgcgtagtagttttcatcatgttgtgtagctcataatgataatattttcagtagacataggctttgttgaacctaatcctgtcaaaa

SEQ ID NO: 11784 - DNA, 197 bp, Glycine max
cttcatgaccataatcgactactgtttaaatctgaaaaaaaaaaaaaaaaagaaaagggaaaaaaaaaaaaaaaaaaaaaaaaaaaaaagaaaaaaaaaaaaaaaaaaaaaaaaaaaaaaaaataaagcatgctgtggattaatttttacgtactctcgcttatagctaattcactgtccgttggtgtacagcaaat

SEQ ID NO: 11785 - DNA, 352 bp, Glycine max
gccacacatacggagagagacctggtagggtcactggaagagacgaaggatatgaggagctcttctggaagcgcgagggtccaacagagggtgcgacgctaatccgcatcagatgctacttctgacgctcctgctaggaaacaagatgtgaagaaagatgtggttcaggatgttgctgataatgttggagatcataaggagttggctgcaaggcgggctgctctacaggagactcgtgtagagtatgatagagggaacgattttgtgagctatttgaagcaccatgccgagctcaaagacgatctggaatcagatacgaatgtggatgccgacgagatagtcaacattctac

SEQ ID NO: 11786 - DNA, 424 bp, Glycine max
ctaatttgtgtggctaacagtgggtttataacttcttgggctgtttgactagcttcgttcctatcatccctcttcccgtctgcaaacaccttgccctcttcttgggctgttggatgatgggctagtcaggctgcccaataagctgaacatgctgaggctaatgttgacaatcaagtcctggatcagatcaaatgcctcagaatggagtcaaatgaaataggttcaaaccttaatggatgaaggattatgaatatgaagtactttagcctgttttagtggtgaatttggaataaaagatatggtctgcgaggagttgttggagtgagtcctgaaaggagtttgttagggtggttattttgtattgttgtattgtgttgtttgcttgcctgtaagttgtatttatcattagaggggttattcttat

SEQ ID NO: 11787 - DNA, 389 bp, Glycine max
gtcggaacataaggcggggaagagttagtttcttctctcttcgatggaaggcggggaagaggttctcccttcggccactgccacctccgccgccaccggcaatcccaccgcttcgcctcctccgctcgctgatcttgtcggtgctcccgatctcgctgctgcctcggacgacgtcgttacccaacctgaaattcacgcgctgatttcagacgaagagcacgatcacgagcatgaacatgacgatgacctcgagcacgagcaccaaccagcatgagcattaaccaccaccacgaggaccgcgatgatcacgccgctgtggccgctgtctccttggaagatctcaaactcaagatcattaagcaagcggagtattatttcagcgatgaaaa

SEQ ID NO: 11788 - DNA, 270 bp, Glycine max
gctgctcataccacaaccatgctttatgttattcacacccacctcacacggtcacatcatgtttggagcactcaaaacaacgcttgtgctcctctctcccttctctaccaccacaacagaaacacaaggtgcaccaccttcttcttcgcttcaactcggaccctcaacctatggtttcgcatgtctggtactcgcgttcagaagaacctcacgagtacctcgtactctcgagagcccctaggcattcaattcggctaacttctgacggct

SEQ ID NO: 11789 - DNA, 429 bp, Glycine max
ggatattccattttcccctttctgcttacgcttcacttcccagatctcgtaagtcggatcggtgaatctaccacaccatgcaccgaaccactgcataaccgcaccagatccatcccaacctcgacatggtctttggcaagaacaacaaccaccaccttcgaatctcctcctccctccaagatctctcctactatcgccatgacctcgaacatggccatggccccactcccgacaacaacatcaacaacaccaacttcacctcctccagtttctccaaaaccaaaccggttcaactgcccaatccggttcgccgcaaacacctcttcctcttcctcttcctgatcctcatcctctaccttttcctgctacttctctgtttgctctacactctatactgctaaccactgcctcccccaaatcctacgtcgg

SEQ ID NO: 11790 - DNA, 94 bp, Glycine max
tcgggaacattgataatattttataataatttgtgagacagatagatcttatgggttagtacatatgaggtaatgaggatcattcactctatta

SEQ ID NO: 11791 - DNA, 124 bp, Glycine max
cgcacgcgtccggttatttgataaggtgccatatgttccggctatactgtaggcggagagttaaattgaaaggatgccaaccatatcttggccatggatcccacaagtgcacattccagagaaa

SEQ ID NO: 11792 - DNA, 130 bp, Glycine max
ggcactcttccgctcacgcttccgcataacctcactcatcctctactttcgtcttgttccatttcaagatcgccggacaaatcttgcggtagaacacatattccatgcaccgctcttctgcgccaacaat

SEQ ID NO: 11793 - DNA, 208 bp, Glycine max
  modified_base (24)..(24): a, c, g, t, unknown, or other
cgcacgcgtccgcttactgttacngtttggatgagtatccgaaggtgtacgaggagtgtaggttgaagtgccagaattgtccgatggggtttcatgcgatggttgtacgttctccgccaaaagatggttcttttggctcgttttgcagatggggttattttacctgtgggtttttcttgggattttaaggacattaactagtcttttt

SEQ ID NO: 11794 - DNA, 179 bp, Glycine max
  modified_base (23)..(23): a, c, g, t, unknown, or other
aacactcactcgcactgtcttgnacttcatcaacacgagtgagtaaagggggaccgtccaaaacgaaacaaaccaaaccagcacaataaaaccaacaaaaatacatacaagacactcataacaacccataaaacaaacatacaaatagaaacaaccccaacaaaaaaaatagatgacac

SEQ ID NO: 11795 - DNA, 217 bp, Glycine max
gttggtgacaccattaagtaagggatagcactgcgttctccagtcctggttgatggaggtgctataagtgtggttatcctgaccttagaagctgtatattgttgtctacatcataatgtgtgctctttgttctgtagctaccaaagataaaaccattcaaaaagcatcttccattgaaatccatcatatgaatattcaacattcttctacatgtaac

SEQ ID NO: 11796 - DNA, 142 bp, Glycine max
gagacacgcacggctcagctcgcgcatgaactaccaacccaacaagcgatcaacaggaccggacaacacgcatctaggcggaccaaacaccctcagccagccaccagaaaaaaagctcccagtaaggctcaaaccacccaca

SEQ ID NO: 11797 - DNA, 180 bp, Glycine max
gggcgatgcaagctcacacggacaggtcggctcccggccccccagaaagcaccaggactggggcaaagcgcacccagcgcggccgatcggagcgcacacgcccgctcgggaagacagacagcaacagcgcgaggccgctgacctggaacccaaggacagcgagagggcccgcgccccaac

SEQ ID NO: 11798 - DNA, 69 bp, Glycine max
cggacgcgtgggcttacgcgtggggttaacttacttaatcaagtagttgtggaatggcagggttaaagg

SEQ ID NO: 11799 - DNA, 169 bp, Glycine max
gtgctctctactcttttcttcctaacatgcgattctctcttctcacgcatagaggcgctctcgtaaacagaccgaacaacccgcaacagaggctccgacccaaatcggacgagtcgactccaactccgaacacttacaggtgcttgtgcgccaatcgcatttcactacc

SEQ ID NO: 11800 - DNA, 382 bp, Glycine max
caggaagaaagaagtgcaatggacattggaatctatggctatcctacaccagcagggaaagggatagagtcttactatgatgtgccagagggagtggatattcggggaagatatgatgcagagtttgcaaaaatcctcacaaaagatgctttgaaattcgttgctgacttgcaacgtgagttcaggaaccatatcaagtatgcattaaagtgcagaagagaagcaaagaagaagtacaatgaaggggctcttccagagtgtgatcctgccacaaggtacatcagagagcaagagtgggtgtgtgcacctgttccaccagcagttgctgatagaaaagttgaaatcactggccctgtggatagaaagatggtcatcaatgctc

SEQ ID NO: 11801 - DNA, 341 bp, Glycine max
  modified_base (261)..(261): a, c, g, t, unknown, or other
  modified_base (316)..(316): a, c, g, t, unknown, or other
  modified_base (333)..(333): a, c, g, t, unknown, or other
aaggtgacatatacgacggtgttcgagctcagttccctctctcattcgggaagcaatcgaagcctcaaacccctcttgaagccatccacaatgcgacacgtcgttccaattccaatcccaaaacagccaacgaccttccttctgtctcctcctcttccagggattggctcaattccctccgccctcccaaaacccctactcctcctcctccgctgccgccgccagatcacgacgacggcccaatggtgggaccgccgccgnctccgcccacagctgccgacgaagaagaagacgacgacgacgccgagatgattgngcccgccccgccttcgncgatcgcg

SEQ ID NO: 11802 - DNA, 287 bp, Glycine max
gaaagaatcaagcttagtcaaagtgtctgtgactgtcacacacagtctttaagatctggaagcgcttctcacttgcccacaacaacaattcctctcaatttcaaaattttcagcttcaaaataataaaaccctaatagaggggttgcaagcaaactgcgaagcgcaaatatgtggacggtctcgatgtgtctgatggtgagcttattcgctcgcattgaatcgctgtctgagacggcgtacgacgtcgaatgcgtctacgagtacgtgctttacaagggcgacaccg

SEQ ID NO: 11803 - DNA, 413 bp, Glycine max
cccacgcgtgcgaatacgcatagaaagtgtccaagatagacttcccgctatagatcctgtcaagggcctttataagggtctctatgaatgcctatatagttcataatatatttgatgacgtagtatgagacttaatattgcgaagaataatggcttcgatgaaggcctctatgattgcctcactgcttctgtatatatagatgaatgatagactcagaatatgtggggaaaattgactacggtgtggactacttattgagctagatatcgagctatatcggctgtgattacgaattgagcttaataagatgcatataaggttgtatccatgaaaattcccatttgaaacctaacttggcctttgccattgactaattctaatggcttcctatctatcctccaatctatttctc

SEQ ID NO: 11804 - DNA, 394 bp, Glycine max
caattccaaattttcagtttcttcctcgcttttctgcaaaatcatctaaatccggttctgatcctgaatcatcagtttttcccttgaaagatgggaggtggcaaggacaaacacaatgaagaagagaaaggagttttctcacatctggctcatggagtagctcaagctgctcatggttaccctacaggggcataccctccacctcctggggcataccctccttaccaagggtacccacctgctcatggctacccttcacaaggtggctattctccggctggttatccacctgctggctattcttctgctgctggtggttacccacctgctggttacccttcacatggttatcccggatcatttgctccacatggatctcatgcgcctgggcacg

SEQ ID NO: 11805 - DNA, 415 bp, Glycine max
ttggatggaactggtcttcagttcaagtctgtgatgacagggaagtatctttgtgctgagtccggaggaggaacaatcctagttgcaaattgcacagatgcttcgggttgggaaacatttagattgtggaggataaacgaggatactttcagattgagggtgtttaacaaacagtttgttgggttagatgggattaacgttgttgctgtttccaatatttgcacttattctgagacatttcatatagttaaggaaagtgacaattcaagtcgaattcgaatcaaagcttctaatggatacttcttgcaagctaagacccaggagctggtgactgcagatgtttcagaggtgagagaatgggaagatgatgacccaaccatttttgtgatgacaatagctgcaaggttgcaagggg

SEQ ID NO: 11806 - DNA, 406 bp, Glycine max
gccacacttaaaaggaaccgctcactcaccaaggatgaaattgatgcttactggaaatgaaagaagaagatagaggaagaacaccttagagctatttccaacttgtcagagactattcaggctagcaaaagcacagaacctgagaagaagttgcagaagtcaatgaccatgcctgtgacccgtgcacgggactacttaaatatgggcatagacacaagtttggagcatcttattaagaaaaatggctggtggaccaagagtagctgggcatttctgaatgagcctccagtgactgaagctgtgtccaataagtacaaatcgcagtttcacgttacaagcatgggatcatcgatcaaaatttaacccccgagatggaaatagtgcttgatatatatatgaatctaac

SEQ ID NO: 11807 - DNA, 443 bp, Glycine max
cccacgcgtccgctcggctcagcacagctaccatcgaaaactagccaaggctctgtctgtttccctttttccttttgcttcaacaacatcgtcgtcacaaatctagagacagagagagagagagaaaaaaaaaactgttgaattgaagatgaagatcactgtcatgactgctgatgaacaaatcatcacgttggatgtggatccccacgaatctgtggaaaacgtcaaagcattgctcgaggttgagacaagtgtggctcttcaacaacagcagcttctgtttaatgggaaagaagttaggaattctgagaagttgagcgctcttggtgttaaagatgatgatttgctgatgatggtatctggtgctggcgctggtgctgctgcttctagtggatctaccaatgatttgagcttaaatactgatggatctgctgtcacccctg

SEQ ID NO: 11808 - DNA, 212 bp, Glycine max
cttacgcttgcgtcatggctgctaccatatcgaacctttccgatctgaattaggttagggttagactctagggtttacaacatcagcataatccatcgtcacttcaatctactataattgagaagatagctgaacactttacagccatggttactgctcgtctataccgatgacaatatcattccatttgatgccacatctcactaatggaa

SEQ ID NO: 11809 - DNA, 208 bp, Glycine max
gtcacacgttcgctgagaagtccgaggacacgctgctctatgccatccattggagtggggagacagtctgtgcatgagattagtggatgcaggcgtgagatttgctgaatcgacagggtgctggtactctgggacctttaatttacaacaactggatgctgttgtacaagtatacggcgtaaagccaatgatttgaggtatttaaacg

SEQ ID NO: 11810 - DNA, 317 bp, Glycine max
accaagtcaagttctcactttgaagagaaaataacatcgtaaagatgtctgcatcaggaggcagaaggaagccaagaggaagagaataaccttcttgacaaagggccccttttaatcttaaagtcaagggccaaaatttaactcaaatggtttcctggttgattgaaagagacttccagctgaacagacccctgatgagcttgagatggacgaaggggattagatatgatgcgcatgctggaccaaaacggaggtggacacaagtttctttaaatgtatgatgatcatattcattaaaatgcttgataaaacgcatg

SEQ ID NO: 11811 - DNA, 452 bp, Glycine max
  modified_base (271)..(271): a, c, g, t, unknown, or other
  modified_base (288)..(288): a, c, g, t, unknown, or other
gtgttaccagagcagaagaaacaaaaagaagttgatagctggaaaaatgtagatagagaagctagagagaggagaaaagaaagggatgctgatttagaaggggataggtctgataaacgtaccaagggccttgacaaggaatcaaacgatgggtgtgctgatgtaaaaggggtgatggagaaagagagggaagtctataattatagcagtcagcaccgtaagaggatacaacgatctaggggaagccctcaggcgccgaaccgggagtctnttttcagatcccatccncaagacaaagacgggtctcaaggtaaagtagaagtttcttctggtggttataaagttggcgaaagcatgcaagaactgataaagttgtggaaggacatgaatcatctcaatctgaaatggaggaaaaatgtgaaagctctaataatggtcccactctggaaatt

SEQ ID NO: 11812 - DNA, 421 bp, Glycine max
tctctcactgcaattgcaaagcaacaacattccttttctccacttcgaagcaacgcaacgagtctgtctttgcgaggttgaagtcgtcgtctttcgatatccggtggtgcatccctctcttcttcaattcgttttgtgtttgtgtctccatttgtttccttcttgaattactagaattcaccttcatatagttctaattttagtttattggttgtttttttttgttaatttattaatttcatgcggaaaagcctacttcatttctcaatcgcggatccgtactcagactggttaatcaatgctagggtttagcttgtgaatctttgacttctctctggatgagtccgatagttattattattatggtgaaacagtgaacctgaatactttctggtacttctaaacatcagcaattttactc

SEQ ID NO: 11813 - DNA, 338 bp, Glycine max
gagaaaatagcgacgcggaagcacgctcgtcttcacgatccggcgcggcgtgtcctgcggttccgctctccgacgagtctgcgcagggtaaagaatcgcgcgattcgtctggaaatcgagattctagcacgattcatcccagatatagagattcaaccacgattctggaacaaaaacgaaacaacctccgattcgtatcggtagcagctggaatcgtatcgaatcgtgcgatacgtatcgtgaatcgtacgatactaactaccgtgctaccgggtgctttgctcttcaattctgcagaaattcagattggtcaattaaattaaaggctttcttttcac

SEQ ID NO: 11814 - DNA, 222 bp, Glycine max
accacgcttccggtaattatgcatccatttcgctgcatgactgggtctagagcgaggaggataaaatgtcgggcttgcttcgaagcgcttgcaacactgatcaggtcacagctacaacatcctactttctaaaccttgcgcctgcacactataactgctgctacagactatgatgaactattcctaggactagatatccttaactatatcttttcgaatatg

SEQ ID NO: 11815 - DNA, 286 bp, Glycine max
cccacgcgttcgcccacgcgtccgcacacgcgtgcggtgaactgaatggtcggtgttgggattgattatgagcatgaatactttcctagcatgcatgcgtgcttctgattctacattataccaatactctgccaccttgacactaacacaactctattatcttttagatctaatgcaattacaaagcgtctgacatagcattggtagcatattgctccatctagccatgcagcagatgaatgacaccaaaccatacttgtcaactaaaccgctcattctcatgtca

SEQ ID NO: 11816 - DNA, 444 bp, Glycine max
tccacgattagtgagagcaaagctttttatgtttttcggatttgcattgagatattacgatataatatcgcggaaaaggaaaaaatggaggcacccattatgttaccccttgaaaggacttcgtcaattgaaagagagcccaggactcttaatatcaaccaaatccaatccgctaggggtttaatgtttggtggatttaattaatttacaggagttagcaatatatatattgaacacaaagaccatagaagaagcgtccagaattttcacggaggggttgcagccagtggttagtgctgcttgctgcatgagatccggcacaacaatggacatggatttgggtgaagaacttgaagtgttgaactccaaagacgcaacatcacaagtagccccagcaacatcattcaaagacatagcatctgcacctttctagaacaatttgac

SEQ ID NO: 11817 - DNA, 419 bp, Glycine max
  modified_base (388)..(388): a, c, g, t, unknown, or other
cccacgcgtacgcccacgcgtccggcctatctgaacaggaattcacatattgaaatagcgaaagaaaaaaaaagggggggtttcggattaaggtgcaaaggaagcagcgatggaatttgccaagcccgcaacgattgggcgcaacaatgagacaccggcgattcatacggcggtgagaatggcatgcgatggccgtgaatggcgatgtcatttttgtggcctcgacagaggagaagaattgtacggtggtgaagacggaataacagaaaggttagtgtggatgggttatgtctgatggatagcggattcgcgatttgattttcgcggtggtagttcagagagagtttgtctatggcgacgtggtgcgccggtggctcactaactacangactaggtcctctttttctctcaattctcta

SEQ ID NO: 11818 - DNA, 434 bp, Glycine max
ggatcatctaattaaaccagctttcatcagggtgtgggtgatttattgtaagctttttggtattatcttcgattgtgtttacacgtgtgtgttaaaggtggcgaatcctaaagagaagggaaatgaggttgatgacaataaggaattgatattattccatgaagggataatgaacaaccctacattgtcaaggctatttccgggtttgaatagggagagggagatgtctgctatggtctcagctttgacccacgtggtctccggagaggtgccaataaccggtgattcttcttcttcttcttctttggttcttcatcatcaacctcatgatgatactgttattgttacaccaaccatgccttcttcttcttcttcatctacttatgttgttggcacctcttctctcaagagaagtagggaaaatgatacatata

SEQ ID NO: 11819 - DNA, 55 bp, Glycine max
gacactcgtccatggtgtatgcatcaatatcgttaatcagatctactaattctga

SEQ ID NO: 11820 - DNA, 162 bp, Glycine max
tatactcgtaccagctctcatcatcacattcgtgatttactgcaccctttccgggtattggattcttattgaggctacacgatgtgtagttaaatgcgtcaaatacctatagagaaacgaaatgccgttagtcacagtcatgaattgatattaatcccatga

SEQ ID NO: 11821 - DNA, 209 bp, Glycine max
atcggtgaatatttcaaagtttgaaacatctgagataaagcttttgaagactgactatcaggagtatctccagctaaaagctgtcaaggaatctcaaacatcatctgctataagtggtcataactacactgcccgcatttcttaatccggaatggggtaccgggttgaccattggcctaagaattggattttaagggctttaataactt

SEQ ID NO: 11822 - DNA, 382 bp, Glycine max
gaagaaatggcgagtagcagcagcaacactccgaaggaaagcgttgttgtcgactgcggaaggcgtcgaacctcttgcggctattgcagatcctctcgtcacaatagcatctctcatggcatgtgggcacatagccttactgtggatgactaccaagatcttcttgatcgtggctggagaaggtctggatgttttctttataaaccagagatggaaaggacatgctgcccttcttatacaattcgcttgaaagcaagtgactttgttccttctaaggagcaacttcgtgtatctagacgaatgcaaaggtaaaaaggcaaaagcttgagatccgtttaaacagatccagttttgatccagaagaatttgctttgtacagaag

SEQ ID NO: 11823 - DNA, 240 bp, Glycine max
tacttctcgttttactttgacggtttctagagagaggaaggttgttatagagagagaaagcgcgctgctgcttcttctgctgctgcttcgacagtgagaagagagagagaagcgctcttctccgtaccgtttctagagagagaaactgatggccggagttaatccgaacggcgtcgccgattttccggcgactccaacgcacggcggacagttcattcagtaccaccatattcggaaacc

SEQ ID NO: 11824 - DNA, 365 bp, Glycine max
ctctgcaataacaacaccatcaacaaccccttcaagccggcctaaaccccattacccaaaacttggtcttttttctttccttcaacactctctattggatcatcacatattcaatttcattctcttcaaaaattccccttcaaaaaaatttaaaattaaaaaaaagtgctctttttgtgaattttgagccatttgccaccgacagatttcgatcttcttcgtgccaaagttgtaatcttttcgaattttggccaggtgggtcgatctgatttcgctcgaataattgccggttcgattttgatctgaaaaagggaaagagaaaaaaagattgggttatttctgattcaagatattggccctttttg

SEQ ID NO: 11825 - DNA, 241 bp, Glycine max
ctctgcaatagcttcaccatcaacaacccctgcattctttgctaaaccccattacccaagcctaggtcctctgctcaacttaagcactctctattggatcatcacacattcaatgtcattatattcaaaaatgacacttcagaagcttttatagttgccaaaaaacactcttacagagacttttgaaccatttgtcaccaacagatttcaaacgctttcgtgccaaatttgtaagctgctc

SEQ ID NO: 11826 - DNA, 443 bp, Glycine max
atcagaatccaagctttgggcttcattttagggattttacatatatttccttgtttaatgtgtgataatcatgaaaaaatatgcaataaccctgatcagaatccaagctttgggcttcattttagggattttacacaattttttccaaaaacatgccaggccctttaaactcaatcacatgatcttagattggattagggaattgtatactcctttgcttgtggtggagggaggaaagataaaaagaatacgtatgagtttaatgaatgatttgttttatcttgactaatttactcaaaattctttccccatgttgtgttgcttgtcatgagcttttagttcatacatcacgaatgatgtgcatgttgtaattgattaatctttattggtagaagagcgatacagttattagatgaatccaaggaaaagtgtagttaacaacc

SEQ ID NO: 11827 - DNA, 320 bp, Glycine max
accggtcacggcgtccgcgtacacgtccgacgacgcatacggtcacagttgttgatgcagatgctgatgctgacatggatggctaacagatgcaactacatgtgctccaactggctcaggctgcagaagacgctaaggctcttgactaacccgatgaggcatcgggaaaaggatgaggacagatgatgaactatgatagctcttagttcgatggctttcaatgtatcctagaggatcccgatctatttgtacccgacgagaaaggccataagccatatgtacgcaattgatcaggaccatacgcagtctatcaggggcaa

SEQ ID NO: 11828 - DNA, 445 bp, Glycine max
ggcgattgaagcacagttgtatcccaacaatgctcctccgtttccttttcacgtgtcaagggtagacaaatctccagcagcatatagtcatagtcacaggcaacaacaaccaggtggctggcagatgaatcagaacattcctcttgttcctcccaacttttcttgtttttccaattccaattccaattccaattccaatgtcctccaaaacgccttcaataagaatgttgttcagccttcagcctcatatcctcaatgcttggctattgagtttgatcaacagagggagattgatcaccatatcagatcacataacgaaaaattgaagattttgttgcaagagcaaaggaaacagcatgtggcagagttattgaagaaggtggaatcgaatgctcttcatttgttgagacagaaagatgaagaaatagcgcaggcaacaaagaaa

SEQ ID NO: 11829 - DNA, 337 bp, Glycine max
cttcactcttacgtctatcgctttcacctctctctctctctctctctctctggctctcgctctcttcgattttgattttgggtttattttttcccccttttcaattctgttcatggtgttgagcgtgtcacggtaattggcggcaagtaaccgtcaattccgataaccctttggtgaaaagcttgaaacttgaggagtttgaagaacagggggtttatcgtttcgtcgtggatgatggcgaacccatctggcaaccatcaagagcacacgcacgtggtgtcatcttctgctccagagacttcaggtgcggctctcgcgatgaagcacaatcctagca

SEQ ID NO: 11830 - DNA, 371 bp, Glycine max
  modified_base (351)..(351): a, c, g, t, unknown, or other
gttgagttgatttctgatcccaaattgagtttgagtttcagccatggtatctgtttctctgctcttattcctatctttctttgccttctttgcaccctctgaatctcacgacaaagtctcgttggaattgtactacgaaagcttatgcccctacagcgccaacttcatcgtgaatcacctcccaaaaatcttcaccccagatcttgccccaatcgttcacctcaaactcgttccttggggcaatgccaaactccgtgccaacgccacctttgactgccagcatgggccatatgagtgcttgctgaacacagttgaagcctgtgcaattcacatctggcctcaactcagcanacattttcctttcatctact

SEQ ID NO: 11831 - DNA, 427 bp, Glycine max
tctagttcatcatcatcatcatcatcatcatcgaattcccttcagattccaccctgtgagcgagctcgatcggcaatggttgatgttgtgatgttcattgctgttgtttgtgcctgtggctttttgttcttcccttatgtagagtttttggtgacaaagtgttacgaggttattaagggtgttgtgtttttgattaaggaggaggtttctgtggcaccttggatctatatttccatagggttgagtgttgcgtttgctgcattggccacgtgggctgtggtggctttcaccactaggaagtgtgggaatcccagttgcaagggtctgaagaaggctgctgagtttgacattcagttggagactgaggattgtgtgaagaatttggcttctgcgtcgtcgaatgtaacgaaagatggtggttgtggaa

SEQ ID NO: 11832 - DNA, 132 bp, Glycine max
ctagtatgtagtatattattcacttaaataaagcgcattactatgtgcaatgagtgtgtgtaaatattaacaaaaaaaaaagaacaaaagcagatcatagcaaaaaacataaaacagggcctccgttctaaa

SEQ ID NO: 11833 - DNA, 337 bp, Glycine max
cccacgcgtccgcaacatcttcaccctcttcaaatgacatgccatgcaagaagaaccttgacaaaggcttaaaccatgcttcaaaatcaaacaacaacaacaacaacaactgttgtttgttttgccattgtggtgcttcctcttcagtttctccaacctccacactcttcggcatgtcgcatttctcgccaccagtatcaccatcctcgtcctcttcaccacctgcttctccattgaaaccccgaagcgtggtttctcctatttctccaatttcctcgttacagtgctgtgaatattaacccttatcacggtgtttgtaagttacaaagacattttc

SEQ ID NO: 11834 - DNA, 100 bp, Glycine max
cccacgcgtcctaaataaaaaaaaaaaaataaaatttaaaacaattttcaaacttaaaaagaaaaggctataaattaaatttttccaaagaaaaaccaaa

SEQ ID NO: 11835 - DNA, 437 bp, Glycine max
atctgggcatgttagtcgattagatatgtcttctctaaaaaacttggatacagttgcaggatgctccatggttggtttccttctaaagcatgaaggtctggcccttccaacactacgaatgtgtttggaagcttttacatggacagacggtgaagctgtgactaaaatttcttcatattgctctgcattggtagttcttgcgatagtaacaaatcacgcagaactcattgaatatgtttctagagatctttttacatccattattaaaggtttagcccttgaatcaaatgcaataatcagtgctgatctagttggcatttgtcgtgaaatatttggttacctttgtgatagacacccaactcccaagcaggttttgatgtctcttcccaatattaccactcatgatttagttgcctttgaggaatctttaacgaaaa

SEQ ID NO: 11836 - DNA, 436 bp, Glycine max
caacaacgaccgcgccggcggtcaccggagaacaacacattcccggtcagtttcctggagcgaccggtctccggttacccggaaaccgccgcgtccgcttcagcctctcgccatccacaaacgcagcgttttggagtggcccagcgccggctgcgacgatctcggtgattggtctcttccaccgacccctagagggtccaccaaaacaccagattcgggttcgggtcaagttttccagttcaagaaagactattacgcgttctacgacaaggaatgttcgagaatcgcggagcacgtgtacctggggagtgacacggtggcgaagagcgtcgagcttctgcggcggcacgggatcacgcacgtgctcaattgcgtcgggttcgtgtgccccgagtttttcaaaaccgacttcgtctacaagaccctctggctgcgt

SEQ ID NO: 11837 - DNA, 437 bp, Glycine max
gttctctaatcttgtaattttctgtgtcgcttcgtggttcattcttctcgttcttgtgatctgttctattttggagtacttacaacactcctttgcaagtttaattaattaaagaggctaatcaattttcaattggactgcagcagatggctgaggagggttgcagggttactctaaatgtttatgacttgagccaaggactagcacggcagctttcaatgtcctttttggggaaagctattgaaggcatatggcacacaggagttgtggtttatggtaatgagtattactttggtggtggcatacaacattctcctgctggattaacaccatatggaactccacttagagtggtagacttaggtgtgacacatgttcccaaagatgttttcgaaatgtatttacaggaaatcagtccgcgatacctgcctgaaaca

SEQ ID NO: 11838 - DNA, 416 bp, Glycine max
gaataatgctattgtggtaagatccagaaactcttctccaactacagtctcgaattatgggtatactgatggagagcttgtcaaactagaaaaggatgaaaaggttagcattgtaagggaagatgatataggtgcatcactggaggatgaagaggcagctgctgtgcaagagcaggtaatgcaaataaaggctcaagaggaggaatttgaaaccttcaatctaaagattgtgcacaggaaaaacagaactggctttgaggaggacaagaatttccatgttgttttaaattctgtactagctgggcgctatcatgtcaccgagtatctgggatcagctgcatttagcaaagctatacaagctcacgacctgcacacaggcatggatgtttgtgttaaaattataaagaacaacaaag

SEQ ID NO: 11839 - DNA, 423 bp, Glycine max
cctccttcaacaaccctgccgaatgcagagccgtatcctctgcttctcaacgcgtggtggaccactccatcagcgtcgttttctcagccacttcattcccgaccaccaatacgacccgccgttctccccttccccaaaaccctactacaaatcaaagaagaaccacgcggagaagaagaaaaagaacaattccgaaaacggtgatccgaacaaaaacggagccccgaaactccctttcaagtcgaaccttccgttcgacttcagatactcttattcggagtccgacccttccgttgggcccatcagcttccgcgaatcgcccaagttctccccctttgggccgggccggatcgaccggaaatggaccggtgtttccgctccggttcagggtgaaccggacccggagagggtcgaggaggagcg

SEQ ID NO: 11840 - DNA, 163 bp, Glycine max
gggttctgaatgatgattcaattcaaactatgattgtgtccttgaataatttttatcatgcaattgtaatttgtattgagctaatcataaacatgaagttacatgttcaaaaaaaaaaaaattaataaataaaaaaaataaaaaaaaaaaaaaaaaaaatgaa

SEQ ID NO: 11841 - DNA, 381 bp, Glycine max
cagagagaaataaagaaaccgagaaaagacagcgatgcaaccaacgctccctctcctccttgtacgctttcacacacatccctaccttcttcatcctcgttcgacaatcttttgaacaaacccttctttcttctcatcatcgccttttcttttccaccgccacttttttttttttttcaattcgcttcatttctggcaaactgtctctgtcacacacccaataattgaactcaccgaaccaaacccctctctctcaatcaccgaacagcaatttcttcactctactcctttcaagtttaaggcttttcccacgtgctgccccaagaacactgatttccagggtttgttctttccccacccaacccttttcggttttctcta

SEQ ID NO: 11842 - DNA, 328 bp, Glycine max
gggatgttgaccatgacgaagtgttgccagagctcattaagttatcattgtgctggacggttccagatcctgaacatcgaccaaatatgaatgatgtgttatcttcccttgtgaagcttcagacaacactgtcttgataattgctaaacacaaccgatcactccttggagctgctttttctaaagaagaaatatcaaatgcttaccaattgcctcattactattgtctttaacaacagcaaagcctcattgtatccaatatccatgctagtgttccaattaatgtacggaattatcaactttccttcacagccatttaatataaaatt

SEQ ID NO: 11843 - DNA, 450 bp, Glycine max
gagaacttgaaaccagtggtccaacagaagatcaatgagcttaacagcaaacttgcatgccaacaaaatggacagggaaaatttagttcaaataattcactggatttttctcccgtgaaaaagcaaacttcggctagttatggcctaataaaggctgtcaggcctactgctggggagtttgtttaccaaggatcaaggagccaacctttctcttatgtcaggcctgtggaagagcatgcacgaagactatctctaactcttccacctccaaaggaagaaactctctctagacattctatccttggtcccaacgggctaaaaaggcagtggagaccacctatcattgattaaagggatcaagtatccaagcaacatagatctggctcctgttgaattaccaagcctacaacattccttggaagatgaatctctgaaaaagaaggataacag

SEQ ID NO: 11844 - DNA, 421 bp, Glycine max
tgatgctgccagggatgaaaatcaaaagaagtctgtaaaagagcgaccaaaatcctcttgtgaattcgaattcaaaaggattgcagtcaagcaggagtatgcaaaattctgtcccaaagcaagtgaattcagatgccagagattctgttcatgtttcatcttctaaacctttgatacatcagactgcaagtatattaggctctagtgagtctaatgcatcattgcaccatcagaaggttttacaagtgcagaataagatttcatcttcagcgccacagaaagttgaaaaacttaaccaaacaaacatccacactttctccaagttgaatcaaagtcatgtatcatcagtgaatccttctccaatatcgaattcttcaatgctgagtgatgaagagcttgctcttctattggatcaagaact

SEQ ID NO: 11845 - DNA, 220 bp, Glycine max
gttagttcacacactaagttctgaaaaatgagttccaaagtttttcttattctacttatgttcatggccactatacttttgatctcctctgaggttgcacccgatgatgcataccagaattttgacaaaacagatgggaagcgtaatgcaaatggggtagatgaaagcaaatattgccgtggtggctatggcgactatggtggttggcttgttggtggtt

SEQ ID NO: 11846 - DNA, 415 bp, Glycine max
tccacgcgtccgtgagctgcttccagaaaaatgttaccatggccatgtgtttagaaagcgagcatgccccattgattccttaagtttgagattaagtttgttggagaaagttttgaggagttttcttgaccataagatacttaaagatcagctttttggccttcttaaagcaaatattaaagcatcagctgttgtaaagttccccttagaattagaaagggacataagtaataatgccactcttaatcgtacgattcctgattggagaacaaggcccggttttgaaaggttctggtttgagatattggccagagttgaggaaaacaagctcaagcctcttttaatcaaggaagtaagaccttttatcgaatcagttttaatttcctgggcgaaattgatgtccaatatgtcatac

SEQ ID NO: 11847 - DNA, 372 bp, Glycine max
acgatatgtactagtgttttgttagttcacacactaagttctgaaaaatgagttccagagagggtcttattctacttatgttcatggccactatacttttgatctcctctgaggttgcacccgatgatgcataccagaattttgacaaaacagatgggaagcgtagtgcaaatggggtagatgaaagcatatattggcgtggtggctacggaggttggggtggtggctttggccctaacgaacataatgaggctgggattgatgctagccctcacaactaagaaggaaacttgctaaagcttatataggatttaagttatcggaataaataaaacttcattggaagggtagctataatagatgtggagatct

SEQ ID NO: 11848 - DNA, 425 bp, Glycine max
  modified_base (379)..(379): a, c, g, t, unknown, or other
  modified_base (402)..(402): a, c, g, t, unknown, or other
  modified_base (405)..(405): a, c, g, t, unknown, or other
  modified_base (408)..(408): a, c, g, t, unknown, or other
gaagctcttgtgttgtactcttgctgcatcttgagtctttaaagaagtaaaccagcggcgcaccacatccccattcaaacaattctctttctctcttccccactcaacactccttataatcgattacaactaaagaaaaaaaaggggtttttcaatttgaatcctttccattcccacaccaaccaaccaagaaaccataaggcacattgttattatgaagaaattgaagaactactacatgcacctgcggcaccaccaccaccaccaccacgccgcggcggagcgcaagtgggtgttcccactcgccattggctccctcctctccctcttcctcctcttcctcgccaccctcacctccccggagggaacccccatcctncccttctaccgctccatcaccgncgnctnctactccgtcttcgtcg

SEQ ID NO: 11849 - DNA, 306 bp, Glycine max
attccatttctttccaacacacactttctctctctatctctctctctctctctctgtgggtgtctttcattttgttcattggtgttgatgatgtcacgcgccgccgtgttattacacgcgcaggaggaggaggaggaggagtgtagtacttcgacgtcgtcgtcgatcgggaggaacagcgacgtgtcgtcggagagatcaatggaggaaggagaaaacgaggtggaaagtgcctaccatggacctttgcatgccatggaaactttggaagaaggtctttccatcaagaaaagcattttgaacttt

SEQ ID NO: 11850 - DNA, 441 bp, Glycine max
cgaaacctaaaatttctgagattaaaaaaaaaaaagggaattgtattttcttcttcttagatgtattctatttttatatattttttaatttagcttaattttgcagcttggaaagggaacgaacgacaaacttaacaacaaaagagcgccggttgggaacagggtgctggaaaagcacaagacttttcaataatccatttgtgttagggtttggtctctctcatctcatctaaaccaccgcgatcagaagaaacacacacctgaatagcaattgcgacacgccgaagcatcattcatagtcaattccccacctccggcgacccatttcgatggagacattgtttggaaactagggttagagggagcttttgctttggatcatatagggggtctgctggagcaaatgagattatgattttgtagttttgctcagtgattgtg

SEQ ID NO: 11851 - DNA, 280 bp, Glycine max
tgaatttttagaattggattgtttatttcatttgtatcatgttattgttgggtttggttattagtgtatagggttagtaagggatttggttcttggtgatggattcaattggcactgtttgaatgatgtttttggtgtttgttttgatcctgcagtgatagtagtcttgcgaatgcaatctcgcgttcgaaacctgctgtttatcaagaacaagttcaaattcaatccgggactacaaggggtcccagtaaccctgtggatccaaaacttaatgtgtctg

SEQ ID NO: 11852 - DNA, 285 bp, Glycine max
cccacgcgtccgatcatcaacacagagctgagtgtgttgctctgtgaatccaccttcttcttccattggaggaccatttcctcctggaatagaaatactaccacacttttcttttttcacttctctaagttgctaagttaattgctccttcattttttcactcttcgttctcgcgtacccgtgtcacggtaactcgtggtgaagtgttcgaaaatgactgtcacacctaagatctcagttaacgatgggaaacttgttgtccatggtaagaccattctgactgga

SEQ ID NO: 11853 - DNA, 453 bp, Glycine max
ctttgtttggtgcaatgtgccaatgtttggtaggtcgaaattatgtcatttttaagcctgaattgctaatttctgctgggtgagttttattttattgtatttagcctacaatcttgatttaggctagtattcttattataaagtagtgatcttggaagatcttaacatatttggttcatgcctctcatggagaagaacctctttttggtttctcaagatgatatagtcttgaagggatctagcacaccctcttttatcaaaacccctttggcttcttttgcactttcacttacacaaacacaattatatcacattcaaatgccacactcttggtgattatgcttgaatcaacctggtggtggaaaccattttaaaatttattttcaagaagcaaatatcttaaaatgaatatgattgaaaatataaaatgccattgtttaatttaatgggact

SEQ ID NO: 11854 - DNA, 230 bp, Glycine max
tcgcccacgcgtccgtccacgcgtccgactggctgttctttttggcgttaagaatgaaattgggaggtctaacgccactaaccctatgctgacgcgacttcttgagaactgtaagagtctcaaatatatggttgatgagtgtccttttgcatttgtgaactagtgtgtaatattttattcacttaaataaagcgcattactatgtgcaatgagtgtgtttaaatataaaa

SEQ ID NO: 11855 - DNA, 354 bp, Glycine max
cagacattccttcggttcactcttgctccttttcctcgtgttgttgcagaagcgattccaaatgggcttgctagaagaaaaccctaatcattccaagaccatcctgatccgcgaggtctgggcatccaacctcgaatccgaattccagctgattcgtcaagtcatcgatgattaccctttcatttccatggacaccgaattccccggcgtcgttttccgtccccacactgtagaccccacaaaaccctaccttccaccttccgtccactaccgctttctcaagtccaacgttgatgcacttaaacctgatccagatcggtctcactctctctgattccaacggaaatctccccc

SEQ ID NO: 11856 - DNA, 345 bp, Glycine max
  modified_base (20)..(20): a, c, g, t, unknown, or other
ctaaacccaaaccgaaacanaaactgacagacccaaaacccacacccaaacaagaccaggacccaacactcccaaaccaagcggcgaccatggccgacgaatcacaacctcaactaatcgaggagagaagagaggagcaagaacttaagtacctggaatttgtgcaattcgcgaccatccaggccctgatgcgctgcgccatcctctactcctacgccaaggagcgcgcgggtcctctgaagcccggcgtcaacaccgtcgaggaggccgtgaagaccgtcgtggcttcggtctacgacaggttccaccttatccccggcgaggtcctcaaatacgccgatcgca

SEQ ID NO: 11857 - DNA, 343 bp, Glycine max
cccacgcgtccgtgaaccagcaccatgccctcgtcgtcctctctccgtcgccgtgttcaccagctatcgccgtcgatcaccccaccgcaacggagcatggctgttggagaccacaccacgccgcttctggattccttcaaaaggggggtttgggagtgacgaaccagaaggagaaagagttgttgttgggggataggggtggtggggacgaggagggtatgggtctgaactagatcccttccaaatgaaccctctaatcaacaacccaatgacattccaaaaccgttgtagtgcccacaggctagcgaaaccctatcccatactggcgcataagaagagaccc

SEQ ID NO: 11858 - DNA, 375 bp, Glycine max
aaagaatcaagcttcgtcaaagtgtctgtcacacacagtctttaagatctggaagcgcttgtcacttgcccacaataagaattcctctcaaatttcaatttttcatttgaaaataataaaaccctaaaagaggggttgcaagcaaaatgagaagctcgaagatgtggatggttttcatgtgtctgacggtgagcttcttcgctcgcattgaatcgctatccgtgacggtgaacgacgtcgagtgcgtctacgagtacgtactttacgagggcgacaccgtttcggggaactgtgttgtcggtgaccatgacattttctggagctctgatcaccccggcattgatttcacagtgacaactgctgcaagtaattctg

SEQ ID NO: 11859 - DNA, 138 bp, Glycine max
aaaaaaaaaaaaaaaaaagggcggtcgatctaaaagatccaagcttaaaagggcgggcgtgctaaaggatccaagcttactttccccttccttccaacgtataacttttctaatatggcaaccaaattcaatttaatt

SEQ ID NO: 11860 - DNA, 234 bp, Glycine max
aaaaaaaaaaacgtttgacagaagctcccatataatgggctgaagctgtacagatttcggggctcgttacccgtgccatcgtgaggcacacatctgatgatagagatctataagatgcatagacatggacgccgtccaacaccattatgacaggtaataccatgactatgcggaacttaacaagatgaccatacaaactgccttaattatgtagagtgcttgcacaagtacttc

SEQ ID NO: 11861 - DNA, 467 bp, Glycine max
  modified_base (398)..(398): a, c, g, t, unknown, or other
  modified_base (439)..(439): a, c, g, t, unknown, or other
cttggggaaggggtggttttaggagtcacacacggcatggcagtggcaatggtagcaagagcaaaagttcccgcagtagtcgcttggctaagttagttgattatctccatagcttgaatgaaaacactgatgagttagatgtccatctcattcttttgtctttagacaaacaaattacaccaagcttgcagcagccacacctttgctgtcggccaacattgtctgtgaagcatctttgtgaatatgttgctcatcagacacctttgctggttgaagaagttgagatattggcagttaaaggatgctgcagtacagtttgtgacaagtcatttgatgagacttcatcctctgatgagctaactacgctggttatagatcctagcaaagatgaactgganactctgcaagggcatgaatctctggcagggattaaatctanatgcatatctaaaagggagcatttgatt

SEQ ID NO: 11862 - DNA, 349 bp, Glycine max
tcgggatggatcaagaggactggctgacattgaggatgggacagatagtaaaagctgtgctgctcagatggaaaatgtatctgaagtcccaaaaccctcggtatcagctgtgaagggggaagaaatcttggaagcccatgatggatcaagaggactatctgacattgaggaagggacatgtagtaaaagctgtgctgctgagatgggaaatttatctgaagtcccaaaaccctcagtatcagctgagaaggtggaaggaatcttggaatcccaggatggatcaagaggactagctgacattgaagatgggacagatagtaaaagctgtgctgctgagatgggaaatgta

SEQ ID NO: 11863 - DNA, 395 bp, Glycine max
atcctggttgcgtttgggatgcaaaatttatggaaaatggtgatattgtgacagcatgttcagatggagtagtacgcatttggaccatagatcaggataatgttgctgaccagctagagcttgagtgatacacttcgctactttctgaatacaaatctagtagaaagagggttggaggattgaaactggaagagttaccaggcttggaggcactgaagatcccaggaactactgatggccagacaaaagtagtcagagagggggataatggggtggcatatggatggaacatggaagaacaaatgtgggataaaattggtgaagtaattgatggaccagaggaatcaaatcgtcaattttttgacggtattcaggatgattatgtagttgatgtg

SEQ ID NO: 11864 - DNA, 445 bp, Glycine max
ctcggggtgagttgactcagcgatggcggaagaggtgactcgggtgatggtggcagtgaacgagtcgagcatgaagggataccctcatccttcgatcagcagcaaaggggctttcgaatggaccatcaacaagatcgttcgcaacaacgtctctgccttcaaccttctttttcttcacgttcaagtccccgatgaagatggttttaatgacatggatagtatctacgcatcgcctgacgattttaagaacatgaatcagagagatagaattagaggggttcatctgatggaatacttcgtcaataggtgtcatgaaattgcagtggtttgtcaagcatggataatgaagggtgatcccaaagaagttatatggcatgaagtgaaacgactaaggcctgatcttctggttgtgggtagcccgaggcttggaccttttaaaaaggtt

SEQ ID NO: 11865 - DNA, 403 bp, Glycine max
cccacgcgtccgttcggattttgatagcaacgttggaaggaaaggtgagagcagagtcgttggaagaatctggtattgtgtcgtggttgttgttttcgcgatcaaaacgatgtcgtcgccggacattgtctcgatattggataactcgaaggagctcgatcgggttaggaaagaacaggaggatattctgtcggagatcaacaagcttcacaagaagcttcaagcaactcctgaagtggttgagaagcctggggataactcattggcaaggctgaaatttttgtatactcaagcaaaagaactttcagaaagtgaagcaagtatttccaacttactgataaaccaaattgatgccctactgcctacgggtccacaagggcaaacacgaagaagaataggaaaa

SEQ ID NO: 11866 - DNA, 163 bp, Glycine max
tcggataaggagccaaccttaagttatgagtttgttatgggaaaacttcttgtagtaaactaggcatagcttacttggaatataaattcttgtagtcaactagtctgtaggtttcaattactgaggttaaatcccaaatgaataatagcaacttggtttatat

SEQ ID NO: 11867 - DNA, 411 bp, Glycine max
gagacactaactcctctgtgaaatctaaagcgtaatattattaaaacaatggccagacgccaagcttcccttctctccaaaccttccctcccattcccgttcctgtctccgaaccactccccattctccctctccttcccccccacgcgccgcgtcccttccacgctcctatgttgcaccttccgccccgaacccaacccctctgaactggaacccgaacccggttcagccaacaccgaagaagaaccgggtataaattcacccgaagaagaaaaagaaggtgcagcttcggtttcagatttgggtttggaagaagaaggcgccgaggctctcgatagtggcgctgattcggagaagattgcgaatggaaggcggctctcgatagtggcgttctttgtggggctgtgggtg

SEQ ID NO: 11868 - DNA, 367 bp, Glycine max
tcggtcaaaaggagtgattgggcctcattggtacaagtgtttttaacaaacagcaacagtacagagcattttgatgcatgtaagtggacaaaatcggaaccacattcctgggaattgatcttcccaatataggtatgtggtcctaataatggttttgaaatgtggagttctgagtgggcaaatcaaacttcatggcatttgagtttccttattgacaatcccaaacagtctacagtttttgacattctcttgggaatttctcaagattttgaaattgctggtaatactcttatgccagctttttctgttccacaggctactgccagatcttctgaaaatgcggaatcctctgcatgatctggaattt

SEQ ID NO: 11869 - DNA, 371 bp, Glycine max
cccacgcgtccgtccacgcgtccgcccacgcgtccgtctgactctacttcacttgcctataaatagggaacactcagtcacttccttcaaatcgacatatatacacttgtactgttctattagttcatactaagttctgaaaatgagttccaaggttttgcttgttctacttatgttcttggccactatacttctgatctcctctgaggttgcacccgatgatgcatacgagaattttgacaaaatagatgggaagcctagtgcagatggggtagatgaatacaagtattggcagggcggctatggtggcggctatggtggtggttatggaagtgggcgttgaagctattgaagtgggcgtggaggctatt

SEQ ID NO: 11870 - DNA, 349 bp, Glycine max
gggaaagacaaaagcggtggatgggtcaaatttttacccttttttttatttggtgctttagggtaaaaataaacaaagcaatttggaaggggctggaccatatttgcagagggattacggctccttccaattgttgaatcacagtggaatcattttgggggaatacttgtcagaagtaacatctgattccaacctgtccacccgcattactttactacaataaataataatgcaaggaattttcactatctcgttttacatttgtggacaatgatgtgttctgtagccttactagtattttttagccttctccagttttactaatttaagcccctttgttcttgataaa

SEQ ID NO: 11871 - DNA, 346 bp, Glycine max
gtcttatgaatttcttcgacgtaaatcgattcttcaacaattattatcatagaaggcgagtcatgttctgatcctgcgcattctcttatggctaatcacgacaataagctgcactgataacagacgatatagtagcctgatcaaacgccggatataggctagattgctcagagcctttatgacgttcaatcttggtgacatgtctcattatgacgtcgactcccagactaccatcatccttgatcgaatctacaacaacgtcttaagcacacgctagtatgagtactattaactacaactagatgatgtgaaatcgcatggtgaagtactcttggtggaatcatgt

SEQ ID NO: 11872 - DNA, 405 bp, Glycine max
ttcttctctatttctccaactctttctgcttcttccaccaaagtggcatcagaaaaccaaaaatggggtgtggcaatttattcttcacaattctgataactttctcagtggcactcataacatacaatatcataatctcagccaatgcccctctcaagcaggacttcccggggccctcacgcccttccatcaaggtggatcctctcatcaagatgccactgcacagaaaatcatcatcctcggaggaatcgaagaagaggttgttgttccacactgctgtcactgcctctgactctgtctacaacacgtggcagtgcagggtgatgtactattggttcaagaaggtaagggatgaaagaagagatgaatctgggatgggggggttcactaggaacctgcacttcg

SEQ ID NO: 11873 - DNA, 278 bp, Glycine max
  modified_base (7)..(7): a, c, g, t, unknown, or other
cggggcntctaagcggcagaaactgccaattcatgcggaggaagtacatagattacgcaggggaagaaaggctgataagcgcttactggatctgcacagaaggcctaaagaacgtagtgaagaagtgatagagacacagatgtactgatgaaagaatttatgatacctgaacgagcagatgcgggagttgaaatacagaaggaggcttattcaattgtgagatgcgaagccatgatatgccctcactgtttcatggctttaagaatacaaatgggagg

SEQ ID NO: 11874 - DNA, 130 bp, Glycine max
gtgaaagctggagcttttgcttcaattcattttactatttcactgattagaacaggcaaagatgtctcttttgggttgatctttttatgtttcgatcaattgaattttccattatgacaccgtcctgaaa

SEQ ID NO: 11875 - DNA, 394 bp, Glycine max
ctgacatctccatatgggttaaagaatgatagacagaaagaaagaaaacggtcaagggcactttcaacaagtgtgaacaccaaactgcggcattcacagcaaacagagtctcgaaacactagtaccctattccttccatgtcctccgaagacatcactctgatacccgaccagaggatcgagaacagtctcaattccactctcgtcttccaagacgaccctctccgcttcaattgccccaccccgcaccagcgtcaggtcggggactcgccaccgaagaccctcgacacgccccacgcccactatgggagcgccacagacgatgacgaacagtctgaccacgacgactaagatgacgacgacgaagaagcggatgacaccgaattaatgagact

SEQ ID NO: 11876 - DNA, 187 bp, Glycine max
aggaacatgcgctttaaaaagcccttctctatcgccaacactccaagacaattcgggacagccaaacttatagcaattagtgtagaagatgaatacattggatgcaactagggctgaacttggactacttgtactatatttgggcaaggctgaagcaagggacacaatattcaaggcaatacaaaaa

SEQ ID NO: 11877 - DNA, 51 bp, Glycine max
cgtgggggaattgtttaatcaacgtacaaaaccacgcaactaattgacatg

SEQ ID NO: 11878 - DNA, 195 bp, Glycine max
agatttccttttgcttcttaccaataacaaacctccctggaagcttctctctgtgggcttccataggaaagatctccgccctgtatatgatggaacttgctcctctttccttttctgattaatataattatttatatttaactggagagagagagacatataaagagagtcatccttcttcatacatttaatacc

SEQ ID NO: 11879 - DNA, 211 bp, Glycine max
ctgtaacataaaattacaaaactggatttctatatcattattattattattatggagggtattattgctattattatcacatgaactagaaatgacttctcttcaattccaccgaggcaacccaacaaccgatacatccaccgccatcgcaaacggtataaactgttcgaagccaccgtcaacgctccgtttattggcgaaagtaggcctt

SEQ ID NO: 11880 - DNA, 52 bp, Glycine max
tgtcaatcgcccatttcaccatcagctgaactatcattacaattattattat

SEQ ID NO: 11881 - DNA, 133 bp, Glycine max
  modified_base (30)..(30): a, c, g, t, unknown, or other
  modified_base (53)..(53): a, c, g, t, unknown, or other
gatcgcgtcctcatttcccaccgcccgtcngatcccagcggtcaagggattgntcctgcacttcaacatccaagatcacgaccctaattagggggtctattcattgatggcccactacaacagaacaactggt

SEQ ID NO: 11882 - DNA, 248 bp, Glycine max
  modified_base (56)..(56): a, c, g, t, unknown, or other
gcgcgaaagcaaccacatcaagcacagtaaatacatcctatcacaccctattacanagtcacttttcacaaacacttaaaatggctctataagctcgttcaatcacccaaaactgccactccatcgtttaatccctttgaagaaaccaacctcagttacttgaatacaccgtggaccaaatgaaatcgttctaagcatagcctattaagatcaatataactattacacaatatatgcaccgataaata

SEQ ID NO: 11883 - DNA, 229 bp, Glycine max
  modified_base (29)..(29): a, c, g, t, unknown, or other
gccaatggccggtgtatgatgcaagtganagccactctgaggagcgagctagaatgcttttttaaggaaggcaaaggacccataatgagaacaggcttaggaataagatgatacaggacaagccaactacttcagatgattccaaggaggatccacggtgggtagaaatgccagtaataacaaaagcagatgttcaaggaactgtacaagctgtcacagaggcatcaaa

SEQ ID NO: 11884 - DNA, 237 bp, Glycine max
  modified_base (52)..(52): a, c, g, t, unknown, or other
cgcacgcgtccgattcttcaacccttttattgccaacacgcaatcgcagcangcgggtagcttttataaaacttgagcctgccacaaccgtgggccctattacagcagtaacccttggtgcatatgtaggcacaaaacatcaatgcacaacaactacaacaacaagtgctaggaaacctagctgcctactctcagcagacagcggtatatgcaatacaaccaacatgctgcatagaa

SEQ ID NO: 11885 - DNA, 212 bp, Glycine max
cgcacgcgtcctcctacgcgtccgtcaatctcatcctctagctagcattgagaagcaatatcttcgaattgaggagagcgcttttaatggcggtggagtaccattgttgtgaaactcattttttcatacgcttattgataattttgctgcttgtgttgttttctggatttatgtcttgtctcactttatgactcatatactttattcttttt

SEQ ID NO: 11886 - DNA, 278 bp, Glycine max
  modified_base (32)..(32): a, c, g, t, unknown, or other
gtcaaatgatagttctatggtccaattgcacnaactggtcaactattgcgggcaagttagaatactaaggtgcgctggccagtgctgatactggaatcagaataaggactcgtccaggaagaaatgaacagccaaacatggacacgatggtacaatcacaaggtattgcaccaaggagaatacgattgggagttgttaggcgtccgcttggttcccaggatgggagttgtgcttgtgccccagaagaccataatccaaataccatcattactgcagag

SEQ ID NO: 11887 - DNA, 53 bp, Glycine max
tgcaaatctggattctgactaatattacgtaacccctgaaaagtatgagggga

SEQ ID NO: 11888 - DNA, 136 bp, Glycine max
cgctatctctctctttctcctaagcttaatatccgaatttagggaatagagaaacgctaataaaaacatatcccaaacccatcaaaacactgagaacctgataaaccatatcatgaaatagaaattcactacctaa

SEQ ID NO: 11889 - DNA, 312 bp, Glycine max
agagaacacaattctcttattgatgttatgcttacagtttcagattgatgactctgaggaggtgtcatgaaagatgatcccattggtattttctcaggataaatccatctatgaagcagtggagagcgctttccatacaatatatatcaggaaaagtccaattgaaactgccaataatcttttgagtcttgccactgattccaatataggagatctagcatctcttgagttatagtaggtgccctggactctaagggtgaaatatattgcagcatgatatctcattatgggattccttattgctttaatgta

SEQ ID NO: 11890 - DNA, 157 bp, Glycine max
cgctcgaaaactcaattgcaatagaatccaacccgaaacttctgtagtgcggtgaaactaattataactccaagagggactgagccatcaaagatgagacacaagcataataccaaagatcaaccagagcctggggaagaggtggaatggggggcat

SEQ ID NO: 11891 - DNA, 112 bp, Glycine max
cagaacccataaattctctcaccaagattaccttaccttattgcattgcataataccaggtcaattaaaatgtatgctgacctcacccttactgtgtggcaatacatggcca

SEQ ID NO: 11892 - DNA, 281 bp, Glycine max
gagaaaacccccaactctcaaccataactagaacctctactcactgacttttcaagcaggactattattaagctttttaaagccaacgataaacagagagaactggcagaaaatgcgagtggcggaccacccgttaagaagcaaagtgccggcgagttgcgtcttcacaaagatataagcgagctgaatctaccaaaatcatgtaccatgcaattccccaatggcaaagatgacctgttgaactttgaagtttcaattcgacctgatgatagatattactt

SEQ ID NO: 11893 - DNA, 205 bp, Glycine max
ccgacgcgtccgaattttttatgttactaaaaaaattatattctcatttttaacgttagtttacagactttcacttaaacaaagcatgaccaggattgatgaacgagggagagaagtaactgaagtagtctgggatggggaggagacagaatataagaaacctgataaggctacaatcaataagtctgactgtagcgcatattcg

SEQ ID NO: 11894 - DNA, 164 bp, Glycine max
agagatttgagaggtctcctcctccaatagatactccccatctaagtgaccgtgaagggcgggctttatattatgattctctgtctctctctaaacgttcttatgctgctattgatgaagttcctccactatatgcttatactgttgcttttcttatctagatc

SEQ ID NO: 11895 - DNA, 288 bp, Glycine max
ctcgtattgatttttatgctctttctctaatcttgcatttgaggcattacattggatggctttatttagtgcctgcacctggatttgaagcttacggggaccccactagttaccctggaagttctaataacaaaggcagcaatagtgaactaattgatgaggaacctttgaagttacaaaggctaggctatcaaggacctgaaattgacctgtataatcagagttggagagttttaaatggaccatatatttctgtctggcttcacaatgtggcttggggtgctgtaa

SEQ ID NO: 11896 - DNA, 188 bp, Glycine max
cccacgcgtcctaaataaaggaaattaataaaaaaacaaaaaaaaaaaaaaaaaagaaagaattgactacaaccctaaagaatccatccttacgtacgcttccatgcaacttcttatctcttctataattttacctaaatttaataaattgaccataattttaaaactattagactgtaaaaaccaat

SEQ ID NO: 11897 - DNA, 163 bp, Glycine max
gtttgtacatcttttggtttggtcgattgtacagccttttcagatttgcatgggttgcttcatagaacaacgtgatttgcggattgctgtaaagggcattattaggccataatctaatggacaagggggtgccttctaacctctactacaatgatggttcatt

SEQ ID NO: 11898 - DNA, 242 bp, Glycine max
cacacacacagctagcagatattttcattacgtgaatcactaattaagccatggagaggatatcattaactgggttgtgctccctcttccttgttctctttgttgctcaagaagttgtggtgcaaactgaggcaaagacttgcgagaacctgactgatacatacaggggtccatgcttcaccactggcagctgcgattatcactgcatgaacaaagatcacttgcttagaggcagatgcttg

SEQ ID NO: 11899 - DNA, 184 bp, Glycine max
cggacgcgtccggttctctctctctgatgattatcaaatccatactatcactttcgcgtcgggacttaaagaatcattggcgcgcagacacaaatcagtaccatacgaagcccgacactacgtgaattaagcatgtcgggcagaaaggaaacagtattggaccttgcaaagattggagacaaag

SEQ ID NO: 11900 - DNA, 360 bp, Glycine max
aaagaacgctgttttactcatttagatggctttgcagtaatcacgggacgaatgcggttctgtatggaccatgggcttcttcaagatgttgttccttcacacatgttgaaagaagagtagagctgatataactccagtaattattagtcatcatgcttctatgtgatttattttttgctgactttttcctatgagacttaggtgagaactctagtactggtacatgtaatatatcttcctgactggaggttatattagtgatcatgatcatatattacttgtaaaatccattattatcattttcctcattattctcattaatgattaattgctgtatatcaatgattgattatgtattaa

SEQ ID NO: 11901 - DNA, 125 bp, Glycine max
cctacgcgtccgcctacgcgtcttgaataattcttcgttatactaactctatgtgatggactcttaataataattgcccttgttattttacatgtcatttgtttgtaatattaaccagtagccta

SEQ ID NO: 11902 - DNA, 145 bp, Glycine max
ccgacgcgtccggtttttgtgtgtaacatggattggctgttagaatggagggtcggaggaatgatataaaaaatgtgatggcagggatttagggcaaacgaagggagaatgtggtggaaaagtctgcatcatcaatagaaggaac

SEQ ID NO: 11903 - DNA, 151 bp, Glycine max
gagattttcttcatccttctctgatcactgataactcgattacttgaacattcccgatggcttattaggtggttcttctggacctctttccaagtccatttgtgatgagggtcacgattgcacttgctgaaaagggttttgtatattgatt

SEQ ID NO: 11904 - DNA, 134 bp, Glycine max
cccacgcgtccgccctacgcgtcctagattatttgacacctggatcagagacctggtcggttacattgaaaggaatgcggacctaccacttgcccgaaatcaacaaagcttttgcaaagcgagttgcagatatt

SEQ ID NO: 11905 - DNA, 55 bp, Glycine max
  modified_base (47)..(47): a, c, g, t, unknown, or other
ccgacgcgtccgccataaacaaacagaactaccaacacaggtattgnggctcttc

SEQ ID NO: 11906 - DNA, 154 bp, Glycine max
tggaaccttacaatgtactcaaatctgattgctatcgaaagggatgagtaaagatgtagcacgctttaaaagaaaaatgcaccgtcccgttaaagggtggatatgagaccaaggctgctcctgtatagctgcaaccattgtctattccagatct

SEQ ID NO: 11907 - DNA, 348 bp, Glycine max
  modified_base (30)..(30): a, c, g, t, unknown, or other
ccgacgcgtccgattaaaactcttaaatantattcctgatagaaaaatagaaaggatcgatttttagcaaggttcacaaaactggttggaattagtaaaactgttttgatcaaaagtgtagccgcaggaattaaccttctataagtatgattctttcatagaaagaaaaaatggtatgttgctgccatttttgaaaagattgaagaaacccgaagtaatgccaaaacctaatgatacagagaaaagctaaaagaatatggaacaagtaatatccatatacaaaatgtattatcaattctattatatataaatataaaaatatatattatatattatacatttcacttg

SEQ ID NO: 11908 - DNA, 258 bp, Glycine max
ctgcaaaccctaaataccaaagctccgtattccacgcagcgcgccacaaaccgggtggtgaatctaaattcgaagagctaaacgaatggggaaaagaaaagagcgtcgtcgcctcgccgctatcagcaacgccggtcgcagagtcaaactcgatcttttcacggaaccctctggagagttgggtggctccactctactaggtgatgcttgatgagatacttgatgcacagtcattatgatctgttacactattcaccc

SEQ ID NO: 11909 - DNA, 52 bp, Glycine max
cgacgaccgcgacgtcggaacccacattacttgcccggaatgccgccaaatc

SEQ ID NO: 11910 - DNA, 305 bp, Glycine max
gtctttgtctgatacccaaaccgtaactactctttcccaagatgggagttcaacggcgtgatgctttatctgaagacaacgagcctgctgaaaatgcttgtgctaatagttcctcgtaccaacgtgctcttgccagtatagtctgccaacatcgatccatgtgtaaatactgaaagtcggaaatttaatgaacctggttacaaatcttatggcaacatttctacaccgcatatctattgacaagatgtcttgaaaaataatatcattggcatgattggtatagtaacaaatgttgctggtgaatt

SEQ ID NO: 11911 - DNA, 210 bp, Glycine max
cagcaataggagatctcctaatttggctactccaactagtcaagacagagcagggccggcataattacaatcatttccagaccctctgaaatctaaactgaatgctgtatcaacaagatacaaggagtcaattaccaagagcacaagatggtggaaggatagattgatctctcataacaacaccatgtcagaccttggattctcaattaa

SEQ ID NO: 11912 - DNA, 299 bp, Glycine max
ccgacgcgtccgaataggtaactggaatctcctcgaacaacctattcaccgtggcttgcaacgtttgtacaaagaatatggaatcatcgtttccctttggttcggttcacgtctcgccgttgtcatttcctcaccaacagcataccaagaatgcttcaccaaacacgacgttgccttggccaaccggctaccttctctctcgggaaaatacatattctacaacaacaccaccgtaaggtcctgctctcaccgggagcactggcggaaccttcgtcacatcatcgtcctggactgtctct

SEQ ID NO: 11913 - DNA, 376 bp, Glycine max
accgctctctaccattgccatggatctttattgcaccggccatccagcgccttcaattctgccttctttactacaaattctggtgctcctatttggaacaacaactcctctttaaccgttggagctagaggtccaattctgctggaggattatcatcttgtggagaagcttgcaaattttgatagggaacgtatcccagaacgtgttgtccatgccaggggcgctagtgcaaagggtttctttgaggtcacccatgacatttctcacctgacatgtgcagatttccttcgagcccctggagttcagacgcctgtaattgttcgtttctcaactgtcattcatgagcgtggtaaccctgaaaccttgagggaccctc

SEQ ID NO: 11914 - DNA, 52 bp, Glycine max
cggacgcgtccgcccacgcgtctcgaatgaccaacagaaggccaagacaacc

SEQ ID NO: 11915 - DNA, 232 bp, Glycine max
gattccattacatatcatcctttaaaataatttcattggcttttatgataatgggttgaagtctttcacagatattttaaattacaccgaagaaaatagagaaatctgacatgtatctttaatctctagcattattaaattattacgacgatccaataaggtaaactcaagtggctgagagtagagtctgtaggatggattgatgagtatcagaatctgagcgaatattggg

SEQ ID NO: 11916 - DNA, 175 bp, Glycine max
  modified_base (73)..(73): a, c, g, t, unknown, or other
attcgaccactggttgttttgattcaataatatccaaggatggacagactcggggacgtgttctattaaaatncacccaagctttcaaacagatgataagctgctgaaacaaaatggatgctactacacccaagaataccaaggccaggaatgatgaaaaagagaatgaagacac

SEQ ID NO: 11917 - DNA, 206 bp, Glycine max
ctcgctctgtctctctctctccatagattcatggatccttacaagctccagccggccgtttcctttaaaactcccttctggactacaaattctggtgctcctgtttggaacaacaactcctctttaaccgttggagctagaggtccaattctgctagaggattatcatcttgatgtagaatcatgcaaacttattcttggaacgta

SEQ ID NO: 11918 - DNA, 216 bp, Glycine max
aagaacagcggctgttacggctttggctgctctaacgcaatcagcaaaagcagctacgtttactttacaagcacacggaccacaccatacccatgtacaaactgtgaccgacagtgccataccatccgcgatgaaagcattgcacaaggaacccgccacagatatctggactcgcatattcaagtacttaaaagaacgctaacttacctatgatat

SEQ ID NO: 11919 - DNA, 245 bp, Glycine max
ccgatttgtacatataggggcttaaactcctttgaacctgttaaccacgcaaggtccgatatcttcacaagaactcgccggagaaaaaaaaaagaatgatcgacagagggaaaacgtcggtcgccgtcgtgtactccgacggaaaccgcgagatcaatgtcggcacggtcgtggtggaccccacgctcaactttaagagccttcgcacgctcctcagccagcagatcgggatctcgccgcaccag

SEQ ID NO: 11920 - DNA, 384 bp, Glycine max
caaaaacccataaatcctctcaccaaataaacctcaatttattgcattgcataataccatgtcaatgaagttgtatgcttccctcacccttacggtgtggcttttcatggccacattttcgcgagcccaatacgttattgacacaaatggcgaacccgttgacaatgatgatgagtattacatcaggccagccataaccgacaacggagggcgtttcaccttgatcaaccgaaacgggtcgtgccctctctacgtgggtcttgaaaacaccgatacgccactgggttatccagtgaaatttacccattttgcccttaacgttcaagatgaggatataagggtgaacagcgacttgggaatcgaattcctggaagttttcacaac

SEQ ID NO: 11921 - DNA, 410 bp, Glycine max
cccacgcgtccgcccggtcagccttggtctgtccccgtaaggaaatggccggggagtttcaggaaacccaggcgccgttgcctcagcggagcccgggctgacgaggcagggcagcgggttaaaccggagcagttccgcgcggggtggggaggccatggcgtccggcagtaactggctgtctggcgtgaatgtcgtgctggtgatggcctacgggagcctggacttaaaagaggagatagatatccgactgtccaaggttcaggatatcaagtatgaacctcagcttctcgcagatgatgatgcaagactgctacagctggaaacccagggaaatcaaaattgctacaactacctatacaggatgaaagctctggatgctatccgtgcctctgagatcccatttcatgctg

SEQ ID NO: 11922 - DNA, 157 bp, Glycine max
atctgaagagaagcctctgctgtgccctggttgagccctgggggcctttatgggtgcttcttcaggccttccttaccccgtcattttactttatgccttaacgctgaaaaatgttctaggggctaataataaagctctcatttctcctgcaaacaat

SEQ ID NO: 11923 - DNA, 408 bp, Glycine max
  modified_base (374)..(374): a, c, g, t, unknown, or other
ccacccttccggtctctcttttgggtatattcaaatccattactatcactttcgcatcggtacttctcttttcattgtcgcgcagacacaaatcagtaccatacgaagcccgacactacgtgaattaagcatgtcgggcagaaaggaaacggttttggaccttgcaaagtttgtagacaaaggcgttcaagttaagcttactggtggcagacaagtgacagggactctgaaagggtatgatcagttgcttaaccttgtcctagatgaagctgtagagtttttaagagatcctgatgatcccctcaaaactaccgatcagaccagaaatcttggcttaattgtttgtagaggaactgctgtcatgcttgtgtccncaactgatggtacagatgagatcggcaacccctt

SEQ ID NO: 11924 - DNA, 392 bp, Glycine max
gtttgtacatcttttggtttggggcgaaagttcagccttttcagatttgcatcaatttcaacagagaacaacgtgatttgtggattgctgtaaagtgcattatttggccattagctaatggacaagggggtgcctcctagcctcttcgtcaatgatggttctttcatggagaggttcaagcaacttcaacaagagcaggataaagggaagaatgtcaaattggaggattctaaaccaattaaggttatttcagggtctttgtctcccaatccttcctttaccaaaacgcctgtggacttgaaggttaatgacacaaggaaaatatcccaaggtggttccagtggaaagctagctttcagtttaaaacaaaagtcaaagctggtgccaccccc

SEQ ID NO: 11925 - DNA, 377 bp, Glycine max
  modified_base (360)..(360): a, c, g, t, unknown, or other
aaagaacgctgtttttactcaagagagacggctttgcagtaatcacgggacgaatgcgtttctgagggaccatgggcttcttcaagatgttgttccttcacacatgttgaaagaagagtagagctgatataactccagtaattattagtcatcatgcttctatgtgatttattttttgctgactttttcctatgagacttaggtgagaactctagtactggtacatgtaatttttcttcctgaccggaggtaatattagtgatcatgatcatatatacttgtaaaacccactttatctttttccacatagccccatcatgattatggctgtatagcatgatggattatgatttaatgcanggactacttctagttct

SEQ ID NO: 11926 - DNA, 175 bp, Glycine max
gcggccacgcgtacgcccacgcgttcggtttttttctttgttatactaactctatgtcgtgaaccctcaattgtaattgcccttgtgattctacatgtcatctgtttgcaatattaaccagtagcctacgtcgtctattctaacgttctgatacatagctacataccgctgacat

SEQ ID NO: 11927 - DNA, 378 bp, Glycine max
gaacaattcaggtctaagcatatatcccgggatgattttgtgaagatgctgaggttaatagttggagatggtctgttgagaactacaataacaaatcttcagtataagataccttccggtggtgaattgaaagactcaatcaagaaagaagactgaggctgtatttctgtgaggaggtggagatctttatccttggagtcaattaatgtcaactgtttgctggataaatcaaaactatcttttttcatttccttttgtcatctatatttggacttgagacatacatgcaactagaactacattatagagtttagtttgaactgtttgtgattaggtgacctgtcaatcaaccctcttgattatgttgggtttttatga

SEQ ID NO: 11928 - DNA, 411 bp, Glycine max
gtggaggcttgtcttggctgtttcttcgtctccatggtgttcggaggtgggcggctttgacggagaagcaactgcagctcaggcgtggacgggatgtttcgtcttaactcactttctgcgttggcagagctggcagtgggctctcgatggtaccatggaggatcacagcccacccagatcaggcgacggctaatgatggtggcttttcttggagcatctgcagtaactgcaagtactggtctgttgtggaaaagggcccttgcagaatctccaccatctgcaaacaacatcaagagtgaacttggagataaagggaagagtaaagaggaaggggaagattgtaatgctgaaaaaaaggctgcaggtgtttgacttgagccgtatccagaagagaaaaagaagaaacgttct

SEQ ID NO: 11929 - DNA, 388 bp, Glycine max
cccacgcgtccgccaaaaacaaacagaacaaccaagacaggttttgttgctcttcgagagggttgaagaggatgttctgaaaggaccgctttatctgaaaaaagatttgggtttgcagaaagtcatctactgaggagagaggagagagaaagaggtgtgatagagaaagagtgttgtcttttgtttgtttgtaactttgcattgaattccattcattttttttctctttctctctctctctctcttgtgttactcgctacaagctattcgactataacaccgactccctcttttaccgtggaagaaggaaaatgaatatctcaagtggaagaaggcacagaaggcggtttcgccattgatgagagctagctactttaagagaggacca

SEQ ID NO: 11930 - DNA, 398 bp, Glycine max
cccacgcgtccgcccacgcgtccgattggatttgaaacctggatcagagaccttgtgcttgacatggtttggaaggtgttttgacctcttgcccttaatcaacaaggcttttgcaaagcttgttgcggatattgactacccaatgagtaaatgggagattttttccattgaagggtactacttgagctacaccttgagtttgctagagcttctgaattccatttcttcttgtttttctcatcttggccaagctagcctttctctggttcatggtttgaccctagtggagaattcaccttctttggctacaaagccatatctgaaagcaattcaacttcaacaagggtgtttcagcaccaactttggtcaagatcatgatgaccaaaaaagggtttttt

SEQ ID NO: 11931 - DNA, 361 bp, Glycine max
cgacgaccgcgacgtcggaacccacatctgcggcggcggaatgccgccaaatccgggaccaagcggcggaagctgccagtcctcgggaaccctaaattgcggcggaaaatcgtatcctcagtaccgttgctctccgccggtaacttcctcgacgccggcgatcctgacgctgaacgacttcagcgaaggcggcgacggaggggacccgtcgcagtgcgacgagaagttccataacaacacggagcgtgtggtggcactctccacggggtggttcaacggcagttcgctgtgtttgaaaatgataaggatcacggcggggaacgggaggaacgtgacggcgaaagtggtggaccagtgcgac

SEQ ID NO: 11932 - DNA, 377 bp, Glycine max
gttttgctccgttctaagcatggggaaggaaggagatctatgggacgattcagtgctcagtgaatgccttcgaccaagctatttctacttacaacaaaatgcatagcagcggcaaacacaaagacgccgcctcggttcaagaggaggcgaagacactgatcggagaaaatggctccaattttgacactacaaggggtgctgatacgaatattccagctactgatgcgcttgattcaggtgagactggtaatttgtcgaagttggaagaaaatcatgacacagagtcacaggtggatcatctggattcaacaagtggtcaagacatccagaatgcacagaacggttatgcatatgctcaagctgtagatggttataat

SEQ ID NO: 11933 - DNA, 380 bp, Glycine max
ctgcaaaccctaaaaaccaaagctccgttttccacgcagcgcgccacaaaccgtttgttgaatcgaaattcgaagagctaaacgaatggggaaaagaaaagagcgtcgtcgcctcgccgctatcagcaacgccggtcgcagagtcaaactcgatcttttcgcggaaccctctggagagttgggtggctccactctacaaggtgatgctggaggagatactgattctcaacatcgtgatgggttacccaattcaccctcttcttcaggtcaacaaccacagaatcccctgctgttacttgggcaatatagtgatgatgaaggggatgatggatcaagcaaagggcttaatgatgcaaatgtgcaaagccccatgcttaatg

SEQ ID NO: 11934 - DNA, 368 bp, Glycine max
gtctttgtctgatacccaaacctcttcttctttttcccaagatgggagttcaacggcatgaagcgttttctgaagacaacgagcctgctgaaaatgcttgtgctagtagttccttgaaccaaggtgctcttgccagtgagtctgccaacagcgatccaagtgtaaatactgaaagtcgtgaagttaatgaaccgggtgacaattcttataagaaaagtagtacaccgcatatctatagacaagatgtcgtgaaaaataatatcagtggcatgattgggattgtgacagaagttgctggtgattctgattcggattcagatagcagcatcactgatgacgaaaatgatagtgaggatgaggatggtgat

SEQ ID NO: 11935 - DNA, 394 bp, Glycine max
ctggagggctggtgcgacgtggagcacggtggggacggctggagggtggaggagcggccgggagactgtggggtggaattcatccatgatgagagcgtcaagaagtacttcgcctcctccttcgagtggtgtcgcaaagcgcagataattgatctgcaggctgagggctactgggaggagctactggacaccactcagccggcgatcgtggtgaaggactggtactctggtcgcagagacgccggctgcctgtacgagctcaccgtgaagctgctgtcggagcacgaggacgtgctggccgagttcaacagcgggcaggtggcagtgccggcggacagcgacgacggtggctggactgagatctcccacaccttcaccgactatgggcccggcg

SEQ ID NO: 11936 - DNA, 308 bp, Glycine max
ctgcaggctggtgcgacgtgcagcacggtggggacggctggagggtgcaggggcgctctctagactgtggggtggaattcatccatgatgagagcgtcaagaagtacttcgcctcctccttcgagtggtgtctcaaagcgcagataattgatctgcaagctgagggctactgggaggagctactggacaccactcagccggctatcgtggtgaaggactggtactctggtcgcagagactccgactgcctgtacgagctcaccgtgaagctgctgtctgagcacgaggacatgctggccgagttcaac

SEQ ID NO: 11937 - DNA, 233 bp, Glycine max
  modified_base (137)..(137): a, c, g, t, unknown, or other
ggccaacccgtcggccaacccttccgggggattccatgcctatcctgcccaggttgaggcagcatttccaacatatggattaacaatgtagtccttaacttgtcctctttctatctttgaacatgagagcaagattntgtgggatgtccatgttacctttaggaattggaattctcttggtacggacatgtatttattttggattaagagtaagaggctacatatcaagtgct

SEQ ID NO: 11938 - DNA, 392 bp, Glycine max
aacagcctctctctctctctctctctgccaccttatattgccttgccacatttctgacttctgagtcttttgtgggaattgagttcattcaaatgattcctctgtcccataactcagtctctgttcacctgggtggagtaccctgtgaccctcttcacccaattgcgttcgatcccactctgaacaagccttgttcttccacctctctgttttggaactgcaagaggagaaggaagaggaaaaactccattatcatggcctctaatctcaggaccaacaatttcctgcgccatgtggaatcaatgaagcttcttccatcaggtgctggccacatttcgcacctgaacgctgtgatacttggtgaatctctcgccactgaagaggatgatttc

SEQ ID NO: 11939 - DNA, 383 bp, Glycine max
ctggagggctggtgcgacgtggagcacggtggggacggctggagggtggaggagctgccgggagactgtggggtggaattcatccatgatgagagcgtcaagaagtacttcgcctcctccttcgagtggtgtcgcaaagcgcagataattgatctgcaggctgagggctactgggaggagctactggacaccactcagccggcgatcgtggtgaaggactggtactctggtcgcagagacgccggctgcctgtacgagctcaccgtgaagctgctgtcggagcacgaggacgtgctggccgagttcaacagcgggcaggtggcagtgccggcggacagcgacgacggtggctggactgagatctcccacaccttcaccgacta

SEQ ID NO: 11940 - DNA, 376 bp, Glycine max
gcttatcgcatgccgcaggaaaaacgttcctggcctgatgggcctgcggtcgagcgagtttttgctgggaacgcgtctgctgggacgatggcctcttctcacccaacctggatcgcgacatcctctggtgctcagttgcccaggaagaagactaactacaaggaaatacttctgaaaaataaatgtgaacaacaagcttgagtgaatattcttctgagctggcttattgcagaatggcagtgcttttgcagaatagacctttactagcgactgatggtagagggacagagttgtgcctgtccaatagtcatactgacacagcacattctctcttcaaattataagtggttgctaccaggaaatagctacttgaacc

SEQ ID NO: 11941 - DNA, 369 bp, Glycine max
gattccattacatatcatcctttaaaataatttcattggcttttatgataattttttgaagtctttcacaaatatttttaattacaccgaagaaaatagagaaatctgacatgtatctttaatctctagcattattaaattattacgacgatccaataaggtaaactcaagtggcggtgtgttgtggctgttggttggtttgttgagtatcagaatcggagcgaaaatggggcggggttggtggtggaaagtggcggtgttggcggtggtagtggcggtggtgtggagagggtggcaggtgggtggattggagaaggagtcagcgttcaattttgtcagagaatggtcggagaagctagggatttgggc

SEQ ID NO: 11942 - DNA, 183 bp, Glycine max
cggacgcgtggggcttggctctaatgggtttcatcttaaataaaaacagactctggagcgatgtcaaaatctaagactgcaattttgtcaatgtttcttatcttcatttaatagacaatcaaatgaaaatccttccttatgattgagagaaagaacttctgattaaaatttgtcacaaatagc

SEQ ID NO: 11943 - DNA, 373 bp, Glycine max
gaaaaaagaaaaaagaaaaaagacacgcagcgcacaagttaaaaccttctcaaactctctttcgtcaaaacgcgtccattggatccatcaacgcacgccaaacatctcgtcttttcgcgtttccgttggtggtttttcgttttcctcagtgttccttcagtgattttcttctgggtctgtgaaaagctcggtgctttgtttcggaagcaccgacattggggaactgtgtgatggtgaaagcggagattgagaaaaagggttgcagcacaagacgatggctttggcttgtgatggctctcgtcgccgtgtttgttgccatggtcatgtcttccagaacctctccaaaagctctgtttggagccattgatagagc

SEQ ID NO: 11944 - DNA, 385 bp, Glycine max
  modified_base (68)..(68): a, c, g, t, unknown, or other
  modified_base (138)..(138): a, c, g, t, unknown, or other
  modified_base (185)..(185): a, c, g, t, unknown, or other
  modified_base (187)..(187): a, c, g, t, unknown, or other
actttttataatacctcattttaaaaaaaatccagtgaatccggtatttcctgtggcaaatacgtctncctcatttcacgcctttcctgctccccaccacactagtgccctctccacccgccccgcccctgccctctngttcttcatcagtatttgaaagtgaatgatttgtaaccaagactctntntcttaggatcacatttacaatttacagattcgttttcttgggaacaaatattttttgtatgacctgtctaaaacccctcgcctgagttttgtggtaaaagtattgtttgtggttgtgatcttattaaattgataacaaactaagctatttgacagcagtgggaaagcagattgtcttgggcaaggagaaaaatccccc

SEQ ID NO: 11945 - DNA, 350 bp, Glycine max
cagattaactagccgaactttatacagaagcgacgagatgaccaaacatttatatatatatatatatataaaaaaaaggcaaccatgaccttaacacacccatcacaagtccaaaacacttgaacttgctcaagggcaagaaatgaccactttattctaagggtgtttgtttagacacaaaacaccagagtgcaacataatacatactacataattttgaagttttgaaactacatatagtttttatcattatttctaagggccatttctgcttgaagctttagctctccaacacctcacttgcaagtgcaggggttgcaggtgcagttagctccacatttgcagccatc

SEQ ID NO: 11946 - DNA, 364 bp, Glycine max
aagaacagcgtctgattcggcaaaagctgctggaatgcattcagctttggcagatgctgatactgaagttgttgacggactacatgatgtccatctacaaactgtggccgatagtgctatagtgtacgcggtggatgcattggagtgggaagccgatacatagatctgggctcgcatgttcatgtaattaaacgaacgctaattgacctattatgtgctgatggactgaatgcctgaccacatacatcatcctatagcgattatacaggtgatcaggattatattaagtatggaacgtgagatcacggatcataatcacactaccaatgatgcctgtctagaggagatcgtattattggacgaa

SEQ ID NO: 11947 - DNA, 428 bp, Glycine max
cccatttgtacataaaggggcgtaaacccctttgaacctgttaaccacgcaaagtccaaaatctgcacaagaactcgccggagaaaaaaaaaagaatgatcgacagagggaaaacgtcggtcgccgtcgtgtactccgacggaaaccgcgagatcaatgtcggcacggtcgtggtggaccccacgctcaactttaagagcctcgtcacgctcctcagccagcagatcgggatctcgccgcaccagttatccgtctacctcgcctccgtcggcaccgaccgcaagattccggtcacgtccaagctcaacctcgccgccgtgcgccgcgacggcgccgcgcactacttcttcgtgaagcgctccaagcgcaacaaggaaggcaaccggaagccgaaaacggaaaggacgccttgaagaagaattaccctc

SEQ ID NO: 11948 - DNA, 625 bp, Glycine max
cccacgcgtccgaaattttttagacttatttctattctgtccctctcctttcaaatttattactttggaggtcaaccaaaacaaacagtgtaagactacagcgaatgcttcaagagttgaatctggattaaaagcattgaccagaccacccactagcggcgaattgtgtagcaaggaaagaagcagaggctgaggaaacaatgaagatattggtgaccggcgcatccggtttcctcggtggaaaactctgcgacgccctcgtccggcaaggttactctgtcagggttctcgtaagatccaccagcgatatctccgccctttctccgcacatcgaaatcttctacggcgacatcaccgactacgcctctctcctcgccgcctgcttctcctgcactctcgtcttccaccttgccgccctcgtcgaaccctggcttcctgatccttccaaattcttctccgtcaacgttggaggattgaaaaacgtgttggcggcggtgaaggagactcgcacagtggaaaaactcctgtatacgtcgtcgtttttcgctctcggaccaactgatggaatcgtcgccgacgagaatcaagtccatcacgagaaatatttctgtacggaatatgagaa

SEQ ID NO: 11949 - DNA, 291 bp, Glycine max
tcgaaacacgccgcgaacaagaaaaagaaacaaccttagccggttcaacctgaacttatgggtgttcaattccatgcaaccgttcacacccaaatcttcttcgacaattcccaacggcactttcttgaacggtgatcaccattactaccgttcattaacaggcggcatgtcattaaccccggaccttggacatggaccgaagtcccgtgccccaccaaacccaatttccaagcctggaacccgaacccgaacttgccgacctagccaccgcttttgcttccaaacgtttct

SEQ ID NO: 11950 - DNA, 401 bp, Glycine max
cccacgcgtccgaaattttttagacttatttctattctgtccctctgctttcaaatttattactttggaggtcaaccaaaacaaacagtgtaagactacagcgaatgcttcaagagttgaatctggattaaaagcattgaccagaccacccactagcggcgaattgtgtagcaaggaaagaagcagaggctgaggaaacaatgaagatattggtgaccggcgcatccggtttcctcggtggaaaactctgcgacgccctcgtccggcaaggttactctgtcagggttctcgtaagatccaccagcgatatctccgccctttctccgcacatcgaaatcttctacggcgacatcaccgactacgcctctctcctcgccgcctgcttctcctgcactctcgtc

SEQ ID NO: 11951 - DNA, 354 bp, Glycine max
actgccatccttcaagtattagcaaatcagtacgcgtagagtacagcgcagaaagaggcctgattattcttgatgacacggagtgtacagtgcatacattcccaacgaggagattgacatggacgcagacgcatagcaactggatgagcaacttgttccctatcacacatacttggaactggaggacttgaataagatgctgtaggtgatctatgatgaagcttgctcccttaatgaaatgcacgccatggtcaagacagagatgttcatctgctaagatttgaacagctgtcatacatcttacgttgatacccttgaagttaatgatcaggcccaacagatcgaccatgaagt

SEQ ID NO: 11952 - DNA, 224 bp, Glycine max
aacagcgtgcggaacataaaaggtagctgccaatttgacgtactcagtctccgaatggaaacctcattacgcaatccgtaagtttctagtgacccttgtcattatcatcctcctcgtcgtcgaccgctgtttgccctaataggctctcatgttgcggctgcatgatgattgatcgattgattgggatatataacgctgccgtcgaccatgatcaaccattcata

SEQ ID NO: 11953 - DNA, 322 bp, Glycine max
acggccccaaaatgtgagtgctcaaaactgcggttgtgctgaacggttatgttgcagccaagatgggtattgtggtaacggtgaggagtactgcggcccatggtgcaagcatggtccttgttattcgagcacaccaagtactaacaatgttaatgtggcgacatcgcacaccacacttcttcagtggcataattgatcaggctgactctggctgtgctcgcaagtactcttactcacgagatgcttttcttaatgctctcaattcctataatgactttggtagacttggttccaggatgactccgagcgcgagattgcagct

SEQ ID NO: 11954 - DNA, 388 bp, Glycine max
cggacgcgtgggcggacgcgtgggtgtaacgtgacgaaacagagggattataaaaagagaagttactcgatagttcaaatcagaagatggttcctgtcacaccaactcaataacagatcaaaccaaacccaaactgttaggtttcctttgtttggtgtgaagccatggctgattcttcttccaacctgaaatccgacgcgataatggagcagatgaagcaacacctcgccaccgacgctggcaaacaagtcaccaataaaattggactcgtttatcagtttcacattgctcctaagaaacttggattcgacgaggtcgtctacaccgttgatctcaagaaaggagaggtcaccaaagggtcatatgaaggaagaaagcctgatgcatc

SEQ ID NO: 11955 - DNA, 361 bp, Glycine max
ctcctgtctttccaagaataagcaccgctcaaacacataccatttttgaaaccgcttcgtctcagctttctcttctgcttccattctgcatccacctctttccctcttcctctgtattcctctgtctctcttaaaggccctcaccaaatctaaagaaggattttctcaccttcctcgctattaatccttcttttagtatttaggtgcgggcacgagttgtttgggtttggaataaacactcccaaccagaataccatgtcaatataagagtgtggagaagaggggaaaatagaagagaaggaaaacccagaaatggcaaccacggataatcacgtggaagaagttacgatcgacgaccagt

SEQ ID NO: 11956 - DNA, 422 bp, Glycine max
ctcctgtctttccaagaataagcaccgctcaaacacataccatttttgaaacccgttcgtctcagctttctcttctgcttccattctgcatccacctctttccctcttcctctgtattcctctgtctctcttaaaggccctcaccaaatctaaagaaggattttctcaccttcctcgctattaatccttcttttagtatttaggtgcgggcacgagttgtttgggtttggaataaacactcccaaccagaataccatgtcaatataagagtgtggagaagaggggaaaatagaagagaaggaaaacccagaaatggcaaccacggataatcacgtgaaagagtttacgatcgacgacgagtcatcgccgagggcgattctggaaacccctgtttcgggaacagagtccgacaacagtggaag

SEQ ID NO: 11957 - DNA, 400 bp, Glycine max
ataagttcacggtcagttctgaaaaatgggttccaaggttttgcttgttgtagttatgttcatagcggctatacttctgatctctgctgaggttgcacccaatgaatacgaaaattttaacaaaaaagatgggaagcatgctccaaatgggttatatgatagcaaatggggttacggtggttggggtggtccttggtatggcggctggggtggcccttattatggtggcggctggggtggcccttattatggcggtggttggggcggtccctggcgtggtggtggcggtggtggctggggaggttggcgtcgacctaatggcaaccctcacaactaagaagaaaacttgctaaagcttctttacgggtttaagttttcgcaataaataaaacttcatgag

SEQ ID NO: 11958 - DNA, 433 bp, Glycine max
gtgctcgcacattgggggaaataagtacgctggaaatgtcattatatttggatcaagtgtcaagtatcaacagagaagtcactgggcacttgtatggatatgttactccagatgatgtacctttattgtttcaccagcatatcattaaaggggagatttttgactcactatggaggtaatttttatctatgatattttcattagtattgaattttaaagggttttttcttttttactttttagttccatccttcaaaagacactagcaaggattgctctcgtgctggtcttttggagcagaagctgggtctgtggggttagaagttaattttatacaatgttttgtcagagtagaccaacaaaggttgtgcctgaggtggaaattttagctatgttcataaagtttgatgacatttccaatatttcatattgc

SEQ ID NO: 11959 - DNA, 183 bp, Glycine max
aaagatccatctaaacccagatcagcttaactaaagtgtctgaattgttctgagttaggttctactacagcagatactgacactcttcacgaatgtgatatagtgtatatgatcaattctcgactattcttttaatcctattcactatcgacagcataacttgattgtctcaacttggttaaa

SEQ ID NO: 11960 - DNA, 340 bp, Glycine max
gctctctcttggttcagagctccttctttgttctttctccttcgctggttgatatcagtgtttgaagaaattccccattgacgaagctcatgggcaagaaaggaggggccaaaaaattggagtctgcgtctcacactccaatatcattgagagaagaagccaccggaaaaatacaaaccaaggcagcctctaacaccaagtccaaattgagatttgaacacttgaaaaacctagcagtgtgggccaccaccataccatctttgggtgccttctatggtcaccaattcgctacctttggagaggccaccggaataccacctgatccttctttaataacttg

SEQ ID NO: 11961 - DNA, 419 bp, Glycine max
aagaacttcatgccaactatgtttgtatcttggctccttgtattttaatcaatggtttgatttgctttaagtaaattttgagttttcaattgtggtgctcgactttagccgtgcaatttagactatgtgtcgggatgttgacgttttcttttcgttctctttcttgtaggctcattgtgaatgccttgtcttgcagctgaagtgtgaaggtatcctactagcatttcaaaattatatattgaagctgggaacaagtatgatgattcctttaataattgttaatggcatgggaagaagtgatcgatgtgtgctgaatttctgctcgtgtaaaacaattaattcttgcttttgaaacacatttttttttcctgatatttactttgttactggtttggtttggttgctcgatcatatataac

SEQ ID NO: 11962 - DNA, 392 bp, Glycine max
accgcccacgcgtgcgggaaactccggctgccaccggcgcatagaatatgctcctcggggaggacatgttcagactgatttcagactcatgcgaccctgtaccaaacgtgactactcgaatactcatgcaataatctgaacaaattgcatgcatgatgcctggatgcctaacgagttattcacgccaatgagtcagatgcaatgatagaacatcatggcttttattgtaaagctgtgtatacaggacgtaatcaagcagaatgtcccgatgcatgagactatttaaacaactaatgatcacgagacagcacttgtacttgcgatgccttgcacttgacaatcgacgatttttatgcgtgcatggatacttattatacttctgttcacaaaga

SEQ ID NO: 11963 - DNA, 409 bp, Glycine max
cgcactacctcctcttctcctccttcgttttcctctccttcctctaccgtttcctggagctccatttcctccaagacctcttctccctcttctccggctcctccgtcaccttaacctaccatcccgcttcccaattctacgacgccgtggtttccaaatgcaggattctccacggcacctacctcgccacgccctggctctccagccctcatctccagaccgtgtttctcaacttcttcggcagacctcccttcttcaaatacagaagacaactgtttactactcctgatggcggaaccgttgctttggactggctgttgagttctgacgtttctgctggtgctatccatatggaagatgttgtttctacagatgaatccactcccattgttgtagtaattcctggtct

SEQ ID NO: 11964 - DNA, 240 bp, Glycine max
ctcttggaatagtatgagattaaaaagttgaccaatagtatatgaaagcttcccactgaattgattgttggaaaggtccaaatagtataatgaggcaaatttagtgaccttgaacataggaattggtccactcaaatggtttaaacttagatccaaaacatcaagatggggcaaatggtcaaatgataatggcccaacaatgttggtattttgaagtctcaatgtctttaagtatgaaag

SEQ ID NO: 11965 - DNA, 435 bp, Glycine max
caagaatgctgatgtgttgccaaggataatgatggacaaactcccttgcattatgctggtacatgtgagagagaagccatagccgagtatttattgaagcataatgcagacatatattcaaaagataatgatgggagttcaccacgtgacatctgtgagtcaaactggccctgtatgcagcatgtggggggagaagtaaattgattgattgattgtttgcttgttgctgcttctggccaatacaaccttttacccaaatccctataggatgttcgtgtctatataacttgattttttttgtccttactcatggtgtatacacccttttcagtctagtgtacgctgtacgcctatgcaccgcttaggaggttagttaattaggttgtattctgttctattatggattcctctgcttaactctttaattctggctct

SEQ ID NO: 11966 - DNA, 344 bp, Glycine max
cttcgaaaatttcccgtggcttaactaatttaaaggttttccattatttttccttcaatgaaatgccaggttccttaaccttaaggggtgcaccggaagctggttatggtaaatcaggatggatttaagaacgaaaaaccaatgaggactactaaaccaaattttcgtcagccaggaaaggacagcccaacttttatgaccaaagggaggtctgtacgtggggtttcagaaccagctgaaaagttgggcaatttgcctgtttccagtcgaagacattcaatggggcaacctggtcctcctcaaccaatgaaggctggaggcaattggatttctgaatttggaaa

SEQ ID NO: 11967 - DNA, 419 bp, Glycine max
ctcttctatgacccgtctatccgagagactggtccgagtgcgtggatcgtacccgaaaccgacccgtcttctcgatcttgactctctctactatctactgcatctctgcaagttcctcgatcgcttactactctcccaaatactacccgccatggacaacctcttctctgattacttctcctactactccgattcctcccactacagtccccaccgccgcttcctccaagaccaagaccaccaccgctaccgcgatttctccagcctcgagcgcactctacctccttccctacacctgatggctggaagcggagaacgaaggtgatcgatgaaacgcactgctttatacggcttcatgcaattccgattccgactcctagattttgcttcatctcatgaaggaagaggaaccacacaac

SEQ ID NO: 11968 - DNA, 421 bp, Glycine max
cccacgcgtccgtagaagcctagttgtggtgctataaacattagatgctacgatttttgtactctgccaactgctgctgtggtgcaacacttttctttaagcttttgtggttttaaaatagtctcaataatttgattatataggtgtatgatagatagaagttgttgaaggggaaaaatgtagaaatagtatctgtattttaggttatagctgttcattgtatttcagaaatcagcttttatttgtggttggttgcatatatggctccatggtgtatttatgtatggatgtatatatacgttctctcttggtatattagaaagacattaccaactagtaaaaaaaaaaaaagaaatgacatacaaaaatgaaacaataaaaacataatataactaaaaaaaataaaaggggcgcccgtttt

SEQ ID NO: 11969 - DNA, 418 bp, Glycine max
cttatgtgtacataagtcggtcacggtggcatgatgcaaaggtacaatgtacgaagcaaagggcctttacaaagaggctataaaagcttttcgcgatgctttgagcattgatcccggacatgttcctagcttgatctctactgctgtggttcttagacggtgcagtaatcaatcaaatcctgctatcagaagctttctgatggatgcactacggcatgacagatttaatgcttctgcttggtataatcttggcatttttaacaaggatgagggtacaattctagaagctgcagactgttttgagacagcaaactttcttgaagaatcggcaccagttgaacctttcagatgactgactctgcaagcatttttgtcatttaatctgatgatgatgatgatgatatatatatatataaca

SEQ ID NO: 11970 - DNA, 379 bp, Glycine max
ggaggctatggagggggacgtggtggatatggcggcggacgaggtggctatggtggcgggcgtggtggctatggcggcgggcgtggtggcgggcgtggtggctatggtcctaatgaacataacgaggctggggttgatgctaaccctcacaactaagaaggcaactttctaaagcttatatatgggtttaagttatcgcaataaataaaacttcatgagaaggttagttgtaatagaagtggaaaactttgtaaaggaataatacctttcatgaatttccttatctttgtgttgtctctggttctgttttgctaaactcaaataaataaaattgtataatattgtctaacatacatatttttactaccttttatctatt

SEQ ID NO: 11971 - DNA, 433 bp, Glycine max
cccacgcgtccgcccacgcgtccgcccacgcgtccgatttatccatttagaaagacattgtggttacccatagtctcatagtgtcatactgcaacacaaaacaatgggttcccttatggcaggatgggactctacccacatagatcctcaatcagccacacttaaaaggaaccgctcactcaccaaggatgaaattgatgcttactggaaatcaaagaagaagatagaggaagaacaccttagagctatttccaacttgtcagagactattcaggctagcaaaagcacagaacctgagaagaagttgcagaagtcaatgaccatgcctgtgacccgtgcacgggactacttaaatatgggcatagacacaagtttggagcatcttattaagaaaaatggctggtggaccaagagtagctgtgcatttctgaat

SEQ ID NO: 11972 - DNA, 424 bp, Glycine max
ctaagcaaccaaattgagaaacactcccaaagattggtgaccttagtctacccttacatccaaatcacattccatgagttcactggtgagagactcatgagaagtgaggcctattctgccatagagaactacctcagctccaaggcatcaacacaagcgaagaggctcaaagctgacatagggaagaacaaccagtctcttgttctcagcatggatgaccatgaagaagtagctgatgagttcaatggtgtaaagctttggtgggcctatgggaagcacatttccaagtcacaatccacaatttccttccaccaccctatgtcagatgagaaaaggcaaaggaagctttataccaatagtggtgcttattggagccatgtagtgtttgagcaccctgcaacatttcaaacactagctatggatc

SEQ ID NO: 11973 - DNA, 402 bp, Glycine max
gtttccaacctatccacctaaggccaaacctttctcacaaatggaaaaaccgcaacgaaagaaagaagaaactaataaaagcaaaaaaaaaaaaaagagagaaaacatctaaataccaaaatccccctctcaattcattttctttaacttttgttcagcaaccacaacaacttcttcccttcttctctttctctctctaaaaccctttttctctctagattatttccttcatcattagcttaattgatcaagctttagtcctttcgtttgcttcaccccatggatctaacattcgcaccttaaaagagatccttcaaagttcagttcaatttcggatcaaagtggtggcgttccgacactgataaattaaaattgagaggagagagagaaaaaaaaatgaaa

SEQ ID NO: 11974 - DNA, 425 bp, Glycine max
cggacgcgtgggggatgaatgggttgtctcaagggtttttcacaagaacacagatgtcgaaaagtcctcaactcctggccttttgaggataaactctattggggatgatcttcttgattattcttcactaccacctctcatggatcctccttatggcaacaccaacaccaccaacaacactaacccactttcttcatcaactaaatcacaatcagagggctattatcttcccagtttctccatcaacaaccaccagcagcagcttctcatcaagccagaagatcaccaccaccacagaagctataatgagattcccacaattaactacacctcaaaccaagccaatctcagcaacaacgttaacgcaatgggcaacaacactctctcacagcccttaaacatgttctcagctgattactatgtgc

SEQ ID NO: 11975 - DNA, 354 bp, Glycine max
  modified_base (338)..(338): a, c, g, t, unknown, or other
cactgatctacaaagacatttaatttcaatggatcttgtttcgcatcttgatcagaagcaactggaagaattagctgtgtcacttcgtctatttactggctgattgttgaaaacaggattttaatggaattggtgattgataatcaaagatatgaaagcttagttactggaagtactgaagtacgacatgagtggccaacccttgggatacaatgtttgtactcttcatgcatctctacattttaacgactactgagtatgtcatttgttcaattttcctttttttccttcactttttctgtttttgaggggtttgggtcgatactgaatatgagatntgtgttttcttttttc

SEQ ID NO: 11976 - DNA, 106 bp, Glycine max
attaatataataaaccaactagagttggccttgtaaaatgttttagattcaaaatctggtgttgtcattgcataaaaaaaagttaatataatcatcttttatatgc

SEQ ID NO: 11977 - DNA, 432 bp, Glycine max
gcgctataaaggtttcaaggaggggcatacaaggattcttgttgcaacagattgggttggaagagggattgatattgaacgtgtcaacattgttataaactatgacatgcctgattctgctgacacatacttacacagggttggtcgagctggaagatttggcaccaaaggccttgcaatcacatttgtttcctgttctactgatgttgatgttctcaacaatgttcagtcaaggtttgaggtggatataaagcaacttcctgagcagatcgatacctctacctatatgccatcgtagaattttttgggaacaatgttaagtgcttggtggcatgagtaatcgtgacgcataacggtgcaactgatgattaaccgtgctgatagataccagagtcttgttacagactaggccattttaccattggatattta

SEQ ID NO: 11978 - DNA, 414 bp, Glycine max
gttaacttctttcaactaatttgttttctctatacacacaagagtcaagattggaagtgtacttgcttcatgaagcacatgactttccatggtcaatgatgcttcatgcagtgatctaactttctgaaactgaaccaacaacggatcgttctcagtcaccaccccagacgaatgtttcctttattacgatcgacataatcaaacatcaatatcctcacacgtgtcttactcacgtgcacaaaacttaagcttatagttattgtcgtcatagtcatcatgggagaaggtacaaagtaaattaaaacaaccgaaagcataagcttggattattttattttgtctcacaataatgttattacttattccaaccaaagcatttatttagtcttacactttgttctcactaggagaaaa

SEQ ID NO: 11979 - DNA, 427 bp, Glycine max
  modified_base (362)..(362): a, c, g, t, unknown, or other
gaatttatttcccaagcgcattcatttttcttttatccagatcgccgcacgattccattttctcaatcagcatcggtgattgatcctaatctcccaacagttgaagaaagatctagggttcctcctgctgaatccacagctgtctcaagcgcatttcttccattccgatatagaatctaattcacgcacgcggtttcgattcaaattcagctcgctccagcaggtttcgttacgtgaatgagaagagatacggttacggcttaaaatgagcatggaggtcattagcgatacggcgtcgttggaggtcgatttgttgcagctccctgaggtgtcctctctcgcactcaaatctaacctaactntcgtcgagacgctcttcgagcagtggctttcgcttcccgaaagcaaccgattggtgacatcattg

SEQ ID NO: 11980 - DNA, 431 bp, Glycine max
atttcccaatgcgtatcgcaatctacaggttctaatttcactgaagcctaaaaagtgtgctgattgttatgctgctaatttagcaccttctgatgtgaactcaagaggcgaaggttgggcaactttgattgctgagagaatggggaatgttggttactctttcaatcgaactgtttggaagaaaatacacaataaggcgagagagttttgtttctttgatgactataattgggatatcacaatgtgggcaactgtttatccttcatttggcagtcccgtttacacgttacgaggtcctaggaccagcgccgttcattttgggagatgtggtttgcatcaaggtcaagaggagaataaggcttgcattgataatggcatggtgaacattaatgttgaagagcctgatacagtttctaacattgaattaaatt

SEQ ID NO: 11981 - DNA, 281 bp, Glycine max
gagcgtatttaagttgtggagtagttctctacaggcccctatggtgggtcgtgtattctgtaagtaacactatgagtaactcaagagcaggtttgcattacatcctgtagaattcgatgtggaactctataatcaactgttgaaaagtcacctcaggctcggagattgtattctgatgatatattatatatcaagtggccaactattatctaatttaacagtccggtacacgcactaggtctataccagcgggacatttggagattagatagcatcaagtc

SEQ ID NO: 11982 - DNA, 362 bp, Glycine max
cccacgcgtccgcaacttatcacacaactcggtttcatattgcatagtgagagagttacgtacgaggatgtctgacattgctatgctggtggctgacgagtacgagaggagggtcaagagtttaagaaagtccggtggtggaactggagccgacgaatttgacatggtttcttgagttacggagatagtgtcgaggctcaaggaaaagatacaacttgtgcaatgggttcaggagcccaagactcaagtcgatatggctgcttccaacagcttcttctatgcttaaacaattcattcattcatcaactgctctggactctgttgtggtaggtgtcattcattgttgcaacgaattgctatct

SEQ ID NO: 11983 - DNA, 327 bp, Glycine max
agttcacacactaagttctgaaaaatgagttccaaagtttttcttattctacttatgtgcatggccactatacttttgatctcctctgaggttgcacccgatgatgcataccagaattttgacaaaacagatgggaagcgtagtgcaaatggggtagatgaaagcaaatattggcgtggtggctatggcgactatggtggttggcgtggtggtggttggcgtggtggctatggaggctggcgtggtggctatggtggtgggcgtggtggctatggtggctggcgtggtggctatggtggtgggcgtggtggctacggaggttggggt

SEQ ID NO: 11984 - DNA, 423 bp, Glycine max
caaaagaagaaactgttgtggggtggcaaaaagagtacacctactgaagagtctggccatcgatgggataccgggatgttttctgatcgtgagaggcaagagaaattcaacaaactcatgggtatgagaggcgaagcaaaggtggagcagaattccaacaaccaaagcagtaacgaaattctccgtgctgagaagcagaaggaacttcagatggatctagagaaacaatacactgcaggccttcgacgaagagatggccgtacagttggcttagggctttaaccattctccggaaaatttacatcctttgacatttatgtgttaattatcaccccatgtttagggaggagctttttgcttgtttgctgtggacatgcttgggagtttatgaatcttatgttagggacatcaccacttggcatc

SEQ ID NO: 11985 - DNA, 438 bp, Glycine max
  modified_base (380)..(380): a, c, g, t, unknown, or other
  modified_base (390)..(390): a, c, g, t, unknown, or other
ttcagatttaaacatgaacaaacatgcagactcagctcttttggacctgctcaaggtgagtgaattgtgacatgcagtctgtcaactttccatgttgagtaactgtgatttaagatttcttaaggaattacattttttatttttcactgtgatactgttccattgtcatgaacagatctctttcgccagatccaacacttctgtggcgtttccctatgtttctacatcagaggatgtgcttttggaaaactcattgatttcaggatttgctgaagcctgtggagatatgggaattggcaatgttgctttccatggatcttgctccatggatggggcaaatcatgaagaaatcacaactttgcactcagttcaagactatntgatcaagangatggaagagagtcacagaaggaaaacagaattgggtgtgttctgcaa

SEQ ID NO: 11986 - DNA, 310 bp, Glycine max
ctcactcgatcgggataaccctaatacttctatcatcatctattgatactggcccttacgatccttgcggctcttcaagcggtccacgatgtgctgagaagctcgcgcatccatgctcatataggcctgatcaacctactagcgactatccctttaatacagggaactagccatccaaggtcggtagcgcgaatatcatcatccatcagactacaatgcgccgatcgcagacgcatccactattgcccctgatgttgcattgcaaccgatggcgccagctcacagtcattactctatacgagcccatagg

SEQ ID NO: 11987 - DNA, 376 bp, Glycine max
  modified_base (156)..(156): a, c, g, t, unknown, or other
tttctcttttcctcataaccccctctctccctaccaaatttcaatttcctctttcctcccttgaggttatggatccattggggaaacgccctgccgccgaggacgattccctaatttccgattgcgagagcggggtttccgctggagacacgccgncgtcgttcgtcgaaaacgccgacctcgtccggacagattcgttcgtggcctcgtcgcgcacttgttcaaacccgaggttctggcagttcgcagaaacgtgtgttccttcgtcatggccctggcgcgtcaacattcctttcacgtcttcgcgccgtccctgggccgaattgcccggcggcaatgccaacgtgaagttcgcctggtacggtgcgtccagtaa

SEQ ID NO: 11988 - DNA, 318 bp, Glycine max
ggcgaaggagatagtgaaagagcttcttcctctaattcgagtgtacaaggatggcagcgtggagcgtgttctaagctctgaaaacgtggcagcctcccctgaagatccccaaactggagtctcatccaaagacatagtcatcgcagacaacccctacgtctccgctcgcattttccttcccaaatcccaccacactaacaacaaactccccatcttcctctacttccacatacgttggaaacaataaaggggacgtgaaaacagaagatacaggtgtgctgtaccatgaaatggtgcacgtttggcagtggaatggga

SEQ ID NO: 11989 - DNA, 450 bp, Glycine max
caagcgagcacaacctcgatatgggtcgagggagctgagacagggatactgtcgtgcgtggtcttcgagcattctggagcaaccctgagagagctgtggaatatttgtatacaggtatccctgatcaagctgaaactacaattgtaaccagcacgcctgtaagtgctcaacctacaaatcctactgatgatgctgcacagacagcacaacctgctgaacttacctcagatggacctaacgctaatccttgagacctttgtgcccagggtcatcctaatgtgggttctggtgctgctgctgctggttcatcggactgttcacgcaacagtcaacaattgcaagcctcgcgagctatggcgcatgctaatccacacatattgcactcaatgctacaagagctcggcaagcaaaatccccatctgatgagattgattccagaccatcaagctg

SEQ ID NO: 11990 - DNA, 431 bp, Glycine max
gtcagagggaccctatgccttggggaggtcacggtattctgtcaggcagcctcgagtacgtcctcctccttcactaggttctgttcacagaacttacaaaaatgaaaatgaacaccctggcccttctgctttcctagaaaatgagatgcattataatcaggcaaccagaagtgactctacccttccaactggttatgacaatgggaaccgtggacaacctgaagtagtggatgcccggcaagagactactgagaatgaggaccataaagtggaatccacaccgaagtgtgattctcagtcttcactctctgtttcaagccccccaagttctccaacacatctttctcatgatgacttggatgactctggagattcccctacgatattgacttctgaaggaagcaaaaatgaccccctcacagctccagata

SEQ ID NO: 11991 - DNA, 266 bp, Glycine max
cggaaaacggagcaggccggaaacccccttgtccaagtggaagatccacgacggcggaagagagaggaacatcattggcggcggcggcggcggcgatccgctcgaggaccacgtccggaagaaggaggctccgccgcatgccgccgtgtcggcgaggaagctcgcagccgggatatggcggatgcagctgccggaagcagcggcgggttgatggcggaaggcgaaggtgttcgaggaaaatcggtgaagatcgtttgggagttcat

SEQ ID NO: 11992 - DNA, 418 bp, Glycine max
cccacgcgtccgaacaaacttcccaatctgggaaaaagcaaaaaccgtcttctgatgatgagggggatgataaagctgaactttcagatgcaaaagatgtttctcaggaagatgaagatgttgcagtaccgaacaatgaaagtgatgatgaaagaagtaaatcagaggaacagaaagagaaatcaaagtctcacaagcgtacttccaaaaaatctgttaaagagaattcagttagcaaagctgatagaacctcatctgccaagaagacccctgttaaagatgccaagagcattgaaaaaattaaaaaaaagacaacttcaaaaaagagtgttgctgagcatgacagtgcttctgcctccgttaagtcaaagcaacctgcatccaagaaacagaaaactgttagtgaaaagcaggacac

SEQ ID NO: 11993 - DNA, 61 bp, Glycine max
  modified_base (1)..(1): a, c, g, t, unknown, or other
ntacgccacgcctccgctatcgtagcaaaaaaagaaagaaagaaaaccctaacttaacttt

SEQ ID NO: 11994 - DNA, 154 bp, Glycine max
  modified_base (46)..(46): a, c, g, t, unknown, or other
taaaaaggtgaccctacattattacttagtggatcctctatagctntcatgctcctaaagcttgtctttctttcagtgccattttaatgtacgtgttactttataatttttagaatgtattatgaaaaccggttttggtaaaaaataatgcaat

SEQ ID NO: 11995 - DNA, 412 bp, Glycine max
aacacgcgtccgcacagacatagaggaagactctatcgccacgaagcggttggagcttacgaaacgacccaaagagggagcttaactcatccagagcagctcacttttatcgagtcctgcagcgtgattgtctgatatgtgccaagaatgatctgaagctgggctgaagacaagcatcacgaagagacccacacggtcaaaagctatggcaagcatgacaaagcgatccacatgatcatgactatgatcatgcatccgaagaaaaatcatttgaacagatccgtaagacggcgtagaaaaagcatttttaacaagaaacttgtaggactgtcttacagatagatacgctgcagatgatgattgaagcaccatgacatggtaaaagagtgacatgtatgtcgcagcataacat

SEQ ID NO: 11996 - DNA, 397 bp, Glycine max
aacacacgtccgcacggacaatgaggaagactctctccccacggaactatgtaagcttggttaacgacccatcgagagagccaaactcatccaaagaatctcacttttggtgagtcctgcagcgtgattgtctgatatgtgccaataatgatctcaaactaagctgaagacaagcaacacgaagatacccacacggtcaaaagttatggcaagcatgaaaagctattctatatgatcataactatgatcatgatggaaagaataaacatttgaacagatccttaatacggcgaagaaaaagcacttttaacaagaagcttgtaggactgttttggagatggatacgctgcagatgatgattcaagtatcttgacattgtattatgagtgacatgtat

SEQ ID NO: 11997 - DNA, 435 bp, Glycine max
cccacgcgtccggttggatatggctaaaacatcagaacctcttagtgccaccaaggaagacataggatttggcttgacttcagatcaaaacaaaggggatcctggtaattcagaaactggaaaggattcaacaaatgtgggaggccaagttgaggagagttcccagagtaggcctgttgctactgagccagaaagccatcaagagggggagagtgctgcatctaagaggcaagtctctcccgaaaagctctaccgtgcagctttattaaggagccgttttgctgacaccatacttaaagctcaagagaaagcacttgaaaaggatgaaaagcgagatcctgaaaaacttaggattgagcgagaagatcttgaaaggcggcagaaagaagagaaagcttcgttgcaggcggaggcaaaggctgcagaagaggctca

SEQ ID NO: 11998 - DNA, 228 bp, Glycine max
gctaagtttctcttcttcaatatttgtaagatgagattcagggcctcatgaaaacacaggggtgtaggggtggaagtttttacctgctatattctttctggattttgtggatggtgtgttacctatagttatttgtaaatatttttgttgaaccaaagacagtttcttcagtttttcatgtttcatgtttcatgtttagtagcaactttttgccagatttatgtgctg

SEQ ID NO: 11999 - DNA, 437 bp, Glycine max
  modified_base (232)..(232): a, c, g, t, unknown, or other
  modified_base (296)..(296): a, c, g, t, unknown, or other
ctttgtttcgctctcgcttttcagggccaacaacgcccgagaagaaagaagattgtgtctcccggtattatttggagaattctggaacacccaaatgtttctggtcatcgtcgtcgctgatctctgttccctcgttactggttctgattgcagaggcgaaaaggttttccgcatcaaaatcgaattttgtttgctccatcatcaccatgggtagaatcacgaaactgggttntcttcttctacccagataagtaaaagggttttcttctttctcatttattccgacaggtgcacanataacaacatcatcatcgtatcaatcatcggacaagtgcacagacaaacaacatttgtgtctgattagcagaaaaaggggtaaagggttgttccgtgtttgtttgatgaattatgttcaaacagatattcagtaaactccc

SEQ ID NO: 12000 - DNA, 364 bp, Glycine max
agaaatctttcccgtaaaacaaatataaattatatacatgtatacatacaacattgtcacaaggcctgaggtgtgatatttgtttctggtgaaaaagttcactttagagagattgttcaaagttcaaacgtgtacgagtggaagaatgacttccaaaacaccatggtcgtatactctttagaaaagtacaatgttaatgtaaacatcttgcttgattctgtgaagtaactatgaaatgccttgcatggcttgtgatatgtcttagtatgatttattagctgtttctgaaataaaataaagtataattaagtgggatattaattttttacccgtgacatattgaaatatattggggatttttttt

SEQ ID NO: 12001 - DNA, 447 bp, Glycine max
gacacgcgtgcggatgcctcaggcaccatgggttgagcatgcggatatgggaacttgtagagccagtgctatggtgcgaacactgctgctttgagcacagctgtgttcaacaatggtgtaagctgtggggcatgttgtgagataaagcgtgttaacgaccaaaggtggtgccttacacgctcagttattgacactggaaccaatttctgtgcactaaacaatgcactacctaataatgcaagtggatggtgtaaccattcccttcaccacttagaccttttccaacctattgttcaacacattgctcaatacaaagctggaatagtacccgtggcttaccgaagggtgccttgccgaatgagagagggcatcagattcaccatctacggtcactcatacttcaacctagacctaatttgcaacgttggaggtgcaggtgatgttcac

SEQ ID NO: 12002 - DNA, 249 bp, Glycine max
accacacgtccgactatacaatctatgcttatttctatagacggacttatttcctacggggtatgcactataagttgctccccaatatgtcactctcttatctatacgcatgatgctcatcaatgtccaacgatccctcaagcctttcaacatcttcaactagaatccttattacctaaacaacatttgtccaacacgaatgagcctcttctaacattcaatcctcttctcggaataattacatctcct

SEQ ID NO: 12003 - DNA, 438 bp, Glycine max
cttgttgttgtaactaaggaacaagagattgcttcttcttcccttttgttttcaaatttgaatttttcatcgggttctctgaaatggagagagatttcatgggtctcaactcaaaagaacctcttgctgtggtgaaggaggagatgcacgtttatggcttcgaagactctggcttcacaaagggtcggattgcacagtggccattctcgaacaaagtatctgcccttccacatttgatgtctttcaaggcttctcaagatgataagactaagaagatagtgtctgatcccttaacatctgcagggtttatgtctatcttaagtcaagaagcatttgactctagtcagaaacgctgtgctggtgaaccccagaagtctttcaatcacgatgggcaaggtcgccttcatttttcgctgactccatatcctgtacaacatg

SEQ ID NO: 12004 - DNA, 281 bp, Glycine max
atgaataggctgttaatatgatgctgaagaaaagctaaggaaggcaaagttcaatctcgctgtaaacaaagcagaatctataggtgcaaaataacttgtatatattttcaaatgaaaccccttttttaatctgtcgttgatatcttttatttcttttatttatcttctctcaagagtttacggtgttatgtagtggctatgtccaatgtcacatgaacatcttagaccatttactgttacgattgcgtcaatatgatgggttgcatgttatatttgaagat

SEQ ID NO: 12005 - DNA, 299 bp, Glycine max
cgtatctattctttgcttttggttttggttgattgaaggccttcacggcattcgttgcggcagtttaatcgatttatccaagcagatcttggcatgttataaagggtagactgcaaaatggaggcattgaaagcatcttatggggatggatcttctgattcagattctgaatctgcccattcaattccaacttctgctccctcagcagtattcacacccttgccaccacctcctatctcactccttgatcctccaagcattcttgatctgcagataggtcagacaactagacttaggag

SEQ ID NO: 12006 - DNA, 420 bp, Glycine max
cacatgactgtctcttcaataccttccatgtcttaatcatagaactaattgaacgatgagggcaataactaagtgtgcactcactgtcttaccttaccagtaaagcagagcctagcttctaaggctgacacacgatcactctatgcctttacaactgcacagactgctaatacgcttcttctactcacatgattacaaaatgctttacctactttatcagctataccgataccacatacagatcccaagatacaggctttgcttgttcatctaccaaatcctgcttatgcgatcgacctctatatagcactgtaccctgagaggccttttcggcaattgatcctgagagttcagactagacctgcttttaaggcgccaaacgctttaataaccaatgcttctattaaactatgaaggtct

SEQ ID NO: 12007 - DNA, 432 bp, Glycine max
tttttgtctcattgcccccaaatatcaccgtttctctcaagcggtctcaatcttttctcgatttgagtggctgcaaaaccccacgtgttacctccttcacttttttggctgcccccactttttttgttcacctctttcttcaaccaataatccctttggaggtttagggttttggtcctcgcggctctctcctaattaaaggatatttctttctttttttcaataacccgccatgtctaagaggtgaggttgatcatcttgtgttttgtattggattattaacattttcttgatgtaggttttctgtcttgtgttctgcagtttctccaatttctgttgattattgacttttttatttatatgtttctgttatttattggtcttataatccggctttctttgaaccgagaaaagattggttttggtttccat

SEQ ID NO: 12008 - DNA, 448 bp, Glycine max
cccacgcgtgcgcggacgcgtgggtagctagctaggcagccacgaaccttggcgcatttgcttttttctgtgggcgagtataataataattgcagtaaaatggcatttctgaggtcaatagcaacaacagcaattgctactatacctgcagccttagcattctcatcatcttcatcatcttctttccctcgctcttcccaatcccccaatccccaaaatagattaagtcttgtcaaaacacttgctactcctccctctgctctccacatggaccacaaactctcttctcagcctgacgctgtcttgcccgagttactgacggagttcatggtggacatgaaatgcgaaggttgtgttaatgctgtcaaaaataagttgaacgagataaatggagttaagaacgtagaggtggacttgagcaatcaggttgtgaggattctcggttcaa

SEQ ID NO: 12009 - DNA, 425 bp, Glycine max
cttcaaccatcacaaacccaccaccgccccaaagttgaatccgttctgtccccacaacatcaagtgcagcttcttcggatgccccgaattctgttccgttatggatgtgcgaggagatgggattttcccggatgaggtggttattcagattctagcaaggttgcctgtgaagtcccttttcagagtcaaggttcgagcatcttgtaatggcttgctgtgctgctctagtattcctgataagggtgtcttctatgtctgcaatccggttactcgcgagtacaggttgcttcccaagagtagggaaaggcatgtgactcgattttacccggatggcgaggctaccttggttggtttggcctgtgattcagcatatcggaagttcaatgttgttctagcgggataccatcgcatgtttggtcataggc

SEQ ID NO: 12010 - DNA, 410 bp, Glycine max
cgttgttccaacttgcaactccttctcttgtcactgtcacttctttcttcccaacacaacacggcagacgcagtacataacaacttttgtttccttggcgccgccacaccaacatgtcagccttcactatttccaacaacgccgccgccgccaccgccacgtggccactcccccaattcaacacttgccactttccgcactctccatccattgttcttcatcattccctcctcaacatccgcgctttcaggatccactgtgtccctcaagaacctctccccccattacaacaacaacccaaacacgatcaactttctcccggaggcgacggaagccacggtgacgccggcggtggcggatgcggaggcggagatggaggtgaaggaagaggagacgaaaaagtcggaccc

SEQ ID NO: 12011 - DNA, 354 bp, Glycine max
gcaacgtggtcacacccactagcagtattattacaaccatccataactttattcatacggggtatatgaacattcggggatgaaaccacctcatgaggtattgctgctaccatgaacctaactctatttacagaagcctgcctcttattgccgacagctgtcgaaaccttgatgcatgactggaacctagaggcgaacatattgcatctaaccatcagaaacatcactttcaggattgactgatatagcttctcagggatgcacacaatataatccgctgatcaggcactactttctatacaatgaatagcttaaacaatgcaggagaggttgccagactcagacgaagaagat

SEQ ID NO: 12012 - DNA, 337 bp, Glycine max
caatcatcaacacagagctgagtgtgttgctctttgaatccaccttcttcttccattggaggagcattttctcctggggtagaagtactaccacacttttcttttttcacttctctaagttgctaagttaattgctccttcattttttcactcttcgttctcgcgtacccgtgtcacggtaactcgtggtgaagtgttcgaaaatgactgtcacacctaagatctcagttaacgatgggaaacttgttgtccatggtaagaccattctgactggagtgccagacaacgttgtgctgactccaggttctgaaggggtcttgtgactggtgcttttggt

SEQ ID NO: 12013 - DNA, 377 bp, Glycine max
gttaataccatgcgcatgcacagaatggtttgatgctataccatatgatcttgatccaggggtcttaactgttcgaggggcacactacatatggatgattatggccatggttggatcgctactagctacattgacctactactggatgattaacatgcccgaaaccgcttatgataccgctctagggaccaataacacgaggcttgcagctgtagactatgtctcatagtttgcctgtttgaaatcaagctgaaccacaagactcggagcatatggctaactcatatggctagacctccaaggactttctcagtcgtcatgtactgcatctactctgtacatctcagcacatggtacttgctcgatattgcgttcta

SEQ ID NO: 12014 - DNA, 116 bp, Glycine max
gtaaataccatgcttaagatcataaccttttatgactataccctaagctttttggacccggctactttttaaccctgtcgtacataacttaaatatctatttggcccattttgcat

SEQ ID NO: 12015 - DNA, 435 bp, Glycine max
gtaaataccatgcttaagatcttaccttcttatgactatacgggatgctttttgaccggagctacatcttaagctcaccgcacagcacgtatatatctatgtgtctcattgtgcattgctactgtaaacatgaacctcacccaatattactgactcaaatgcaatctcataaattctcactttaaggacagaaatagagagcgctaacagctctcggttacgttcatacatacgctttgttacctaatagatatgtgaaagactcacaaatatatcgtgacgctattggctcatccctcgtagaatctcatatgcttcttctaccagatgatacttgaatgtctcatacctgtaaataaaaactgcattagttttaacaaaactattgtagaccataatagttgaaccacacatccgactaatgtaaataccact

SEQ ID NO: 12016 - DNA, 412 bp, Glycine max
  modified_base (364)..(364): a, c, g, t, unknown, or other
gaaaaagctggcagattccttgccctcaattggtgcaatagaggaccgctagaagagctggctcacatgagcttcaacctccaccgttcactcttcgaagaactagacggttcatgatcgtacagttacagaaccctcaccactctcagcctcatcgttacggaatttgaaggctccttttctgccacctcaatgttgtcgtcttgagttgacagacctactcgtggttggaaccatcgaaatgacagtgcaggtgcacctatggctcttcattcccgcgctgattgatagatcagtggagaagcatggagtgaagatagagattacaaaataggaacggttggaagtggaagaaggatgagtnggatcgatggtgcttgaagaatgacgagttttggaagcggattctatg

SEQ ID NO: 12017 - DNA, 311 bp, Glycine max
acgctactacctttaccctcgcaacgctgtcactaccgtcgtcttctcgtgtttccattggcagaggtccgattcgacaccaccgttctccgaacccaatcttattgatgcctcctctcaaatgctcctctttggatccggaaaccgacccgccttctcccttccactggactcacaagttgatcgccggaaacacctgcgttggattcctctaaacctcttacctcacttaccttaaactcaccggcgcagacaccttttgacccctcggccgcatcaccctttctaaaatactctacagctattacgcc

SEQ ID NO: 12018 - DNA, 450 bp, Glycine max
gcatggtgcatctcattcgtctcctttctccttcttcttctcttcacaacaaccttaatggtctcaatctcaaccagctcgactgctccgaaatcaccggcttcactgtctccaagttcaaacaagtcatcaaccttctcaaccgcaccggccacgcccgcttccgccgctctccaccccaagcccaagcccaagcccaaactaatcctcaaccacaacctcagatccaacaacaagggttcagtttagatttcgtgaagcccaccattctaaactcaaagcccatcaacaaagacgaaactttgactctttcaacaacctcttcttccttcatgtcctccgtcaccaacgacgccagcgtctccgacggcaagatcggacctttcctccctccctccgccgccaaaccccctctctcctccgcccaccggaaaaagtgccgcgacgccg

SEQ ID NO: 12019 - DNA, 395 bp, Glycine max
  modified_base (325)..(325): a, c, g, t, unknown, or other
  modified_base (329)..(330): a, c, g, t, unknown, or other
gctttatctgacccacgggtcacccatgagatccgcagtgtctggatatcatactggtctcaggctgaccgttctctaggccaaaagatagcttctcatctcagcacgaggccaaatatttaatgttgttgccaactccagaatgattgttagagttgcagacgtgcaaagagtacgataaggatgtgattttggattacctgaaagaactaatccttttcttgcaatattatgttgtgtgtacccataactccatgaatgcaactcgttgacctatctcaataaatgccgtttgtatttgttagtatttaaaaaaaaaaataantaannaaataattataaaaaaaaaaaaaaaaaaataaaaaaaaaaaaataaaaaataataaaataaaatt

SEQ ID NO: 12020 - DNA, 455 bp, Glycine max
  modified_base (433)..(433): a, c, g, t, unknown, or other
cccacgcgtgcggatagagatcatggaaaaagttggggtaaggctggtggtattgctgtgtgtcattgtgacggcggcgatggcccaaaactgcgggcgacaagctggtgggcagacatgtggcaacaacctatgctgcagccaatacggttggtgtgggaacagcgaagatcattgttctccctctaagaactgccaaagcacatgctggggcagtggcggtggcggaggaggcggtgaaagtgcgtctaatgttcgcgccacgtatcataactatttaccagagcaacacgggtgggacttgaacgccgtgagtgcttattgctcaacttgggacgctgccaaaccttactcttggcgcagcaaatatggctggactgctttctgtggccccgttggacctagcggccgtgatgcttgtggaaaatgcctncgggtgacgaatacagggacgg

SEQ ID NO: 12021 - DNA, 448 bp, Glycine max
gtcacgcgtacgtccacgcgttcgcccacgcgtaccaatttgatctagttgtatctcagaggcatatcgatatacagactcgcatattctaactacgctctcataaactggtatatgacgattgttagcactttgacaaagctcgttcttgacatcaatgtatatacactactgagttgtgttgcaacacaaaaatttgactattttcgtacatattatctgcctacatttttgcacttaactaagttatggaaaaataatttgctgatgagatatacttggacagatggatgaaattacaccaactttttataaaaaggagaagagtgcattttaatataatgtgctgaaccctgcagaaaagctggtcagaaaaatcactgacttaaatgcacttctatagatttgggatatttcatcagacaaaaatgttgagcttgtggacatt

SEQ ID NO: 12022 - DNA, 290 bp, Glycine max
gtaaaacgcatgttaaagcgttgtacaataccaagcaatcggagttgattgcatgcctggcccgtacggtactactagctatgatcacaatacgacgatcacaactcaccatatatgccaattgcgaacgcatatactatgatcactaatgtcactgtaggccatacattaccgacacctgatggctgataaccctgagcctacataactgcatacgctacaattacatgggtcttgtgaacaaagatacgacaacactatatccagtgcaaattacccatttcgacgtc

SEQ ID NO: 12023 - DNA, 436 bp, Glycine max
tgggaggcatcagagacagagacagagacgatcaaagagaagttcccttctctctgctgtgaggaaaatgctgaaattagagagggtgatattgatgggaacccagttcctatggttcttggacagactacaagtgagaaagctcttaaggtctacaccaagaggcccaaggccaaagtgcctaaaagctagcacaacctaacatgaaccactattgggggaagggaggagttagttatatagaaagagaaaaggacgtagaatctgatatatagggggaaagagaataagtgggggatatcttttgagattattgtcgattgtagcctagagacgtgtctctggcttgggggcatgttcttattttcttgtaattccttcatcatctatacacagtaatacaattccaattcagataggaatagttcatatctta

SEQ ID NO: 12024 - DNA, 436 bp, Glycine max
cccacgcgtccgttacaactcctaacccctcaccatcctcttgttctctctcattcatacgcctccttttttatttgtattctcagctttgttagattccgtttctggtttttcccaattccatagtactctgttatcgtcgtcatcccttttataggacagacaaagctgattcacttaggagcctcgagagctatgtctacatcttctcgtgttcttcccactccattggaaaacaagtatatgaaacccccagattcttttcagctttcgccagtcagagatctgactgcaaattcagcctcatcaaattcaatcagaagtgctgggaagatgttttcttcaccttctaaatgtcccgatgacttccctttttcctctgtttcacagcatgataggcaatatcaagatcccccctttgtttctcagacaattg

SEQ ID NO: 12025 - DNA, 150 bp, Glycine max
gccagacgtgcgagcgcaccagggagcactgacactcaaacgggggcaatgtatacctggggcgggatctgctcgacgcatgccgctaatttgaccacacagattcggacgctccaaattcaccatacatcggtgccaatctatgaaact

SEQ ID NO: 12026 - DNA, 454 bp, Glycine max
cccacgcgtccgcccacgcgtccgcccttgtgtggtggcttccaccgcagaagccgccagagagttccttaaaaccgacgaaatcaacttctccaaccgccccggccaaaacgtcgccgttaagggcttagcctacgattcccaagacttccttttcgcgtttgcacccttcggaccctactggaagttcatgaagaaactctgcatgtccgagcttctcagcggccgaatgatggaccagttccttcccgtgaggcagcaagagaccaagagattcatcagccgcgtgttccgaaaaggagtcgccggcgaggccgtggatttcggagacgagctcatgacactctccaacaacatcgtatccagaatgacgctgagtcagaagacttctgagaacgacaaccaggctgaggagatgaagaagctcgtgtcgaatatcgcggagctcatgggg

SEQ ID NO: 12027 - DNA, 277 bp, Glycine max
gtgttactgcgcatccttacggttctaccaccgactctgagcaaggaaagaatgaatgaacgggtgaacatcaatatcaggccaacacccattctttgtctgctgatgcaaggatgaattcgttcttcatcactcataaaaagacgccgatccacaagcatagactagaggaggaagcttataagaagagagcagaagatgagactgctcacctgtatgctgagtttgtacagacatttcaaggagatactactcctgggtcaaatacttttgttct

SEQ ID NO: 12028 - DNA, 125 bp, Glycine max
gcgagctgctgcagctactgctgctggtgaatttaaagatgaaattgtcccatttaccacgggaattgttaccccaaaacccgttaaggaaaattttgtccccttttttgtgaataatggatttc

SEQ ID NO: 12029 - DNA, 437 bp, Glycine max
agccattatggctctttgcatcgcacactaacggtatctatcggattcgctctgtctcgggggccgcataagagttgagtgcattataggtgatgatataactcgcctgcgtggtatgacacgcgcaggaggaggaggaggaggagtgtagcacttctacgtcgtataaaatcggtaggagctgccacgtgtgatgtgaaacatcactgtaggagggctaaagcgaggtggaaagtgcctaccatggaccttggcatgccctgggaactatggacgacgttctaaccataaggagaggcatcttgaactctgatcatgggttgactaaggcagtcacaatgcctgactgatgcattgtctcatgcatcagtgagggacctagcaaagcctgagaatgcatacaccaacaagcgcatgaacttgacggcattgaacca

SEQ ID NO: 12030 - DNA, 395 bp, Glycine max
ctttgcagcactgggttctgatggaggagtgaagctgtattggggtattgcagctgatggatctgtggtgatctctgatgatctagaagtcataaaagagggttgtgccaaatcctttgctccctttccaacagggtgtatgtttcacagtgaaggaggtctgatgagctttgagcatccaatgaacaagttgaaggcaatgccaagagtggacagtgaaggggccatgtgtggggccaacttcaaagttgataagttcgccagagtcaacagcattcctcgagtgggaagtcaatccaattggatggaatgggaccaacattagcttaaaaataaagccttaggataatgtaaaataaacaaaaaaatgtcatctatgtatgctcctttcctaa

SEQ ID NO: 12031 - DNA, 371 bp, Glycine max
  modified_base (20)..(20): a, c, g, t, unknown, or other
ccacgcgtacggatgtattnatgattcaaagagcacacttccaagcttattgcgggccatcatgccaactcttttgacttcattcttgggagttcaaacggagagaagagacgaagcataagcagatgtggtttgctaggaaacaatttcacagtatcattaatggtgcaactccgtgatcctatgagaaactatgagccggttgggacaccaatgcttgctcttatacaagttgagagagagttcatgcttccaaagcaaagaattttcaacagtgtgtctgagataaggaaaaattattatgaggatgacgagagcgatatagtaggaaaattgaagacaaaggacacccataaagaggagaaaagttc

SEQ ID NO: 12032 - DNA, 390 bp, Glycine max
  modified_base (10)..(10): a, c, g, t, unknown, or other
cccacgcgtncggtgatatagataatatcagtgagcacacttccaagacttttgcggcccatcatgccaactcttttgacttcattcgtgggagttcaaagggagagaagagacgaggcaaaagcagatgtggtttgctaggaaacaatttcacagtagcattaatggtgcaactccgtgatcctatgagaaactatgagccggttggaacaccaatgcttgctcttatacaagttgagagagagttcatgcttccaaagcaaagaattttcaacagtgtgtctgagataaggaaaaattattatgaggatgacgagagcaatatagtagcaaaattgaagacgaaggacaccgagaaagaggagaaaagttctgaagaggaagggggca

SEQ ID NO: 12033 - DNA, 336 bp, Glycine max
  modified_base (4)..(5): a, c, g, t, unknown, or other
  modified_base (96)..(96): a, c, g, t, unknown, or other
  modified_base (112)..(112): a, c, g, t, unknown, or other
  modified_base (122)..(123): a, c, g, t, unknown, or other
  modified_base (155)..(156): a, c, g, t, unknown, or other
  modified_base (215)..(216): a, c, g, t, unknown, or other
  modified_base (242)..(243): a, c, g, t, unknown, or other
  modified_base (292)..(293): a, c, g, t, unknown, or other
cgtnnccgattcttggcttggaggggagctagatgcttctctcccaaacaaagggtgattgacaacagtaagggcaaggagaagttctgagcctgngtcgtagattacttanttatccgacnncggtcccaaacaaccctccatgttgatgggcnngtgggccgtgttgttggtttggaagtggcttatgttcttcatagcaaaggtcattccannaccacacttgcccttcttaagtgttnngcggtggtgggaagggggtttccgtggcccttagctagtcacaattcannaactagttaaacctcttaaaaaaaggggtcaaattaagggttt

SEQ ID NO: 12034 - DNA, 348 bp, Glycine max
tcgaaatacaacaatctttcttttgtttgggtggcaagtggaaaacccgagttaaaatagtgtgaaggttatgtttagattgagaaataaataatcttgggggcggcctgtttaaaggatccaagtttacgaaccctttcttgggactgtttaatttttctatccggtcacctaaattaaattcactggccgtctttttacaaacgagtgactggaaaaaccctcgcgctacccaatttaatcgctttgcaaaaaatcccctttttaccagttggcgtaataagaaaaaggcccgaaccgatcgcctttccaaacagttgcccaacctaaatggcaaatggaaccccc

SEQ ID NO: 12035 - DNA, 177 bp, Glycine max
ctcacacatcccaatctatatacctgtttatcatgcctccctatatgtattactttggcttgtctacgagcgggaggacacatctgcaacttcatctatttccaaggatgagttatttgctggactaactcatccatactgtctattatgactcctgatatcgcttgtgagtcatgg

SEQ ID NO: 12036 - DNA, 400 bp, Glycine max
tccgctccttccgtctctccccacaccagaaatcccaaatgaacccaaaacagctccggctcctcttcttttctctctttctcacaatcactttctcgttgaacgaaagatttgaagcctgcgatgccaagacatgtgggaacgggcagaacataagctacccattctacatccaaggcaagcaaaaacccttttgcgggcagccaggcttcgagctaacgtgcagccacaacggtttcccaattctgactctcatgtacaccccatacacaatccaccaaattttctacgacaaccaatctctccgagtgtccaatcccgtcttttcacaaccaaacctttcttcttgtattgccccgactcagaacctcacggtcggaaggtacagattccgagtcgc

SEQ ID NO: 12037 - DNA, 392 bp, Glycine max
ctgtttgttattgttaggaaccgtttgtcttatgagcaatttggtgcattcttggcgaatgttaaagaattgaattcccataaacaaacaaaagaggaaacgctacggaaagctgatgaaatttttgggcctgaaaacaaggatctgtacactatatttgagggattgattaatcgcaatctccattgacattgtgcttaagagattctttccaaatttgtaataacggatactatcgtgcatgtctccttatttatagcaacttttttttctcccctctgtataatacaatacttttttttgaacatgaaaaccgaatgacagtcttggcaggactacaaggttgcagttggtttccttgcagtatggatgggaggtactctagttttaat

SEQ ID NO: 12038 - DNA, 367 bp, Glycine max
ggagtttcttattccttctagacgctttcattgatcggcgatttctgatacatggcggagcatcacgaacacgaggaagtgaagggtgagtccttgttggagaagatttctgggaagatccacgaccacgattcctcgtcttcgtcggattccgacaacgacaaaaccagcgccactgattccttcaagtctaatgttttcaggcttttcggcagagaaaagcccattcatcatgttcttggcggtggaaaaccggctgatgtttttctatggagaaacaagaagatatccgcatcgacactcggagttgcgaccgctatatgggttctgtttgaattgcttgagtaccacctcctgactttggttt

SEQ ID NO: 12039 - DNA, 299 bp, Glycine max
  modified_base (52)..(52): a, c, g, t, unknown, or other
gccacgcgtactgttcaagctaaaagaagaaaaagaaaaggaaaaagctgcngctatgggagagtagaaagtcaacacaaaatcttaaggcccagtggcttgggaaagcagccactgcgaaggaaaggaagcatctttagctccaaatccaatggcggatacctcaagccgatcaaaaaacctcgacaagctccttctcctgcctggcaatctcgtcggtcctaagtttcaacctggccctgaggtgcgagatgaccttcaggccttacccaaagtgttggtggttagggctggtggct

SEQ ID NO: 12040 - DNA, 350 bp, Glycine max
gagaagtttgagccgtgagaagaaaagggaaggagaaagagaagatgggattgcggagtaggaaaaaatggcgtgcaggggtatgcttcgttccaccattctcatagaacccagcctactccgttctttaaatttcaattctaacaaacatcacatagcttcactcaaccaatggtcttgccggtttcattctccaaaacccccttattcttcctctcagaacgaaacgccgttgtctcaggaccctgtcttgaaggccatttcagagatttccaaaggcgaatggagggttggccaaacaacaaacgtaattattggaagcactgctgccgatgattctaacaatgaat

SEQ ID NO: 12041 - DNA, 389 bp, Glycine max
aagcaaatagaggaactaccactactactaccgtgttgggttgctgtgggtatcaagggcgaaccttttaggacgatcatcatcaaattggggcttcctccaactcctctcagtgcgactttcaggcaaagtagcacgtcctccaccaccgttggaagagccaaaacccctgtttccaaacccatcaccaccacttgcctacttaatcttgacgctctcaagctgctcatcaatcttcttccaatcctgccctttctccgccaaaacctgctccctcggcctcgcctctccgaacggattaacacctttaggcttccccgcattattgccatcaaccccttcatcgctcacggacactgtccgaggttgcaacacaagcttcgggcttc

SEQ ID NO: 12042 - DNA, 360 bp, Glycine max
  modified_base (9)..(9): a, c, g, t, unknown, or other
aacaaatanacggaactaccactagtactacacagttggcatgctggtgctatcacgtgcgaagcttatcggacgaccatcatcaaatcagggctacctccaactactctcaaagcaactatgaagcaaagtaacacgttctccaccaccgttggaagagccaaaacccatgtttccaaacccataagaaccacttgactacttaaacatgacgctctgaagctgctcatcaatctgattacaatcatgccctttctgcgacaaaacctgctgcctcggcctctcctctccgaactgattaacacctttaggcttccccgcattattgccatcaaccccttcatcgctcacggacactga

SEQ ID NO: 12043 - DNA, 364 bp, Glycine max
  modified_base (23)..(23): a, c, g, t, unknown, or other
  modified_base (39)..(39): a, c, g, t, unknown, or other
gtcttcccatgattttcaccctntgtctctctctcactntctgtggacttttctgtggtttccttttcagtgaaataaaaaaaaaccactctggcttattactgtctatatagattcttctgaatccagttctttctaaaccaaaccaaaaaaacattccctctccaaccaagttttgttttttttttttttcatgtgaaaattgaaatcgcaaccgcaatttaaaaccttggtgtatgttcttatattgaaattgaaattcttggctagggaagcaaaagggtagtaattggttttagagtaagtgagaatggaaaacgtttcggttcttttgtgtaataaggaaaaggatcagatggatttg

SEQ ID NO: 12044 - DNA, 331 bp, Glycine max
tagtgttttataagttcacggtcaggtctcaaaaatgggttccaaggttttgcttcggggtaatatgtgcatagcggctatacttctgatctctgctgacggtgcacccaatgaatacgaaaattttaacaaaaaagatgggaagcatgctccaaatgggttatatgatagccaatggggttacggcggctggggtggtccttggtatcgcagctggggtggcccttattatgtgggcggctggggtcgcccttattatggcggcggttggggcggtccctggcgtagcggcggcagctgtggctggggacgttagcctatacctaatggc

SEQ ID NO: 12045 - DNA, 352 bp, Glycine max
gtaggtcccttctggtgatgcaagggttatcaactgatttcgccaagcacgctcttgcgtctattcacaaacaacgcataatcataaccttcacaaagtcccaaccaaaatgttccctgccaaatgattctcagcgacttgctccaccggcagcgtcccattgggcaccaccacagagcagatctcccaatcacgtgcgtcatcaattaggccccaagcattatcccacggttccagcaactgtagtactgccagctccatccatacatgcacctccaaacagtatgcagccattgtttgtgccagcaccagttgcacctcccatgtcatttcctacacccgtaccaatccc

SEQ ID NO: 12046 - DNA, 380 bp, Glycine max
gaagaaaacaaagataggagggatgacataagatccaggaaaaaacatcactctcatggcgcttcacaccacaatcgggacaagcataagcacaagagaagacattcctcctccaaagacaaatattcttacagggggaccaagcacgatagctcctctgatgatgaacatcatcgctcaaggcatcatcgtcataaatatgatagctcctcctctgatgatgagcaccactcttccaaacaacgacatagggatgataacttgtcagaccatgagcatagacattctcgccattctaatgaagattatagttcatctgatgatgagcataagcatcgaagcaaaaacagaagtgtaaggcataagagcaaatctcatgc

SEQ ID NO: 12047 - DNA, 353 bp, Glycine max
gcgggcacacatacggaaacaatatcgaacataatcctgcctatggagatgccatatttacagaacgttgtggggccgtgaaaaaattctttaacaatcatttaaatgtcatgcccaaagaagagaaccataacttcctaacttttgggattcctcatgacagaaaggcgctcatgacgaatttcttttcagagctccaagatagagaagaaaaatttggcatatctgatatccagcttggtctaacaacgctcgaagaagttttcttgaatattgctagacaagcagagctagaaagtgctgcaacttaaaggagactagtgaccctgaccttaacatctggggaatctgtg

SEQ ID NO: 12048 - DNA, 326 bp, Glycine max
ctcacaactaagaagaaaacttgctaaagcttctttacgggtttagggtttcgcactgaataaaacttcatgagaagtgtaattgtaataaaagtggaagtctctcttctcttgtgatataaaggaataatagttttatataaaagaacacacacatgctaaaacatactcaaagatacacgctataccctaccgcaaaaggttacagaagcaacctacttaaccggatatcacacttaaccgtacagcgggtgtaaacagttatgttatatattagaaaacttgtgctttatgaatacgatccctttgaatgatcaaacgctgct

SEQ ID NO: 12049 - DNA, 376 bp, Glycine max
  modified_base (2)..(2): a, c, g, t, unknown, or other
  modified_base (18)..(18): a, c, g, t, unknown, or other
  modified_base (179)..(179): a, c, g, t, unknown, or other
  modified_base (213)..(213): a, c, g, t, unknown, or other
gngaatcaaacaagcctntaatgtttgttcttagtctgagtgatatggggaaaattggtcttctacagattgttatgggaaggccaatcaaggtggatcggcgtctgcgatttgttcaacaacctggggacgggagtgcaaagtctgaagatacaccttctgatttgagtgtgaatggngcagaagctcaacaacctgcagagggcagtgcanagtctgaagatactccttctgagttgagcgtgaatggggaagaagctgacaaagttgattgatatcagtttttccctgatgcatatcaatattatttatgctggggttttcacctttatttaccagaagctcgtgagatacaaggagttgataggtgtaagcc

SEQ ID NO: 12050 - DNA, 281 bp, Glycine max
  modified_base (13)..(13): a, c, g, t, unknown, or other
cccacgcgtccgnccacgcgatcgggaaaagcttttgaagaggaaagaaagctgcggtgataaataaaaagtaaagaaaagaccgcatgaaatggtgtgggtatatctgttggtgcatctgcctgacacccaatcagcgaagaaactgagtactattactgccagctcaaatttctcatttataacaagccagcctcaggaggaaaatcacatcaaggagtactcatggaggagggaattctgatacagttttggggctcaaggagaaaaagaacactctc

SEQ ID NO: 12051 - DNA, 260 bp, Glycine max
aaaaaaaaaaaagctttcaaacatggttctactacaaaataaatctggaaacttatgcgggctttataaaatatccaatcttacacaccccttaattcaacctcacacctcttaaatcaaaacacttaaatcaaattccacaaccaccgatttacaaccctttaactgcgaaaacccacaccttcctctcataaatcacaaactactacattacccattcatcgacttcttcaaaaaacatgaggccttatctctatctc

SEQ ID NO: 12052 - DNA, 119 bp, Glycine max
  modified_base (12)..(12): a, c, g, t, unknown, or other
gttttgtttttntgctctaattcacaattcccttcatgcttaatggcgtaattatgggtactagaatgacttgcgagattcactttattaataaacatgcttaacatagtatgtttata

SEQ ID NO: 12053 - DNA, 293 bp, Glycine max
  modified_base (8)..(8): a, c, g, t, unknown, or other
cccactcntccggtttgtaatatggcttaacgaaatcgactaagtgtgttctttctgttagttttcacccttttgtctgcttctcttcatcatttcgggtacctcttgctgattttttcgatctgctcccctaatcaacttgtggcattgggtttcgtttggggattgttatgcttcttcccatcttaatccgattcccattgggtttctgccgattgatatgcttttaccagaatgaagatctttaagaaattgatagtctagctacttcttttacatcaattatttgaatt

SEQ ID NO: 12054 - DNA, 208 bp, Glycine max
ctcaaataatcaatcactcctcatcggtctcccaaataacaaagccataaccctgcgggtcctttacaacatcacatatcctccatccactgtaaaatattcttctactttaaaccaaaccaacacatcattcttgtgcaactagctacgtcccagcaataaacccaagacgggcttatatatcttcataccacttcctcaaaacttc

SEQ ID NO: 12055 - DNA, 283 bp, Glycine max
cggacgcgtgggcggacgcgtggagttttgttagttcacacactaagttctgaaaagtgagttccaaagtttttcttattctacttatgttcatggccactatacttttgatctcctctgaggttgcacccgatgatgcataccagaattttgacaaaacagatgggaagcgtagtgcaaatggggtagatgaaagcaaatattggcgtggtggctatggcgactatggtggttggcgtggtggtggttggcgttgtggctattgaggctggcgtcgtggcta

SEQ ID NO: 12056 - DNA, 389 bp, Glycine max
gcgctgagttctgagtgttccattccaattccaagttacaacttggctgtgtctatggatcgcgctcaactggtgttgctgggtgtacccctctttctcttctgctctgacctcttctcccttttcactcaccaccaccattctcacccggcggaccaccaccaccacccaccggaccaccattaccacccaccccaccaccaccatcattacccgccccaccaccattaccagccggtgacaatagatttccctcccgagaaacccaccaacaatattgcaactccgggtctcggcaacactgtccacatcaatttctgctcttcctgctcttacaagggaacagcagtgacgatgaaaaatatgttggagattgcatttcctggaac

SEQ ID NO: 12057 - DNA, 392 bp, Glycine max
gccgcccggcgttcccggcgccaccgtggcagttccgccgccgcagatgcaggctatgatgtcgtaccaggttcagcccggtaacccggccatgcggcccttcgctccgatccctaacggctacgccgcagctccgaacgtaactcccgcgggtgggtcattcattcaatcgttcgttgttcctttgtgaatttgcattgaatttgatttaatttagtttaattcaacgctccttcgttggttgcttcaatttttatttatgactttggaattatagctattatcaatgtggtttcttactgcgctgtgaaatgtgtgaagactgtttattgtggtgactgtagaagacagtcatagcgctgattgatagcttaacaggtatggttttatta

SEQ ID NO: 12058 - DNA, 388 bp, Glycine max
ttggtcttgactgatgaagtaaagcacgctgttccttactcttgggatccaacatccttggctagttttattgagaattatggtacccatattgttacatctgcaactgttggtggaagagacgtagtgtacatcaggcagcaccaatcatcttctttgtctgcttcagacattgagacctatgtaaaggacattggagatgataggtttcacaacgttaaacacttttcgggtcctggtcctttaaagtataaggagaaggatgttactgtcatatttaggaggagaggaggggatgatcttgagcaaagtcatactaaatgggtggaaactgtaaaattggcacctgatgtcattaacatgaactttacacccattggttctcttc

SEQ ID NO: 12059 - DNA, 345 bp, Glycine max
cggtggacatggcggaggatgcaaatgctgcggtcgaaagggctgcaaatgttgctgaagtaaagaaacacaaacatgaactgaagacacacatacgtgtgtactccatgtaataagtatagtatgtagaattaagaaataaaagcatggaatctatatccgtgctagggctgtcataggttgaccggttttccatcaaccatgcatgtagtttgacacatcattttactatacaagatatataattctacactcaaaaaaaaaaataaaaaagataaagacgaaaaaaaccttattataatataaaaaaaccgacattaatattgggcacaaaaaaccctgaaa

SEQ ID NO: 12060 - DNA, 201 bp, Glycine max
ttcactcgtccagacactcttacggcttaccatctacacacatctaactcagcataggggtatagtgcaatatccgtagaagctcgatctccattgcatgtccgaatgttcaacgatgtcttgaatatactataacataatcagcaacttcggcagactatcatgatgatgcacgaactcctaattgagacgattatagca

SEQ ID NO: 12061 - DNA, 425 bp, Glycine max
cccacgcgtccgctttttcttaatagttgctttggcagggaaagacgatcgaaggcagaagcttggaataaagccaacaaacgacgtcgtgtggtttcgaataccttgtgcgttttgaatctctggaaattgagatggcgaacgagaacgaacccgcgaagctgctgttgccataccttcaacgcgccgatgaattgcaaaagcatgaaccactcgtcgcttattactgtcgattatatgcaatggaacgggggttgaagattccgcaaagtgagcgcacgaagaccactaatgctcttctggtttcgctcatgaagcagcttgaaaaggataaaaagtcaatccagttggggcctgaagacaatttatatctcgagggatttgctttgaatgtgtttggaaaagcagacaagcaagatcgtgct

SEQ ID NO: 12062 - DNA, 428 bp, Glycine max
tcaggatccaactgggaagattcaaggacctttttctatgttgcagctgtacaagtggaatgcaagtggatgtttccctccagatctcagaatatggagggtaggtgagaaacaagataactctatactgttaaccaatgcactaagtgagaagtgttccaaaaatgtgtcattgccattcaacagccaattgctctctctaggggtcagtgttacattggatgataaaggtaatagtcaggatgctgggaagaatgcaaagaatgaaatttctacagatggccaaattattgaacagacaaaggaacaaaagccacaggtggataatacctctacccagtctgatggcaaagatgaaccggttaggagcaatggatgttccagccagctgcctgtataccctttgctactgtcaactgccattcctg

SEQ ID NO: 12063 - DNA, 350 bp, Glycine max
  modified_base (331)..(331): a, c, g, t, unknown, or other
atgactcttccagacgcacttatgactgacgatatagacacacataatacggcctacgggtatactgcaatctctgtagaatctccacgtgctttgcatgaccgagggttcaacggtgtctcgcagttactagaatagaatgaccagcttcggcagatgatgaagatggtgcttgaactcctaaatgaacctcttatcgcgacattacatatgactgtcacagtgatcgactatcacaagaactttgtcctgataaggattgagattaccgaatcactatcagaatagacggacgtggtttcaccaagtgtacccatgggacgaactcctnctcagattgcacttcatga

SEQ ID NO: 12064 - DNA, 193 bp, Glycine max
gcctgttgatcaaggagagaattggcaacaacctgctgctccgaatcgaactatgaggaggagttggaggtggtagaggaagaggtggtaatgccacagctgtaggcaaagggccatcaccagctgtacccacaaggcgaactgcagctggtagaggccgcggagcaagattgattgatctggaccctgaacc

SEQ ID NO: 12065 - DNA, 383 bp, Glycine max
cccgtaaccatgtctcaggtgcaattttgctttttatttttctcttgtttttccctcggtttctgattcggtgttctggacttcatagctagcaatttctgaattgttatatctgcaattatttattggaatcatttgtttgacttttcaaaaaattaggaattcctgtgtttggttgggaacccttaaaactagagcaaggattataacacgattgggcgaaaattaaatgcatttgattttcattaaccatcggtttctctgtcaactattgcagaatttcttacttgttcagctaccattgttttttttttttttttttttttgtataacgcgcatgctagatctctgttttcaacactttattcctgattatatgctct

SEQ ID NO: 12066 - DNA, 410 bp, Glycine max
cccacgcgtccgcccacgcgtccgggttttcttggatcaataattcctgatgctgtgcatgatgtgctggatcctgctcatcatcatgtactacataatgctgtccctgcaggggtcaaaagctatgctgtaattcgcaaggttgaaaatgtcaccaactcctcatcatctgaactcctagcttgtaaggccattatgtccgtaataacttataacggttacttccaggaattccacttaagcattgatgctcacaatggattatcttggtctttaagacgccaggtcaatcttttgactgtgaccatggataaagcgtcatgagtgacataaagtgttcttagagcgccaactattactgcgaagcttgaggaatcacatgctacacttaaactttcagacctactact

SEQ ID NO: 12067 - DNA, 220 bp, Glycine max
  modified_base (145)..(145): a, c, g, t, unknown, or other
aacaaaccaactcgaacctctcactctctctgtttctgcaatggcgaagaagaaggagagagaaggtgaacgtctccggaaaacctaagcactctctcgacgtaaaccgcagcaatgacgcgaagaaggagtcgcgctccgccgncactgtgcgccgcctcaagatgtataacaccagacccgtccgcgatcgcaagggaaaagtcttatcccacgagct

SEQ ID NO: 12068 - DNA, 432 bp, Glycine max
accgcctggcttttcccggcgaagaacctatggtacccaccacaacaacaaaaacaagaacgttaacaattatttcaggggtaaccggaagccgacaacccgacccgaacaaagaaaacgggttgtggacaaaaggcccagtttagatgattcgaggttttcgagtttggagatggagaaggtcacgattcttcggaggggggaatcgctcgattcgaagctgaaaacagaggctttgaagaaggaaggtgataatttggtcgtggttgggacccagaggctcggacccgacccggatatggtcccgaagcagatccggatcgtggatttcaggtccgggcgcgagatttacgccggatccgcgttcgcggtgtcgccgtcgccgagcgcgctgcccttgccgtctttttcgaagaggcagccggcggtggc

SEQ ID NO: 12069 - DNA, 432 bp, Glycine max
cccacgcgtacgcaagttcaagggaggattttgatttcgtggtcgtcaatttctacgagtttggattcatccaagacccacaagctgaagtcgacaaacaccgttctttcttgcaattggagggtcttgacatcaatggaagattatatttgaatgaacaagtatagcgggccatcaaaagatgctatgacgtatgtcaactggttaagaaaggataacaggttttctgacatcttggttcagatatctccatcagaaaagggacatacctttccaacattgaagttgcgttataagccttcattagtacaggcagcacggatttcagaatttgtatactctgaagggaggtgtttctcactatctaaagaatgaaggccctgccgaatgggtaggaaatttatttgtatttgactcccgtctatctctccc

SEQ ID NO: 12070 - DNA, 418 bp, Glycine max
  modified_base (289)..(289): a, c, g, t, unknown, or other
gcattgcgaaaattcgaagaatcattatgaggttcaaaggtgtacaatccgtgagcgttgacggaagcaaggacttggtgacagtgaagggaacaatggacgtgaaggagatggtgtcgtacctgaacgagaagctgaagcgaaacgtggaagtggtgcctcctccgaagaaagacgacgataagaaagagaaagaaggtgacggtggcgaaaagaaagagaaagagaaagacggtggcggtgagaagaaagagaaagacgttgctgcagcggcggaggttattaacanaatggaatatatgcaccagatggcacctccgtcgttctggtacgacggaggacactttcaggtcaaacaaattacgctatggagggtcacccaggatatggtgctagtgctaataatcattacgtggag

SEQ ID NO: 12071 - DNA, 170 bp, Glycine max
aaaaaaaaaaaaaaaaaaaaaaaagattaaaaaaaaaaaaaaaaaaaaaaaaaaaaaagaaaaaataaaaaaaaacaaaataagggctcccgttcttcaggatcctaaccttccatacgcatgcattcaacattcatacctcttcttttgtgtcacctaactgcatttct

SEQ ID NO: 12072 - DNA, 169 bp, Glycine max
cccacgcgtccgaaaatatttaattaagtttgctatgttgtaagcaaaaacacatccgtgtttcatttgtagtagtagcatttatttttatgcttgacgggactgtgatcccaaagtatgataacttttgtgacatgtgtaaataatatcttcaagagttcatgcccgc

SEQ ID NO: 12073 - DNA, 380 bp, Glycine max
cccacgcgtccggtccagactattctccttctccaagacgaaggcgacattacaggtgaatctcaccaagggacagaaagtatagggatcgatcatactctagatcatcttatgcatcaagaagccgcagcagaagtaggagttacaataggagtttgagccgaagtccgggctactctaggtgattaacttgataagcatggtggtgggtgcggtggacaatgctttagtttgcatatgtattttttatggagcttgtgtgttgaaatacttcagaatgttggtattttgttcatctagtagagaggatttggcgtggttttgtttcagctttattactagacaacatttgtacttgatatttaattctaggtttattg

SEQ ID NO: 12074 - DNA, 98 bp, Glycine max
aaaaaaaaaaaaaaaaaaaaaaaaggttagtttttgaaaaaaacaaaataaaagggaaggggtaaaaaaaaaagaaggttaggaaaaaaaaaataaaa

SEQ ID NO: 12075 - DNA, 293 bp, Glycine max
aaaaaacaaacatataaaaacaaagttctaaaaataaaaaaaatcaaaaaaaaacacagggatattttaactataaaaatgaccaacagaacctctaaagacaccattttcacaaacatacccttccctaaatcttgctaatttaaagaatcacatcaataaaatttactgtatacactacaacaacttactcacttaaaaatctttcacgatccctcttcaaattaacttccaacctatttcacacttgcaaaaccattgacaattcaaaactcacactcctaacacatttc

SEQ ID NO: 12076 - DNA, 433 bp, Glycine max
cccacgcgtccggcacataataaccctcaaactccatttcactcacagaaaaatagagatatagagagagaaagtgctgcagaatacacacatacacaccacttcttcaagagagagaggtgtgtgaaggaaaataagaactgaaagaaaaattttgcaaaggaagatatgaaactttgcaaatttaacaactgagaaagaagatctgtgatttctctctctctttttgttgttgttgttgtttgcagagaaaatcacacaaaagcacacacacacacacccttcttcgagtctgaatttgtatcattgacaattttttcacaaagggttgttgtctcttcagagagacacagatcttgaggttggaggcaaaatccttcacacactttggtggttatggaaacagaagagaggaaccagaaagattgcaagg

SEQ ID NO: 12077 - DNA, 142 bp, Glycine max
cggacgcgtgggagagatagagaatggccggctggctggagaatcctgtccagaactcacatcacatgagctgttctttgttttgtttatttttcagaataaatggtttactattatttcaatgaaatttgttgatcttatt

SEQ ID NO: 12078 - DNA, 186 bp, Glycine max
aaaaataataagaaagttgatttagttatctatgtcgccatagctaaagggatcatagtgtcggctgtttgtgagacgtaggtattggagacggatactacggcaactatgtccacctacatatgaaccaatatagtatgtataaggatgaaacacagattgcgtaaatttacatccaacaattta

SEQ ID NO: 12079 - DNA, 133 bp, Glycine max
cccactcgtccgaaaaaaaaaaaagaattaaaatttaaaaaaaaaaaaaaaaaaaaaaagaaaaggtaaaatattaaataaacctaaaaatatccatactacattaaccattcaatctacttatttatatttt

SEQ ID NO: 12080 - DNA, 387 bp, Glycine max
cttagagtatgcatgtatgtgaatttagcaaaggaaatgtgtgtgatgtaggtaacggatacgccttggaagtacatgtaaataatctaggtaacgaaggtgccttgattgtatatgggtgcatttttcttagttataagaatgtcttgtgcaagtgaacgttcgtgaagaagtatgcgcataagcttgctctaaatttacattgatgtttgtatttattggagggggttgtatgccatttttgttttaagggtagcatttcttggtaaaaactaactttccaaatgtttgccttcgcaggaatggccccgaggaagcttgcctcaaagaggtccaagaaggacaaagcggccgaaagaactagttccgctccggagtacgacagtc

SEQ ID NO: 12081 - DNA, 338 bp, Glycine max
gcacccctgtagcaatgttatctctgaattggttgatttgccaaactacaatgctttgggattttatgaggtgttgtttgttttgtttattttttagaatatatggtttactattatttctatgtaatttgttgatcttattaaattatttaattaagggcgttcgctctagatgatttaagcttacttacgcgtgcatgcgatgttatatctcttttatagtgtcatttaaattcaattcactgttctgtgttttactattttttttactgttataactttttttttattcaacttattgggtttttatttcattttttttttatcaagtggcttat

SEQ ID NO: 12082 - DNA, 427 bp, Glycine max
ctcactctcaccatttttctctcctcaacccattgcccactcatctattcagtatttctatcatattatagttatataattaaacatagcaatagcaaattatatatatatatacatcatccaccacccagatttaatttcactccaacccatcatgcatcaccgcagattcagcaaattaatacatgtggctgacccagatgagcccgagtcagggcccgagcccgcctcagaagctgggcctgcttctccttcttccggtgaagacactaaaactgaagcaccgtcacccaagaaaaggagggagatgaagaagagggtggtgacgataccgatcggtgacgtggatggatctaagagcaaaggagagaattatccaccgtctgattcatgggcctggaggaagtacggccaaaagcccatcaaa

SEQ ID NO: 12083 - DNA, 433 bp, Glycine max
gttcccccctcaactcctgcaactttaggcaccattggtattggaaatgctcctaggaacgtaaacattcatatacatgctggtacctctcttgcacctattgtttcagccattggttctggggcaaataatggagaggggacaagaagtgaacaccgtaatgagcctggctctggtgattcaggttcaacacgggtattacctgttagaaatgtcatagcagcaactatcccatcacaccctcctggtgttggaatctctagtagcacacaaactgggtttggtattcctacttcacagccaccttctgattcagcttcattgtcatctgttttagcagaaatcaattctcgccttagaaacgttgttggtaatatgcatggagataacacagttccatctggtcaaatggaatcaaacagcagggacttgc

SEQ ID NO: 12084 - DNA, 428 bp, Glycine max
  modified_base (407)..(407): a, c, g, t, unknown, or other
gccaaagaaaaggctcaggctctcctcaatcaatttaaaagtcaaagacatgggagtgctgggaggggctgatcttgaattcccaactcgtgtggtatccaaaggttttgaattaactcctgtataatgtccaatttatatattacatggtgcaaataatgtgtgtaaaggtgttttgtatcgttttctcttgcttggaaagggaaaaaaatatttgtggaggattgattgtgtcctccttgtgaaaaacctttctgtattgcaaaaaaattatacatgtaagtctagcttttgtattaacaaaaagggtccggtttttgttgttgtggtaatggttgtggacaaataaaacatttggtttatttagtgacacttgtatttcccctttcattgagatagggatgtangtgtaaactgttatgttcatg

SEQ ID NO: 12085 - DNA, 412 bp, Glycine max
tcgctttcaagcctcccaaacacaatgatccactcttcatcaggcatatcattgtggcgaggatctgatgataatgaatccagtgacatctttctagaaccaataaggtggaagggatttgcaaatgtgtgcactgcagtggtcaaacatgaccctaactggttgcatgaaacaagtggtgtttatattgtaagtggtgcacaactcattagtaaaggaagttggccaaagaatgtgcttcacttgcgcctcctatacactcacatacccaattgctgtataaggaagtcagaatgggatggtgcaccagaggcttcaagaaaatcatcttttctcacaaatctaagcacaacattttcattcacacaacaaagtccttctcagaagcaggctccaacagtacttgactctg

SEQ ID NO: 12086 - DNA, 421 bp, Glycine max
cccacgcgtccgctgacttttgcaaagcacatgggggaggcaagagatgctgttggggccatccgggttcagaatatggcatccaacaggatggtccttgcaattcatttgcaagggggaaaacaggtctatgtgcacttcatagtgggctagtgcatgacaagagggttcatggaggcatctcactgggatctgttgttcaggatcctcattccagtaaaacagatgaactaaagcaggtactcgttgacaaaaacatgggtatagatatgatgaaaatagggagtagtctaggcactgcaacctgttccgacttcgaacagtttgaagctgcaactgctcatgtctcatccaaggaaggtagtcacttgccagtgtcagttgctgttcctgaaagcaaggtgcatggtggtagcctgat

SEQ ID NO: 12087 - DNA, 434 bp, Glycine max
  modified_base (399)..(399): a, c, g, t, unknown, or other
cccacgcgttcgcccacgcgtccgaagagagtgatagcaggccaaaaaactaccagtgcagtgtggacaagtattcacatgacaaatatgacaggtctgatcatagaagcaaagaaaaacgtagagatacatactcggagcatcagaaatataaagatatggattcttcatatgaaaaatctgcatctagcaagaggcatgcactgtatgatgaagtggagagggaggggcattcaagggactgggatggtcaaaatgaaagaagagattcccgccgaagttcaggggactacagaagtgaccaaagagatgagtcaagtccacaaagagacagtggtaaatttagtttaaaagaagcttataagagtgaacagaaggagtcaaatgatcaaaaccttncatgggaagaaaaaagaaaacatgatgacactgag

SEQ ID NO: 12088 - DNA, 444 bp, Glycine max
gcgccacgcgttcgccagcgtccgccagcgtccgattgttctttcacaaactctgacgttccaagaggagacacttgttagttcttacattacatggctcatttggtttatggtgaaactccgtcttttggagcctcacaccatggacaggctcacaaattgttccatttcaaaccacttcgagctccttaaggatcctgctcttacatggcaacttagaaatatgggtcaacgaggccagaaaccttcccaacatggacatgttccacaagaaaacgggagaaatggtttccatgttgtcccgaaaacttggcggcaaaatcgaaggtcacatgtccaaagctggaaccagtgatccctatgttacggtatctgtggccggtgctgtgattgccagaacttttgtcatcagaaacagtgagaaccctgtttggacacagcatt

SEQ ID NO: 12089 - DNA, 428 bp, Glycine max
ttagcattcactgtccgtgccctcgatgctggacctgtcattgctactgaaaccattcaaggtgatgatcaaataaaggcccctgatttgcttgagctcctgtttcataaaggatctaaacttctgattggagaacttccttctatacttgatggatcagcaagagtaaaggcacaacctcaagacgactctaaggctacattggctccaaagataaatccagatgaatcatggctattctttgatcaagaagcatctgttctacacaataagggtggccaggaactagagcaagagtgttagtggttgagaaaaatggtcagcagaaaactttggagattaaaattataaccacacgagttcgcagtcatgaaagtgtgcagttcgatgaagcagatgacattgcattcgttgagggtgcgttggta

SEQ ID NO: 12090 - DNA, 428 bp, Glycine max
tcgtctcgtgtttggtctattgaatctcaattctggagagaatcaattagtgtctaatagaggtaattggagattctagtgcagttatctatctgagataataaagaaaaaacaattacgggtacaacaattatacggaaggataaatgactgctgcccctaaacgcttaacgatacagattctgctacaactccttctctttccttctcccctaactgtttttctcttctttttttttcctgttcttcgggcatatacagatacaacaataactaaaatgtccgtgttggtggactttatactgtgtcaaaaaacttgtacacattcttggctggttcaatatatcacaacacgtagtaggcctggctgagtttccatgaagtcaatgccctcttcaagaagaaaacgctgtacagctattggaagt

SEQ ID NO: 12091 - DNA, 231 bp, Glycine max
atatacccaaaaagtactagtctctcttgtgatcatgtgctgttcaaaggttttgtggcctgggcacatacaacttgcacattcttcatatgcacctaatgcactttctcctcacggtatggttactacactaataacctgggtccaaatgctattcactaaaagattatgaacagtgcaatcattgctgagatacaggaccttcccgattggaggacctttgatttaaac

SEQ ID NO: 12092 - DNA, 334 bp, Glycine max
ctaactgctactcgctcatcccgtggaggtttcgctctctcagtttcttttgcccaagggggtttttcatctaacaatttactttgcagaaccgtaaccctaaccccttcccctaccttgtaaccttcctttcgatccttcacctcgcagataatgggagaaacaaaggacgaagcatacgaggaagagcttctcgattacgaggaggaagacgaaaaggcccccgactccgccggagctaaagtcaacggcgaagctaccaagaagggctatgttggaattcacagttccggattcagggacttccttctgaagccagagcttcttcgggcta

SEQ ID NO: 12093 - DNA, 361 bp, Glycine max
  modified_base (276)..(276): a, c, g, t, unknown, or other
agaatattaactgtttccaacaagttgtattgtaaggaaatgtttctgaaaacaggtactgtaaaactgagagaaaaaagaaactggtgagaattcacgtctttctttgtagttcaacttgtcacaaaaattctggtttggattcctcaaatttagtacatatacctagtttattttaaaaaaattcaatatggattgtggttatatttaggtagctgatgaacttgtggccgaatttgctgatccaatcaaatgtgtttcaactcctgatcagcnatcatatgatgagaaaaacattcgtcgaaaggtgtatgatgctttgaatggtctcatggcaatggattattattctaaagataaa

SEQ ID NO: 12094 - DNA, 302 bp, Glycine max
tcggggagaggaaaaagagcagcctaagaatgaaaccgagaagaaaccccgagaagccggcgggcccccaagaaagacgacggacccattcctgtcgtttacaaactcgacttgcattgcgagggatgcgtcaagaagatcaaacgcacatgtcgccactttcaaggtgtggaaaccgttaaggcagatctatcgtcgaacaaagtgactgttaccgggcaattgggatgccgaaaagctgcgagataagatcgccgagagaaccaagaagaaggttgacatcatctcagcttcgcccaaaa

SEQ ID NO: 12095 - DNA, 325 bp, Glycine max
tgtttgatggtatctactagttttataactttagtaattctagatctaatactgtcaacgtgaccccgtcttctggaaagtattcattcattacataaaaggtcaacacattctctaactctttctttcattattcatgataactcttcatatcacactgccttaattcctgctactcattattcaaatatctgccctatctactttcgattttttgatagtctcctaccattttaattacttattactcataattaggtttcctttccatatatgtagccttataaactgttaccactttcatactatatcatcattctctcat

SEQ ID NO: 12096 - DNA, 439 bp, Glycine max
cccacgcgtccgattaatctccgatccgaaaccgaatggggattctgtacgcgggggttggtcgtggatcggtggtgctggcggagttcagcggcaccaccaccaacgccagcgcaatcgcgcgtcagatccttgaaaaaatccccggcaacaacgacacgcacgtttcttactctcaggatcgctacatcttccatgttaaacgcaccgatggactcaccgttctatgcatggccgacgacaccgccggaaggcgaattccttttgcgtttcttgaggatattcatcagaagttcgtgcggacttacggacgcgccgttcactccgctcagccttacgggatgaacgaagagttctctacggttttgagtcagcaaatggagtattactccagtgatcctaacgccgataggatcaatcgtctcaaaggtgaaatgta

SEQ ID NO: 12097 - DNA, 69 bp, Glycine max
tcgccactcgttcgtccatcgttcgaaaaaaaaaaaaaaaaaaaaaaaaaaaaaaaaaaaagggaaaaa

SEQ ID NO: 12098 - DNA, 148 bp, Glycine max
aaaaaaaaaaaaaaaaaaaaaaaaaaagaattaaaaaataaaaaaaaaaaaaaaaaaaaaagggaactggggatactaaaaaatccaagattacaaacacatccatacaacatacataactattatatagtgtcacctaaattcaatt

SEQ ID NO: 12099 - DNA, 438 bp, Glycine max
accacgcgtccgggttgttcatctctcaaggaattttcagtgacatcagaggaagatgacggatttggacttatctcagactgctatacgtgcattattgacgtcaatgttatttctcctgaagcttacatattcggatttaagtggctgcagagagattgaaagccttagtgttcatataaaatctctacgggtactgacactcatcggtggcccatatctcaaggaattatccgtgacatcagagaaatcgacagtattggagttacctgacactgctatatttgcattgccaacatcaattgggcacttattatctttaaaagagaaattggtgtctctgcatgagcttccaccattcctgagcgagctttatttaaatgattgttgtaaactcgtgtctatgccggagcttccaccatcgggtaaagaggagac

SEQ ID NO: 12100 - DNA, 384 bp, Glycine max
tcgtataaaattaaaaaagtcatggataacataaaaaattgggaagaagagagattaagcgggtggcggcccaaagagttaggtgtaccaacctcatagcactaataacacatatttgaagacgaatagaagaaagaaagctaattggaaaattcgtataggaacacaaaaaatggcagatattcctcgggtgaagcttggaagccaaggcctggaggtttccaagttaggatttggttgtatgggcctaagtggagtgtacaacgatcctgttcccgaagaggttggcatctctttgatcaaacacgcattcaccaaaggggtcactttctttgattctgcagatttttatggagcacgtgccaatgaagttttggtcggaaa

SEQ ID NO: 12101 - DNA, 361 bp, Glycine max
cccacgcgttcgggcttgggtttggggttgagtttgaagttaggatggggagaaaataatgataacaataataatcaacaacaacaccctttcaacgtgcacaagcctcctcaatcggttccaaaccaaagggtttccgtcaatagcttgttccattttcatgatcggagctccgagatgcggtcgttcttccgcggaatagacgtgaatttgccaccgtccccgccttcggcggctctggcggcgttcgatgacgagaacggggtgtcctcgccgaacagcacgatatcgagcatcaacgggaagcggagcgagagagagggaaacggagaggagaacgagagaacgtcgagttctcgcg

SEQ ID NO: 12102 - DNA, 337 bp, Glycine max
cccacgcgtccgcccacgcgtccgcgtataaagaaggctgcctcttctgtgtgcttgccaagttcttgaatattttcagcttcagcaaaactactagaaaacccatgtgatcaacttttgaaggttcaaggtaccatgccatgacatttggaattatgctgattttctggtgctcctaagttaatgcaagcagggatttggagtacctcttcaaattagccatttagatgaatgaataattttgcttttagaatttattgatagtaaaacttatctaagaactgtaaaaggttgagatatattcacaaaatggtaagtgacaatgacgtctacaatc

SEQ ID NO: 12103 - DNA, 399 bp, Glycine max
gattcagcatcatggttcagctaatgaggtctgatacggataatcactgtgggaaaaaggtgaagttggaggttcaagatgaaatcccccctcttcacactcacaagcgacccaaattggaatctccccctaagtgtggtgcaagcgatgaatccatttcaatcccaccagcttcatacaatcccttggatgagccaagccctttgggtttgcgtctcaggaagagtccctcccttttggatttgattcagatgaggctctcgcaacaagaggaatccataaagaaagatcaaaaggcttcttcttcttcttctgatgctgctgctgctgctgctgctgctgattctaaacttaaggcctccaattttcctggaaccattttgaaaattgggaattggg

SEQ ID NO: 12104 - DNA, 321 bp, Glycine max
cttttggctttatcccacttgacttcatcttgccaatggttttctacaatgtgacatttaagccatctaagcgaagccctgttttctggttgaatgtgataattgttgtggctttctccgcattgggagctatagcagcagttgcagcagttaggcagatagttcttgatgctaaaaattaccaattatttgctaatgtatgatcatgttggaccatccaatgaagctttgttgttctaaaaaaaccaatgaaaaaaaaaaacaagccaaaagctgtagattattctaacaaaaatgggaccctcataagaagttaaaaat

SEQ ID NO: 12105 - DNA, 355 bp, Glycine max
tcgagtagatgacgtttctaaaaaaagaggtatatgacgttcaataatgtttatttgtttatgtcatcggttgaagctacaggggaggacattgattttgttagagtgcacagatgagaagaatgttgtggatatgttggaattatccgtacatttgaagtgtgtggataaggtggatcttgtggttttggttgcgggatagcatgtttctctgcaatttttttgtcatgtgctacctatgaaaagattaaataaaaaaaaaggggtaaaggggaatagttgaatttcatttagactgcgtaattatcttcactgtttcagaacttaaggaaattaaatattttattctttctgt

SEQ ID NO: 12106 - DNA, 248 bp, Glycine max
cccacgcgtccgcccacgcgtccgaaaaaaaaaaaaaaaagtaaaaaaaaaaaaaacaaaggcaccaagctaaaacaaccaaaggactcccactctcgcaggccccagcttacgtcctcgatcatgcaacccaaaaacattttcaatggcgtgacctaaacaacgttcactcgtcgatatcctccaacgctcccactcgaaaaaccctgacgttccccaccttattcccctttcgcatcatacccctt

SEQ ID NO: 12107 - DNA, 445 bp, Glycine max
gagcgttcggcaagaaccccgtggtcttcgagaggcgcaaactccggcaggttctccagcgtggtttcgagattgttcagcctcgcagcaaccaaattggtgccatcaaggtaggactcgtcggagtcaatttcctccgatgatccccccacgctcgtattcgagccatacttgctacgatcaccgtccccgcattcctccgttacggtcaccttaaaagtctcctcaccaatggcgacatcgatggtatgttgtatttgcggcatccacgaagtcttaataagcacccgggctcgatctagtcgccgtctatcctccgcctcgtcgtccatgtcgacgaactcccccacggccgccgtgatctttcgcaagtgtttcgaactccacgcttgaagaggaactccccaaacgtaaacccaggttagtctatctcccactcgcactc

SEQ ID NO: 12108 - DNA, 343 bp, Glycine max
atcgtggtggtcgaggcggtgttcgcttcggcggtcgcggtggaggcagaggtggaggctggcgttgtcctaaccaaagttgtgggaatctgaactttgcgaaaagggttgaatgcaacaaatgcggtgctccaagtcctaatcccaatagttctaatgatcgtggtggcagtggcagtggcggtggttataatagacgaggtggaggctatggtaacaatcgaggaggaagaggtcatgactatagcatcggagggggtcgatctggtagttatgatggagggagaggcaatgaatataatagtggaaggggtggtaatagtgaacgcagaagtggttcata

SEQ ID NO: 12109 - DNA, 398 bp, Glycine max
gcttgctttatatgttcttcagtcaaaccaaaatctctctccgcagctccaggcaacagcccaattccccttttcagttacaaggattggtttgggtcttgttcctgcattttgtgcactagttggggtggtagtgacttgcaccatggatttccacaatccttcaaagtctttgacggcaccactattagcctagctgtgtcattgatcataattattctcctttctctaacatacaaaggtaaatggttatatcatacttggagaaatttcagctgctcggacccattggaaaattcaagcagcaagtagtactgagaatattcactttatagtttatatatatgtataatcttgtatatttattgaattattaattgttacaaatattatatgtc

SEQ ID NO: 12110 - DNA, 425 bp, Glycine max
  modified_base (397)..(397): a, c, g, t, unknown, or other
tgtgactgtcgctggcagctcaggtgttccttgttaagatctgtggtttggttttcgggagggaacaagaaaaaaaggaaaagatgaatagctacagctactatgggtaccaagagaagaacaccttgacaagctgtgaggagacgaggatggaatcagtgatttgccccaaacctcgccgattgggtctcataaaccactctttcatcaacacagaagtcggaccctcgaggcaccccatcatcaggaaattctctgttcttttttctttttggtttttcaagcaaatcggttataaaaattatgacttttctgtatttgttcactaaaaataagcagcttccaacctgaggtggaagattcaggagttggggcagcgcttctggacatgctcctncccaaggaaaattgctatctggaaagat

SEQ ID NO: 12111 - DNA, 437 bp, Glycine max
cccacgcgtccgggcttctggtgctaccaatatgtaagtaacgaattgccttcacagtgatgaccgatgagaggtagataatggattttactttactgcccctgtagagagattaatcactgtctggttttgaagctttggtcattggtggaccttgcgaatgttgccaaaatttcaattaagtgtttgtttcaattacttggaaaagtggattctaaaagcatccacttggtgcactgtaaggtgaagctttgttaatattggccgtgcaattagggtttcatttcaactttataaatacaaattcaattcagtgttatgtattataattttattaaggaagggaataatggatagctctggaatgtttttgaagtaattttttgaaaaatggagattttatcatccatagactatggaatctggaagatagaagt

SEQ ID NO: 12112 - DNA, 434 bp, Glycine max
agttgacattaaacttgatagtcacagaaggcttattccagcacacagcaagggcaaacctccctcatatgatattattgctggatttgtttttacaactgtttctgttccatatcttcgttccgagtatggaaaggattatgaatatgaagctccagtcaagcttttggataaactgctgcattcgatgccacaatcaccggatgaacaacttgttgtggtctctcaggtgctggtggctgatatcaacattggatatgaagatattgttaacacccaggtccttgctttcaatggtcaaccagtgaaaaacctgaagagcctagccactatggtagagagctgcaatgatgaatatctaaaatttgatctagattatgatcagatagtggtgcttcgcatgaagactgcagaagcagctactcttgatattc

SEQ ID NO: 12113 - DNA, 117 bp, Glycine max
cccacgcgtccgaaaaaaaataaaaaaatttaaataaataaaaaaaaaaaaaaaaaaataggaaaaaaatgaaaaaaaataataaaaaatataaaaaaatataaagaaatcaaattt

SEQ ID NO: 12114 - DNA, 427 bp, Glycine max
gttgcttgatgccgttgtaagacatgttccaccaccaaatgcaaacattgatgcaccttgccaaatgctggtttcaatgatggaaaaagatttctatcttgggcgaattttgactggacgcatattctctggggttgttcgtgttggtgacaaggttcatggattacgtaataaagattctggtgctgaaaaaattgaagatggaaaggtggtgaaactgatgaaaaagaagggtacaaacatggttctaactgattgtgctggagctggtgatataatttcaattgctggcctgtcaagtccagcaataggccatacagtggcaactgtggagattatgtctgctttgcccacagttgaattggaccctcctacaatttccatgacttttggtgtaaacgactccccactagctggccgtgatggc

SEQ ID NO: 12115 - DNA, 449 bp, Glycine max
gggaaatggaggatcatggtacaatgactttgattttcatgattacgatgatacccctgctcatcccaaaaatggcaaaagtggtaagggtagtaacaatgtcaaagaaggccagatgggcccgggcccaataatgggtaataatcttccaatgcgtcatcagatggagaatattcaagcagtacaaggacttccggcgatgaatggtgatggtggctattatcaaggggtgcaaatgcaacatgctccatacaataaccttcagcagcactacatgggtatgatgatgaaccagcatcaacatcagcaagcaaatatgaacaacaacatgtacccaacacccatgatgtatggtaggccgcatccatctatgaactacatgccaccaccttctatgccatctcacccaattgccgatcctattactcataccttcagtgatgagaatg

SEQ ID NO: 12116 - DNA, 440 bp, Glycine max
cgcacgcgtccgattttggcatgtttgatgagactgtcttggcctgaataaaatgttgcaggtggacttggatactgcggagcctcaagctcaacaaagtgaacaaacaagtgggttttaatggccttctgtatttttttctactacatatatatgctgtggaactcaaaatcccaacacttttatttgctgtgcagatgaatcaaagtttgttcgtgtatcttttcagttagaaaagaattgtaacttcggtgaacagtttcttatcgttggagatgatcctgtgcttggttcatgggaccctttagaagcattacccatgacatggtttgaaggacatgtatgggccgtggagctggtgagtaaaatctgttcagaattttaaaatattgtcggattgaaaacttttataaatgttgtttttgcttactttgtgtaat

SEQ ID NO: 12117 - DNA, 428 bp, Glycine max
ggaattggaagttgacgagaacgacttgaaagccgccggcgctgaactcttcgccgaaggtggccggcggggcattcgtatcaatggctggttgatcgagactcggaggcactccatactgaactcttccacattccaagagtgggaacagaaactcgatacgtctcatttaccagaaatggtttttggggaaaacactttgattctaaaacacttgagcagtggaaccaacattcattttaatgcatttgatgctctacgtggctggaaacaggaagccttgccgccagttgaagttcctgcggcggctaaatggaaatttagaagaaaaaaagtaattgctggccccaagtggaaaacgatgattaaaaagataaatggatatggaaaggaagtgaagtaccaaagaaacaaaaaacgggcggccg

SEQ ID NO: 12118 - DNA, 427 bp, Glycine max
gaaagtcttctctgcattatgtgagttcagatcccctcctaactgcaggaggcacaaatgggtcagagtctccaccagatcatgacaaggaattgtcttctgaagcagatccacttgatgaggtgaaggatatgaaggacttcagttgtaataaatataaggatccgttcaagagatctaggagtgcttctcttgtgggaatccaaacttataagggaggatctccaaggtcagagttccacactgctgaatctgagaaacatggtgaaggatttcgaggaaagagtagttctgacatggttgttagaagagaggcacatgttgttcccaagcttcggtgccgggtgttgggagcatattttgagaaactaggatccacttcttttgctgtctattcaattgcagtgactgatggtcaagagaaaac

SEQ ID NO: 12119 - DNA, 343 bp, Glycine max
ccgaaaccttttcttctcaccgcagcaacagtcttcttcttcctcttgtttgcggcacagcaatggagccttgtcggtgacggacggcattgagctgcagcggaagagtctgtttccttcacagcgtattctgtgttgccgccaccatgccttcagtgccacggggaaacttctccaatcgccaaacccaattctccgagcggtattctcctaaacccaattagggtttcacaatcacttcaacacgaaaaaaaatacaaacttttcaatatcttcttacgcaggaggcagaagattatacaacagaggaagtctcttccgattacaccagttgagaaaaggc

SEQ ID NO: 12120 - DNA, 437 bp, Glycine max
tgattttcatatttattttcttcccttgttcctccaatcgataagtttgtttagtgtaagggcccttagcggaaacccaaacaggttctcacacatcggatgtttaagcgtaaattcaactagaatgcttaaggactaagccaatgcccctggcaccatgcctgaacatcagctatcgcacatccagttcttcgtgctaatgatgtctgccggatacacgattgtgaagcaagccttgcccgtatacacggtcaaatcgattcactagcgtatccaaagcatgaagggaatcccattgttcgagcaaatgttaatatatcgcgggaaacagatgcattgttaacagactcttgccgaatgcttcattcagaacgactccaacctttaataagaaggccgtatgctcattacccaacaccctcaatcctgaccagtta

SEQ ID NO: 12121 - DNA, 354 bp, Glycine max
aaaaaaccttatcttactaaccaaaaaaacaccaaaacttataactatagaatacaaaacaggcaaaaaagcctaaatcaaagacggaccgcattgaactgcatctcaaaactcatgattccttaacagcgtattctgcaactacctgcaccatgccttcaatgccacttaacaaacttctccatatcccaaacccaattctccaaaccctattctactaaacccaattagggcttcacaatcacttcaacactaaatatcacacaaacttttcaatatctccttacgcatgacgcatatgattatacaacaaagctagtctgttacgattacaccaattgagaaaacgctatt

SEQ ID NO: 12122 - DNA, 107 bp, Glycine max
cccacgcgtccggttgtaaaccgccagcgtacactatacaagatccaaggggacttacgggtacatgctacgtcatagatattgtatactgtcacctaaatacaatt

SEQ ID NO: 12123 - DNA, 427 bp, Glycine max
gcaaggttcgtctcgaggaaggcgcccctggtgggattcgtgtcgcggcgacgccgaatgcgttgaagcctatgttgttgcctcgcaatgggaagagtggggtgaatgcgagtggggcttctctcaaattgccgccgctggcgtcgtactctgatgtttatggtgatttgattaggcagaaagagggcaactgtggcctttgcggtcacaaatgtggttctggacattaccgatgtacacaggataatttcattatttgtattaattgtttcaaaagcgggaattacggggagaaaaggtccacggaggattttgtattgagtgagtcaagtgaaaatagtggtaagcatgacactgtctggactgaggcagaaactcttctccttctagaatctgttttgaagcatggcgatgattgggaacttgt

SEQ ID NO: 12124 - DNA, 385 bp, Glycine max
ggcaactaacaaaaaaaggcaaagtcataattccatttccatgcgcatggcttccaaggaaacttggccgtttgagtctcgcgagatgctcgcatccttcgtctcgtccacgcccctgctgtcggactcatggcgcctctgcacccaggccaacgccactcccttcctgaccttcgtgactgagcgtgtcggcgcctccgtgtatgtggctttctccggcgtccatatggccggcgagtccgacccgaactggagaaatttgactcctttgtacagcatcggcggcctgcctctgttttcgtctcggcggagcaaggaatgggaggaaccggtcatggttcatgctggcatcctcaatctcttcttttcacttttcaattctttc

SEQ ID NO: 12125 - DNA, 352 bp, Glycine max
gcgacacaccctcaagcaaccgtagtggtacctgtgatcatgccatttgtcaagacctggggattaagggccctattgaccgccctgctgtccacatggcctttcacatttactatgatcattatcacgatcataaactcgatgtatacacccctgatcatacccgttttcatgattgttttaacgattctatggtagatgtatacattgatatctctcatcatcgctatgaccatagatgggtacacagattggtgccactgtccgttccaattgactttgcacctgatagtttgattgaaccatattcttatcctactgcttatggtccataccaagttaaattactgat

SEQ ID NO: 12126 - DNA, 417 bp, Glycine max
gcaaagagaaacagaagagcaaaatttgaagtgcaaagtgtgtgtgtgtgtagcgatgggtgatgtttcagattctcaagaacagcctgttcttgattccgctgaactggaaatgaagaagaagcgactgttggtggagctggaatctgcgctgggcggtgagaaatcggtgacggcgcaggcgtcttcttcttcttcttcctccttaggcttgggtattgaggttatcgacgaaacggcgttgcttgactccgttgcgaagaagaacggaggttcaagaagaaccaagaacaacaacaatggtcacaatcacaagaagtcgaagccctcaaataagattgggaacaaaaagtactctcgtaaggagttggaatcttttagattcgtgaacatggcccgacaacgcaagttcttgaa

SEQ ID NO: 12127 - DNA, 420 bp, Glycine max
acgaacgcgtctattgaagggtgtcagtggatctttcaggccaggtgttctcactgctctgagaggtgtcggaagtgcaggcagaacaactctgatggatgtactcactggtagaaaaactgggggatatattggggggaatatcacaatctctggttatccaaagaagcaagaaacatttgcacggatttctggatactgcgagcaaaatgatatccactctcctcatgttactgtatatgaatctttgctttactcaacatggcttcgactgtccccagaaatcaatgctgacaccaggaagatgttcatcgaggaagttatggaacttgtggaactgaaagcactaaggaacgcattagttggattgcctggtattaatggtctcttaacagagcaacgcataaagttgactattgc

SEQ ID NO: 12128 - DNA, 101 bp, Glycine max
aagtaatatccataacttttgtttttctttagaatttaaaagtttaagtagtcctctaagtaacacatatgttcttttatttttgggctcttaatagagtt

SEQ ID NO: 12129 - DNA, 159 bp, Glycine max
aaaacacatacaaaaaacaaaaaaagttataaaaaaaaaaaaaaaaaaaaaaaaacctggcaatttgagacatccaaacttacttacaccttccataaaatctcttactccagcaaacactttacctaaactcaatacaatgccacatccctttacaac

SEQ ID NO: 12130 - DNA, 373 bp, Glycine max
cccacgcgtccgcccacgcgtccgcttctctattttaagtaattcaatggcttacactggaagtcttgtgttcttagcttccactttccttatcataaactttcctcttctggcaaacgctatcggatgcaatggaccatgcagaaccctcaacgactgcgacggccaactcatttgcatcaacggaaggtgcaacgacgaccgcgacgtcggaacccacatctgcggcggcggaatgccgccaaatccgccaccaagcggcggaagctgccagtcctcgggaaccctaaattgcggcggaaaatcgtatcctcagtaccgttgctctccgccggtaacttcctcgacgccggcgatcctgacgctgaacgac

SEQ ID NO: 12131 - DNA, 390 bp, Glycine max
cccacgcgtccggtgaggcgagggtaaggtcgcgttgtgttgcgtcgtgtggtgcgctgggcctctgtttctcgtttttgtgttcagaccgaaccctagctccgcatcgcaaccatgtcgaccaagcaaggtggaaaagctaagcctttgaagaaacccaagtctgataagaaggattacgacgagattgatgtggctaacattcagaagaaaaaggaagaggagaaggcgctaaaggagttgaaagccaaggcgcaacagaagggaagctttggaagttctgggctcaagaaaagtggaaagaaataagggctctttatcatgattgtatgcattcaatattgagccctgtaattacagttgctaccatgataacttctcttattattg

SEQ ID NO: 12132 - DNA, 360 bp, Glycine max
atctccatttccatttgctgtctctaagtttccaagaatcttaagctatgggaaagtcggacccaaccgtgagcgctgattaccagaaggccgttgataatgcgaagaataagctcagaggcttcatcgctgtgaagagatgcgcttctctaatgctccgtttggcatggcactctgctggaacttactacgtgagctcgaataccggtggtccctttggaaccatatagcacccctccgaactctctaactgcgctaacaacggtcttgacatcactgtctaggcttctggagccactcaaagcggagtttcctatttcgagctacgccgatttctaccagttggctgtcgttgttgcc

SEQ ID NO: 12133 - DNA, 369 bp, Glycine max
gcgcgcacgcgtccggtcaaattgacttgatggactcttaaaattttccaatctaaaaactgggcattgtatgagttaccccttcctgaagagcaaaccggtattttttctcttaaaaaaaaaatgactggatatgatagcacatagcagtctatgaacggtagcagtacatgtctattaatgcatgagttgcaccgaccaatcaaatatctatgcatagtgacaataattcacctaacattagcccaattatcataatacatgaacttctgcacgttagcatcactgcttacaaaataatgcaagtctatctctgcaataatcatatgaatgtcgagacccactaattaggaaaaccgtatgatacat

SEQ ID NO: 12134 - DNA, 104 bp, Glycine max
gccgggtattatttaacatatattcaaaaataaaccattcaagggttacagccttattttgatggttaatgtaggtactacttttgggaaaaaaaagaaactat

SEQ ID NO: 12135 - DNA, 417 bp, Glycine max
acggaacaaagaaccatcgccatgcttgatccgagaacactccaccccaccaattctttcgaggtgcacggggcaacacgacacaaaccccacacatgggatgttacgaactccggtttgtggccttgaaaaccggctttggaggaagcagaggtagatgattccgggatttgttcacctcctatgaggaccacgagcccgtcacgccgaagaaacaaccaccgaagcctgtcgccaacgtcgaggacgcaagccatagtgagagggcagagggagctcatggaaatggtgaagaacatgcccgagtccaactacgagctcttcttgaaggacctcagtgagcactacatggttggtgatgctactagacatgaaaaaaacgcggtggaagagagaaacttgagcagcgtgtacaac

SEQ ID NO: 12136 - DNA, 436 bp, Glycine max
cccacgcgtccgctcaagcgaatagtcctccaccaaaaccttgggaacaagcgggttccgcttctggtccagcacctttcaaacctccgtcagctggcaacacaagtgatgtagttgaggcttcagggactgcaaaacctggggaaattgtttctagttctgataggagtgcagctgtcaacaggaatactcttgggaggcctgttccctccaggccatgggagcagaattatggaaacagcacctatggaggatatggttctacaatgaattataattctgggtatggatctggaatgtatggatcttcttatggtggactaggaggtggaatgtatggatcttcatatggtggggggatgtatggtaacagtatgtacaggggaggatatggtggcctgcatgggtcatcccggatgtacggaagtggaatgta

SEQ ID NO: 12137 - DNA, 410 bp, Glycine max
cccacgcgtccgcgttccgtgactgaaccctctcttctcttctcttgtgcgatggcaacgcgacagatacgcttctccgccagctacatcgccggaggagaacgctctctttctcgatatactacacgaagctcctcttttcgctcatcgcaaagccgcgagggttatcgggagcgttttctactgcatactactggttatgctactttggccattggagctcactggatatttcgtccagtgcaaggactcatctctcccgtgctttgtagttgtgatgttctgcttttgctgttgacaggaatctttcaacaatacctggtttatcaagtgcagaagatacgcttgcagggctattatagtttcagtcagaagttgaaatttattgtccgcataccctttgctattac

SEQ ID NO: 12138 - DNA, 183 bp, Glycine max
cccacgcgtccgaaaaaaaattaaaattttaaaaaaaaaataaaaaaaaaacaataaaatgggaaaaaaaaaaaaaaaataaacataaaataaaaaacaagggctggctttataaaggatccatgcttacttcctcctacattcaacttcataactctttcattctgcatcttaaattcaata

SEQ ID NO: 12139 - DNA, 182 bp, Glycine max
gggcgagggttttcagttttctcatatttttccccttcccagtttcactggattgtttgtggtgcacctgatagcatgtaagatattgcctttgatagaaacaattgtaagtttgaaattgatactttgacgttacatacaataatagcttgtggagtaaggacatacgcatttttgctatc

SEQ ID NO: 12140 - DNA, 431 bp, Glycine max
gcggactgacctagcttcgaatctacaatatctgtccctttctttaatggccttgccttgtaggaccattcgggatctgaaactcagctactgatgctacttctacttctacttctacttcttctttcgcctacatgatactctgcatgtgcctctccgcacctgaaccacgcttctgaacgcaatggctcggcctaattgccctcttgctctctgcatctctttcatcttcgttgctcttcctctttccctcgccaccactgacccttctgatgttcaagctcttgaggacatgtacaaagtgtccaatagtccaactcatctaacgggttggaaaatcggtggtggcgacccatgtggagagtcatggaaaggggtaacgcgtgagggatcaatcgatgacttcattatactctcaagttcaagactcg

SEQ ID NO: 12141 - DNA, 300 bp, Glycine max
ggcgaacaccgcctccgtaactaccgctccgtcaccaccgtccactccttcgacgacgacaacgcctccggcgacggcaagatctacaccgtcgtcctcgaatcctacgttgtcgacgtccccgacggcaacaccgaagaggacacgcgtctcttcgccgacaccgtcgtcaagctcaacctgcagaagctcgcgtccgtcaccgaaggaaccaacggcgacggtgacggtaagccacactcgcggtgaggaagcaagcaagcctcaataaaaaaatatatatatattaaagcaaacaac

SEQ ID NO: 12142 - DNA, 405 bp, Glycine max
  modified_base (375)..(375): a, c, g, t, unknown, or other
cccacgcgtccgcccacgcgtccgcccacgcgtccgcgaaggaaaaagaaaaatgatgaagggatgtgaattggtgtttgaagcttcaacaagaggagggtgtgaggagcacccatatgataagcaatcaccaggtgtttgctcctcttgcttaagggaaaagctatctcagctatacaacacaaaccctattattgatcctcgttgtttttcttctccttcttctccttcttcgcctcatcaatctttattttcttcgaagcacggttcttccggtcaccggagaccgcgctttcggaggaacgcttcgcaagcggcggaatctgcctcgtgcatgctgagcttgaacttgaagaagagcaagtcgctggcgtntgcttcgaggaatagggaaagggatgtgat

SEQ ID NO: 12143 - DNA, 385 bp, Glycine max
cccttgtatcatttcttctccttcttcataacgctgctgcttcacttctggcgctttaggtttcgaaccaattgggatttcgggatgtgtatcgtccagtgaattgaggagaatgacatttttgggttctgttgattgtgttgtagatggggggtttggctgttagattgttgtttgttgagtacaatcttatgttcagtgaagatgatttcgtgatgtggttgagagagtggtttttgtagaggaaggcttgttatttttgttgttgatgtggtagtttattttgtttaagagtaggaacatagtcggcagacgagaagaattaagctttgttggatgggtaataaacttgggaagaagagacaagttttagatgataaatata

SEQ ID NO: 12144 - DNA, 412 bp, Glycine max
acggaatcctgaacaaggaaaataatggcgaaaagtcaagggtagataaggggaagctcgttgctaagtcagcatcaatgcctaatctgacagaactagtagatggaggcttagcatttgctcactattgtctcactgggaatgaatttctgagattatgtacaggagcaatacctgggacacgtgactacgataagcagcactgtaaagaccttcatctcttgcctccacaggtagaaaatcctatctatggctggtgaatggattgactagtttgaatgtttgaaggaaaacttgtcacaccagattatgacaagcagtactgtaaagccatcatctaaatgcctttaggtagaaaaatttatggatagctggtgaatagatttagtggtttgagtttggaggttggttt

SEQ ID NO: 12145 - DNA, 431 bp, Glycine max
ccgacgcgtacgctgcagtatattcgatcatatacttgttcaaataattgggtttccaggtacaataccccaaatccagatgctcatgctcatgaccatactcacggtccctataacacttacttgaagacaatttagagtcgaccttacagtctacttacacctatgcaaacacactcgatcctgaattctccttagagatgaccttacctagctacaatactggtaacaatcatactctcgggcatcagaactatcttcattctttctttgcacctgactttgcaggggataagcgaggttttagcgaaattatatgcgtaagtatgtgctaaagagctaggtcatcatagacttcatctcacacactctcctttatactacctattatattctagatttaacgctggataactcgtgattaacggagt

SEQ ID NO: 12146 - DNA, 381 bp, Glycine max
gcgcgcacgcgttcgcccacacgtgcgcccacgcgtccgtccacgcgtgcgaatttaccagcggtactcgtgggttttgaaggctagaagtgctgcaatacaaacaatggcagctactcaagaagaagtgaagcttttgggtattgacggaagccgctttgtgtgcaaggtccagattgaccttaagatcaacggagttgaacacaaatttttggaataaaatttggacaataagactgatatgcttgttacatacaaccctgttcacaagaaagttccagacgatgatcactatgagcagcccatagcagacgctcttgttaatgttgaatacattgatgatacatggaagatcaaccacatcttaccttctgatcccta

SEQ ID NO: 12147 - DNA, 442 bp, Glycine max
cggacgcgtgggcgcggcttcaaccttgtagttattctctttcttcttttttagctatccctctcttgagaaatctagatctcgttcttccttgatctacgttacgcttttagtgaccggatctgtatggatctgaaccagatctacacgccgatggtggttttggcctggtctttcatagatctgatgcatggaggctcagatctactgtacagagatactgtagataatcgataagaagaacgcagatccagccgcttccgcttgttcgatcgctacagacgcttgtatcggattattcatgattgattcataagcagcatgtcttcctccggctatagttgttgcagatctcggatgttgtaaaattagtgtatgatgtgaagctatgggctggaaaatgtggatgtaggagatttcgggacgaaaggcctcaaaacgc

SEQ ID NO: 12148 - DNA, 280 bp, Glycine max
aagaaaaccattcctttcaaattagtcgtatatactcaaaagatataaagatagtttatgggagaagaaaataaaatttgtgtgagaaaaccattcctttcaaatttgaactttagcatatactatttgatgtcatcaacttttatatcaaaaaactatatttatgtgcacaaacattgctaaaaggaattcgtacttgctgtgaaaaaaaaataaaaaagcatggtcttaattaactatgtgttgtataactgtaaaaaaatatatacatactttattt

SEQ ID NO: 12149 - DNA, 318 bp, Glycine max
accgagaataccgttgctttcatataggtcgtatatcctcaatacatatatcgatggctcaggggatacgtgtacctaatgcgggttagaaaactaatccttacggattaggactttatggtctcatattcgatagcgtaatctgttatatccgaagactgtattcatgttcacaaacataactaaaatgacatcatgccttgcagtgatgaccaactattgcgcatgatcttgattaactgtgtctagtataactctatgtacatgactcttgtacacactcatacgcaggtcggtcattctataagattcaagctt

SEQ ID NO: 12150 - DNA, 418 bp, Glycine max
ctgagatggtagaggttttcttgtttaagaggtgtaggaatgtaacctgcaagcatttggttcctgttgatgattgtgactgcaagatttgctcagggaacaagggcttttgcagttcttgcatgtgtcctgtctgtttgaactttgattgtgcaagcaacacttgtagttggattggatgtgatgtttgttcacattggtgccatgctacttgtggcattcagaggaatcttatcaagcctgggcctagcttgaaggggccttcagggacctcggagatgcagtttcattgtattggctgtggacatgcctcagaaatgtttggtttcgttaaggacgtcttcgtgtgttgcgcaaaagattgggggcttgaaaccttgatgaaagagcttgactgtgtaaagaagatcctcatggg

SEQ ID NO: 12151 - DNA, 385 bp, Glycine max
cagaaaacaaggggagcaagaacattggatggagagcaatggttgcacagtggtctcgggctccattcattgcaaagaggccacgtacggtcttatcaaagaaacccatgttcgaccgtacctgggcgcactccagggcactgcactttgagagaaattaatgtggcatggtcatcaatatcatgttgcaattgctcatgcaccaccactcttccacaacgtgcttcccaagtttggagaaccagaaccttacattcacaccccaaaagatcgactagacaattaaaacacttactctgtccaaaatcactgtaatatacatgtagcgcttatatgacatctgtctcagatcttttactacttcaagacagatatacaacttact

SEQ ID NO: 12152 - DNA, 395 bp, Glycine max
agcctacattacttgagaagcgcaaaggataggctctccttgaatggaagagtgctagaggagacgaagggtcagactatcatatacagattggggagcagtatcttgccaatgttgtgaaggaatcggtgagatgtcttaatgcttgacatgctgggaaagtttactatgtccaagattggcaggagacaatggacacagagttggatactcataagctggaacatgggcccaagaaaagaaagatcccatactgcaacaataatgaagatgatgatgatgtggaagatataaatgcgtgagaggatgacatgacagatgatgaattagatgatgattctggtaggatgatcgatgatacagctaagactgaagcatgtaatgccagcacagat

SEQ ID NO: 12153 - DNA, 383 bp, Glycine max
agggactggtccctggcctttgctttggtgcgggtcttggaattacggtctttgggatggcgtacatgtttgtgcgcgatggattggttcataagagattcccggtgggccccattgcaaacgtgccctatctcagaagggtggcctctgctcaccaacttcaccattcggaaaaattcaatggagtgccatatgggctgtttttgggacccaaggaaattgaagaggtgggagggctagaagagctggagaaagagataagtaggagagcaagatcatacaaaatagctaatgagaacaactaatacaaatcaagaatgtttcgaagaattatcagtgtaaatcagaaatatgaaataaaatgatccaaaaattttgcttgc

SEQ ID NO: 12154 - DNA, 437 bp, Glycine max
actagctagtgttctataagttcacggtcagttctgaaaaatgggttccaaggttttgcttgttgtagttatgtgcatagcggctatacttctgatctctgctgaggttgcacccaatgaatacgaaaattttaacaaaaaagatgggaagcatgctccaaatgggttatatgatagcaaatggggttacggtggttggggtggtccttggtatggcggctggggtggcccttattatggtggcggctggggtggcccttattatggcggtggttggggcggtccctggcgtggtggtggcggtggtggctggggaagttggcgtcgacctaatggcaaccctcacaactaagaagaaaacttgctaaagcttctttacgggtttaagttttcgcaataaataaaacttcatgagaagtgtaattgtaataaaagtg

SEQ ID NO: 12155 - DNA, 428 bp, Glycine max
gaatgctcacgccttctgcttccgtggcgctccaccccactccaacgcgctctcgaggggcttccgccggaggcgagtccgcatctcgctcctcagccagtccgagaagcctgacgtcacttataatgacattggaggatgtgatatccagaaacaggaaatccgtgaggctgtggagctaccccttacacatcatgaactatacaaacaaattggtattgatcctactcgaggtgttttactgtatggaccccctggcactggcaaaacaatgcttgccaaagctgttgctaatcataccactgccgccttcatcagggttgtaggatctgagtttgtgcaaaagtatcttggtgagggtccacgaatggttcgtgatgtatttcgtctcgctaaagagaatgcgcctgctattatatttattgatg

SEQ ID NO: 12156 - DNA, 426 bp, Glycine max
attagccacccctttattatttcaggtgttgggtgggggtatgtacgtgtatcactgcgtggtactcaaatcatcaaagccgccactaacctcatacacacaatcgaaaacatggcatcttacgagggaaggccattggtgatggaaatggaaggagaagaaggtttcgaagaagccggtagcagcggttgcggatgcttccggtgtttcagcctgaagaaatggtggcaaggctatgaggaagaaggtaaagggctacttgatcaaaagggtgagggagagtcatgggttgtgaacaaattaaggaaggcaaaggaggtttcagaagtaattgctggccccaagtggaagactttcattagaaagataagtgggtatgggaagaaggtgaagtaccatagaaacaggttccagtatgatgaacat

SEQ ID NO: 12157 - DNA, 303 bp, Glycine max
taatttaatattaatgttcgggtacccccctccggctcgtagttgagaagagctttcgtttaggaaagggctaaatgggtgcgatccctctcgttgagagtcaagggtctcctggagtagaaggcacatcctggatctattaagccggcaagggttcagcattggctttcacgaccgcaaaggggccatctctcagtcggagtagataagatagatatacttaatttaatatcttttattatatattttaatataataaagaaaatcgtgaataaaagagcgtgacgagaaaaaaataacaac

SEQ ID NO: 12158 - DNA, 438 bp, Glycine max
attaaactgaaggaaacaacgatgttctgttttattgctattacatttgcggttgttaggggcatgttgatggaacaccgccgaattatgtatctttatcacagtcgtgcttttcggaaaggaaaaggataacttagagtgaaaacttttacagttgatatatgtagtttgggattctgttatgaaatatttgttttcgttgggtatgactatgaaatgtggctgaagaaaccgaagtctgcttgtattatgcactccggcttcctttcattggatttaatcatttgtttattcaagtattcaacaagtgggtttggaagtgggaaccatgatctcatctatgcatgcacacaacacaaagaaagcatgggctgcattgtaggaggctgcagaattcacccattgttgctttgtgctttggttaaaactattaaagtg

SEQ ID NO: 12159 - DNA, 370 bp, Glycine max
attaatccaactgaagctccggagttccgcttcatagctaatactactgcggatttttcagtgcggactcatggaaaatcatcgagatacttatgaatatgcagctgcaaccttcattcttgctttggatatctttccagggattcatctacagtttctaaacctacgtatgcgctactcatataagcaacactattccaaagaccttacccactgaatggtcactacttaaacctcagacgcatcggagaacgccgtatgcattggatattcgacatcgaaaaaatctcacaggctaccatgttcacgttgcaacggcccttaggcccccagatatccattatcggctatcacgccaccgttgtgcaca

SEQ ID NO: 12160 - DNA, 448 bp, Glycine max
cccacgcgtccggaaaaacggtgttctgttctgttctgttcatgcacttgcacgcatgacagaccctttttaaggttaagctgtagagaggagttttgctcaagttactttgcttgcttctgtgatctgtttggtgtgttgcgtcttgcggcaaactgagtgaggtaaaagagggagagggaggaacagagagaaagagaaattaaaaaacaaacaagggaaccttcccttaagactctctctctctctctctctcttcttagaatttgtctctcatttctttctctctccctgtaacacagccaccgcaccattctctctctttctcgccgccatcatgttctcctcaaccagatgcgctttcctgagcaactcggggttaggtgggtgcagcagcttgtgtgatgctgcgcagaaaaagcgttcaactcgtttgagggtggtgagt

SEQ ID NO: 12161 - DNA, 441 bp, Glycine max
cccacgcgtccgaaacacttaatttctcatctcatcatttctaattctacgctcttttctctggcactaacaatccaagatgaataccaacaacgacaccgaaaaaaaccaatcatttccagaagcacaaggagcatcatcatcatcatcttctccacccaatgttgggactgagaattggggaactcacataatgggcacccctgctgttccaagcagccacccagataacaaaaaagcagctttacaaagtggacaacctcaaccagttcaatactaccatgaccaacatcaacatccctacgtgcaacatagcccagttgacaaaccaagcaacagtcccatggagtcaatccttaacatgttcgattcatggagcaaaaaagctgaagccaccgcacacaacgtctggcacaaccttaaaactggtccatcagtgtc

SEQ ID NO: 12162 - DNA, 436 bp, Glycine max
cccacgcgtccgcccacgcgtccgcggacgcgtgggtatagggtactactaattaaagtgagagaattgatagcaattgtgtgtaatgaaaaataaataaagggaaagggtagtagcggcatattattgcaaggaaaaatccaacgtcaaaatggaagacgacccgtgggagctctgcaacgacgacggcttcgtcttcaagcgcaagcgccgccgcatccactccccctcgccgccctccgttcccgaccaagagccggcggatacgctcctgagagagcggaagaaacaaaccctattgaagctcaaatctaagtacgagaaagagattcttctttgggaaaccttgttgaacaccttgcgctcaatgcaacaacgcaccactcaacaacatccccaaccaaacctatccctatctcttccttctacttcctcg

SEQ ID NO: 12163 - DNA, 427 bp, Glycine max
gtgaaagtggcgacgtacttcgcgatgacgcttggagccttcgtgttctggcagtccatggacaaactccatgtctggatcgctcttcgtcaagacgaaaagaaagagaggttggagaaggaagcggagatcagaagggttagagaagaattattgcagcagcaggccagtcagaaggattctctttcttgaattcgaattatgttgtaattttgctttgtaatttccccttgcttctgtttttccaatgcaatgtcttgtgctcaaataaaatctgctactcccgagcacttcaaatttaattgcgtggatttctattgtgttcctctacacatgcacttgtttcattaactgctatgtgtcagtaattgctggaacacttctatcgggttatgaaccagattttaagcgtttagatggattgttt

SEQ ID NO: 12164 - DNA, 414 bp, Glycine max
agtgagcaacatctgtaacgtcaggatttaggccactcataaaacgagtcattgcgtcctgagtttcctcttcggtggcggccctcactagtgtcatcttcatctccttgtagtactcctccacggacaaacttccctgggtcaacctctgaagtttctatcgcatggttctgctgtagctagttggaacatacctatttcgcataacccttctcatctcagtccatgtacctatctcccacctatcctctcttatcatctatcattgatccttattccaccaaacaagggcatactctgagaattcagctgcggctaacttcaccatctacttttcagtataatcattgcaggagaatacatgctcaattttcatctcccactcaaagtacgcatctggatcactcctgccct

SEQ ID NO: 12165 - DNA, 383 bp, Glycine max
agaaagaaaaaaaaaaaaaaaaaaaaaagagtaaaaaaaaagagataaaaaaaaaaggactggggatatatcaagagggactcttaaatactctggcttgcgacatcttacttctaatctagggtggattcaattaaattgactgtcactggttatacaacgtctacactggaactaccctgtctttaccaagataaattgccttgcaaaaaattccccttacaacccataatggaaaatctttcacttccacaccaatctttcacactaaaagtctgactatcctacttgtagaacggaagcctacttgtatatgtcatttaggaccttattaagcagtggatccgcacaccgtttaaaattcccaggtcattgttccaata

SEQ ID NO: 12166 - DNA, 428 bp, Glycine max
ggtaactaacttttgtttggagtctcagtctcagagtatggacactcagaaagggccgtgttcatcggctgcagctgttacttcatgtcgaaagaagaagaacgaagaagccacttttttggaggacttgaaggatcacattgacgagtttattaatgcttctatggatgaacataagacttgcttcaagaaaacagttcagaagatgttcggaatgtccaaggctgttgcagagagggacaccaatgctgccaaagaagttgagagttctctgcctcttcagacaactttgcaagactagtatcatgcttgctctcaagaaaaataatgtttgttttctagaagctcttttggaggatgttgataaaaataagtgagtgattaagttggttggtcttgatccatgggactaggttgttgttgaatgt

SEQ ID NO: 12167 - DNA, 167 bp, Glycine max
tatctttaaaaaaaaaaaaataaaaaaagtttaaaaaaaaaaaaaaaaaaaaataaatgggaaaaaaaaaaaagcaaatgtcatcctttcttaaggatccaaacttatcgtctcttccatgcaacgacctatcttttctctaatgtcacctactttcaattcactct

SEQ ID NO: 12168 - DNA, 316 bp, Glycine max
cgatagtgtcttgcaaatatatactcgaggctatagtaaacaactactggttattcaagggggtggatctggaggggacactactgctgctgtggtactagctgatatcgtagatattcaagacttatttcctagaagggaaattctcgtgagccatcctaactatagaatgtagaaagtgcatctgctaaaggatttgacctggatagaatctgatgcccgtatctctctggtagtgcaattgtaaagattgaatacacattgctcaggaggaaggatataacatgagccttgatagaatacgttcattttgact

SEQ ID NO: 12169 - DNA, 388 bp, Glycine max
ggggagaagccgcacaacattttcgtcggagacgacggagactgcttcggcggtgtctgtggcttccaaacgacgcgacgattcgatgatgcagccacaggatggtattaaaggcgccattttacactgcaggagatccttcaatccatgcagacctgagtgtaagtcatcacaactgccgtgatctgagagccatccatgggacgagataggcatacatgaagccaatgacatgctcctttcaacatagccagcttccttgcagcggtgtcagagtgtaccaagggaaatgtatgtgattactattagactatatgatacactccaatgagatcaagaacaagatgatatgcatagtaagagtagagtcttggtccagcatgatatg

SEQ ID NO: 12170 - DNA, 417 bp, Glycine max
cccacgcgtccgggtgtgtgtaggtggtgattacaaagaaaaccaaaaaaggtcgtagaagattaaaaaggctttaataggtcaaattggttgccttgagcagccagtgttaacatgcaaagccgggtagggattccaatgatatgttggctgaggttgtcaagaattcttggaaaaaaagagcaaaggaatcagtcgtgattagtaaaggggagggctctgattttgtggcaaaagctgtggatttagcagccagagaattaataacaagtgcatcactaggacaaggtacagcttgaccgtgccaaggtatccacgaagtctgcagttctaatgaatttagagtccagattattggactcagtggaggaaagagactcttgagttcatcataccattactttgatattatagaaa

SEQ ID NO: 12171 - DNA, 437 bp, Glycine max
aaacaaacagacaaactaagggaaaccatcaatagttcaacatcaagctgatccatcatatggctatggcacgttgggctttgaaaaacttgcaacaaagggtgtgtgcttactctgtcttgagtggcaatgttcacaagcagaggtggaacaatgagttgctgataaggttttgtactggaactggatgacaagggaaaatctgaaggcactgaagttgctgtcactgaagggaaaaagtctaataggatgttcccaaggaggaggggcacaagatagacttggagaaatgaggatcatgatgacttacattctgctctttatgagatgattacttcaaggcttgggagtacactgatgcaggcaagtcataacatcaacaggctgtatgagaacatgaatctgacaccttggtctctgactagcgggcgtgtgaa

SEQ ID NO: 12172 - DNA, 391 bp, Glycine max
agacatttcattttgtttttactgcacttgttgaatcttgtatttcctgtctcaaagactggatttaattaattctttcttattttctgtagtaacagggtttgttttgttttgttgggttgaatcgatctcttttcctttccgatttttgaattaatcattttactaatgtactggtgtcactgcactggcaggaaccactcgccatttcgactcttgttggtgttctatatttggccttaattcgatgacttactcatactgaaatatctctagtgtaaaatatttatgatatactcaataaaattcagcgactttcctctatcttcacgaaatcttatgcttgctaaaagactttgaattggtgttggagttggaagcatgtctatct

SEQ ID NO: 12173 - DNA, 132 bp, Glycine max
cccacgcgtccggtgaggccggttcaacactctgtcctccgggggaattcgaccgttgccggaaattcagctccgccccaccgctgcttgcggaaatccaactttcgtgagaccttttcgcagatgctgcac

SEQ ID NO: 12174 - DNA, 354 bp, Glycine max
agagaacacacccaacacaacacaatacaatcgatagtttccgattcttaaaaaacccgagagtacgaggtgatgttcgaatggagccaaacgaggagaacggaggcagcacgagcagggaggaacaggaagaggcattggtggctttgattgaacaccgaacccacgaagtcaaaaaccttcgtcaccgcatcgcttattataaaacccagcttgatgaagcggagaaaaggttgcaagattctgaatccaaattggctcgccttcgaggtcagacagtgtcatctagaagtaccttagatgatggaatcaaaactttaaagacagagcgcagatcaaatagcccattggttg

SEQ ID NO: 12175 - DNA, 283 bp, Glycine max
gcgagtttgttcaagggctgttgctgtccaccatacttgatgacaatttataaaggaaattgatggaggtggctgcttcagtagtgggcgaattcatatgcggtacctgctatgtatggtttgcctgatgaaattgtctatgtatttgatcagagtggaataataagtagtagaaaatgaatgtaatttatgttatatgtgaactgatgtttttagttcaagagtttcatcatctcctttaatctcagatcataaagcttaaatgaaaaaaaatcctttcctg

SEQ ID NO: 12176 - DNA, 307 bp, Glycine max
attggaactgagccagctatgcttatgatagacgatgtggctcagaaccctggaatgctggtgcacctttgctctaactgtactggacaatttgaagttaactcaagccgaagacgcaccaatgaataaatttcacataggcacacacctagatgcatttgtcgaagatatcagataacaatgccatgagccgaatgacatgaaccagaatgctatagccgccatcagaggtgacaacgctgatgccatgaagcaggacagcatgcacacgttcacagtgacatgcgcatttatgatgaacacacta

SEQ ID NO: 12177 - DNA, 428 bp, Glycine max
ggttgggatccctcactgcattctggaaagataattgaatgttcttgggattttgacaaacgggaatggaaggttatgcgaatcagaacagacaaatcaactccgaatgagtttaatacttacaggaaggtcatgcgaagcataagagacaacatcaccgaggaagatttgttgaatgaaataagtgagataattcgccttcccatgtatgctgacaggatcagaattgatagtaaagcgaatcagcatgctaatgtcgcaaggcgaatgtgatttggtggtggtttagatcagatcagggacttttatgccttcaatctttacattggtggtagtgggtgacatcaagtgaaaacaagatttcgtgtataccccgatacttgtctctgggatttgaatgaaattgtattgggtttggctatgtattt

SEQ ID NO: 12178 - DNA, 434 bp, Glycine max
  modified_base (336)..(336): a, c, g, t, unknown, or other
tgggaagcctgggtgaaaagcaaagtcaattgctgctaaagattgcttataaacatttctggcttccacgtttgatatgttctggattttgatctgatctcacactagacacatcaccatacttttctttgcaaaagaaggggaaggttgcacactaactccaatgaaagaaaatgttcttccacccgtgactgtaaatttccagcaaggacttggccagaagtttaaacagccagctggaactggtattgatttttcaacatttgaggagtctgagttattgaaagtaggggacatggatgtctatcctgttgcaattaaagcagatgcatcctncagcgaccatgatgaatcaaaatcaaatgaaactccatcatccggtagctcaaactctcagataactcaagcagtgtttgagaaggagaaaggagaat

SEQ ID NO: 12179 - DNA, 374 bp, Glycine max
cccacgcgttcgctttaattttctttgtattttattctatagtcttaattctattcctgttgggtgaatactgtcggatgcctgggttcttggtctccatttgaaaattgctacctaaaccagcctatcaaaatctgcatattttcctaaactgaatttctctgtccttttttggtaacctatcaattaggccgtatttctgctaaaaaataaaaccaattccccggggtttattatcatattgtgccaagttagattcgaagagggtgtgctcttgttcgagaatgcatattgagggcggtaacggataacaatgtcgaatctggtaccgggggtgcttctcaagcttctgcatcacatgaacacctatctta

SEQ ID NO: 12180 - DNA, 431 bp, Glycine max
aatgcccgctaacacacctgacaccagaccatgatacccactgacaagaaaagtacaccgaatcaaccacgcacaaccataagcctctctcacttctcttgttaaatcaattggaatcagattctttcttctgttctctccgtttcagttgctatggataataagaagagaggggcgagggagggtgaagatgaagatgagatgaagatggagaagttttacgcgctgttgaggaacttccgcgacgcccgtgatcgccggcgaacggagttggtggagttggaaaaacacgagagcaacatctggaagaagaatatgaaaggcaccgtcccaactgcaacgaacgacaataaggcagaagtttctttcgaatttcaggactttaccaccgagattcaattcagaaagccacctttggttttcctaatcca

SEQ ID NO: 12181 - DNA, 440 bp, Glycine max
gcggcagtggtgcctactggtttgactctatctttgaaaaactgaattgggctccacatttcagggttaaaggttgtgaaatctggttaatatctgcttatctgctcacatacactgatacacacatattgaaggcatgcaatcttgaacataattatctgcaaccattcagacttactaaaggaatacaatgtggaactaaagggtcccttcaattattcacctctagataaatctgatattcccggcgattgttatgatgatgcatcatccgcaagcactaaggacatgaaagtacaaagatggcaatcaaaaacagctctatccagtaagtgacaatcatactgatcattccttcaacttgtatcatctcaatttttatgtactggccatgttaaactcaagtactcaactaatcagaaattatgatggttgtgatt

SEQ ID NO: 12182 - DNA, 287 bp, Glycine max
tcgaccacgcattcaaacaggactacccttgtattaatccaatgggcctatgggagatacctggggggatccaataataatacgatctgggaaacttatatcagccactgtggtttactacgctttttgtacttttaatacttatcactctagggcatgctattatctacaaataagggaagtgacattgaccccagtgatagctactagcgagatctgattgtatcttgaagaataaaacctatgggcattcgatatgatgatgattatatgaatgtagaacctat

SEQ ID NO: 12183 - DNA, 444 bp, Glycine max
cccacgcgtccgcccacgcgtccgcaagaagggtggaatagttgacattaatgctgctgcaagaatcgttcttcatgattggaatgaaggtaaaattatatattataccatgcccccaaatagggatcaaggggaaccttcagaggccaatatagtttctgatttttcaaaagagtttaacattgatgaagtttacagcagtgaatcttcatatattgggagccttatatctgttgataacttcaatgctgttgaagttccttcaagtcaccctctcactcttgatgagatgatgttagaggacgagacacaaatcaaaccagctgaacaaggtgaaggtcctggaaacctggctgaagttgatgaatcaatggaagaagatgatgttggcaagaacaaggggaacagtgaagctggcatgcaaaatgaaaaattatatgctgc

SEQ ID NO: 12184 - DNA, 373 bp, Glycine max
  modified_base (337)..(337): a, c, g, t, unknown, or other
caattctgaattggttcaaaattaaaaagtataaggatcctaataacctggccaattgccttagggggtgcccttttggcaacaatttgtccaaggatattggaatgttggtggatgccaataggaaaatgcatctggctctcagtgatgatcccttcaaaattaagttcaaagaagcctgagatcaaagctctttcaaatgatggcaaaattaaatgacaatgcatgaatacgtgtgtttataatgatcgatccttgaaattatatttctttgtgaagaattagtaaatgaataaaaaaattaagagtgtatgtttttgtcctgctgttacaactntaatttcactattaaataataaatacaatttttaat

SEQ ID NO: 12185 - DNA, 328 bp, Glycine max
  modified_base (240)..(240): a, c, g, t, unknown, or other
ggcttctcagcaaccctatgcggtgccctggagcgcttcatttttcggagaggaacgacaccgttataagctacggtcttcagaccaattccaccagtcttcagcggcgaaggaagtacgaggatcccacggcttcgtttcagctccctcttcagcttgctgccgagagggaaattgccagataccttattggagatgcggatttcagttggaatgtgtttctgagggaattcgcgcacncttccatgaatcctttctctgctgtggtttcaatgggtcctgcatttttcctggcaatcgcctggttaaatttggtccttaaaataac

SEQ ID NO: 12186 - DNA, 386 bp, Glycine max
cccacgcgtccgcccacgcgtccggtcaactctagataaggtgctcggaaccaaccttcaaaagtctactactccgggggtctaccagaaccaacttaaaccccatcttttttgggtttttcttgccagaatggtaactactggggtaggaacaacaccttgatgcctttgggttgggagatttgttgctgatgcctacactggtggatttaacatggtcatattttctttcctcgtatacttaatgggtaatccaaatttttttaatcaatgtgcaacatgtttttattataacttagtaatgtgagcttctacaacttatataatctgtctttttgatcaatttgaccactctttaatccctgaaaataattggaatttctttt

SEQ ID NO: 12187 - DNA, 60 bp, Glycine max
aaaaaaaaaaaaaaaaaaaaaaaaaaaaaaatataaaaaaaaacaagcttacatacacat

SEQ ID NO: 12188 - DNA, 383 bp, Glycine max
attgcagtttattctatcatatccttgttcaaataattttcttttcaattacaataccccaggcccagaaacttatgttcatgaccatcctcaaggtcccaataacatttacttgaagacaattttgagttgaccttacagcctaattccaactacaaacacccttgatccttcaaaggctctcatagttccaatactggcaaccattatactcttgggcatttaaactatcttcaatctttttttcccctttcttttgaatggaatttccaaggtttaaagaaatttaatgccgttttatgtgcttaaaagactctggattatataattcatctcacacatactcttttttactatcctttatattttagagattatatttg

SEQ ID NO: 12189 - DNA, 372 bp, Glycine max
ccttattttgcggatcccatattgactcagagacccacaaagctttcctggtgctacccttggaatggttggtagtatttggataaaaaatagtataagtgaaagaaaaaagtctgtagattagatcagaattgaatccaagtggtgcagaattcagagcagcatttggtgtccaaaagaagaggagtaataggagagaggtgataaaggtgtcaagaatggggatacctggtgttgatggagaattgaagaagattttgaacgctaacatggacgaaagtggtgctagaaagcgtgcaacgtaaggctttaaaggtattcaacttggaaatgatcatatattggttaaaaacccatgtgattgaattaaaa

SEQ ID NO: 12190 - DNA, 252 bp, Glycine max
cggacgcgtgggctccacaacactaaaacatgagaaggcaaagcaatcagaggagtctttcagagctgtcatgtacttaagctgctggggccccaactagaaattaaaagagaaagaatattttcttattagacttatgatatctagttggggccccagctgcttaagtctaataagaaaacatactttctcttctaattgctagaaattatcaagcttagtcccaaacgaagatgacggttgagatttctg

SEQ ID NO: 12191 - DNA, 404 bp, Glycine max
ggttgggtcacgtggacgtagcagagaggtctctgattaaactttcacgctcacacctctcgtacagaacgcaatccaaattttccttgcttcttttcttccatggatttggattggtcgtgttcttccaccaccaccaccaccaccggcaacccctactgtctcctcttccaagcgctatcactcattccaatctcgcactacctcctcttctcctccttcgttttcctctccttcctctaccgtttcctggagctccatttccttcaagacctctttttcctcttcttcggcttcttcgtcaacttaacctaccattccggtttccaattctaccacgccctgggtttcaaatgccagattcttcaccggacctaccttggcacgccctggcttttcaggcc

SEQ ID NO: 12192 - DNA, 361 bp, Glycine max
gctacgtctacttcatacttctaaatacatctctccttactctctcgatgcaaaaagcttaggacagagagactttccgaatcgagcatgaccttcatctgaagctattgctgctgccttcttcacctctgctatcccttccattgtagcatcatgcttagtaaccaagtcatcgtatctatcttgtatatcagcatagcgctctaccattctatcatgttccataacaactctctttagggcatcatccatctacaacctttttgtacgatagccgtaagacttaaaaacaggcttaaacttaataataaacatagatccactcactttcatttctgtacatctctggctttcattctct

SEQ ID NO: 12193 - DNA, 119 bp, Glycine max
cctctctcgatgcagaaagctcagcggagggagatttggcgaagcgagcatgacctttttctgaggcttttgctgctgccttcttcacctctgctatcccttccattgtagcatcatgc

SEQ ID NO: 12194 - DNA, 174 bp, Glycine max
atacacttgtactgttctattagttcatactaagttctgaaaatgagttccaaggttttgcgggttctacttatgttcttggccactatacttctgatctcctctgaagttgcacccgatgatgcatacgagaattttgacaaaatagatgggaaagcctagtgcaaattgggt

SEQ ID NO: 12195 - DNA, 441 bp, Glycine max
atgaattctcaatagaggttgcagctagatttttggtgcatccaaacttgacgtccgcaacagagatggctttacgcctaagctctaagactaaaggagtaagcacactggatatctggccttggaagtatctggttccatggatgagggaagacctatttgctaggagagaagctaggtacagtaggggactgaatatcattgaaagcaatgattcttatgacatggaagattttgcaatgccattacaagaatacatcaatgatcctgtggctgtggatgttgtacataatggagccacattccaggttgcaggtttgacaaacaattcttatatagcagaagcacatgaagtgcgccattgggtacagaaatataagactcttggtaaatatgtgctacaaggtgcaaagaagaaactggatgaaatggtatatggtg

SEQ ID NO: 12196 - DNA, 281 bp, Glycine max
agaattctcagatttgcggggcgagatgatgcagcagccaggacccggcatggcacctcccgccatgggccagcagccgcagcaacagtaccagcagcagcctccgccgcagcagcaacaaccctacgtcatgatgccgccgcagcatcaggcgccgcagcctatgtgggccccatccgcccagccttcgctgccgcagcagcctgctagcgccgacgaggtccgaaccctctggatcggggatctgcagtactggatggacgagaactatctctacacct

SEQ ID NO: 12197 - DNA, 179 bp, Glycine max
gtgtgcttgcattgcactaacaggttacgacttagtagctacctatgtaccgttaataaggggggataccatgatcattgctaggatgaatcatgtctagatcatccagaatatagcaatgatgatcacacttgttcttctgaactaaaatcatcgtcatctatctttgcagcacgcac

SEQ ID NO: 12198 - DNA, 235 bp, Glycine max
aaaccctaaaaacgaaaccaactatggcagcatagcaggcagaaagcgataaacgaagcagagtagaagaagcaaaacagaggaacacagaagcaggaacgaggaggagcactgtgtagaagaaatggggaagaagcagaacgagatccagaaaacggggctaggtcgagccctggtgaagcagcacaaccagatgatccaacagagcaaggacaagtctcgcttctacaggaag

SEQ ID NO: 12199 - DNA, 262 bp, Glycine max
tcgttagatcctcagtttccaatcgaccttcaatttcaaaaattatctgccctgttgagatcggatttgttcagcttgatgaatgcttcagactcagagaaagaagacacagaaattgaagtaatagcaattacacccaatgaagaaaactcgaaattgatgaagaaagagaagaaaaagaagaagaaagtttcgttgaaagatgcagagaagaagggcggcgtgtgttatatgagtcgaatcccccctcatatggaccacg

SEQ ID NO: 12200 - DNA, 304 bp, Glycine max
ctggattatagttgatggttgtcataaattcatgttgggggttgtgaggcctcatctgttagtcgggttcttttgaaatttgacccccccctcccccctttggatcgttgtttcatgctgtactagttagtggttaccatttggccactcttagaggtactttttgttaaactttgtctgattttgttatcagttagtttggaagagaccatagaaaagaatctgcttgtggggtggtttgatatatcacttgttaaggaggggtggatatgggtggcaaaaaaaagtttgggttggttgaaac

SEQ ID NO: 12201 - DNA, 446 bp, Glycine max
gattgatccgatccggttccggttccgattccgattccgatcccgatggcttctacagagggtctagtgcccataactagggcctttctggcctcttattacgacaaacacccttttactcctctttctgctcatgtctccacgctttcttctcagattcgttcaatggctaatgattttctcactcagcatcctcctatccaaggagagagcatcttaataaatgaagctgaccagcaacctccgcacaaaatggatgagaacatgtggaaaaaatcgagagtacattgaagaaacaatttttttacttcaaaagtcttattggccaaaagcccttaaacaacaatccacaacttacaatggtgaatttgccattacgcttgggaaactgaaagattaacttcatattacattgaaggctttggaatctttccaaactaaaaatg

SEQ ID NO: 12202 - DNA, 443 bp, Glycine max
ctggattatagttgatggttgtcataaattcatgttgggggttgtgaggcctcatctgttaggcgggttcttttgaaatttgacccccccctcccccctttggatcgttgtttcatgctgtactagttagtggttaccatttggccactcttagaggtactttttgttaaactttgtctgattttgttatcagttagtttggaagagaccatagaaaagaatctgcttgtggggtggtttgatatatcacttgttaaggaggggtggatatgggtgacaaaaaaaaagttgaattggatagaaaccaaggttccattaagtattctaagggaatgcactccgattggaaaattgggggtgccaatattgcgaggtcttctggaactattggtggcctggggaattctattaatggcaaccgaggggatttgaatgggtcttct

SEQ ID NO: 12203 - DNA, 401 bp, Glycine max
  modified_base (111)..(111): a, c, g, t, unknown, or other
  modified_base (121)..(121): a, c, g, t, unknown, or other
cagaaattaaccgtttttcctttctgggttttgtataattttgttgattttccattccttcgatggttttgctgctgctaagtagcagtggtatgtatgacttatgagctntgagcctctntatattttgaaaagaagattggaattttttttttcttcttttgggaaaggcttctagtggttggatttttgtccatcaagttattgatcgaggagggggttatcacttatcaacctttggtagtgcgtgatcacgggatcttgtagatgatggagaaggttttttgtgctttgtgattctgagatgtgaattaatggttggtgaagtaaagaatcaaggcggagtttgcatgataaatttgacttttggatcgaggtgggtccatttttgtacacaattt

SEQ ID NO: 12204 - DNA, 204 bp, Glycine max
cttaaatgagataaatacgactttctattgtgtgcccgtgggcacagtgtgaaagcgttgtgtatacctattagatgcggtaaattacttacaaatcgtacattgaatgattggtgtattgtctatacataagtagttaagtactttgtattttcaacttcttatcatgtgctgacccccctgtaaaaaattgagtgttgagcc

SEQ ID NO: 12205 - DNA, 396 bp, Glycine max
gtgaattggatgggttttcctcaactagctagttaagtcttctttttggcctatggggcaaggagatgctgctctctctggcttgtacttctgccttggcctgcagtaatggctttttcttggttgagtcttcctcaaagtctgctgctttgcacagtttgactacttctactactactgcatgtaaagagaatcaagaatgtgaacacaggggatttgcactgctatcgcgagctacacttctgttgcataatgcgtttgatgtatgagatatgtgcttgtacacttaacctatggggaccatgtgcgtgctgactgtgtgctagatatgttccctgtgggcaatttgcgagctacaataagctgttagcgacccatgaacttctgaaaatatta

SEQ ID NO: 12206 - DNA, 114 bp, Glycine max
aaaaaaaaaaaaaaaaaaaaaaaaaaaaaaattaaaataaaaaaaaaaaaaaacaaccaatatgtagggatccaaaataacgtacgcatacatacaacataatcaaaaattcta

SEQ ID NO: 12207 - DNA, 352 bp, Glycine max
agggtgcccattccccccggcaaggtcacgtcatcataggtaagtatgcatatcgctcgactgatttctgatttcatctattgtttgcaaggatcgcgcctgcaagacacccaatggacccgaagaagtccaacaaggtcttggagttgtcaagctctaattacaattctctgtcaagtctaccgaatgtctggcaacttcaacaaagggcttaaggcccttaactaatcaacctttaataaaaaagtcctgcttcccaagccagccccaggttgaaccaccccagaaccttgggaatggccaacagcggccaacaaaaaaacggccttaacttttaaagttaacttaagtt

SEQ ID NO: 12208 - DNA, 310 bp, Glycine max
actagctagtgttctataagttcacggtcagttctgaaaaatgggttccaaggttttgcttgtggtagttatgttcatagcggctatacttctgatctctgctgaggttgcacccaatgaatacgaaaattttaacaaaaaagatgggaagcatgctccaaatgggttatatgatagcaaatggggttacggtggttggggtggtccttggtatggcggctggggtggcccttattatggtggcggctggggtggcccttattatggcggtggttggggcggtccctggcgtggtggtggcagtggtggc

SEQ ID NO: 12209 - DNA, 332 bp, Glycine max
ggagagtgaagagttgttgtgagaaggatgaagaatgaaattgaaaagtgaagtttagagatggaagaagaaaaagcagcggcgtactacgacgagctggcccgtaagggcgagggagctgcgaggttcaagcaaggtctaggcttttcctcttcagcaccaaacgacgacgttccaaaacccttcttcttcttcctctccaaattcgtcaaagccttctccgagtcggagaagcaagcgcagctccaatccatccacgacaagcttaagaaaaatccctcttccgagtctagggtttcgagcagcgacagaagcaggagcagagaaaaacg

SEQ ID NO: 12210 - DNA, 405 bp, Glycine max
gagcaatttgcaaaggaaaatggacttctgttcttggaggcttctgctaggacagctaaaatgtaaaaagctttatagaactgcttgcagaatcttcaaaatattcagaaagtgtgttgatgtgtccatgagtcatttgataaaaggtgctatggacgttcccaaggtcaaccaagtgccagagatgaactgttcagcagagtggtgtgcactgattgagaggaaaacactctgaaatctaatccttttgtgcatcgattctgaatccctgtttaaaccgagtgtatactttttaaacttaaaacatggacttttggataaccttcaattcatggattgaacttatcttaaaagccttttttggacaaatattacttcataagttaatgggtggcttgtggggtc

SEQ ID NO: 12211 - DNA, 210 bp, Glycine max
taagttctgaaaaatgagttccaaagtttttcttattctacttatgttcatggccactatacgtttgatctcctctgaggttgcacccgatgatgcataccagaattttgacaaaacagatgggaagcgtagtgcaaatggggtagatgaaagcaaatattggcgtggtggctatggcgactatggtggttggcgtggtggtggttggcg

SEQ ID NO: 12212 - DNA, 155 bp, Glycine max
cgaaaccctaactcgcgatggcgatcttgctgggcgaaattctttaatagcttgagctgtgggtgaagcttatcaagaacccgcagactcatgcctacgtgaaccctaatctggaccccgttttgctggtgccccatagtatgaagctccatgct

SEQ ID NO: 12213 - DNA, 460 bp, Glycine max
acgcgtccggagtggacccagagggtgatgttagcagggcgagttgagttcttcgaacacttaagtcggagggactgctgaagacgcaacccaaccaaccatggctgcttctgatcccaacaagttgatggccaaagctgataaacaaacaagactcagtctcacgaggtggaatgcggattggaaaagtgctactgttctatatgagcaggcagctaatgggtttagagttgccaaggactatgagaatgccaaatagcatatgagaaagcttcaaaggacaagagatgctttcttcaccttgggatgcagctaagcacatggaatctgctgctgctctagcgaaggatctaagacactggcaagaagttgtggacttctatcgaagggcatctgaattgtatatggagtgtgggagaccccaacctgcatcagacgctcttgcaaagggagcccgtgc

SEQ ID NO: 12214 - DNA, 379 bp, Glycine max
gctgggtctgataccaaaaatacactaagttatgcagttgatgtgtcaaagctacatgttgaagaaaagaagaactcatattcaacaaaagatggccatgatgctgaaaaaatagggtttggagaggcaacacaggaaagtgtcgatcaaccgaaaaggactgcaaagattcatgacttctgtttaggcattccctttggtggatttgttttaacaggagggattattggattccttttttcacggagtcctgcaacactaagcagtggtgtgctttttgggggggcttaactattcctaagaacttttaccttaaaggcttgaaggcaaggaacctaaggttaccaattatttttaggccaaccacttttgccagggg

SEQ ID NO: 12215 - DNA, 317 bp, Glycine max
aaagcatgctgggtggtagtgctatgccagatcctgctttattgacccagctaatgcaaaatgcagctatctcacaaatgatgcaaagtatgctttccaacccacaaacattgaatcagattcttggtgctaatactgagcagcgtggcatgcctgatttaaattctcttagagaagtaatgcaaaatccagaattccttcgtttgttttcttcacctgagacattgcagcaactcttgtctttccagcaaactcttatgtctcagcttggccagcaacaatcaacatgggaatctggtcaaactggcggaggcact

SEQ ID NO: 12216 - DNA, 280 bp, Glycine max
acgcttttaacgaccatgatcctttgcttaacgcttactctcggatctaagtcgcaattccacctgcaaggttaacaaccttttcaatcttcctaatggatccttttacttttggtccagctgtagtcatcgataatggctccggttatcctaaaatggggttggctggtaatgttgacccatgtttaaaggttccgacagtggttgcaattaacgagtcctttctaaatcaatcgaggaattcctctaaaggcaatggggttgcccagcacaatgctgg

SEQ ID NO: 12217 - DNA, 388 bp, Glycine max
cggacgcgtgggcggacgcgtgggcacggacacccgaaaagcctttacgctgcgatcgaaatcgcagctggggactgtttttattatagagattgtgattggaaattgcaattgatgtgtccacaattgtagtcgaaattgcggccacaactgcgatcgcaatgcgatcgaaatcccagttgtggattgttttttgaaaccaaggtaatgagtaggttttatttttggttgatttaaaccgtatattggtggttgttatcttctaaactaaggatttggtgagtgagggtattgtgtggctaatgtctaacaactttgactcttaactttactaaaaagtgggatggcctacagaatctttttggaaaatggttggggattttgttgc

SEQ ID NO: 12218 - DNA, 330 bp, Glycine max
cccacgcgtccgcttcctctacttctttgttccacaatttcacggttttctccaaatttcagggtcaaattcaataggctaggctacggcgacactaagttgcaggcctcaaaggtcacgtcgccgaagcttatcttcaaagacccgcgctgagctttctcatcttctttggtctactaccatttcatggcttatttcaaatttcaatttccaaaattggagccttcggcttaattgcttccatacccattagaatgccaggtgcctggggtggactatctttaggtccaagattccttaggttccaggggtttaaatgggacccaacca

SEQ ID NO: 12219 - DNA, 394 bp, Glycine max
cccacgcgttcgctgaaaatgagttccaaggttttgcttgttctacttatgttcttggccactagacttctgatctcctctgaggttgcacccgatgatgcatacgagaattttgacaaaatagatgggaagcctagtgcagatggggtagatgaaagcaagtattggcgtggcggctatggcggcggtcgtggtggcaggcgtggtggctatggtcctaatgaacataacgaggctggggttgatgctaaccctcacaactaagaaggcaactttctaaagcttatatatgggtttaagttatcgcaataaataaaacttcatgagaaagttagttgtaatagaagtggaaaactttgtaaaggaataatacctttcatgaatttgcttatct

SEQ ID NO: 12220 - DNA, 306 bp, Glycine max
atgaaatattatggtggttgggggtctggttgggatagataccgccgtggttggtattgccggaatggttgttgtcaatggagctactactatcaaacctgttggaggtgctgctattatcctggtgaacatgttgatgtgcgtactgatgctcaacctcgcaactaaacatgaacattgtgcttaaagtataggctattgttatctatataaataaaacttcatgggacgtgtacttcatgagacgtgtacttatctagttatgcatgaaataaaagtgaaaatctttcactgtgcattattact

SEQ ID NO: 12221 - DNA, 411 bp, Glycine max
  modified_base (322)..(322): a, c, g, t, unknown, or other
cccacgcgtccgcccaaacatcccttcagctccatgatcatggatagatcatctcaaagcagctccgattcaccgactcgagagcccaaggtgttatccatcgaatgtcttaaaggaagctccaaaggcgacgagtggaccggcgacatgctccaaaccggcgatatcgtggaggagctccgactcggatcgacggcgaactcacagatccggtaccagtggccgttcaagggcgggaagagcggcgtgcagaagattctgcaggatgcgttcaaaaaagaaggagccgtcgatcgcggttcgggtgcggcgaggatcggangagctggcggagctgcaggcttgcatcgtccccaacgaattcacggccaagaagaacttggtgcttcgatccatttttgacccgaatta

SEQ ID NO: 12222 - DNA, 428 bp, Glycine max
cccacgcgtccggaggaattgtgttcagatcttcttgacaggctcacgacacccgttgaaacgtatggacggatgcaaaggtcgcgtttaaggatcttgacgaagtcatccttgttggtggatcaacacgtatcccagctgttcaggatcttgtaaagaagttgactggcaaggacccaaatgtcactgtcaatccagatgaagtggttgcccttggagctgctgttcatgctggtgtcttggctggagatgtcaacgacattgtgctgttggatgtcactccattatctttgggtctggaaactctaggtggtgtgatgacaaaaattatccccagaaacactacccttcccacctcatagtctgaggttttctcaactgctgctgatggacagaccagtgtagagatcaacgtccttcatggtgag

SEQ ID NO: 12223 - DNA, 450 bp, Glycine max
ggaaacgccagagctccatcaccggaacaagacccaggcaggtgtcgcagtacgcggagaaaggactgtatataaatatatgtgtccccgatgctctctatttcagccactcgtatattcttactccgctcaacaactataagattatcttcttcttcttcttctcttcaattcttctccaatcccaaccgcaccctcttccgtccctttcttcacacttccttcaaaccacttccttcgtctttctctttccgaacagatcacactatggccacctcaaacgccaaatcagtccatgatttcaccgttaaagtatcttttttcgttatgttttgcatatgcatgtaaattttagattttaggttaaccccccctttttttatccttttgcaggatgccaaaggaaatgatattaaaccttgtgactacaaaggaaaagtccttatcatt

SEQ ID NO: 12224 - DNA, 367 bp, Glycine max
  modified_base (359)..(359): a, c, g, t, unknown, or other
cccacgcgtccgggaagcagtaccggctcgtacccaagaacaagaacatggattatggcttcgtgctgttgctcctcttcttccatatcttccttcctcactcctctggtaaacccagtggagtgtgtgtttctcaaggaggtcgttttcctcccttcaaatcagagggtagcactcccaaaaagggtcctaaagatttgactctttgccggatctttcgcaaaaagacttgctgcgatgtaacccatacacatcctgcacttctgtctgtaaggaagcttgcttctactggggaagctagccaagagtgcttgcacttatgggaactgttggaatgttccatatgcgatccacgtgtnggtactca

SEQ ID NO: 12225 - DNA, 425 bp, Glycine max
cccacgcgtccgaatttcgggttttgggagagtctctattgacgttcgctgatcagggttaaagtatgggtctttgatccaagtcgtcaatggattttcatattgatgttgttgatcttcctcgatcaacatagttaatgtttctgttcatcacttgctttaccattgttattctgtgaatggaaaatttgtgagccaaaaagttttgggctttgcatgaagaattaagtctatggctaggatttaatcattgagttaatgactgaaatcatgagccatggacaattacattgataggatgcagtacctgatctgcgatgtcattacaatgccatgtttgcctattagaatatcatggatacaaagtttgcacgaatgactgaacgcattcgtagaacatcatgctcttatttgaagagctggaa

SEQ ID NO: 12226 - DNA, 339 bp, Glycine max
cttgttttgtactataatgcaatgtgccaatgcctcaatcctatagtttaatgaagtagttagttgtttgtccctagtacatctgtcagcaactaagattaggcctagacataatctggcttcccatatttagttggatgaacttttctgttagatttgagagttacacacgcaatctagataatgttatttataattctttctgaattaaaccaaaaaaggtttcaacagataccagatagaaagtgtaaaacacatgataagggcccctaacagagaggtacttctctcaatacacaatacacaggcttctcaatcacacccaaattacaatactga

SEQ ID NO: 12227 - DNA, 338 bp, Glycine max
cttagagcgtactataatgcaatgtgccaatgtctcaatcctatactcctatgaaggggggggatgattgtacctagtgatatgagtcacaactaagattaagcctagacataatctggctacccatatttaaggaggatgaactttcctgtaggatatcaaagttacgcacgcaatctatataatgttcattctcaatcatactgaattgaaccatcaaacgattcagcagatactacatataacgggtgactctcacgataagcgtccctagcagagagtaacgtctctcaatcacattacacaagctactcaatcacacccattgtacaagactt

SEQ ID NO: 12228 - DNA, 438 bp, Glycine max
gtgcatgcttaggggattccggcttctcagatgcccttactggattaggccctctataaccgtgtgagatcacagtggtgtgttgttctcaaccaaaaagcatctgagaaccagggagcttttgccagaagatttttggtttagtgcgccaaaaaagggagtgatggtctttgctttgccgggagagcctggccttaccgagttggctggggacttcaaaatccattttcatgatcgccaaggagatttttactgttggttgaacacaactatgacagaaaataggaaagtattgaacaccagtgatctggatggctttgacaagagaaaattgccttctccgggatttatggttgaggttgtgctggtggattataatggcaatgatgtaacttctaaaactgaaactactacaaagaaatcagatgagagttcaag

SEQ ID NO: 12229 - DNA, 309 bp, Glycine max
ggagagaacatggatcagaattttctgcagtttgatccagctcccagacaaattgagcccggcgctacacgaaagacgccagattattttttgtaacttcatatatctctttgtttgtagctactgctttatgctgttactgtagatgtgtctttaaggagagaagagtttcactgtttaagtggacggttttcatcaacataattctttcttttggagtttgtctgctgttgccgccgctgctgcggtcttatttggacaagaaacaaatagaaattgacacaactggtgttgtatatttttgataaa

SEQ ID NO: 12230 - DNA, 433 bp, Glycine max
cccactcgtccgaacactcgtacgaccactcgtacgaccactcgtacgctttttcttttcaaagggaggaatcataaactgagcaggctggctggctagcctttggtcaaccaatcaatgaacaaagacaactttcacagaactgcctctattacttccatcttcttctttgatatacttgagagagagagaaagaagcataagaaaattaacatatgtaaaccttcagaaatctcaagcttatcgaacgtttactgtatcctagacatgcttctctgcgttcttacctgttgatcagagactgtgcacatgaatcatagctgatcgttcatgcaatgaagtgcttctactatttcatagacacatctaggagcacttttcaaaggtcaacacctgaactgacagatccagataaactcgagttatcacggcc

SEQ ID NO: 12231 - DNA, 407 bp, Glycine max
cagcggcagctagattgctgggaggaagcaacggaagccgggcacttagttttgttggaggcagcggtggcagcaagagtaatggaggaaatactaggattggttcgattggtgcttcaagtacaagtagtgcaatggcgaatccgaattttgacgggaaaggaacttacttgatcttcaatgtcggagatgcaattttcattagtgatttgaattcacaagacaaggaccccataaagtctattcacttcagtaactcgaatcctgtgtgccacgcatttgatcaggatgctaaggatgggcatgatttgctcattggtttgaactctggtgatgtctactcagtgtcattgagacagcaattacaggatgttggtaaaaaacctgtcggggccctgcattacaac

SEQ ID NO: 12232 - DNA, 426 bp, Glycine max
attcaaatatgagcagattgcaagatattggaagtcaccatcatgggttgctattccttttagcttgcatgcatatagattgcaccaaatacatcgagcagcaaaatttctaacagctatatcatttcaagttaagaaggggtatagcaaactgcctgtagccaggggttctttgtcaacaactacaaatgcctttcgtatccttattgtgatttggatttggtctttctcaagcttcctcatgagattcctaacttctgcttctgcttctacaactaagcagtgatgcctagatgatgtaaggtttgttcacaatatcatctcactgttcaaaacagaccccgggtcatctttgggccgaatatttctatatgtactttgtctgtggatgcatttttgtgtgtgtgataaaaactagacaatctg

SEQ ID NO: 12233 - DNA, 378 bp, Glycine max
  modified_base (304)..(304): a, c, g, t, unknown, or other
  modified_base (324)..(324): a, c, g, t, unknown, or other
  modified_base (336)..(336): a, c, g, t, unknown, or other
  modified_base (344)..(344): a, c, g, t, unknown, or other
cccacgcgtccggttgctttgtgcttaatggaaggcccttgagcttttctttctttctctgcgctcttttcttttaggttgccactctcacacactctccctcttctctttctctgcaataatctctcttctcttcttcactctctcaactcctgccaaacccccatttccgcagttcttaaatttggagtctgatgtctccgccattgctggttaccgaagatgaagggcagtgccatgcctcgatggtagcatctgcatcttcaccatccctgaactgtttctccctaaatgaggccggatntaaagaatgcaattacctgngattgtcagatngctcttcngtggacagttctactgtccccgaattgtctgatg

SEQ ID NO: 12234 - DNA, 418 bp, Glycine max
agtgttcatggggtagcaagcctactcctccagggactgcctcaactcctctcccaccacctgcttctgcgaatgtgtcgggattttctcttgctagtcttgcagcttatgaacgccaaatggctttgagtaaaatgggtggtgcacatgcccttatgcatcaacaaggtcaacatgccctaaaacaggtagccatgggaatgggtgctcctggggctggttatgatgcaagattccagaatgttgcgaccacccaacacctaatgtactatcagtaaaatgtgttggtgtgcaactctccgcgataaacaagggaggattaaagtatgtaagaacggttttacaataccgattgtttcttctgtgcttatgtatggttattacatttgtaatactacagttatttagccgttgcatg

SEQ ID NO: 12235 - DNA, 352 bp, Glycine max
  modified_base (263)..(263): a, c, g, t, unknown, or other
ctcgaatccaaactcagaacattcatttccctataaactcgacgtcgtttcattcccgtctcgaagaaaacatctagctgaagattccaatcggagctcagaaaaaagaaacctaatcgccgatcgcgtcgccgtcgcgccgaaagttcgttgttgttctgtgaaattgccggttttaatttttcgttttgtgataattctgagaattagtaacaattattgtggtttttttttctgttaggtaacgttgctgtggttctttntttttcttttttcttttttataatttcgttgccggtttgtaggtgaagatagtcgatttggttgctgctgtgtttttggttttctggtg

SEQ ID NO: 12236 - DNA, 290 bp, Glycine max
attactactagttttacacatgagttttagtggctccttgcctttgatagggtttagcccatacgattgaatagggttagttcttgcgattgtattttatagctacctcaaatgaatgggttaaattaaaaaaaaaaaaaataagaattaaacactacaaagtaaaaaaaaaaaaacttttaactacaaaaaaaagatataaaagcaaatataccaaaaaatagaaaagttctaaaaaaataattattacattggaatgttaaaaaaaaaactcttggacgaactaattg

SEQ ID NO: 12237 - DNA, 352 bp, Glycine max
cccacgcgtccgcttcgataaaatcctcaaaccctcttcatgatgtggaaccctctgcgcacggagtccaaccctgaaccggagatcaatcaccagtttcattcacaaattcaatcctgaacgtcttttctcgcaagaaaaatgagacaaagcacacatttcatacccttcccaattcaaatgaagaaaaacagcataaatcttcttcttcttcagctgctgcaaagacaactaaagactcaaggatgcatgagactaaatctggaatgcctcctccaaaagttttgcatgcgtatccaggtttgtcctccccaatggattatgcactcatagagacaagcccttttcttgg

SEQ ID NO: 12238 - DNA, 427 bp, Glycine max
caacaatggcttcttcgtcttcagaatcggcggtgtcggagcgaagaggaataccaggggctcggttggtagaggatgtccaaacttacctcactcaatcgggtctcgatgttggttcagccctggcttttctccaagagagacttcagcagtacaaggtagtagaaatgaagcttcttgctcagcaaagggatcttcaggcaaagataccagatattgaaaagtgcttagacgttgttgctacattgaaagctaagaagggtactggtgaggaacttattgctgattttgaggtatcagaaggcatctattcacgagcacgcatagaagaaaccaattccgtgtgtttatggctgggagctaatgttatgctggaatattcattagaagaggctactggtcttctacagaagaacctggataatgc

SEQ ID NO: 12239 - DNA, 419 bp, Glycine max
tgatgatgctggagaaatcgtgcaaattccattggatgataacgaaatacacgatatacagtggcaggatgctaacaatgtggaaaatgatgctgatgccgtgccaattacagatgctccccttatcggtgctacatttagtttgatatcatacgttgctaattttgatagtggtgctgacttggttgacccaagctcttcaaacaccgctcattgacgtggttgaccaaagctcctttttattggcaagattgaacatacaataacctcacttacattaggcagaataccaatataggttggcctaacatgggccatcattaatgattgcatgttaagtctttgaacaaggatatacagtactggggaaaagtctatagctctatgtgcgttcttacttcatgaagccataacaaaac

SEQ ID NO: 12240 - DNA, 341 bp, Glycine max
gacacacaaaggaaaaaacagagaaaccatgtcttctccaagcacgcggcaagagatggactggatgggactgttaatccaccacttcttctgtcttccttttaccttctatttacattaaagttatactcttattatatctaattgggtgtctaaatttgactattgattctgattctgatattagctacacatctaattaataggatgatgagtaactacaatgtgcatataattaatgatataatgcacaagttttatgtacatatgaattgacccaatgcgagatcttattaaccacgattgttaaaagtgacggttgaactgccatatgcttatcc

SEQ ID NO: 12241 - DNA, 401 bp, Glycine max
cccagagcgtcccataaatagctggagcgtatataatatatcatatggtatatgattatctttatatctcattgtggttgatcttcataatatacactgatctctcataaatacatcccaaatttcttctctgaatttttgtaggatggaactggtcttcagttcaagtctgtgatgacagggaagtatctttgcgctgagtccggaggaggaacaatcctagttgcaaattgcacagatgcttcgggttgggaaacatttagattgtggaggataaacgaggatactttcagattgagggtgtttaacaaacagtttgtcgagttcgatgggattaacgttgatgctgtttccaatatacgcacttattctgagacatttcatatagttaaggaaagtga

SEQ ID NO: 12242 - DNA, 426 bp, Glycine max
  modified_base (382)..(382): a, c, g, t, unknown, or other
cttcctcacagcactcatcgattcttttggtgccttatttgtctattcggttgaagttgaatgatagaacattccatggctgaagaaatgaaaatggtagaacctggaagaggtaagaggaagtttttcaaaacgcaaggccataaaaagtcaagtaagaaagcaaaagtgatgccaccacaacatggacaaaagaaagttaaaatagacaaaaaaatgaagaaacttttccgcaagcgagcacgggagtataattctgatgatgaagaagatgatgaggccactgtccctgctaccttagagcctaaaagtctggcatctatcaccaataaaagaaatgacaaggatggcatagaaagtgaggataggtctgaggatgaangagctgctggacccacaaaaaacatggattaagaatgctactga

SEQ ID NO: 12243 - DNA, 400 bp, Glycine max
gcaatgcgccttattgtccgttgaaatttagttctggtacttctagttcattcagctgctgggcaggaagccaaccccaactaaatctgagtctcttccatagctcacagcaacaaagccacattgattgtgctaacaagtccttaaagtcaaaggattccactttaagatctggaggcattgattttcatccacttctgcagaaatctgatgatacacagtcaccaacaagttttgatgccattcagcctgagtcactggttaatagtggtgtgcaggctatagccaatagatcttctggcctcaatgacaaatccaatgaacttgacttggagattcacctaagttctgtatctggaagggagaaatctgtgaaaagtagacagctaaaggcacatga

SEQ ID NO: 12244 - DNA, 458 bp, Glycine max
tgtttgtgtttcaccacaacagtttcctcgattggttgatctgctttctgggccatgttggtgtggatgaggaggatcatgttcagaggcatccacagtgagttgtagaatagaagcaaaaagagaagttcttggtggcgatttcttagatgggtcttcttctgtgggtgtgagtgggtgtgagttttgactgtgttggaaaaagaaggcttttttttttttctttttaatgttatgagaggcattattcttggtgggttttgtgaggggtggctttgatttgcctggattttgatatggggtggtgttttccttggtttggatcatccaacaagggaggcaatggttgtggggttaaggtcaaagggggtcccaacaaaagatcttcttttaaaggaactggttttggtggtccttaatcttaccttcccagcaagggtaacttagattaatcaaaa

SEQ ID NO: 12245 - DNA, 434 bp, Glycine max
gccacgcgtgcggtcagggtcgcatttttaggtctgccaggactgtggagaggagatccttcggacggtgagattgaacagatgtttgaagtgggagagtgcgtgaggttgaacgacaatgcatataattggaaatcaattggagcaggtagtgttggtgtcgttcatggaatagggtatgaaggagatgaattggacagaagcatttgtgttggattttgtggggagcaagaaaagtgggtaggaccaagttgccatcttgaaagatttgacaaactctctgttggacataaggttagagtaaaacaatatgtaaagcaaccgagatttggatggtcagggcatacccatgctagtattgcgacgattcatgcaattgatgctgatggaaagctctcgatatgcacaccagcatgatccaaaacatggatggt

SEQ ID NO: 12246 - DNA, 452 bp, Glycine max
attctcaaacatgaatatcagcacaagatactatgattcattatggtgggggagagcagagccgatcgatgtcactagttgcccacgagactcaagctcaaaggaggcttcaatctcaaatgtacttttcattaacattactgcaaattcggaaaatggcatcttcctgtctggttcaaagagaggattgttaagaaatttgagattcattgatatggacattacttacagaaggttcaccaattatgctggtgggttattggactataggccaggatgccaagagttggtaaaacacaggactgcagggattatgatggagcacattgaagggcttgaggttaaaaatgttgaaatgagatggtcaaacgatcaactagagcagtggaataatcctctagagttcaggccatctactgtgaataacatctctttccttaattttaattctg

SEQ ID NO: 12247 - DNA, 306 bp, Glycine max
cccacgcgtccgcttcggagcaaggtgccgcctgctccggtgaatttcttccgtaggttgcctgtctgtcacagacagcatgctgtgaatggatactcttgtgtgttctagaatcttgaaaacttatctgctgctgccagtgtttgaattaatttttggtagtggttgtagaatcattggcgctatctcactttgtgttgtttattaagtgttgaccgttggtgcaactgtatacttagtttggtaaactccaatgtagttttcatgttaattaatcagcgtttgtgagcttgtgttctatacttg

SEQ ID NO: 12248 - DNA, 399 bp, Glycine max
acggctatgcttctcatagatcatcctaactcaattttcgtagtcgtacctcattcggatgaaggggaagatgacaacgatgcgtaaaactccgtatgtgacttagatgaataggacgctgacgaacatctagaggatccgccaccataaaccctaaaggatcaacatgatcctctgaccctgtcggctgctatccactctctagtgaactgtgataatcaacagtacaaccaagaatatgatgacgttgatctcactctctaggaacatcccgtagtgcagcttatagaaccgttcacttatgagcatcttgactctctcgataaacatgcactggatatgtatcctgaattcgtatattgcatgcgccaacttgctgacatgtaccctgctcacagg

SEQ ID NO: 12249 - DNA, 430 bp, Glycine max
cctcttcttaacatgtcttgcattaactaaatgttttaggtcataaatcatatgcttgaatgtatccatattatctgcacgatcaaactttcacttcattgacagtcataccaagtcttttagcatgcatcttaatatgcacaatgatcatcaaatgataacttgcgagtcaagagccaaatccatgtacaaaatgcatgttctcttcgttttatctgatttgatttcttttttgttcttctttatgcatagatgcacagaaacttgaattattcctgatacccattttgtggatgccaattaacctgccaatttgtcacaagtcttttctgcaacatctgtggttcaagtgcatgaatgaaagagctctgaagcatgacttaatccatagtatcttctatcattgaattgttgttaactttcaaaaagt

SEQ ID NO: 12250 - DNA, 387 bp, Glycine max
  modified_base (329)..(329): a, c, g, t, unknown, or other
  modified_base (375)..(375): a, c, g, t, unknown, or other
ctcctctttctctctccaattcttctccttctctatcttccaagccaaagtttccatctttgggctttctctctggcaacaacaccttgagggtcaaatgcccaaaaccttcgcactcaacaactgttgttcatgttgctccagaagcgttggattcttcacctgatcccttagacccacctccagaaacccttgatgatgactctgacgccaccacctttgaggttggtgacctggggactcctagcacttcggcaattagcattggtggcgatgcagatacaatggcaccaaagcagaagattagaatcaagcttagatcttactgngtgcccttgatagaggattcctgcaagcagatattagatgcagcanggaataccaatg

SEQ ID NO: 12251 - DNA, 349 bp, Glycine max
ctgcatctctcctacactttctttctcttatcttcccaaacccaccaaaaaagaatggattgtttaattccccagaaggaaaaaacaggaacttttttctccctcaatccacccaccctcttctctctctctatttctcaacacacacaagcactcctcttcataaagccgtgaccttaggtggaattggaattggagatctagatgtgcctaatcagaagcatgagatcgcagtcgcagcgtgtggtgcaggaacaagaagaagcagagtgtgtcggcgacagcatgcgacagagttgttgggccaacatgccccaagagcttcttcgagaggtcctcttcagaatcg

SEQ ID NO: 12252 - DNA, 175 bp, Glycine max
gaaaagaactacactagtataatacaatttgtaattgtatcagcttagatgtttagatttcgggtcaccaatatgtctcatcaatatcaggtcagcttggacataaaatggtaaatgcttagacgtacaatcgtgtataccttttattcttgttaactcaattttattgtttgta

SEQ ID NO: 12253 - DNA, 244 bp, Glycine max
cccacgcgtacgcccacacgtacgttcaaaatttactctacaaaaaatacataaatacatacagaacgtaaaaaaaaaaattctcagctaacaaaattaatattaaccatacattaaacaaaaataaaacataaatgaaacctaatacaagccccttttatcataaaatgcttactttcaatgctatcaatgtatcaaatagactaactatgttaatactattacactatctattacacttcaa

SEQ ID NO: 12254 - DNA, 235 bp, Glycine max
caacaggatccgatcttacgctccattgttctctgctcgagatgcttccatgcatagagagcgtggtacgtaactactcagctgtcgcatattctgagccatcaataggactacatagacaccaaccaaacctaataatagcctctttgaatgtacaacgcttacttctaatgcactcagcaaatgaactcgataaactctgctactactatgcgactatataatacactgcaat

SEQ ID NO: 12255 - DNA, 371 bp, Glycine max
  modified_base (342)..(342): a, c, g, t, unknown, or other
caaattttcagtttcttcctcgcttttctgcaaaatcatctaaatccgtttctgatcctggggcatcagtttttcccttgaaagatgggaggtggcaaggacaaacacaatgaagaagagaaaggagttttctcacatctggctcatggagtagctcaagctgctcatggttaccctccaggggcataccctccacctcctggggcataccctccttaccaagggtacccacctgctcatggctaccctccacatggtggctatcctccggctggttatccccctgctggctatcctcctgctgcttgtggttacccccctgcttgttaccctacacatggntatccttgatcatctgcttcacatggatc

SEQ ID NO: 12256 - DNA, 446 bp, Glycine max
  modified_base (281)..(281): a, c, g, t, unknown, or other
  modified_base (390)..(390): a, c, g, t, unknown, or other
cccacgcgtccgtgaagactctactggagaagcatctgcttataatagcaataagagtcatagaatgagcactaaacatggtgttgaggggatgcgatctgattctgcttctaaccatagtgatcactatgaagagaagcttacagttaagcagaaaaccttgatgctgcatggttatgataacatcaatccaaagaatatacaaaggagtgaacatgtaaaatctaaaccttctagttcaatccataattcccgtgttcctatggatactgaagaacggnggttatctgctaggatggcaaaggaagagatgtttaaggggaacaggaaagcaaaaaatacatactgcgatgtataaggagcaaggatgctttcaaatgaaatcatggntgcaaaacgagctaaagttgacatgcttcaacaatacaatgtgaaaaaatcacctg

SEQ ID NO: 12257 - DNA, 384 bp, Glycine max
  modified_base (316)..(316): a, c, g, t, unknown, or other
ctgacgttggcattctaccttttcttgattgttccatagaagatgatgacacattgggtgggaatgaaaacaacagcattgaggtgagacttgtttggtttactatggaaagagaagtgagaaataaaattaaaaccatattttatccctaacaataacactcaacacaaacacacataataaaaattccaactaagaaaattgattatcaccgatgaaaatcaatttcctagtatgatgcaaaaattgtttataaaactatacaattgattatataagattacaaaatcgattggaagactacaaaaattgattntttttcagttttttatgtaatagatgaaagagatagatataacattccaaactattttttttatcaca

SEQ ID NO: 12258 - DNA, 368 bp, Glycine max
cttgtactgttctattagctcatactaagttctgaaaatgagttccaaggttttgcttgatctactgatgtccttggccactatacttctgatctcctctgaggctgcacccgatgatgcatacgataattttgacaaactacatgggaagcctagtgcatatggcgtagatgaaagcaagtcttggcgtcgcagctattgcggcggctatagcgttggatatggaagccttctaggaggctacataatgtccctgttactctagatactgaagaacgggggatatctgctaggactgacgaggtagagatgtctaacgtggacactatagcagaaactacatactgcgacgtagaggctacagggat

SEQ ID NO: 12259 - DNA, 389 bp, Glycine max
cccacgcgtccggcctctctttaaggacgtcctatttgctgctcctgctcgtgacaacacgggttcagctgttgctgcaaatctctcactaacccgtaattctcagcaagaatctgcaccatcaggttattttccttgcagggagcatgatgtgttgggaaatttagaccatccctccgaccaggattttgctaggactggaccaatactaaacagatggaagaaaaaggaactgctgcttgatgatgttggtgctagtccttcgctgagatctgcatcaactcctggtagttctttaataggtggagcaaagggaaagaggagtgaacgagacagggacaaagactcttctgtagaaattctgtttcaaaaggtggtcgttcttctgc

SEQ ID NO: 12260 - DNA, 468 bp, Glycine max
accacgcgtccggcctctctttaaggacgtcctattcgctgctcctgctcagtgacaacactggttcagctgttgctgcaaatctctcactaacccgtaattctcagcaagaatctgcaccatcaggctattttccttgcagggtgcatgatgtgttgggaaatttagaccatccctccgaccaggattttgctaggactggaccaatactaaacagagggaagaaaaaggaactgctgcttgatgatgttggtgctagtccttcgctgagatctgcatcaactcctggtagttctttaataggtggagcaaagggaaagaggagtgaacgagacagggacaaagactcttctggaagaaattctgtttcaaaaggtggtcgttcttctgcaaagggtgagcgttaaacaaatgcaaagtccaaaccaaaaacaggtcaactatctagttctggaaatggatctctaa

SEQ ID NO: 12261 - DNA, 462 bp, Glycine max
cccacgcgtccgcttccattgtcttgaaagagatgagctctctttgatggccgtatttaggtatgagcttcctgcccaaggcctcttatacaaacggccttcgattgttaagggggatgacatggatttcagcaggtttgattctggcataatgtatgatttgatttatgctagtgctgtatttcttcacatgcctgataaactcgtgtggactggattggaaagattagcatctaaattgaaaccttatgatggacgaatctttgtatcacataatataaagttctgttcaaggttgggaggagaggaatgcacaaagaggcttgcaagtttggggcttgagtatcttgggaagcatactcatgatagcttgctattcaatcactatgagatatggtttgaatttagacggtcaaaggcataatatctggattggttccataaagaggcatcataaacatc

SEQ ID NO: 12262 - DNA, 234 bp, Glycine max
  modified_base (7)..(7): a, c, g, t, unknown, or other
  modified_base (22)..(23): a, c, g, t, unknown, or other
  modified_base (31)..(31): a, c, g, t, unknown, or other
  modified_base (39)..(39): a, c, g, t, unknown, or other
  modified_base (47)..(47): a, c, g, t, unknown, or other
  modified_base (68)..(70): a, c, g, t, unknown, or other
  modified_base (78)..(78): a, c, g, t, unknown, or other
  modified_base (112)..(112): a, c, g, t, unknown, or other
  modified_base (124)..(124): a, c, g, t, unknown, or other
  modified_base (132)..(133): a, c, g, t, unknown, or other
  modified_base (146)..(146): a, c, g, t, unknown, or other
  modified_base (152)..(152): a, c, g, t, unknown, or other
  modified_base (165)..(165): a, c, g, t, unknown, or other
  modified_base (171)..(171): a, c, g, t, unknown, or other
  modified_base (198)..(198): a, c, g, t, unknown, or other
  modified_base (207)..(207): a, c, g, t, unknown, or other
  modified_base (217)..(217): a, c, g, t, unknown, or other
  modified_base (226)..(226): a, c, g, t, unknown, or other
aaaaaangacagacacggcgcnnaggggagnggaggaangaaggccnacacggcatgcagcgcggcannnaaagcgancgatccaagcagagcggggcaggggataaagggnagactgcaaaanggaggcanngaaagcatgcgangggganggaaccgcagacncagagnccgaagcggcccaggcaaagccaaccncggcgcccncagcaggagncacacccgngccaccac

SEQ ID NO: 12263 - DNA, 455 bp, Glycine max
  modified_base (433)..(433): a, c, g, t, unknown, or other
  modified_base (440)..(441): a, c, g, t, unknown, or other
cccacgcgtccgcccacgcgtccgcccacgcgtccgcccacgcgtccgatttgcaaaggaagcattttttcatttgccaatcgaccttcttcaaccctctagatcgaaaggccaattttttttttcttttagtttttgttattatttcgcattctttttaccttttcaattcttcaaaaattctcgcgactgaattcacgtcagaacacggaaacataaagttcagttttttgcatcgtttttattaaaatttgttggcgaacaaaacagagaaaaaaaaaccaaaaaattgaaatttcttatccgttttggcgaattgaactgcgtgttcaattgggttgttgaattcgaggcagagggaaccgcgggtgtacaaggaatttcgattctgctgttgttagaaacggtgtagtttggtgtgagagaagctggngacttgnngtggtcgtaacgac

SEQ ID NO: 12264 - DNA, 81 bp, Glycine max
tcgcaacactattcttttaacgattcttggttatgtagagcctacaacttttaagatcaactagatcactaaagggattat

SEQ ID NO: 12265 - DNA, 465 bp, Glycine max
  modified_base (368)..(368): a, c, g, t, unknown, or other
ctacatcaagagagaaattaacatagagagagatgggggcttgtttttcttgtgactcatgctccacgttgaagaatatccgtgtggttcatctcaatggttatgtagaggattttgatcaaccaatttcagtgaggcaagtaattggatacccccaaaaacactttgtttgcacttccactcagcttctttccccttgctcaacatcaatgaatggagacacccacctgcaacctggtcaagtgtatttcatgctaccatactcggtactacatgccgatgtttccccggtggacctggctggccttgcaaagagactcaccgcaatagcaaaatcaggtcctttgtcaagccaaacccaaacattntggaattcaccctgcaggagtcctggtagagttggggtggcagagcaatatggtgttggtatgatgaatattggaggaaaaagcccttctaaagtgc

SEQ ID NO: 12266 - DNA, 440 bp, Glycine max
  modified_base (388)..(388): a, c, g, t, unknown, or other
  modified_base (434)..(434): a, c, g, t, unknown, or other
cccacgcgtccgcccacgcgtccggtttcacgtgcatcattttgttgatggagtcaaaatgtgacgcaagaaccatttaatttaagaaaaaaagcctcgaatcttattcaccgaatcacagttgtatgtagtctaaaaagttggcggaatataactctgttgtgtgcagtggtctctcacaagggaataatagtctcacatacattcacaaaaacctgagctttattgcgttgttgttgctgtagatggaaaagggtagaaccgtggtggtgtccgctctgcagtttgcttgcaccgatgatgtctcaacaaatgtcgtcaccgccgagaggctagttagagctgcacataaacagggtgcgaacatcattcttattcaggaactctntgaaggttattacttctgtcaggcacagagagaggagttcattcanagagct

SEQ ID NO: 12267 - DNA, 449 bp, Glycine max
ctctctccatttcccatttcttctcaactctccgtttcccatttttgttccggtcttctggactctctgttcctctccattcttctgaactctctgtttatctcaaaacttcatgagtaacggttcataaacacaaaacctttttgtgtttaggtccttttttggtggtgtaatggttcaatatattttttggcatgttgtttgcagagaaagtggaagaacacactttagctgcgatttttatctcgatcactaaaggtgcgacctttttgtttatctttatgagctttgtgtttctcaccatttttctgatgcgcaggtatgtattttcatgtgggtatctcttgcgttcaattatttatggatgttcctaacctctctatggtccagagctctcgatttctctcgatgatggtagctgtgacctttgtggtgctctcgatcgctaa

SEQ ID NO: 12268 - DNA, 378 bp, Glycine max
  modified_base (21)..(21): a, c, g, t, unknown, or other
cccacgcgtccgaccacgcgnccgcctacctatgcacatgctccagtcactgctcactgtgaatccaaaatatggtgctcatatcatcttacataagttgtagtgtcatctattaatttgtatcctgcacacctaattatctccattcctttcttatgttctaatctcttgtatttatagagggaaacctctttattatattgaatgctatttttatttcctaaaaaaaaaaaaaaaaaaaaaaaaaaaaaaaaaaaaaaaaaaaaaaacacaaaaaaaataaaaaagataaaaaaaaaacaacgataagactaaaaaaacaaaaaaaaaaaggggcggccgttctaaaggacccaagtttacgtacccgggcttgca

SEQ ID NO: 12269 - DNA, 480 bp, Glycine max
tcgcccacgcgtccggcgtttaactcggtgtcccctgattttccagttttctgtgttacattgagattcttaaaacaacagatttttaggacattgagaaaagtcatcttaatctgcatggaattttaccacgtaatacgggtaccaattcattttgtcaaatgtacctaatacgggcaccaatacatgctgtttgtatgcagcttagtatgtatctaatgagactaggtgtggtttaaggtatagttaggtatgtcttacgtactaataagatcatcctgccccattccccaaattaaagattttaagatttagtgatcttttggctttttttctcaattttctcatgtttggttctgtatttaatcaaaatccattcatccttgcttgtgagatgtgagatacaagtttgtcaatttcttttggtatagatgtttaaactataatctattaatatttcatattcttctatagaacacc

SEQ ID NO: 12270 - DNA, 452 bp, Glycine max
tttaattattctgacgttatcatgttaactagttgtgctcagatttggttgaagtgcgaggagctcgaatttatttttggttttttgaatatttctaattattaaattaattcttgtctaggccgcagatttatatgtctgatttcatttccttgtgaagggatattatcttaaagctggaatatggtatatttatgttattatgtttaatcttggttggcccttgatatgaaataaatcgtattgggaggagaatacttgtgtgcacccccatcctctgacgtagatgtgtcactcctttcggaccttggtcagaaaaaaaaatacttaccatattttgctgtgtaatgagtaatttggcttttgcttgaccatgttctcattcttactgaattgggttgctttgaattcttgtgtgtgacttcattattatgattttactatacattcaa

SEQ ID NO: 12271 - DNA, 454 bp, Glycine max
cccacgcgtccgcccacgcgtccgcccacgcgtccggaagggttgtggggtttgagttccgtttcgctcctttccatattccattttcatttccctcctctatttttttttggccagaacacgaaggaaggtggccggaagaagaatgaaggtgactggaacaaccttttgttacctcattcgaaggtggccagaatacgaacgaaggtgacggaacaacaaggagacaaacgattgacatggtgttgatggaccaaatgggtgcaaagattggcgcgactctctgacaaggattgtcccttgaatttcaacctaagttgcatttgggttggttatatttgatccagaacatcaaagttgtggacaatcagtatgaatacaaacatcgcaccacggcatactttagtagatgttgtgggtgttgatgctgaagttattgaacgtaaaacagtga

SEQ ID NO: 12272 - DNA, 311 bp, Glycine max
aaatatatgtgctcctaggacctgctgtctggactcttagttagtgagttcttgaattatgctgcttcaaatatggcatcttggagcctctctggcgttcatataagcattattgctggctactcagagtgtcatatcattcacgtgtcgctgatttgatctgagaccgatagctaccttcaaatatgatgcgatatttagactgcttatcgggtcatacatgtgattgctaagatgatctttgtgaataaccctgtgttactgatctgttcgtctcacgattgtctgtaccatatctactggatctgtga

SEQ ID NO: 12273 - DNA, 453 bp, Glycine max
atataatgtagctggaggcggtgaaagccatctgtatgggactgaagggcgtctttattagtctgaggaatggatttaacaatttcaacttttgttttgttcttgctctgctgttcttggggattttgcctattgcaaagaagaaatatgcaccagacctactgattgtgatatcacctatatatatttggctggggtttatgtctttgcagccacacaaagaagaaaggtttggctgaatttttacctggtcttctgttacaaatttaaatttagtcatatgatgttatttgagacaaacacttgcacaatgcacacaccatgtatattattatgttttatgctatgacattgaaatggatatcaatttcttatttcctacaattttgggttatacaagttcacataccttatatttattcgtaatctccaatataggcttcattttataag

SEQ ID NO: 12274 - DNA, 403 bp, Glycine max
ctgcggtctgttgattgtgttggtttgttgagtgtggcgttaacgtaatttggttttgagtgaagatgaggttgtgatgtggttgagtgagtggtttttgtagtggaaggtttgttacttttgttgttgttgttgttgttgtgttggtttattttgttgaagagttcggaacatagtcggcggacgagaaaaattggaatttttggatgggtaataaacttgggaggaggagacaagtggtagatgagaaatatacgaggccgcaagggttgtataatcataaagatgtggatcacatgaagctgaggaagctaatactagaatcgaagttagcaccttgctatcccggagatgaagaaaccgcatacgatcgtgaagagtgcccgatttgctttctgtatta

SEQ ID NO: 12275 - DNA, 470 bp, Glycine max
  modified_base (399)..(399): a, c, g, t, unknown, or other
cggagcatttcaagagttcagagctgggtgttgcagttcctggagttttctgcttttatgacatatctccaatcaaggtcaactttaaagaggaacatactccatttttacatttcctgaccaatatttgtgcaattattggaggtgtatttactgttgcgggaataatagattcatcgatatattatggtcagagaacaatcaagaggaagatggagcttggaaaatttacatgatgtggtcaaattcagcatgagtgctctaatttcctaattgagtctgcttttgacgtatttggttggctggtgcattgagtatcgtttataatatggtagcatatgcacataatgccaagggtaagcagagcagtaggttcagttgatgcatgaagtgtatttnttggatcatgatttttcctttcatttatagcaatttcaattcagttgctactttggtggctttttaatata

SEQ ID NO: 12276 - DNA, 447 bp, Glycine max
cccacgcgtccgcccacgcgtccgccgaaccattccactccctcgcaaaacggtgtcggggcgatcgcgttcgttcggttaaactcgcgcgttcagaatccttcggaacaacgctcttcgcccaattccctataattcactcctctctctctctcgctttctctggtaacctcctcgcgacggtggctcttccgcattccgccgccgccactgccatcgccgttgccgccgccggaaaacactaatcaatagatggatgattctgcgttcaaacgaggcggtcactttaatcgaacttactcgtgctcttctcagagagatgtctgttacagctgtggcacttgtggttatgagctgaacctatcctcctcaaaccggaacactgcatccattggatctaaatacgggaagtccataaagcgaggtattatatcattctttaacatt

SEQ ID NO: 12277 - DNA, 345 bp, Glycine max
cacttgcgctgttctaataggccatactctgtactgcaaatgaataccaagggggtgctggacctacttatgtccttggccactatacggctgatcttctctgaggcctgacccaagcatgcatacgacaatcttgactgcatatatggaaagactagtgcgaatagcatcaatgactacatgtatgaatctactagctattgcggctgatactagcatggtgcaatgaggaaccaagttactgtatgccataaacgccgatgcttcctcccatacacgataaccttaggcagcatatctaactatatctgtaacgacgcaaccgagagataatgactcacagat

SEQ ID NO: 12278 - DNA, 464 bp, Glycine max
gaaatgatatacgtatacccattaatcatgatgaaatcttcttcacatctgggtgcaatagtcctattgatctttctgcttactgccctaatcacttcggatggagtttcattctcttcattcctaaagcaattaaaacagaagctggagaagagttctaccctaaaagatttcctgaaacccaccactataggggatatttattatacgttgaatttcacagaaatcttctcttccgaagagagaagcgcaccaccggtgtctctcatcaaagattacttatcaaactacggctacattgaatcctctgggccattgagcaattcgatggaccaagaaacaataatatcagccattaagacctaccagcaatatttcagtttgcaacccaccggcaaactaaacaacgagacttttcagcaaatgtcgttcctacgatgtgggcgtcccgacattaacattga

SEQ ID NO: 12279 - DNA, 190 bp, Glycine max
aaaaaaaaaaaaaaaaaaaaaaaaaaaaaaataaaaaaaaaaaaaaaaaaaaaaaattataagaaaaattaggaaaaaaaaaaaagaaaaaaaaaaaaaaaaaattggtgtggcctttttaaaggatccaagcttacttacccttccatgcaacgtaatagcttttttatattgtcacctaaattaaatt

SEQ ID NO: 12280 - DNA, 401 bp, Glycine max
tctataagttcacggtcagttctgaaaaatgggttccaaggttttgcttgttgtagttgtgttcatagcggctatacttctgatctctgctgaggttgcacccaatgaatacgaaaattttaacaaaaaagatgggaagcatgctccaaatgggttatatgatagcaaatggggttacggtggttggggtggtccttggtatggcggctggggtggcccttattatggtggcggctggggtggcccttattatggcggtggttggggcggtccctggcgtggtggtggcggtggtggctggggaggttggcgtcgacctaatggcaaccctcacaactaagaagaaaacttgctaaagcttctttacgggtttaggttttcgcaataaataaaactttatg

SEQ ID NO: 12281 - DNA, 388 bp, Glycine max
  modified_base (9)..(9): a, c, g, t, unknown, or other
  modified_base (19)..(19): a, c, g, t, unknown, or other
  modified_base (21)..(21): a, c, g, t, unknown, or other
  modified_base (34)..(34): a, c, g, t, unknown, or other
  modified_base (63)..(63): a, c, g, t, unknown, or other
  modified_base (69)..(69): a, c, g, t, unknown, or other
  modified_base (85)..(85): a, c, g, t, unknown, or other
  modified_base (88)..(88): a, c, g, t, unknown, or other
  modified_base (99)..(99): a, c, g, t, unknown, or other
  modified_base (106)..(106): a, c, g, t, unknown, or other
  modified_base (125)..(125): a, c, g, t, unknown, or other
  modified_base (127)..(127): a, c, g, t, unknown, or other
  modified_base (187)..(187): a, c, g, t, unknown, or other
  modified_base (196)..(196): a, c, g, t, unknown, or other
  modified_base (205)..(205): a, c, g, t, unknown, or other
  modified_base (217)..(217): a, c, g, t, unknown, or other
  modified_base (222)..(223): a, c, g, t, unknown, or other
  modified_base (225)..(225): a, c, g, t, unknown, or other
  modified_base (236)..(237): a, c, g, t, unknown, or other
  modified_base (251)..(251): a, c, g, t, unknown, or other
  modified_base (256)..(256): a, c, g, t, unknown, or other
  modified_base (258)..(258): a, c, g, t, unknown, or other
  modified_base (261)..(262): a, c, g, t, unknown, or other
  modified_base (269)..(269): a, c, g, t, unknown, or other
  modified_base (290)..(291): a, c, g, t, unknown, or other
  modified_base (321)..(321): a, c, g, t, unknown, or other
  modified_base (340)..(340): a, c, g, t, unknown, or other
  modified_base (343)..(343): a, c, g, t, unknown, or other
  modified_base (352)..(354): a, c, g, t, unknown, or other
  modified_base (361)..(361): a, c, g, t, unknown, or other
  modified_base (373)..(373): a, c, g, t, unknown, or other
cccacgcgnccgcgaggcncnccagaacccacgncaccgccgcaccagagagaggagggggcnggaganccagaagggagggaanaangccgaacagcngcatacngaggagcaacaagaccccncnaccgagcgccaacaggcagcacaccggggagcacaacacgacaacaagcaaacaagggancaagagaanggcgaaganggccagggaagnaaaanncnggccaggaagnnaccagaaagcaagnacccngnagnncgagganccgaaagacccgcgaagcagnnggaaaacgagaaagcggagcagaaaaaaanggggaaaagacccaggccnaanaaaaacagnnngaaagangccaacggagangggaggaaaggaaac

SEQ ID NO: 12282 - DNA, 215 bp, Glycine max
gacgaccgtaaccagacgcctacgcaaaaacagactgcattcagtggacagaattcagagtatggagctgcaagccaaggagcagaaattgactagtatatatgagtgcttctatgttagaactgacgcgacaactcattaaagcagctacccatacaggcatattgatactgtgcctgtccctgttattcgcccagactgcaatgcagatgatt

SEQ ID NO: 12283 - DNA, 459 bp, Glycine max
acgcactccactgcactgttgttctctctcgaacttatcagatgagcagagaaaatacgcgagcaatggcaaaggaagaagtctgtgatgatggttcctccagtgttgagaatgtggatttagaatctcatgctcgaattagtctcgacaaggataatggcttgggaacctgtcgtgtgtgccaatgtaccgaatctgataaaaaggcagatgccgcactagaatttttgggcatcattccaggttcagaaatgtgtaaaaccaagggggaagtgggatctgatggtggtggcgatggaattcccgaaaatacgtctcttgacagaaataatgagaaaaatgctggtatggtggaatttgtaagccctaatggggaggttttcatttgtaaaagcgatttggaacttggtttgtgtcatcaagataaattagttgaacttggatgttcttgtaaaaacg

SEQ ID NO: 12284 - DNA, 390 bp, Glycine max
ctccacgcgtccgtccatgcgtaccttatcttatgagcagagaagatactccggcaatggggcatgatgaagaccgtgattatggttcctacagtgttgagaatgtcgatttagaatctcatgctccaattactctccacaaggatcatggcttgtgaacctgtcgtgtgcgccaacgtaccgaatctgatgaatctgcagatgccgcactataatttttgggcatcattccaggttcagaaatgtcgtcaaccactgcggaagggggatctgatggtcgtggcgatagaattcccgaaaatacatctcttgacagaaataatgagaaaaatgctggtatggcggaatttgtaagccctactggggacgctttcatttatgtaaaccgat

SEQ ID NO: 12285 - DNA, 477 bp, Glycine max
cccacgcgtccggcggagagttgaagagcaagagctagggaaagggacaaacagcccttcggagatctcaagggcctttccctcgttctctccgaactctcactttgtcttcttatttgctccttttcttctctcttccctccccaattattcattccctcatggccaccacgctttattcaacgccttgtcgttcactggctacttcatcctcctcttcctcgtcgttgcaaccctgccctctgtcgtctaacctcgcttaccctcaacgcgtcaccttctcacagcgctttctcgcctccaaggtctctctcaaatctcaaccccaaccgtatcagattcccgttcacacccagcagccggaaggtacagtgacagctgctgtgacccctgttgaaaatggcacttctcacaagcagttgaaggctgacttattgtctcttaagtccccagatgagtctgaagacggttttgaaa

SEQ ID NO: 12286 - DNA, 169 bp, Glycine max
accacgcatccgacggcacagttcaagaactctaactaaattaaggaacatacaactccttgggagatctggaaaaccattaacgtccaactctccctaactctaactaatctttccatactctgctcctctacttctatcttcccttaccaattatccataccctaat

SEQ ID NO: 12287 - DNA, 179 bp, Glycine max
cctccttgtactactatttgtttttatttaataataataataatttcatctgggaaaaatgaaaaaaaataaaaaaaataaaaaaaaaaaatttagggcggccgttctacaggatcacatgcacacgtccgcttccatgctacttcatatcctttttatagtgcctcctaaattcaatt

SEQ ID NO: 12288 - DNA, 472 bp, Glycine max
ggggcctatgtttcaaccgacgaccttgacatggaacttgattggagtggtataattgacgagtgatactttgccatcattgaactttcattacggggagtgtagtagccatgctgagtattccaaagtattcatcaaggatcaggagccattggcagacacttttgaaatttcttgtcctgaaaatgtctggcctcttgatatgactgggcaacatggcgtgggtacaaattcaggggaagatggagacagtggtgagctgagcaatattggcaattttgatctttcatcgaataatatgaatctggatctttactgggatgccaacgagaatcttccgatggatgatgatggatttttggaatacaatgatattgcaattgggaatggggataatcctaccgaggctgatctttctgcaaatgccatgctagatgagtatgctgcactcgctgatgatgatatttacaag

SEQ ID NO: 12289 - DNA, 398 bp, Glycine max
tgttgacatgcaagatggaggatacaaccaagatgtacctcaaggccgtggtcgtggccggggcagggggggatatcgtggaaggggtcgtggcttccgatcgaatgggccaatccaagcagctgcctgaggcaaccagtaggccgccattagtgcagtgcagatgacttgactagtgaaagaaagccatgtctaattttatgttttcttttatttgttcaattttcttcatttcccccttctttttctctggggccctgaagaactgtaaggcattttcttcttacagttttatgtagacttttagttttcagactgctgccacataaggcggcaaccctttatgttttagaccttggtcagatgcttgaacagttgtacttctggtttggcccctg

SEQ ID NO: 12290 - DNA, 409 bp, Glycine max
cctgtttgtgcttttcggtttgtggaacagagtagaacatgaaacagaagatagttatggtgtggctttgaagaagctatgagaacaaatggctggagtgacaaaggaggaagagaggggtagtcctagttggggtgcttcattttttacgcagacaacagaggatgtggctagagctgttgccactgctatgaattctcagaggccatctgtggtatattcattgaaaaatgatcatggtggcagccaacttcaaaggctgcagtatcaagttacgaaaatgataaaaggattttctagcccttcagaagttaaatattcaaattacaatccggaaatcttgacaactcagaagcgtcaatgggcttgaaactttcagttgcagtacacggaccataagtcttggaag

SEQ ID NO: 12291 - DNA, 202 bp, Glycine max
acgaataaacatacaattaacaaactaaaacacttttaaatatctatacaaataatataaatataaagaaaagtaaaaaacttaaagatgaggttaaacaactaaataaataaactaaaacatttctcacatacttatattttctaccactatatttccaactcttacttctatcattatttcaccaaatttcaatacaatt

SEQ ID NO: 12292 - DNA, 344 bp, Glycine max
cattcctgaagttaccccattattagtttatttggttggattggtggttaaaaaagtatctgcatggccgtgttggatgttggacagtttgagaaatgccatggcattagcaaaaaactatatataagattggactttcgtaggtgaacttaatgtgaactaatccctataattatacttataatattcttattcattgctgcagtggtttgacacagacaaattgccaaggaatgaatgtattgtacgagaagtacaagaatcaaagtttgtcactttactgaaagacaaaattaaagaaagaaatatatgtcaactatatttatgagctactggatttttaa

SEQ ID NO: 12293 - DNA, 348 bp, Glycine max
cccacgcgtccgaatttgtcccttttgtgtttttctgcagatgtctcggtgggaagtaggggatgttcttgttcttggtcttgattcgtgaaagaagaactgaaagcatgaagctctccttctccgtcccatcatccaaaccccactcgaagcccaaagccgtctccaacaccttcgacgacaattccacctcccaaaacgacaccggcggaaccaaatacctcatcaccgaattcgacccttccaaacccgcttccacctccgtccccaaaaccctaattcccccaatccaaaaccaatggcaacccttcaagaagaataagaaatttcaacttcccaaccgccgcc

SEQ ID NO: 12294 - DNA, 287 bp, Glycine max
gaacaatgcatggaggatgccgcgggccattccgacaagcaccttttaatgctactttcatggattccgcctatcaattgccagcttcttattcaataattggggtttcaccgtttgtcccttcggccagtcacacctacttcgcttcctttggcatgcccgtaatgaatcaagccacatcaagatcaacccttgaacaagtgaaccaatttgcttcacaagggtcttaatggcaaaaatggcattcatctgtataaggagcccatttttacccttattattaccca

SEQ ID NO: 12295 - DNA, 132 bp, Glycine max
gtccatgagacttgcagtatggtatctctttgtttcctgttggggtcatgagttatgtgtttggcttgtagagttggatggcgttttgaggatctccaaggcttaatttatgatggcttgatcttgcaggag

SEQ ID NO: 12296 - DNA, 437 bp, Glycine max
  modified_base (364)..(364): a, c, g, t, unknown, or other
  modified_base (389)..(389): a, c, g, t, unknown, or other
gatattttagcaggccaatcaactcacaatggtcagcttaatggaattcaatgcaatggtttagttgaatcaatctatatgaattcttcatgtgacatgctgggaaatatagtgcactcgttaaagattgaaggtccatattctggtgtctgtccatccaatggatctttaccttgtataaggtattcagtttctttggctgtagagggtgagaatctgaaagaagttattgaagtttgtgatgagtttgagtttgaagtgggaattggtgctgtggtttcctatgttgaagatgttgtgatgcagatgtctgttggtcagtgcgcttatttctcttcaaacttacttactactgagttgattnttgcttcagctggtgattcagtcanaatgctggcctcgttatcttctaaagactggtgtatggaatatgaaat

SEQ ID NO: 12297 - DNA, 305 bp, Glycine max
acggttggcggcaaggcaaatctgcattgcgatggcctacgaagctcttagtctttgcgcgggctgggaccctaattttcggcgtcgtcggggccaaagccgatatttccatcgcaggaagcactccagagcctgatacctacgacatcaggatccaattagatcaactcaattccaagatccaaattctcgagtctcaaatcagcgaaaagttggaagaagcgaataagaaagacgaaactatagcagataaagaaaagtccattgaagatgaatcaattaccatacaatacttgcagaatgag

SEQ ID NO: 12298 - DNA, 345 bp, Glycine max
cagaattaaacctgtgtcttacaatcttgcaaatcacatgagggaaaaatgataggaggtgtggtgtgtcttggatgaaattgtgacccttctagtcttttttgtcacattatggcatgtggggaaatgcatctaagttacttggctattttaacttctcacattgttggcgcttcaaatggtcaaattccaaattgcaatggttttttggaccatcatatataccacggcatgaacctttcggctgtgaagaaattgtcaacattaggtcattacaatgttgggccttgtcaatttgtcatcttattcatgaagagttctatttgacttcaaactttaaacaca

SEQ ID NO: 12299 - DNA, 405 bp, Glycine max
  modified_base (286)..(286): a, c, g, t, unknown, or other
aagccccattctatattcttttgttaatttatttgccatgccctttgggatatgtgtgcaatttgtgctggctgtatggtatgaatacaatacaagcaccttggattataatgcctcgacccttctaccaaagtggaaggatcaaaatgcttattggctccaagtctatgcgaattaggttcctttattcgcttcaaattcacgatgttgtacaatcgatttataggcatagtaatacataatattataaccaatgaagaataaagagaatatattctcatatatngggtaattgctcatacctgtccatagaattgactgtaaccagggtttttaaaactactgaaccgatcaaaatattaaaggttcatgacaacctctagcctgtgtcctgtgtccctttaa

SEQ ID NO: 12300 - DNA, 408 bp, Glycine max
cccacgcgtccgcccacgcgtccgcccacgcgtccgcccacgcgtccgaaccaacttaagagacgttgttcggaatccagctagaacttcaaataatgcaaatttaagtattccaggaaatgttggttcttcatcgcggacaggctcaaatccagctgtcaatccaccacctgcttcggcgtgggtttctcgccctaatcctcagcagtatccgcgcagattatctgaatatgttcgtcggtccttggtttctcctggtttggaagctgctggaagttcaagcaatagttatactcccttccgtggtcctcctacttcatctgaatcaaggggactgtcatctggggtaaacccgttcgagaagcaaagtgatagtgaatttggaattccatattcggtacaatcttt

SEQ ID NO: 12301 - DNA, 234 bp, Glycine max
cccacgcgtccgcccacgcgtccgcccacgcgtccggtctgatgcaccctctcaattgagaggctcagctagtgcagggagcttggaagctgcaaaccatttaaatgcaatacaagtagactattctgaaagtgatctagagtcaatggattatgctggaatgtttacaaatacccaatggacttcctatgtggcttcacattacaagaaacaagcttttgtgatgtatttgca

SEQ ID NO: 12302 - DNA, 303 bp, Glycine max
gggagaggaaaaagagcagcctaagaatgaaaccgagaagaagcccgaggaggccgccgcagcccccaagaaagacgacggacccatccctgtcgtttacaaactcgacttgcattgcgagggatgcgtcaagaagatcaaacgcacatgtcgccacttccaaggtgtggaaaccgttaaggcagatctatcgtcgaacaaagtgactgttaccggcaaattggatgccgagaagctgcgagataagatcgccgagagaaccaagaagaaggttgacatcatctcagctcccgccaaaaaaga

SEQ ID NO: 12303 - DNA, 393 bp, Glycine max
cagaattaaacctgtgtcttacaatcttgcaaatcacatgaggaaaaatgataggaggtgtggtgtgtcttggatgaaattgtgacccttctagtcttttttgtcacattatggcatgtggggaaatgcatctaagttacttggctattttaacttctcacattgttggcgcttcaaatggtcaaattccaaattgcaatggttttttggaccatcatatataccacggcatgaacctttcggctgtgaagaaattgtcaacattaggtcattacaatgttgggccttgtcaatttgtcatcttattcatgaagagttctatttgacttcaaactttaaacacacgtgcaatggtaaagcactgttgatagtgaaacagcaatgattggtgtc

SEQ ID NO: 12304 - DNA, 418 bp, Glycine max
aagaaaaatgttaggaaaagagtgctacacaaacccgccatcaatcctaaattcctctagtgggggtggccatgttatcaatatcggtggtgttaattcttacgtcactggttcccctctctccatcctcgccataattctagtctctgatatttttggatttaaaccaccacttttaaggaacattgcagacaaggttgcagctactgggtattatgtcgtggttcctgacttcttcaatggggaaccctatgatcctgagaatgtgaaaaggccgaaagatgtttggttaaaagatcataatccggaaaaaggtattgaagttgcaaaacctgttattgaagccttaaaaagtaaaggtgtctctgctattggagctgctggtttctgctggggtgctaagaccgttaccaacctc

SEQ ID NO: 12305 - DNA, 261 bp, Glycine max
ttcactccaaaagcgagatgatctacatctttcaactctccttgcatagagtgcaagggcggggatcgcaattgaggagctggaatgctcatttgtatcgaaatccaatacgaagtatatactgataaatggtaaatatatgtaatcacttatgtttttgtcaaacaatggtcaagtaatgcaaacaactgatgatgatatgctccagtatgtcacaccaccaaattcgtgattagttactagttagacaaaacatgtaca

SEQ ID NO: 12306 - DNA, 246 bp, Glycine max
aacaaacacgacatacgtattactcacaatcatatgactcttaataatcatcgcccaacattcacattaccggtaatttttaaatcatcggtcgaacaacacaactaatcatacctatcaaaatcacttaatatcacaaaaacatatacatccacactacaaatctcaataccacataaacaacacaatcaactcatacttccaaatcatccaatctaccctttataccaacaataccaaatgcaa

SEQ ID NO: 12307 - DNA, 452 bp, Glycine max
  modified_base (430)..(430): a, c, g, t, unknown, or other
ttcagtgaagagcgaaaaaaagcgatgaagaagggcgaaaataagggccggactcggagcttggcggtggatccgaacgtgccccgatgggtttgccagaactgccgcaaccctctctgcatcgtcggcgccgattcttacgccgacaaattcttcaacgatccttctcgctccgggatgcaagggtcgtccattcatggtgccagcagtgtgctgagtacgactaaaatggacaattcatatgtggtgttgcccaagcagagacctctggctcagggaaatgctcctcggccacgcggtgatgccgctgcacagcctgggaaggcgatggaggagtcatttgtggttgtgtacaagtctgaatcggggattgatggaaacggggcgcatttgttgggcacaggggctgattctggtggccatttgccgnctcataactctgggtttaattc

SEQ ID NO: 12308 - DNA, 407 bp, Glycine max
aacaaacaggagatgaggagaatcatggctctaatgagcatcgtgaagatgcacatgagggagaagatggggatcatctgtcgaaggacaaaggtgggcagaggtatagaaatcaaggaagatcaagaaaacataaatatcgtgctggaaatggaatgggccatggaagtacaccatcaactcatgctgccgaagcatcgaagccaccccctggaccaagaatgccagatggaacacgtggcttcgcaataggacgaggtcggtttcctgtccctgcttcgaattagcaaagattggacgccacaaatgagggattgtatttagcagtattatgtgttcgatgctttagtgatgtactaggttttacttgggtccctatgcgtgttcgcttgagtcaacatgggttt

SEQ ID NO: 12309 - DNA, 103 bp, Glycine max
gctacgcgtccgctatgagtcgcgctacttcttgatggaccaggtcccacaggaacacaggggggcaaatggattcgtggtgttgaattacagcataacggtg

SEQ ID NO: 12310 - DNA, 232 bp, Glycine max
cccacgcgtccgaccacgcgttcgggaggtatcaatggccaaagcgttgaaaccgagtttaaggagtgagttcatcgctcagaaaatgcactgagaggatattttcagcctgaacgcgaacaccgttatcgtcggcgaagatttctccgtggacgacctatttgacttctataacggctctctgcacaacgaacaccaacaagagtgctaccaagagaaacagattttatct

SEQ ID NO: 12311 - DNA, 333 bp, Glycine max
agcagggccagaagaggagaagggtgcttctttctgattcagattatgcatcttctggatcatgtgattttgagtttaccatatctgaagaagagagagaacaggtgagagaagccaagagattgtgtggaaatttgagaaataacttgaggagttcatcccatctaataaataatgaagaggttggagtccatgagtatcaacatccgcagcggaagcctccagctcggaagggtaaggaaaagatagaagaacctctgggaagaaagggtaaggaaaaggtggaggatttaaaaagtaagggaaagcaaacatgtggaatttgtctatctg

SEQ ID NO: 12312 - DNA, 137 bp, Glycine max
attacatcatgccataggaaaaatatattgttcgaacaaaacagcaattggatcagtatacgtgactgtttcacacctcttgagtaacgagttaccaaattttctggttgatttatctgggctagtaaaaaaacaga

SEQ ID NO: 12313 - DNA, 330 bp, Glycine max
acgcatgatagttctcatcatataaaagttcctcttgacaagagttctcaaatgctaggcagcaccgctgagaatcttgggggaaggcacgcattgaagcatataaatctactggactatttaagaattcataatccaaacttaaatgactgctcttgacacaaaacaaatgtctaagcgatatctaccatattaaaatcacttacccacattatacaaatccctacatatgcatatactccagacttaaacatgatgagtggataaaccacactcaacctgaacttcacactatgacactggcacaacatcttcagacattcaccaatc

SEQ ID NO: 12314 - DNA, 345 bp, Glycine max
cccacgcgtccgaagccagcagatttctgatgcatctgggtcaattggacgctcaaaaggagcgtcagtagtttcttctgaacagcaaatatctgttactgttgtaacagagttcgtgcgttggaatgaagaagcaatctcaagatgcaatctctttgcttcccagcctgctacacttgcaacccatgttaaagcagtgtttacttgcctgctagaccaagttagtcaatatatagctgatgggcttgaacgggcaagagacagcctgactgaagcagctaatttgagggaaagatttgtgttgggtacaagtgttacccgtagagtggctgctgcagctgcatc

SEQ ID NO: 12315 - DNA, 438 bp, Glycine max
aacagccgcaactttcaactaacacaatatagcatcatctccgatgtaacaccttccgtggaggttacaactcacatttgaacttcaaaaatatctcaaccacttcactttgcaagacgtacgtgcagcatcatcgatcagaatgaacctctggatatactactggttctcactcgatttcaatccattcacaacgcatacgatcatgaacactagctcatgcatacggatatcaccctcatcaacttggaccacccatatacagagagcttattgcaactcattgtcatgccatcatgcctgatccaatcgacagtcagagccttattagccaatcacgctctcagcatactcttcaggtccatcgcgatgaaactcaacctcaccactggtatcattacttcactcaaaatctctgctcgccttgtcgatatcttc

SEQ ID NO: 12316 - DNA, 423 bp, Glycine max
cagagtctagggttttgatcgtccctcttcccaatttcagggtaagctttggatctcggagcggagccttacccatcgtttctaaatcttcaaggaacgctttgggacactaaagtttccaaattgtagagaaaaaaacagaatgagagggaagacttgaatcaggattcaggggtgagatatttgaggatggttacttatggtgaaaggtgggctgataaatagggagtaagcatggaaaatttggtgagcaaatagtttgatctgctttgaattttgataggctcagagattacaatatggaggatgagagtgggcttgagctcagcttgggtttatcttttggaggctcgtcagccaaacccaagggtaagaatggtagctcctcagatgctagagatgaagaagttggtaggggtggca

SEQ ID NO: 12317 - DNA, 293 bp, Glycine max
agaaaacaagaagatgaatttgggtccgggtatggtggaaggaaggaggagtctgagtatggatctgggtatggtgggagaaagcaagaatctgaatatggatccgggtatggtggaaggaaggaagagtctgaatatgggtcaggatatggaagaaggaaggatgaatcagaatatggatcagggtatgatgggagaaaggaggagagtgaatatgtatccgggcatcgtagaaggaatcatgaatcttgatatggatccggatatgagtgaatgaagcaagaatctgaata

SEQ ID NO: 12318 - DNA, 395 bp, Glycine max
cttcctcaacacgtcaaaaattcatctcatctatctgtagatcggagaaaccaaaaggaaggagatggagttcgacgagaggaaagcaatgatccgcgacgtggcgttacaagtcgttttcatctcgctcacgattttcagcttcctctggatgcacggcatccctcaaaacctctacgccaagctccgccaccgtcccccgaacccacgggccgtgcaagccaagcgccatttcgtcaaaagcgcgcagctcctttcccaagccagatgatccaaaagcgcttcctccgcaacttccctcgtcaaacaagccctatccgatgcctagaaagccatcgcgctcgaccccaaagactccggcttgcaccttcttaagttcattgcgcttgaccttc

SEQ ID NO: 12319 - DNA, 408 bp, Glycine max
acggagagagagagattcctatttcctagattcgaattcgattcccatttctcactctttgtgtgcggcatggcgaagcctcgcaagcgcaagaacaacgaagacccgaagcccgaaaactccggcgccgtagttcaccaccaaaagctatgcctctacatcgacatcgacaaacgccaagtgcacgggtacactgaattggagattgcggtgcctgagattgggatcgcatggttgcacgcggagaatttaaggattgagagtgtttgtggttacggcgagccaacggagttcgagtattacccgcaccatcagcagcagggggaggatgagaagaaggttagctccgtgtgttctcctagctctgctgccgatgctgctgtctcagtgtacatgtccgctcttgag

SEQ ID NO: 12320 - DNA, 334 bp, Glycine max
ctcacgcgtacgcctagatccgttgctcgtgcatcaaggaaagtaagagtttaaagtttgagctctgtttttcatatgcacaaagcgcagatctctgtaatataatgtaatacatgaaaatcaaagactaggatgaagttagagatgctttcgttgaggacgtttgaaaatcatttttgctgtcagtcctagataacgatttgagtgcttagtcataaaccaaaattgacagccatagggagaaagtcaagtgtacgctcaagttacttgttacacttgcatttacctgtcttactaattcgcaagccattctaatctattggttcaagatatc

SEQ ID NO: 12321 - DNA, 298 bp, Glycine max
aaaaaaaaaaaaatacaagttattaaatgatgttattaaataagactataaataaagctaaatgtacggaaattacattctaatgtgaaagcctaatgacatacatttctatcactggcttattcagacaataaccttataacgttgaatcttaatattgaccccaatacttttgtgtttctttctaaatgcttgcatataatatcaaatcatatatcttcttcttcttcatataatgcaaatttaaacaaaaattcaattttaccaagaattaccataaattctaaaacatatattt

SEQ ID NO: 12322 - DNA, 406 bp, Glycine max
cctgttgagtctgcaaaattcgtgcttgatctcggaggctcaatcctctgggctgactgtgggtccagaaccaccccatcttgcacccttgccccaatcttccaccgttcaattcgctgcctcacggcaaagggtcctgaaattgagacacatagatggctctcgagtctcgcaaatcccatagatcaagatcagccgtgtcaaattcctgcagagaacagcatctcggggaaaagggtcaccgaaggagagcttgtggaagacttagtgattaatcgctctcacgagcttctcttcacttgctcacccactcttctcttgaacgggttagctaccggtgccaaaagcatggtaagtcttgatcgatcttgcacttctttttcggctcaggtttttcactcacttg

SEQ ID NO: 12323 - DNA, 399 bp, Glycine max
cctgttgagtctgcaaaattcgtgcttgatctcggaggctcaatcctctgggctggctgggcatccagaaccacgcgatctggcacccttgccccaatcttccaccgttcaattcgctgcctcacggcaaagggtcctgaaattgagacacatagatggctctcgagtctcgcaaatcccatagatcaagatcagccgtgtcaaattcctgcagagaacagcatctcggggaaaagggtcaccgaaggagagcttgtggaagacttagtgattaatcgctctcacgagcttctcttcacttgctcacccactcttctcttgaacggtttagctaccggtgccaaaagcatggtaggtcttgatcgatctcgcacttctttttcctctcagggttttcac

SEQ ID NO: 12324 - DNA, 211 bp, Glycine max
acgtctgtttaatatacaaaattctagctttatttctgacactcaatactacatactgacgctggtttaaaatcaaggtgagcttccaaactagccccaacattacaccgttcaatagactacgctcacatcaaatacttctataaactatacaacatccagaactcttcattatatcaactcctatatattactatcagacttaccaaat

SEQ ID NO: 12325 - DNA, 434 bp, Glycine max
gttagttcacacactaagttctgaaaaatgagttccaaagtttttcttattctacttgtgttcgtggccactatacttttgatctcctctgaggttgcacccgatgatgcataccagaattttgacaaaacagatgggaagcgtagtgcaaatggggtagatgaaagcaaatattggcgtggtggctatggtggctggcgtggtggctatggtggtgggcgtggtggctacggaagttggggtggtggctttggccctaacgaacataatgaggctgggattgatgctagccctcacaactaagaaggaaacttgctaaagcttatataggatttaagttatcgtaataaataaaacttcattgtaagggtagttataatagatgtggagatctttcttcgctctggtcatataaaggagtaatacttttctat

SEQ ID NO: 12326 - DNA, 203 bp, Glycine max
cccacgcgtccgcaatcacagactcaaaggtgtgcagttattattatcattatctacatatgtttgcgaagctgcttcatctgtattattacgcagatcagattcaggtccttatcaccaagatccaacaacttctcaaccacaacgagttgctatttccttcgattcacgaacccagaaaattaaagaattaatagagatat

SEQ ID NO: 12327 - DNA, 412 bp, Glycine max
  modified_base (395)..(395): a, c, g, t, unknown, or other
gaaatttctacaagcaaaggccatgtgtagttgttgcaattgtagggaagcaaaattggacgatgatatggagagtggagaccaattccagaaattccattgagaaatatctacccccatggttgttaaaatcgcgctttaactcatgaaatcgtatgattttacgattccaccaagggtcggcgagttgaatcggaagtagaatcgaaaccggagtagactcgtccgatttagcgcagactcgggcgagtttaggtagactcgcgagtctgcgacgagtccgcaagttcatgaaattttcaaaacgacatcgttttgaagcagagctactcccttactcatcatgagtcgtgactccgtggccgtgctgtgctgaagctgctactcaccgctgntcactcgcatcgtcatc

SEQ ID NO: 12328 - DNA, 169 bp, Glycine max
tccacgcgttcgcacaaatgatgcactagatccagctccagctgacatgtgcttggtgcttggcttggagcagtcaagggttgaaattgctgttcttctgaatgagttggcgtacttaaaatatgaagcacctcaggatacttctgccacagctgaagcaattctttca

SEQ ID NO: 12329 - DNA, 209 bp, Glycine max
gagatgcgaactcaatgttttatggacactacgggaaccatacataccactccctcacggccaggctactcactcagcacaccagtaatccccaaatccaattgcatcctacatgttacccacatgccactgatagcaaatcttataccaccttggcacatgtgtaacttcacattcgcctacatccaaccaattgattgtagcatctt

SEQ ID NO: 12330 - DNA, 252 bp, Glycine max
  modified_base (212)..(212): a, c, g, t, unknown, or other
tggaattgaggttctgggattttgctatatatgaattgaagtggagatgatattggtgtagggggcttttcaactggtttggtgagatgaagggtgttctttccatcagcttcttgttttgttgcttgctgctacttttggattcttcagtttcacttcctctatgcgttgattcaagggcaccctttaccttgaacaagacacttgggttntgtccttacaatggaagcacgtgttgcaactccacacaag

SEQ ID NO: 12331 - DNA, 270 bp, Glycine max
caaatattctcatttggggaaatcgtctataatacttatcccacccattgtatcttccgtgcttgtgcttttgtcacgaagattgatgcttacataacgccagcttcgataggaatacgcattaatgcgtgcttctcttgaggcatgtaataagaggtgtcccccctttgaggtcaatcagtcctttgtagaatgaacgttcacatttaccctgtgtcatgatcttcaaatatcttaatgacaaataaaacttatactctgatactaaac

SEQ ID NO: 12332 - DNA, 306 bp, Glycine max
  modified_base (73)..(73): a, c, g, t, unknown, or other
cccacgcgtccgatcacagacatccaatgacgatgacgagttgtgtcaacctgaaaatgtggcttcttaactntgttatcttgtttagtatggtttccttgtcccatggaagactaaatgctcaatttcaagtgaaagcagttaatctaagtggttggctcgttactgaaggttggatgaaaccgtctctgttcgatggcattccaaaataagacttcttggattgaactggtcttcaattcaagtcttggaataccaggaaatatttttgggcttaattccgaagaaggaccattcttagttcca

SEQ ID NO: 12333 - DNA, 432 bp, Glycine max
ggcagatcgagtttccaacttggcatgggccaaggatggacaggctctgctgtacgttgggacagataagaaaatgaggccttaccggtgggtggattgttgttgatctatcggtggcttggtgctgtgatagaattgaaagaagtgcaaaatttatatacagttccttggttgcttttagtgatgttcttcaatcagaattgaagtttcatcttcgtaacctatgttaaattagttttgattgaagaatattaccaaaagcacataggaattgcatatgagttgcgtcttttaaagaatcccttagtttgtgttttgcttatgattgctagaattgaagttcatgcgatcttcctcaatctcaagtttctgcttggtgccacagtatctactacagtctgattggatcaactgatgaaagatgtttgcttt

SEQ ID NO: 12334 - DNA, 383 bp, Glycine max
gttctcaggtccatggatctcttgcgacaccacgtttctcccatcacttcgtagatgtctgtgtagccttttatcttctgaactatgtaccttctgttgctcatcataaatatgaggcttagtggtacttctttgtacagcttcgcttttccttcaagatttgtgtccagaagctccattaccctcattaactgcgccgcataagatgttcctctcactgtatcttagacaaaatttaagcaatttaaggccgagatgccattttccacgcctacattaaggcattggtggaaaatccagactatacaaaaacctatgcccaaagttggaagaatgagctggagttcaaaatccaacttctctcggtgagttttcattccaag

SEQ ID NO: 12335 - DNA, 245 bp, Glycine max
aaaaaaaaaaaaaaaaaaaaacttaaaaaattataaaaaaaaaaaaaaaaaaaaacgcaaaaattgcaaaaataataactcacatatcctaacacctaaatacaatcaatctcaactaataaatacaacttcaaatccttacaaaaccctctctctacccaacttaatctccttccatcacattctcctttcttcttctaaccctcatatctataaaccccacacctatcacccttcctcccatt

SEQ ID NO: 12336 - DNA, 446 bp, Glycine max
  modified_base (392)..(392): a, c, g, t, unknown, or other
  modified_base (423)..(423): a, c, g, t, unknown, or other
attcagtaaggggtgaagaggttgaggttgtttcatttcatgctcttcaatggcggttcgactcataatgaaccacaacaaacgaggcggcatgcttgctcgcttgaagattctcgtcaactctcactctcagagcttccactcccctgcgcccaaacgaccaaagcaagatcaatcatcaacagaaaatgacttggattactctatttgccggggccgcattgatgtctcaaaatggaagactttggatgcaaaggagcttggtataactagttctatgatttcatacccatctcagtttgtcctgaaacttcttcggagaaatggatttggtcctacttagtaggtgggtgtgtgagagatctactattgaataaaactccaaaagattntgatgttatcacgacagcaaagctgatggangtgagaaaagcggttcgtggttc

SEQ ID NO: 12337 - DNA, 416 bp, Glycine max
atttgttagaggagaggaagcatgtgggtgcctggtgggatgacattagcagtagaccatcatggaacaaggtatgaaaccaaatttattgaagagattgtcgagaaggtctataaaaagatacctcctaaagcattatacaccaatcaaaaccctgttgaacttggcgcccgcataaaagaagtaatgtcacttctagacatgaaatactggtgataatgtactcatgttgggcatatatggacttggtggtatcggaaatacagaacttgccaaagctttgtaggacaacattgtgcaagactttgatgctgcaagttttcttgccgatgttagagagaaatcactactagaataagccttttctaagtcggtcgattagacccttctaatcgatgttaatcaaacaaaatcaa

SEQ ID NO: 12338 - DNA, 392 bp, Glycine max
cccgcgcgtgcgctccaaggtattataatggaagatgccatgacagccacatggataagggtagatcgctgaatcactgtaggacatgtgtgtacggtattgagatgggatgaatgaatgtaagaatagagatatcttctacattgcatggggaggactggagctagggttacacttgcatatggtggtatacaacctgcatgattacgatgatgcatcttatgtgtcatctactattatataggctgctactctttctagaggataaattgatgctaggcacatgatgtctgagaataatcaacaactctaatgcataggctaggacatatgaatccgtcttggagaatcaactaggagtcatgatgaatgtcacgcggctatatacatga

SEQ ID NO: 12339 - DNA, 377 bp, Glycine max
ctaggttcttgctttcaacgataaacctgttaagaatctgaagagcttggccggcataggtgagagctgtgatgatgattatctaaagtttgatctggaataccaacagaaggtagtgttgaagactagcactgctaaggccgcaaccttagacatcctcaccacacattgtataccttctgcgatgtctgatgacctgaagacataaaaagttttggtgaaagttatttaaattactcccattggcctcatcttaatttttttttaagtgttattacacctagttcactataacattgctgtactattggatctgcactagtcaatgagataaataggcttcacatacagatgattagagaatcataggatgggga

SEQ ID NO: 12340 - DNA, 372 bp, Glycine max
ccaatgactgcctaggccatcttcccttcgtaaataaaaaactgccattgctaagagggtaggttagatcatagtgtgctggttttattaataccactgatccttttctttttctcctgaaaccaacacacacacacacaaatagtaaaatgaaaaaagtaaaataaaaactactgattctcaaacacacacgtctttataacaacctaccaaccggatattcctcctactaccacaaaccgctttctgattaatttcttcccttgtcttatgtgtgttctgtctatgcttctctctttctcagtatcactgctctctctataactccatgccaatttttcaaggctcatgattgaggcctgaactagtagt

SEQ ID NO: 12341 - DNA, 342 bp, Glycine max
ttcacgcgttcgcattcgttcattcttattctatatataaacacattacacacttaacagtaacaagaacaagaacaacactcaggtgcggaatcagtcatcatggtggtgatcaacaaagaaataatcgatgagccctacgaacaagaggagtgtatcgactacgagcagctgaagaaacgcatgtggaaggaccgtgtgcttttgcagaagctgaaggagaagcgcgagaagcaagaacccgacgtggaagcgaaacaagaggcgtcaaggaggaagaagatgtcacgcgcacaatactcggtgctcaagtacatggtgaagatcatggatgactggaac

SEQ ID NO: 12342 - DNA, 148 bp, Glycine max
accactcgtccggttgatcttcacaagcccaatttttactatcttatgcctatattattgcatatttctaaagtcagggaccactatactactgtcattacctatcttatttgcttatattgtctcaaacaactaccatactttcctt

SEQ ID NO: 12343 - DNA, 474 bp, Glycine max
cgagaaaacaagaagtagtgagaagaatggagagaatggaggaaaaggcaaaagctgagcagaggaagataggtatgaccgagacttggttgaagaagcaccgtcttctttacaatggagccactagacaccctcttattattagcattcgcgatggcaccatcaacactgcttccttcaaaacatggctcgcacaggattacttgttcgttcgggcgtttgtcccatttgtggctagtgtgctgataaaagcgtggaaggaatcatattgcagtggtgacatggaagtcatattggggggcatggcttctctggaggatgagatttcatggttcaagacagaagccaacaagtggggtatatcactttctgacgttgttcctcagcaggcttacaaaaactattgtgggttgctggaaagtttaatgagttcagacgcggaatatatctgtgctattacagcattttgggcta

SEQ ID NO: 12344 - DNA, 379 bp, Glycine max
cccacgcgtccgcaacaaatggcagcggatgacacaagtgactactggtgctgctgccattgggggaaaatttcatgcttttaatcaggatattagcaatcaagttgctgcttatatgagagatcctaatagaatgatcaatcagatgcggctgagaagatcagctgttaatatatttggatctgttccagaggttgacgataaacataaagaagctgaaacacgtactgatggtgatcctgaacttctggatgactctgaattttatcagcaattattgaaagaattttttgagacagttgatccttcatcgtctgagaaagcattatatgctgtgaagagaatgcaaccaaagaaaagaagaattgctgatcgtcgt

SEQ ID NO: 12345 - DNA, 437 bp, Glycine max
cccacgcgtccgcccacgcgtccgcccacgcgtccggaagaaagagaccgaggtctcggggatagctagcatcatggcgtccaaggcgctcctcgtggtagcgctcctgctcgccgccaccttcctcgccgcctccgctaacgagcaagcccaggcggccaaagaggagaagaaggcggaggtccaagactggcacggcggcggcggctacccggggcacggcggcggcggcagcggaggctacccggggcacggcggcagcggcggcggcggctacccgcactgccggtggagctgctgcaaccgcgggtaccatggcggctgccggagctgctcgcaccctgatcatataccaaatcccatggaccgttctgagctcgtcgaggtccacaactaaatagtaatgagatgcgcttgttctatatattccggtacgt

SEQ ID NO: 12346 - DNA, 339 bp, Glycine max
tactaacaaaggctcaaaacgttttctggtctatggcattacatggttcctgggattcggaacaatgttcgtgatgaagacggtctctgttacgaggcgttaactcagtgcacattttcaacatgtgttccgactgaccatgggattgatattcctcacttttgtcttgaatcttgtcattttgattgctcttccgtatatgacattgcaggtcattgctgtatgcattcttgctttcatgccaactggttgctgaatgctgcatattgcttaagcattaaaacctgtttttcacctggctgggatttggtgatcatttgaaacttttgctctatgtta

SEQ ID NO: 12347 - DNA, 438 bp, Glycine max
gttgcattaaaaaaattcattatctttcatcgatttcatggatttcgaattgatcaagggttctttggctgtgttcccttttgttttttgattttgaaaaatgattttaaaacaatgcttttatatttgttataataaaagtacttttgttcaatcggttaaatttatctataatttctattaaaaaatagtctttcacccatatcaaattttacgagccttgaaagagtttttttgctaaatttttttggatggcttagaagattaccctaacacgatttgttggttaaatctttacttccgaataagccattttttgttgctagtgctatttgtttcttgtgtttctggattcatttgggtttgcttaattaatttttctgttgattgtgttgacgcaagactgaatgacctaatggagtctaaaggtgggaaaaa

SEQ ID NO: 12348 - DNA, 434 bp, Glycine max
cccacgcgtccgcccacgcgtccggttcgctttggtcgcaattgagagtagcggtcagaggcttggccgcacctacgctttgcttctcttttgtgccatcttgctcgacatttcttggttcattcttttcgccaacgaaatttgtaaatttacttttcatgtaccgttgtggactatgttgttgagaccaagtgactgagtgcgtgtttgaattagcatccgtcatccgcgattgatcaaattttcacgtcaagatgcaccaaaaacaactaaaagttgcttctgtgatccacgtttgagtttggtggatgtgaatccaaacacactatgagttttggcttgcttgtgtaatgattcttgcccctaaagaaagggaattgactattgatgtggtctttatcttggattatatgtgaccttaagttatataaaaa

SEQ ID NO: 12349 - DNA, 357 bp, Glycine max
taagcctcttgatcatcattctagaggttgttattctgaaagtgctggacaggcttctggtatgatgtttttggaagaggacgttgtcttcaagctcttgtgtcaccatgaaaaagttggcagtcttattggcaaaggtggttctgtagtgcgggctctccagaacgaaactggtgcttctatccaaattgtggaggctggtcctgattcatactagcgtgtcgttgtcatatctgcgcgagatacatcagatcataagcattcttctgcacaagaagctgtcattcgtgttcattgtcgacttacagatattggatatgaaccaagtgcttcagatgttgctaaacttcttgtgcg

SEQ ID NO: 12350 - DNA, 388 bp, Glycine max
ctccgtcgtatgctctagcttgggattctccaatggaggatacccaagaaattgaggggcaggctcacaaagaagtgatgtcagacaaaacatctgataagcagcaggaaactcttgatgaaattctttcacgacacatgaaagagatattgcaactgcagaaaaaagaagttgagatgaaaaaagctgcagctagaggtagcaaggctgagcagaaagctaataagaagcaagtggaagaagaggtttgtcaactttctgctaatcttaaggagaatcatgccaaagaactgactgcattaagctatatcagtggtaatggaaatgaaaagagcaatttggacagtcttgtgaaggccatatcttgagtatctgttactagttaacc

SEQ ID NO: 12351 - DNA, 470 bp, Glycine max
atttctaatgaagcataagttggacaaaaatttactttttaattgaaactaatactgaactgactttcttagttagagtgaatcatttcttattttttatatgtaagatctaatatacactatataaagaaacttgagagattagtgggggcatttccccccagtgttaaacctgcatccgtacctgactcaggtaattgtttaaagcaagtattgttatatgactttcaatatctacttgttccttctcatttacagcagatgaaatatacttgggttgtattgaactattgatcaattcatgcttcttaatgacaaaaccttaaggtattgtctagtgcattgtataaagtaaatctttattgtaagaaaattccatttttactaggtgttgcacctaagtagtcaaatctagccaaacattttgaatccttacaatcactattgcaacacttgatatcacctaaata

SEQ ID NO: 12352 - DNA, 184 bp, Glycine max
tatgatctttcataatattcgttggatcttctgcatattcatattcaatatgagtacctgaggaggggacaccgctatgtgtgccatatcgttgcttattggaatattatcttccactggcgtagaatatacagcggcacaatctgatggtgtgagttagggatgaaatggcatcactctacct

SEQ ID NO: 12353 - DNA, 562 bp, Glycine max
  modified_base (50)..(51): a, c, g, t, unknown, or other
  modified_base (64)..(65): a, c, g, t, unknown, or other
  modified_base (90)..(91): a, c, g, t, unknown, or other
  modified_base (97)..(98): a, c, g, t, unknown, or other
  modified_base (119)..(120): a, c, g, t, unknown, or other
  modified_base (140)..(141): a, c, g, t, unknown, or other
  modified_base (168)..(168): a, c, g, t, unknown, or other
  modified_base (185)..(187): a, c, g, t, unknown, or other
  modified_base (198)..(199): a, c, g, t, unknown, or other
  modified_base (225)..(226): a, c, g, t, unknown, or other
  modified_base (237)..(238): a, c, g, t, unknown, or other
  modified_base (293)..(294): a, c, g, t, unknown, or other
  modified_base (319)..(320): a, c, g, t, unknown, or other
  modified_base (349)..(350): a, c, g, t, unknown, or other
  modified_base (383)..(384): a, c, g, t, unknown, or other
  modified_base (415)..(416): a, c, g, t, unknown, or other
  modified_base (459)..(459): a, c, g, t, unknown, or other
  modified_base (465)..(466): a, c, g, t, unknown, or other
  modified_base (518)..(518): a, c, g, t, unknown, or other
  modified_base (539)..(540): a, c, g, t, unknown, or other
tccgtccgtgagagaattgttcaaaggttcaaaacgtgtaccgtagtggnnaagaatgacttcnncaaaacaccatggggtgcgaactannctcttnntagaaaagtacccaatgttannatgtaaacccatcttgcttnngattctgtgaagtaaccttatgaaatnggccttgcatgggactnnngttgatatgtnncttagtatgaatttaaattagctgtnnttctgaaatannaaataaagtatttaatcaagtaagaattatttaattttttaacccgcgacacatnntgaaatatagagagaatttttttannaatcttgcaaattcctgtgaagaagttcnncaagcccaagtgtgaattattttacttcggtannaactgaagaatgtcgaagaagaagcaatttnncattttaataaatcatactaagttagggttcaatcattacatnatttannacctaaataaaatattgaaccctatatattgatagctttgcaatgaatactnaaatgtgttgccatgtacaanntctcattgagtttaaaggtaaa

SEQ ID NO: 12354 - DNA, 348 bp, Glycine max
cccacgcgtccgctggcgtcctgtacatctcacgatgataaagagcaccaccgggctcgggatctccatcttggtcctctcgcttgcctcccagttctcatggtgtgcagaagcagctgagggaagcgccggaatttccacagagcctgatctccaggtgcaagaacaagtgcacggcgatatgaaaaaccggctggaaatgcagggtcgcaaccggaagcttggccatgaggtgaccacagtggagtcgaagcatcacatgaggattaccagtgggcacaatggtggcagcgcggatggaggcgccggcgccggtgccgagggcgcaggcacgggtgggcataacgt

SEQ ID NO: 12355 - DNA, 246 bp, Glycine max
tcgcccacgcgtccgagcaaacacttcttccttcctacctggctgatggatgattgtgaaccactaaactcataggccacctattcacccgcaccgactcgatccgagttccaactcctgagctctaagctgagcacaacctcagtggtaggcctatacgcgtaatggaaacccgttcgaaagtatttccccagggttgcattgctacaaatcagatactataactcaaattcgttcatactatac

SEQ ID NO: 12356 - DNA, 350 bp, Glycine max
attcaagcatcatgaccttgtttcctttataaaactcacaaccctaactctggtcataggattcattggaacaggagcttattcacattctctttatcactggctgcgcctggcttgcacccatctcgacaaagttaatttcaccttcgacagatgccaacagatctatagataggaacacagatcctacaagtaccacacgtgcctaaaatacgaccacaacagcagaaaggacgatgattgcgaagcatgttgcatgtccatcgagacccccgggcatgtggaacaagacgtggaggcaatctttcacaagcacctgagagcctggtattgtgacacctaccaagaat

SEQ ID NO: 12357 - DNA, 150 bp, Glycine max
tcttccacacatccgctcactcattcgacattttctcacactccaatagtcacctactcgtcctacttcaaactaactgaggcctttccatccccattatatctcataacattatccaactctgattacaacctccaccacacacacctt

SEQ ID NO: 12358 - DNA, 380 bp, Glycine max
ggatcaccttctaatatccttagtcgcttttccatctattccaattgagacttgcaagtgtaaactggtgatgtaaatggatttatttccagagcctcaaagaacccagtagattggtcttcacagggagatccactacatgtccagactctgaactatgcgaatgtttatgacactgctcttgtcagagatcaacaatcacatcattgcaccggtgctgatatgttaacaccaacttcgacccttctgcattgcgcaaacatggatctgaatggtcaaatgaatccgccgagtagtttagacgctagcattagacatacattacaatcccagatttgacaagctattcacaccaattcgtcctctttgcagcattttaa

SEQ ID NO: 12359 - DNA, 445 bp, Glycine max
attcaatgtccacacaagagaagtctccaattcgatctgtatctccagaagagaggagtgggacaagcagtgaaggtcgaagtcctcatgagagccctttgaaacaaagaagagaaaagttgtccaatggaagaagcatgagtcctctgaagaaaccaagaacccagaaacctagccgtgacaggccagattccagagaagaagccgaagaaacatactctttcagaggaagcgcaggttccaaaatggattcattcccaaagatattaaaaactttcccctttagtaaggcaaaagggtacactggcaaattttggatgtgaggatttctctcctgaaagggtgtcaggtcatacagtttttgaacatcattatgataacgatgattggagtaagaaaggccgggagataaaacgtgataaatttttcagacaggacaatgaat

SEQ ID NO: 12360 - DNA, 409 bp, Glycine max
ataatttagtgccttgtctgctgttaattcagttccttcccttcagctggactttgaaggtcttacttaccacctgaaattatggggtggagctgtcattaatggaattgaattgagctggataaacctctccatgactatcaatgaaattgaatcaaacaaatggagtttatagctttggtcctttggagtaaatatatatatagggtggcgtcccaaagaaccgaaacgacccttttccttttggtatgtggtttggttttgcaggggataatgcagttgagactgaccaaggccttcacatggtttacatgcatgctgggaccaatccctttgaagtcatcaatcaagctgtcaagtaaagcatcctcccttgtctgtgttatccttctaagttgataaaaattat

SEQ ID NO: 12361 - DNA, 189 bp, Glycine max
cacactcatacgcccacgcgttctatcctatgctgcgcaggtctactaacagcgggctctggatcacacgaacaggctagtcatcgatcttgctggtggacttaccatacattacaaccattccaattctcgtgactccactatttttgattggtaccgtcataagccttctgctgaattctattgata

SEQ ID NO: 12362 - DNA, 146 bp, Glycine max
gagcaattcaaggttgtattgtataaataagtgatatagactatatctataagccaaatgtactcgaaaatcacaagattttgaaagtctagttgattccccaaatgttattcaaaattcataaaaaaacttgaaactcaaatatt

SEQ ID NO: 12363 - DNA, 179 bp, Glycine max
tccactcgttctctcacaccttctctaatgacgaaaatgcacagacacgaatcaaccatgttggctcggatgcttagataggtactcaagtgagctctttccgacatagcaggtaacagggacgaagcatgtacgctagagttcgcatggtcgaagaagaccataggtgtcgagaaaca

SEQ ID NO: 12364 - DNA, 243 bp, Glycine max
attactcttctattctctttcactttcatatttctattttccatcaacttatcagtcatgtaggatggggtagccatttagtattggctgggttgatatgaacgaacacatatcctttgtagtgtaagccatgtctgttgacactattctcgctgctgctaaatctctcattttcttcttcattcttactggatctttgctgactgacatcaataattcattggccccaaaattgaccccaat

SEQ ID NO: 12365 - DNA, 438 bp, Glycine max
gcggcttcatgtatggcaccgtctcggaggagggaaaggtcgaggtggacttcatctacgagcctgctcagcagggttcggaggacaatctcgtctttttcagggataccgaagaggaaaagtttgttgaggctattgcggtggggttggggatgacgaaggttgggtttattttcacgcagacgataactcaggataagaaggattacactttgtcgaacagggaggtgcttcaagctgtggagtaccatgcggagagtgggttgaaggagtgggttactgctgtggttaagcttgaggcgaatgaggaaatgggtggtgcagatgtgcattttgaagcgtttcaaatgagtgatgtgtgtgtgaggttgtttaaaggaagggtggttcgagacggagatcaaggaggacgatgatcccaagttgtctaagatgaag

SEQ ID NO: 12366 - DNA, 444 bp, Glycine max
caactccatcaggaggcagtcctttccagtttggttgtcaacagaatattgctccacagaacccttctccttttcaggcttctggcagtctaggagggagtttctcattgggcacaggtggaggtgacaaatctgctagaagaattgtgaaagttaaacataaaccacgcatgaagtaggacctaaagttatgaaaatggttaccttgtatcatgctgcaggctaatcttatagtgcaacaaataaataagctctgaagagtgattgcaggatattactgctcacatggcagtctggacaagtggggtgctattgctaatcagcatatgcaaacttgtcagtcttcttttcccttccatattcaatagaatacaaggctgaagttttaccaattgcgtattagtatgatatgatgaaacatgacggtctgtactaccagtaatg

SEQ ID NO: 12367 - DNA, 253 bp, Glycine max
gcggacttatgtgtggcaccgtctgcgaagtaggaaagggcgtcgtgggctgcatctacgggcactgtgaacaggagtcggaggacaatcgctgctttttcagggatacctaaaaggaaaacgtttggtcaagatattgcagcagggatggggatgacgaaggttggcttgattttcacgcagactatgactcaagataagaaggatcacactcagacgatcagcgaggcgacttaagctggggagtaccatg

SEQ ID NO: 12368 - DNA, 300 bp, Glycine max
aacacaaatgataacatactctctccgctgccttcaacaaccctggctcatggcactgtcaccgtgggctctatctatcacctgcgctgctcctagctgctaaatccatcttcgcacacctaccacgctcttcattcgcttgacctcaacattcaccagcacctctactaccccgaaaaagagactctcatcattcatgcatcaccctaccaaggcactatacaatactataaagcctatagccacacagaccaaatattccagcgcctgatgactagccgtcggttaccactcccctat

SEQ ID NO: 12369 - DNA, 159 bp, Glycine max
atctaatccgtacggtcacaactgggacagtttcatgatgaggctaagctaccaggacatggcgtgaagagctgccaactacctacggtcctgcgacaacgtacgcagctgcacagcgcatctgtcgaatcatggactggtcatcagcatatataacac

SEQ ID NO: 12370 - DNA, 280 bp, Glycine max
gtctcatgcggatgttgaataccgatgcttttttggttggctcgcttggtccactgacaacgtgcgatggttacaaagccttctgtgagtgcggctacttcattgaatcgaaggtccgcatctcatatgatctgacacaattcggatccggaatttctccatcccgttctgatctgtgatctctgatctattttcgttacttgttctatgatatgatacttgtgttactatatgattcttatattactcactccaatatgttctttcatcttcatcattt

SEQ ID NO: 12371 - DNA, 469 bp, Glycine max
cgtggacgtagcagagaggtctctgattaaactttcacgctcacacctctcatacacaacgcggtccaaattttccttgcttcttttcttccatggatttggattggtcgtgttcttacaccaccaccaccaccaccggcaacccctactgtctcctcttccaagcgctatcactcattccaatctcgcactacctgctcttctcctccttcgttttcctctccttactctaccgtttactggagctccatttcctccaagacctcttatccctcttctccggcttctacgtcaccttaacctaccatcccgcttaccaattctacgacgccgtggtttccacatgcaggattctacacggcacctacctcgccacgctctgactctacagccctcatctgcagaacgtgtctcttaacttcttcagcagacctaccttcttcaaattcagaagacaactgtttactac

SEQ ID NO: 12372 - DNA, 66 bp, Glycine max
cccacgcgtccgaccacgcgttcgaaaaaaaataaaaaaaaaaaaaaaaaaaaaaaagggaagagt

SEQ ID NO: 12373 - DNA, 408 bp, Glycine max
  modified_base (335)..(335): a, c, g, t, unknown, or other
catgaatttggctacagcagagattaaggcaacgctagtggagaaatataggcgttcaacagatgccagaagggcaaagaacagaattcaagaactgtctaccgatgaagggcttgaacctccaacacaacatggaagtcaagctagttggtggaagcaactatcaacgttgacaaagagatcatttgtgaacatgtgtagagatgtgggttactactggttgaggatcataatttacatcattgtatccatatgtgtgggaaccgtttattttgatgttggctatagctacacttccatcctggcccgtggtgcctgcggtgcatttatatcangatttatgacattcatgtcaattgggggctttccatcatttattgaagaaatgaaggtattttatcgagaaag

SEQ ID NO: 12374 - DNA, 446 bp, Glycine max
cgggaatctgaagggttattactgggacggttccaggtggatgcttaactaccaggcgatgactgaagcctgcgagctcccccgctcctgcggttcgtacggtttgtgcacgccgggtgggtcaggatgctcctgtttagataaccgaacccggttcgaaccgggtgggtgttttaatgatgcttcttctggagacgcagacttgtgtagtagtgaaggaattggtggaaaaagtagttactgggtgctaagaagaaccggaatggaagcagcgcataaggagctactaaagcacgtaacgacgtcgtctctggcggaatgtgaaggattgtgccagaacaactgtagctgttggggggcgctgtatagcaacgtaaccgggttttggtatttggtggagtattcgatccaaaccttgctgggtaccggggatggatcaaaagtgg

SEQ ID NO: 12375 - DNA, 195 bp, Glycine max
gcgactcgttcgaaaaaacatacaaaatattaaaggaaaactctttcaaattaccacaaatcttcatacgactaaagagcggggtccgttcttgaggatgcaaactgaaactccccacccttctaagaggatcttttttcttaaggagacctaacttcaattgactgcacggcgttttacaacatcttgaaaaat

SEQ ID NO: 12376 - DNA, 394 bp, Glycine max
tatcactctcccatggcttcctcttccctctttctctcactctgtctcaccctttgccttgggtcgtctctctgctatgctcacaaatcttccttaaccctacctgtgacaaaagacgattcaacccaccaatacctaacaaccctctcttatggcacccctgttgagtctgcaaaattcgtgcttgatctcggaggctcaatcctctgggctgactgtgcatccagaaccaccccatcttccacccttgccccaatcttccaccgttcaattcgctgcctcacggcaaagggtcctgaaattgagacacatagatggctctcgagtctcgcaaatcccatagatcaagatcagccgtgtcaaattcctgcagagaacagcattctcgggaaaa

SEQ ID NO: 12377 - DNA, 468 bp, Glycine max
  modified_base (356)..(356): a, c, g, t, unknown, or other
cccacgcgtccgcatgtgctgtgttgtgtttatgcattggtgattactgattagctagcaggggcatcgtccccttctccaaagatcgtataaccttcaatccatcttcatctccggtgagtcaagttgcagctactttggcatcgtattttctgggtcagttctgtcgaattccttggtccaagactttgcagctgaaccaacagcatggcgggtcagtcctccaatgaaggctccagtactggaaacatttcagcagaatgttccgattcaactgttcagctcaatatcaagactctagattcccgcatctacagttttcaagtggacaaaaatatgcctgtttcattgttcanagagaaaattggcaaatgaaatggtgttcctgttaatcagcaacggctgatatttaaaaggaaagtcttaaaggatgaacatgttctttctgaatatcatgttgagaatggg

SEQ ID NO: 12378 - DNA, 416 bp, Glycine max
cccacgcgtccggaattttagggttttctcttccagatttcccccaatcttcttcgcctgggttcctttttctttacatttctctctgattgaaacgccacacccatttgagaggatcttttttctagagaagccatcccaaagtgtgttttcatggggttgttgtgatcttgagaaatctgagagtggtggtagttagctaatgttatgaggaagaaaaggaaaggaagcaaaactgatgggtctgcggatctggctgttattttggctcctaatcatggctctgcttcgtcgaatttgaagtcccattactcgctggaagattgttgtaggctgaagaagaagtgttgtaaggaggaagatgctgacactgatccggctacttactttacgaggaggcttgctggcattgctac

SEQ ID NO: 12379 - DNA, 326 bp, Glycine max
gtctctacaatcactccttcctctcatccgctataattaaagtgcttaatttgtgttgttacgtggggcagtttccatggattgggggcttgctatatcttctcatcctaaaccttattcagtcacaactggtggaaatctcttgcagagtaaacacaccaccaagaatatttactttgcaagttcttggatatcaaaagcttcacgacacaaaagggaaactcaaatataacataatgttttaaggttccaacaaccaagtttggatcatcattacaaatgcatcataggagggtctacattattacgaatgcattagaaaattt

SEQ ID NO: 12380 - DNA, 208 bp, Glycine max
gcaaagatgaataccaagccctttttctacttgtgcttactctgcgcactgcttctcatctagattgtggcaactgatccatccaaagatgcgacacatgaagaaccaaagacacggtcagatgcctggagaagcggtggaagtggaagacatggtggaagtgggggacatggtggaagcgggggacacggtggaagctggggacatg

SEQ ID NO: 12381 - DNA, 330 bp, Glycine max
tcacgactactcaaaccctatctatactttcgcttatctttccaatgcttatatcagggaagagtcctgatccattgaagcatgccatacaactatcaccaaagacaccgacagatacctacataaatcatgatactaaaataccttctacacctgctctacataatccaatcaagaaacacaatgaagagctctgacatgacctaagctagagccatgacattgaacatcatcataaatgcaaactctatatcccaaaggacatcctatgcttctcccataaaactttctcaaacattaacttaacacatacttaagcttgtactcaca

SEQ ID NO: 12382 - DNA, 392 bp, Glycine max
gaaaaatatagacttagcgaggacttatattggtggtgtgtacagtgcagaaatttcgtccgtaaacgctgcagactacacccactatatagttatgcttcaaaagtttggtgtcactctgggaaaaccaactgagttgtagtaacaagcttaaaggctacataaatggaagataaagctgcgataaaagaattgctggaagacgaggaaaacccatatgataatactggaaacaaacaagatgcggagaaattaccaatgctacacacccggcagtttttgaatatgggcgagtcttcatcaattttatacggctacacaaaaacatgttcaatagcagaaaacgcttaaaaagaaaatgttaggcataaaaccttgcatgtgatgataat

SEQ ID NO: 12383 - DNA, 412 bp, Glycine max
gccacgcgtacgcccacgcgtccggcagaattcaagtttgctttagtgctggtaaagggaaggtctgagtcatgcttgctcacctggtagtctttagcccggttaggagaagggagctttggttggtggtcttgaatagcaacaaggccactaaaagagagcgagtccaatgaatatgaaatgctatcatacgccacatgtgaggtgagcttgtccattgatttatataaccaaaatggctatgtgggttgaaaacttgtatatatatgcagaaacctgcttagacgctgggaccactttaatgcagctagaatgtgttctgctgagttgaagatgatctggttttatatttttctttttgttgtccgctttgtggttggaaggggtaaagccaatacgcatattgaatttt

SEQ ID NO: 12384 - DNA, 388 bp, Glycine max
gacaggcgaaaatgttgacaagcttctatcccagaaagttcctaacctaactctcttgcatggggctgtacacgagcgaaggagaggccggacgtgcgatccttgctaagcttctggtggttcagccgcacgtgctccctgagaagctgttgcaggcgaagctgaacgaagctctgtgcctcgcgaactccctcgaagaccagcgcgatggctacttccacaccgatttcttcgacaaaccgttgccacctcacgttctcgttcagaaccgcctttcacgctgccactcctattttggccgtggaaccggcgacaacatcaagggtcacatcgacgccggcggctaatctaacggtgacgtcgatgctcgttttggttatgctatact

SEQ ID NO: 12385 - DNA, 439 bp, Glycine max
cccggcgacaccttcttcttagtctccaccatcaagttccagaacctcaccactttcccctgcgttggagtcgtcaaccccaccctcctcgccaccaacctctccatcggccaggacaccatcttccccatcttctgcaaatgcccccccaacagccaaggaacaaattacatgatctcctacgtcgtccaacccgaggataacatgtcgtcaatagcttcaactttcggtgctgaagaacagtccatcattgacgccaacggcggtgagacaactctacatgactatgacaccattttcgtgcccttggcgcggctgccggttctgtcgcagcccgcggtggttcctcccgtgccgccgccagtaattgggagcaataatgatgataggacaaggactgttaaagggttgggggttgaattggggattgtgggggttg

SEQ ID NO: 12386 - DNA, 243 bp, Glycine max
tcccactcttccgaaaaaaaattaaatctatattatattaaataaaaaaaaaataaaaaaaaaagaaagaataaaacaaaacagataaaaaataaatataataaaaaccccaataccatatatttatctttctcctcttttctttcatcatcacataacattccttcatattacatctgtctattttttctttcatccttttcacatattcatctcttatcatactttatatacctcttactt

SEQ ID NO: 12387 - DNA, 372 bp, Glycine max
cccacgcgtccgcttttaatccttttagctgtgtcctcacacctttattttggcatgcttgagactgcgacacatttcatggtctttcctctcctaggggccttggggcagatatctaacattctcctcaagtcagaagcaacacatgacaaagatcaagatgacaacagtggatccataaatacaaaagtggaaaatagtcaactggaaggtttctatgtagacctatcaattaccaaggaagttattgtcgaaaactctatcagtgtctccattaggaagtgctctgagacagctaagaatattttatatttagaaacagatatacctggagatattctccttcacttgggtgtttgtagggatgatttg

SEQ ID NO: 12388 - DNA, 52 bp, Glycine max
aaaaaaaaaaaaataaaaataaaaaaaaaatattaactaaaaccttaatcat

SEQ ID NO: 12389 - DNA, 374 bp, Glycine max
ctcagctgcgagtcatgcagaacgcgaaggtattagatactcgtggacatctactgactgcggtggggtatggattgtggccttttatggttcttctatcagaaattgtgcaaactttcattctggcagatttttgctactactacgtcaagagtcttgttgggggacaacttgttcttcgacttccttcaagagtggtgtaacttaacattcaagtaggacgttcctttaacatgcagcactcaaggaagtcagagtagctagttaatcttttgatatgttatgtatctatctgcggtcattgagtgaacagttcttaactgcggtctaactttctaaaattttaatttatcttttgatcaatttgggttagt

SEQ ID NO: 12390 - DNA, 401 bp, Glycine max
cccactcgtacagtctgatggatgtcctatccactcccattcatactctccttgttgctggggggtggtgccatctacctggctaaggaagctgattgctcatttgattgcacaatcgaacagtggccttctccaaataaagtgtcattcccacctattatccttgtgagatccctagaggaaacttaaaataccacccaaggatcaggagggctacaatggctgctgaattcctagaagaaacaggagggctagcagttcagcatcaaggatcagactcatgggtttggaagcatgactcaaatggaattcattcgaccagatctgcatataagtttctgctgggggaagtaacgtgggaatcagaggatgggaagttctcgcttctgtggaaacttaaa

SEQ ID NO: 12391 - DNA, 333 bp, Glycine max
cccactcgtacggtctaacgtatccacaaatcacggctattgattctattactgctgatccggggaagtgcaatctacctgtctatacttgcttagtgcttatagaaattgacaatataccagtgctaaaatccatattaagtgatactatatcctattatgagtgagagatccctaatcgaaactcaacttacctgccaaggatcatctatggctacaaatgatggtgaattcctacaagaaacgatagggatacctgctcaacattaaggatcagactcataggttgagaaacatgactcagatggctcttattataccagatctgcttat

SEQ ID NO: 12392 - DNA, 201 bp, Glycine max
tcccactctttctgccacacgtacgcccactcttcctttataaatactataaataaaaaataagtgaaggttcaatctacctgaggtcaagaaaactatctcatactttcattttacaatactacagtataacttctcctaataaaatttcattaccacctattattacttgttatatccctatactaaacttataatacc

SEQ ID NO: 12393 - DNA, 388 bp, Glycine max
agagaaagaagaggacttgggggttatatggctggtgggtcgttaccccccgagacaagtggggttgcaccagggtttgggaacaggattagagggaagggtttggagggtaggaatgagaatttgtatggtaggagggaaggtgggagaatggtgtctggtgagaggagcaatgtgggacttgttgatcagcttgatcgtcctgggccaccggcccggagtcaccttcattcgggttcggggaatgagaccagtggcattggtgaagttggtggtagggatagtaagcacaagggatgtgggagattgacgatggatggttttcctgagtctggttggaagggttgctggatttgatgttcttggcgagcaattaacttgattcctt

SEQ ID NO: 12394 - DNA, 364 bp, Glycine max
cccacgcgtccgcccacgcgtccgaccacgcgtccggaaatttaaagctgggggagctcagggctttaattatattaactgttggatctaattcagaagtaattacttggtgtatacatagtttttatgttttgtttaccttaattagcgatttatctattttgcaatagaagtctcattttctttgcttttgaagataaactgatttgagaaggagagaagtgttcttggctaagtcaatttttcgctttttctgtcttttacttgtcaaattcatggtattctgtgcctaacagctgtagtaaatgtctctatcgaatatatatcaaccaaagttacttccttatgggattttgacctgaag

SEQ ID NO: 12395 - DNA, 281 bp, Glycine max
aacacaatctctcccttccaaatgccaattttctctgtcctccatcaggttctgaatggagggcctaaactcactgctgacgaggactcttcacctaacttgcgattctgagagcagtgtttcactgtagtgacacaccagacatctatcgtctaaaacgccagacctccttcataccaacatcggtctcatactggcagagcactggttcaaaccaagtgttctggcaactgtgcacatcgtatgatccttcgtgatggccctgaagcgtcaacattcct

SEQ ID NO: 12396 - DNA, 452 bp, Glycine max
gagcatctgagagtggaaacagaaagcaaaggtcattgccagattatagtggacgtggttgggatgaatccagaaagcaagtgatgaatgaatttggagggctgaagaggtcctattatatggatccacagtcactgaaccattttgagaggcacctttatgagtatgagattagcaagtgtgatgcatgtgccttgtaccgattggaactgaagcttgttgatggtaagaaaaactccaagacaaaggcagcaaatgattcagttgcggatctgcagaagcagatgggaaggctctctgctgagttttcacatgacaacaaaagggctgtcaaaggcagatccaaaatcaacaccaaagttggcatatgtggcggagtctattcagcttcacacagagtgacttcactgaatggaacatatgagtatgggttaactgcaccatattactat

SEQ ID NO: 12397 - DNA, 419 bp, Glycine max
gaatttggaaaattctcactctcgacggaggcggatcttcgtgctctcgacgcggagcctcggtcactcactctcgaatgcgaagcctcactcttgaacttctctctctgctgtataaacattctagttatggaagattctgatcaaccagccaaatctgctgaaaaccagcaaactgaactagtgtgtagttttttcagaaagccagttaataaaaagaatataaggaaacgaactattgttaatgaagataatgaggaggactcaaacaatgaaacttctctgttgcatattcagaagaagaccttaaagcctgataataagttgtacttttccactggttcttcaaaaagctctgcatctgctgaacccagtgaagaaccaggaaaaccagtctttcaagtcgagtcttcaaaaga

SEQ ID NO: 12398 - DNA, 380 bp, Glycine max
ttaaggttcattgtgcatagtcggactctattaccttctatcaaaacccaatttgctacttggtcagggaagcactctacttcatcatgcccaaagactctagttctcttctccttcgcactccttattcatattcctcttcgtctgtcagaactccgccgtcttcacttgctttcttcaaaaccacccaacactctcactcgcctcaccttctccgtcttcgcgtttatgccctccctaaccccgacgccgatgaacccaccaacgacttcgctttagcgtctcatcctcaggaaaatttaagccattctgagactgagagttccgaagatgatcaagatgctccaccacaaatggacatgttgtggtcaacgatcaca

SEQ ID NO: 12399 - DNA, 275 bp, Glycine max
  modified_base (243)..(243): a, c, g, t, unknown, or other
gtcgtgtccatttcaagtgtttgcgagagaatggagttcctggacgaggactcaaggcctaggttcgggttccactccggttcagcttccacgagcactgagccaccgtacccgatccacatacctaccaagccatttctcttcgtcaccgatttcctctgctcactacttgctactctctacctcttcttactctaagcgtagcccttcaaatcgctcctcttctggctcgcactctctatnctcgatggcccctttcccacctactccatcac

SEQ ID NO: 12400 - DNA, 366 bp, Glycine max
tcgtgccttacaagattgagaatgacaaggtggttaactattccatcacccaaagcttcaataagctcgggaattcaactaaatctatcaagtacactctttgcaatttgaaatgggctctctattggtttgtaggaaatactaactttcagcctatttcagcaatggtatcttctcatgctgtaattcctgctgctggtcctttgtacacgaaacgtggtgtttatgccaaatctctatctctaaactgaacctactaaacatattctctgttaggttacatagttaagtctcatacaaatgtgtacatttaacttctttaaaaaatcgttgcttgatcaaaatgtataagacatttttaaattt

SEQ ID NO: 12401 - DNA, 280 bp, Glycine max
gttagttagaaaaagagagagaaaaaggaaagaaaataaaatgaactgacagtaacagatagggaaacaaccaaacctacaaccgccatgaccgaagaagaccgctccgtccaggaaaccgtccacaatggcgtcgcctcgacggagctaggccgcgaggagatggacatcgctgacgtgactgccgccggaagagtgaagggaccgtggtcttcagaggaggacgcgctgctgagccgattggtggcacaattcggtgcaaggaactggagcatgatcg

SEQ ID NO: 12402 - DNA, 302 bp, Glycine max
ttaaggttcattgggcattggcggattctatttccttttctcaaaacccaatttgcttcttggtcatggaagcactctccttcatcatccccaaagactcttgttctcttctccttcgcactccttcttcatattcctcttcgtctgtcagaactccgccgccgccacttgctttcttcaaaaccacccaacactctcactcgcctcaccttctccgtcttcgcgtttttgccctccctaaccccgacgccgatgaacccaccaacgacttcgctttagcgtctcatcctcaagaaaattta

SEQ ID NO: 12403 - DNA, 444 bp, Glycine max
aaataaaggagaaagaaaaaggaggtttgagagactagaagaggattgggatttggcaggagatttagattagcatggaatcaagaatggagtgtagtagtcatcaacaacctcagtcactgtaaatttttttggttattatttatctctctcaaatgcatatgcaatcgcaatcaattgcaaagcatttcggatccagagggagagaccctttgtgacagcctgtatcctctccatcgtctgatagattcttcattttttttccatttctcgcggcaagatctcacactctgcacctagggttagggttttggttcttgcggcatggcgacttcttcgagttcttcgagctggcgcgagggcatgtccttcgacaacataaagggactgtgcctcgctctctcttctagcttcttcatcggcgccagcttcattgtcaaaaag

SEQ ID NO: 12404 - DNA, 325 bp, Glycine max
ttaaagttcattgggcattggcggattctatttccttttctcaaaacccaatttgcttcttcgtcatgggagcactctccttcatcatccccaaagactcttgttctcttctccttcgcactccttcttcatattcctcttcgtctgtcagaactccgtcttctccacttgctttcttcaaaaccacccaacactctcactcgcctcaccttttccgtcttcgcgtttttgccctccctaaccccgactccgatgaacccaccaactacttcactttagcgtctcatcctcaagaaaatttaagccattctgagactgatagttc

SEQ ID NO: 12405 - DNA, 184 bp, Glycine max
tccgacgcgtaccggtctggagtctaatcctacatcagttactatatctatacttgctttttcagtctcatcctctgtctcgtaaacaagggagtgccgtctcatattaccttgatcacactttcactcttcatacgtgacctggcatctcgtatcagtatctcgaacacacaatacatacaca

SEQ ID NO: 12406 - DNA, 62 bp, Glycine max
acggaaagcattccgaatcatcctgctaattcctttcaattttcaatacttgctagagacca

SEQ ID NO: 12407 - DNA, 323 bp, Glycine max
acgttacggttcattcgacattgaccaattctatttccttttctcaaaacccaatttgcttctggtgcagtttatcactatccttcatcatccccaaatactcttgacctcttctccttcacactccttcttcatattcctcttcatctgtcataactcctacgcctccacttactttcttcaaaaccacccaacactctcactcacctaaccttcttcgacttcacgttttttcccttcctaaccccgacgcctattaacccaccaacaacttccctttaacatctcatcctcatcaaaacttaagccattcttaaacttat

SEQ ID NO: 12408 - DNA, 250 bp, Glycine max
cccacgcttacgcccactcgtccgaccacgcttacttatcgcactcttatatcttcatacaggacaggccaaaaaccaaaccacccccgattcccgaaaccctaaccctacctccttgcccctatgcccatggcttacaaacgaaagcttcgaacctccaacccataacctaccaaacccgtcgagccacaacaacataaccatgagactgttgaactcgaccaacatcaacccatcccctaaccaaccc

SEQ ID NO: 12409 - DNA, 471 bp, Glycine max
caattccgagagtgatgaagggttgttacttgggatctgtagggatggacgaagaatgaaagtgaaaagtgaaaagtagagatggaagaagaaaaagcagcggcatactacgacgagctgagccgtaagggcgagggagccgcgaggttcaagcaaggtctcggcttttcctcttccgcgccaaacgacgacgttccaaaaccctcctccttcctctccaaattcgtcaaagcctccttcactgcgccttcaaactctgagaagcaagcgcagcttcaatccatccaccacaagctcaagaaaaagccctcttccgagtctaaggtttcgagcagcgatagcgatagaagtagaagacgaagcagagatagatacagggaatcgcggaggcgaagtatgagtagagaaagacatcggcataaggagaagaggaaacggatgagtagaagcgtttctccttgcaagcaacgc

SEQ ID NO: 12410 - DNA, 284 bp, Glycine max
  modified_base (252)..(252): a, c, g, t, unknown, or other
  modified_base (258)..(258): a, c, g, t, unknown, or other
  modified_base (261)..(261): a, c, g, t, unknown, or other
  modified_base (267)..(267): a, c, g, t, unknown, or other
  modified_base (270)..(270): a, c, g, t, unknown, or other
  modified_base (273)..(273): a, c, g, t, unknown, or other
gtagcggtagaggtagtagaagtttgtgtaaagaaagaagaatggaggaggaaggtgacatggacgacggtgttcgagctcagttccctctctcattcgggaagcaatcgaagcctcaaacccctcttgaagccatccacaatgcgacacgtcgttccaattccaatcccaaaacagccaacgaccttccttctgtctcctcctcttccagggattggctcaattccctccgccctcccaaaacccctactnctcctnctncgctgncgncgncagatcacgac

SEQ ID NO: 12411 - DNA, 283 bp, Glycine max
ctatcgctagaggtactataagtctgtgtgttgaaagaggaatggtggacgaaggtggggtggactacgttgatcgagctcatgttactctctcattcgggaagctatcacaacctgatacccctctagaacccatccacaatgcagacacatgcatgctattccaataccaaatcagacaacgaccttccttctgtctcctcctatttcacggatctgctcaattgcctacgacctctttaatcctctactactcctacttttttatcgacgacagatcacg

SEQ ID NO: 12412 - DNA, 143 bp, Glycine max
gaaaaacttgctttccatcgccctggaagtttataaatttcgtgctgaacatgctaatactagatacagaaatactaaagctggtatgtacatctataacactaaccccttattctacaaaatatgctcatctataagaatct

SEQ ID NO: 12413 - DNA, 382 bp, Glycine max
ctgtgactgaacatgtggagagaatccgtatgaggaagaacaatgatggtgtggatgtgagggaggatgctatagttaaaaggcaatatgcttgtcctcctggggatagattggcaagacgcaacagccttggtactggtggtttgtctgttgaagctgtatctgatagtcaagagttgagaagtgtggagtgcaatcatttgtcaaacagtgggcaagatgatttggatagaacagagtctcctgaagctgcttcaaattctagtgtgattacatctgttggttcttctgaagatattgtatctgtgtaagtggctggttgtgttgagaactccaggggtgttgaaatgatgaacaatggaaggttcgaagatactactta

SEQ ID NO: 12414 - DNA, 146 bp, Glycine max
ctgttccatcgtcaaccctacctatccatcttcgtatgaccttcatgtttgaagacctaaggacggatactatatttctgacagcgtaatcatgtcctgcttcgtatggctaacggttacttatcacactccgtcttcttggtttc

SEQ ID NO: 12415 - DNA, 169 bp, Glycine max
aaaaaaaaaaaaaaacaaaaataaaaaaaataaaaaataaaaaaaaagataataaaaaaggggggtcgctattaacgttcccggcttacgtacacaatcatgcgacattatatggtattctatattgacacccaagccaataagtggcacgtttttaacaagcgtacac

SEQ ID NO: 12416 - DNA, 287 bp, Glycine max
cactttcactggaatcacaatcctgaaacataaacatcttatcatttaacatactactagacgacagtgaccaccacattggaaagaggtttctcggaagagcaagaagctctggtggtgaagtcatggaatgtcatgaagaagaattctggagagttgggtcttaagtttttcttgaaaatatttgagattgctccatcagcttagaaattgttctcattcttgagagattcaactgttcctttggagcttaatcccatgcttaatcttcattgctagtctgactt

SEQ ID NO: 12417 - DNA, 358 bp, Glycine max
cccacgcgtccgggaaaccgttaaggcagatctatcgtcgaacaaagtgactgttagcggggaattggatgccgagaagctgcgagataagatcgccgagagaaccaagaagaaggttgacatcatctcagctccgcccaaaaaagaagccgccgtcacggaaaatccaccggagaagaaggttgaagagaagaaacctgaagagaaaaaaccagaagaaaaacctaaagagagtatggtggttttgaagatcaaactgcactgtgacggttgcattgcgaaaattcgaagaatcattatgaggttcaaaggtgtacaatcggtgagccttgactgaagcaaggacttggtgacagtg

SEQ ID NO: 12418 - DNA, 239 bp, Glycine max
aaaaaacaaaaaaagcacctaataataaaataaataaaaaataacaaaactaatcaagggccgggcatacgtactcactcatacaataacataagcatacctatagtgtcacataagataggttgactgaccttccatttacaacaaaggtcactggaaatacattgtgcacttacacaacttattcgcaatacaccacatacatttttacacactttcacttttacatagacggctca

SEQ ID NO: 12419 - DNA, 416 bp, Glycine max
caactcaataacagatcaaaccaaacccaaactgttaggtttcctttgtttggtgtgaagcgatggctgattcttcttccaacctgaaatccgacgcgataatggagcagatgaagcaacacctcgccaccgacgctggcaaacaagtcaccaataaaattggactcgtttatcagtttcacattgctcctaagaaacttggattcgacgaggtcgtctacaccgttgatctcaagaaaggagaggtcaccaaagggtcatatgaaggaagaaagcctgatgcatctttttcgtttaaggatgaggactttgttaaagttgccttagggaagatgaatccgcagattgctttcatgaggggtgcgatgaagattaagggaagtttgagtgctgctcagaaatttactccggatatc

SEQ ID NO: 12420 - DNA, 381 bp, Glycine max
ctttgtgtatctcctataactgtacaactctttttctcatgcttacttttagtattgatgaggatgacttttacatgtgcttgtgttgattcaggttctcagttgttccatttcatgccaattatccactgtctactcaaacccaattgttagttccttccaatcttagttactcctttgctacaacaggtagacacactctcactgtctttgacttcttcccttgtcttcatttcttatcataatttgtttactgcaatgctttctctgttggttgcacgaaccagaaagttcaagtcttttcagctcaaagctggattttgggaatcaattaaatctgggttgatgaacaataactccatgcacgtcattgatccaccc

SEQ ID NO: 12421 - DNA, 207 bp, Glycine max
tcttgatcaaaagtcgtagaactagaaggttaggttgagggcgatatgaaggtaaccaaagggaaggaaactaaaattgttctgacataaccctttcaattggaaggtgaatcagatttagaaccgtcttatagagctcccaatcttctacatcgcttgttaagtttactcaagaacgtgcggccaggatcagatcttacacacttt

SEQ ID NO: 12422 - DNA, 216 bp, Glycine max
ctcaagcgtacttactcaccaactacgctattctcaaagacgctgcttcattcaactgtcacgtatcggtgctccattcaccagatggcagtgccagacttaaattctcaacatcttaacactcatcacttccaatcactcccaacacaccaactattctcatcactatccctgcatactctcataatctgagatactttcacaccttttaatcca

SEQ ID NO: 12423 - DNA, 342 bp, Glycine max
  modified_base (94)..(94): a, c, g, t, unknown, or other
  modified_base (118)..(118): a, c, g, t, unknown, or other
  modified_base (120)..(120): a, c, g, t, unknown, or other
  modified_base (134)..(134): a, c, g, t, unknown, or other
  modified_base (168)..(169): a, c, g, t, unknown, or other
  modified_base (189)..(190): a, c, g, t, unknown, or other
cgtctcgtggtttcttgctgcatatggttgcctcataccacataatcaacatcctatctaaagaattaatgccttcttaatgtagctgatgctnacttaaggagaatctgaaataaangntatttttcaattcnttaggtgatgtattcatgtatttgtatccaaaanntattttggtaccgtaaagtnncttttaaaaaggtttgcatttctctctctttgtgttttcccttaagttctgataagttattctcctaatgaagacctaatcatatgtacctgtactgtagtgtgaatgatattagtatttgtattgctgtcagaatattgtattgtctaata

SEQ ID NO: 12424 - DNA, 422 bp, Glycine max
gttttgtgctagtgagttttttcttaaaaaaaatttagtttttgtttttttggaattgcagaattgcctggagttcggtgggtgcttcctgattcttacttgaatgttaaggaaaaggattatggaggtgagccctttattaacgggcaagctgctccctatgatcccaagtatcacgaagagtgggttagaaacaatgctcgtgccaatgagagaaacaggcgcaatgacaggcctcgtaatgctgacaggtcaagaaactttgagaggaggaaggaaaatgtggtaaacagagacatgcagggcaggccttcttcgccaaatcctggccctaatgtgggcggtccttcttcaagcaatgcagctgggtacccttcaagcaatgcagctgggtacccttctagcaatgcaggatatgcccc

SEQ ID NO: 12425 - DNA, 342 bp, Glycine max
caaagcacgacttagcttaggaaataagaaataatggaataaccggtagccaaacaggtcagagccgaagttgatgggtggttctacttgtttctgcaaagcacaagagcaaaaccctacttgaaccctttctctctctcaggtcactgctcacaaacatcacaactatgtccttgggaattcttcgatcccgagcgatttcattggcatcgaagcgattcctctgcaccaatgccgcttccgcttcccctcctcttccccctcctccttccgccgcctctcccagccgctggagcttcctcaaatacgccctcgtcggcgctctcaccggaggcactgtct

SEQ ID NO: 12426 - DNA, 360 bp, Glycine max
acagaagcactctttctctctcttcatttcatcttcttcagcttcagcgaaatcctgttctgaccgtatatcgtgcctgttcttttgtgcctgaaaagccacttctctacttgcgttgagtgagggagaggatgtctggtcgcacacagaacagtctgagaaaagcacttggagcccttaaggacaccacaacagtctcgttggctaaagtcaacagtgattacaaggaattggacattgctatagttagagccacaaatcatgttgaacgtccggctaaggaaaaacatataagagctatattttcagctatctcagctacaaaacccaacgcttatgtttcctattgtatccacgcac

SEQ ID NO: 12427 - DNA, 272 bp, Glycine max
  modified_base (22)..(22): a, c, g, t, unknown, or other
tcgggcaaacaacaacactctntctctctcttcaattcagcttcttcagcttcagcgaaatcctggtctaaccgtagatcgtgccttttcttttgtgcctgagaagccacttctctacttgcgttgagtgagggagaggatgtctggtggcacacagaagagtctgagaaaagcacttggagcccttaaggacaccacaacagtctcgttggctaaggtcaacagtgattacaaggaattggacattgctatagttagagccacaaatcatg

SEQ ID NO: 12428 - DNA, 94 bp, Glycine max
caacaccaaatctggatggtggaccagatattccttcttctggcggctcatgcatggacaagaattgcttgaagaaactgagggaagcatcatc

SEQ ID NO: 12429 - DNA, 225 bp, Glycine max
gtgactgcatactaaagccagatgaaaagcgacggtatgctattatgttcgacttgatctttgtgagttcttgggatcctctctctgcatgcataagtacacttgacaacaagtgtcaaaacatgccaaatagtgaacgggctgtggtcaaggaaaaaatcaaccccaaagaaagggatacatgcagtggtggaatgaatggttacatattcttatgtggtggag

SEQ ID NO: 12430 - DNA, 353 bp, Glycine max
agcgatcgccagacactatagatatctattcgattcggcttcttgagctgcagcgaaatcctgtgctgaccagatatcgtgccttttcttttgcgcctgagaagccactcctatactcgcgctgagtgagggacaggatgtacggtggcccacataagagtgtgagctcaggacttggagcccttgacgacaccacagcagtctgcttggctaaggtcgacagtgattacaaggaatcggacattgctatagctagagccacatatcatgctgaacgtgcggctaccgaacaacatataagagctatatttctagctatctcagctacgagacccagcgctgatgaatcctat

SEQ ID NO: 12431 - DNA, 313 bp, Glycine max
accgcccacgcgtcaccccactcgttctctcacgcttccacccactcgtccttccacgcattcgtgcactcatcctaaatattgcatggtatatatcgcctgaagacccttctctacttgcgtcgagtcaagtagagcatgtatagtggcacacacaagactctgacagaaccacttagaccccttacggacaccacaacagtctccttggctaatgtcaacagtgattacaaggaatcggacattgctatagttagagcctcatatcatcgttaacgtccagctaatgaaaaacatataagatctatatttt

SEQ ID NO: 12432 - DNA, 338 bp, Glycine max
caaagacagagaaaaaatccaaagagtaaatggaacagaagagaaagcttgaagctagggtgaacaccattgaaaggagtgaagagaccaaggtgatgaaagttgatgtagaaacgttcaatctgtttacttcatgcagagctctcgacttcatcttggactacatgtatttcatgtcactacaatacctttagttcattatttattgtattttgttcttgattcttgtccttaatttatcataaaaactcttttcattcatagttttagaattcatatcaagttgtttatattttctgagaaatgaatatggttcttttctattactttgaatttat

SEQ ID NO: 12433 - DNA, 419 bp, Glycine max
  modified_base (363)..(363): a, c, g, t, unknown, or other
cacgcgtccgacaaaaactactatttttgtttcctatacagcagggaagaggaaccagttattttcggtgagaagtacaccggaaagtttttgcctaaagaaatcatggagggaatgcgagacacaaagtcacagcttgaaatccaagaccaagagggtactaatattgggtcctctttgtcaaagctcatattagcaagtggcagtggcacaaacacccttgactcaattttctccaattgcccacaaacaacaaatggcagcactagtagcaactccgtgttagatgatttagaaccctttaagtcttcggggtgtgagtctttaggctctttcgtgtaccttcgccaaaaggacatcctncaaaaattctaccaagaaagccgaagaaatgggaacaataacgggtcttataatat

SEQ ID NO: 12434 - DNA, 444 bp, Glycine max
  modified_base (388)..(388): a, c, g, t, unknown, or other
gatggagaaaactgttgatatcaatgagaacagtcaatttttggaagatctagaaatgcttagtgctgtacatgatgaacacctgccaagtttcaaagaagagacaagcacagatcaacctcaagatggattgggtgggatcaagctacagggaaatcccttggaacagctagggttgtacatgaaggatgaggatgaggaggaggatgaggaggaagaggatgaactgcctccgagtggtgctgtaggaccatcaaatgatgttgaagaaggagagattgattgatttgttccccttgattgttccattattttgaacggatatataaacggtatttctggggaacagttgctggacttagagatgctgcttttttgttgctacggngaacagttgctgaacaaataattacgggttgtatgtctgatgctggttcacaccta

SEQ ID NO: 12435 - DNA, 360 bp, Glycine max
cccacgcgtccgcccacgcgtccgataatggaagcagtcatgatactgatcttaataaaacgccacggcaaaaaccaaggagaagaaagcaccgtcccaaggtcatcaaagaaggcaaacccaaaagaactcggaagccagctaccccaaagcctgttcaatcaaaagaaaagcaacctgtcaagaggaagtatgtgagaaagaatgcactgaacaagacttctactcctccaacagaagagactggggaattgactaaagaaatgtcttgtaaaaagtccttaaatttcgacataagaacaacatatgaaagttctgctgccatagaaaatacaagaacgctattgggaaaagaaaatg

SEQ ID NO: 12436 - DNA, 401 bp, Glycine max
gaattaacaagtaaagcaaatctcactttttctctctatctttcctcttctggtgttcattggaaaggaatatatagactcgaatggaaaatgaagagttttggagctgattttgaagaattttggctatgatcttttcaagcacatgaatttataaaagatcagatttcaggaaacaagctcagataatttgctgctgctgccatgaaggagtttccttcttgttttggagaaaatggtgttcgggttgtagattcctcctattcaagcaccacaaggggagcacaaaatgctgttacttgtgtctatcagtgcaagttaagaagtcgttcatgcttgatcactgtctcttggaccaaaaatttgatgggacaaggcttgagtgtgggaatagatgaatt

SEQ ID NO: 12437 - DNA, 252 bp, Glycine max
atttactagctagtgatctataagaccacggtcagttctgaaaaatgggttccaaggctttgcttggtgtaactatgttcatagcggctatacttctgatctctgctgaggatgcaccccatgaatacgataatttcaacaaacacgacgggaagcatgctccaaatggaggatatgatagcaaatggcgttccagagcttggagtagaccttgctactgcggctgtggtggcccttactatggatgcagct

SEQ ID NO: 12438 - DNA, 362 bp, Glycine max
gatatctggagagacaggcttcctccactgtgaacgcagggtcattatctgacttatctaacgtagcgaatgcaagcctttacggctttgaggattaccatggaatagacatcggagttgttcgagctgttcgcctatggtatgctccggttgcaggagagttctctattgagatcaaactaaaagaggaagatgcaaagcttggctttgccattagtcgaactgaagagggatttattttcatctcatcagtgattaatcaagaaaatgtaccggccgcacgatcagggctgagcaatctctataaactagcaacggatacttgtaggatgttggtagtttcaagagtgttcaatcaaaaa

SEQ ID NO: 12439 - DNA, 146 bp, Glycine max
cactgcttctttctttcttgcagcgccgattgctgcatcctcctccaataagagctcgctagtagcgagaccctaacacggcggcaacgtgaggtgttcggtatatgtacatttcagccatggccgcatcaacccccacttctctg

SEQ ID NO: 12440 - DNA, 266 bp, Glycine max
tcgcccacgcgtccgccctaatcaaactgtgttgtttgcttaaaagggattctgtgatgtttctgttttttgttcaaccaaggtttttgtttttgatgatgtgtagattaagtagtttcattcgaagagaaatgttggagattggaggaaaaaaatagtactttgggtacacctaatctgattttttttttttctttttaaatggaagtgccattcacatgtgcaattttgattcacaattttaatgcaattgagttaatttttct

SEQ ID NO: 12441 - DNA, 284 bp, Glycine max
ctcacacttcctccctaatccaactgttttttttccttaaaagggattctccaatgtaacggtcctttattcaaccaaggttttcccttttcatgatctgtagattaagtaacttcattccactagaaatgctagtaatcggactaaacaaatactacttatagtacacctaatctgattatatattattctttttaaatgcaatttccattcacatgttcaatcttgactcacaacttttatgcaacttaattcatttttctaatacatataccattcacata

SEQ ID NO: 12442 - DNA, 304 bp, Glycine max
atcacacgttaccactaatacaactttgttttttccttacaaagaacttctccaaggtacggttttttattcaaccagcgtttttccttttcatgatgtctagactaaaaaactccattccaatataaatgttagagaattgacgaaaaaaatattactttaggtacacctaatctgaatattttttattcctttttaaaatgaatttccattcacattttcaatttttattcacaattttaattcaacttaatttatttttcttaaacaaaatcctcttatatacctttaaaacaaaaggctt

SEQ ID NO: 12443 - DNA, 51 bp, Glycine max
ctccacgcatactaaaaataaatattctacattttaatagctggaacttaa

SEQ ID NO: 12444 - DNA, 423 bp, Glycine max
gttaagatccttgttattattccttttcttttgagactatgttcttgtttggtgtcaaacgggtagaggattttcttctagtaatgatataaaattgttgatgaataagatggtgggtggatgtggatcaatcagtccatcgttgctcatttaatgggtctctgtctattcttccagatctgattcaattccgaattttccgccctattgatatttccaaatccacttgtctttatgtgaagcttttcaaatttgcgcaagtatctgtatttacccctgcactcactatctctatctgtcaacttccagtgctggaaaattcctttcaattctggctctgctttgttccaatttccaaacccaaacctacccacactttcgatcattgtcacactctgttgaactgaaaacataattgctact

SEQ ID NO: 12445 - DNA, 410 bp, Glycine max
cccacgcgtccggcccgggcgcggtgtccattgcgggccgagtgtttcggcccgcccggaagacgtggcggcccactagccacgttgtcgaatacggcgtcgtcttggactccgacggcaacgtcatcgatgaggttttggcggttccgatgctggcaccgaggtcctacacgcgcgaagacgtggtcgagcttcagtgccacgggagcgaagtgtgtctgcgccgcgtgcttaggacttgtttggaagcctgagcaacactcgctcaaccaggctagtttactcttcgcgcttttcttaacggtcggttggatctctcccaagccgaaaacgttgcaagattaattgccgcgaaatccgtggctgctgcagatgctgcactggaagggatccagggtgggttctcttct

SEQ ID NO: 12446 - DNA, 432 bp, Glycine max
cccacgcgtccgcagtgaactcttgccataggttatactatgacccccactgtgttcagtgtgttgtatggctgagatatataagtcaaaggtcatcaggtagcaaagcaaattttgggaacttacgggataaattcttataattagcattctatgctggcctagaccccacttgaccgcaatacgtcaataccaaaagaagaaaagaacaaattcctcaaatgcttaactagctgaaatgttcagggtaatataaagcagaaatcctaagatatgcggacatattttaagaagttttgtggaaagtagaaaaacagatttcaaaaaactcatcacatttgaagatattaagatgctacagaatttcaaacacaaaccaactatattataggaaaatataatttagtggtctccattttccttggggccggc

SEQ ID NO: 12447 - DNA, 306 bp, Glycine max
cgttgctaattgcttgcacttcctcctatggttgcttcctttgtttctcattagctggtttggtttttgtcttagttctacacctttcctcatttccgcagtagcaacctgcgaaccaatctctctgagaaaaaaaaaatggcgtcgaacgggaatggcagcgttgcgaacgggaacgggaccgctaggaacggactggcgaagattcagacgcacaagaagcataacggaatttgtcacgacgacagcggtccgaccgtaaaggctcaaaccattgatgagcttcactcgcttcaaaagaagaaa

SEQ ID NO: 12448 - DNA, 437 bp, Glycine max
  modified_base (252)..(252): a, c, g, t, unknown, or other
  modified_base (278)..(278): a, c, g, t, unknown, or other
gtgaagtgtgctttccaaatttcctttactcattcatagttttctttctttctcttggggccggtgtgagggagactgagaccgaagcaagagtcgatggcggacccctactactcatacggtgctccgggtagcgctgacggagctagcattgcaagggagcagctttgctggttatatcccctctgagccttcaaattccactgaattgaggggcattggatcagattacctgcagagagatataggctngttttacagtgctgatgataccttgngctccagagttcattctgagcctgttaagggttattcgcctcttgcagatccctgtctgagtaaaaaacgagatacaacaccattgggcattaataatggtgttcctgatgtaagcagtgaaagaccagcttctaaaagcagttatgacggtctaccaa

SEQ ID NO: 12449 - DNA, 384 bp, Glycine max
acaccttctctattttaagtaattcaatggcttacactgcaagtctcgtgttcttagcttgggctttccttatcataaactttcctcttctggcaaacgctatcggatgcaatggaccatgcagaaccctcaacgactgcgacggccaactcatttgcatcaactgaaggtgcaacgacgaccgcgacgtctgaacccacatctgctgcggcggaatgccatcaaatccgccaccaagcggcggaagctgccagtcctcgggaaccctaaattgcggctgaaaatcgtatcctcagtaccgttgctctccgtccgtaacttgctcgacgccggcgatcctgacgctgaacgacttcagcgaaggccgctactgatgggacccgt

SEQ ID NO: 12450 - DNA, 221 bp, Glycine max
caagggctgcgtatatgaattgcctttgctttgatgcatggaccatcaccctgatccctcggtgagctcgattgttcttggagagtgcgtacatctcatgcagaaaagcctattgcactacgacattacacactgggaaaccaaggtcattgctgctaagtatgggttacatgatcagctcaatgaagcattgcaccttaagaacagaccaactgactatg

SEQ ID NO: 12451 - DNA, 326 bp, Glycine max
  modified_base (60)..(60): a, c, g, t, unknown, or other
gtgtaattattccaaaaccttgtttcacttactagctaagaagcaaaaggagagcaccgnctggcactgcgcatgcagagaaaaacctaaagtggcggaagatgacggaggtggcgagatcagtggtgcacgacgttttggggcaaagagtggtcgacgtggaccagccaatcgtcgattatatcgtcaacgtcctcgccgacgatgacttcgatttcggcctcgacggcgaaagcgccttcgatgccctcggcgagctcctcgtcgccgccgactgcgtcgacgatttcttccactgccgctccgtatgcatgacgctgtgcgac

SEQ ID NO: 12452 - DNA, 236 bp, Glycine max
atgaagaaataataataataacaccccaatagaatagaagataggataagtcagtagggaagagccctttgtggttgtggttgtgggtaggtgctgctgctgcttccattcctattcttacagtgaaggttcaatggaagggacaatgcagcttgcatacgagactgttgtgaagctcatgctggctgcactcgaacgcaacgtgcttcctgacgtcatcaccaggagactcacgc

SEQ ID NO: 12453 - DNA, 317 bp, Glycine max
cccacgcgttcgcccacgcgtccgctcaatctgaacagattgaggttgaggtcgaagttgtgcgtgagcaccccaataaaacacctcctgttgttggttatttcccttccggatttgatccggtcaagaatcatggcggcggtccctccaattttcaagtttaccggcacaggagcatgcccaagatgctggagcttgtggttcgcccttcccggtcttcagtggaatttgttggaaccagttatgctggcgaggctgcggtcagacaccgtgccaagtacgcacttagggttcttgacaaggaagccggtacccct

SEQ ID NO: 12454 - DNA, 246 bp, Glycine max
gcctatctttcgcacacccttgcgctaaattctaactgatcatcgttaaggtagcacttgagcgcgaggagcatgcttagacagatcctgatgttcggtatatgacttccgtatctaaatcagtcttgcatcatggcttcggtccctcagattttgaagtttaccagcacatgatcattcatatcatgctcgttcttgtcgctagtacttccatttctgactggaattcgatggaaccatctatgc

SEQ ID NO: 12455 - DNA, 318 bp, Glycine max
ggcactgatcgtgcaaggagtctgaccacttggagtctgaatgtgtatttgtagcagaacggagtgtaacttacgaagctgagataaagcttggaagtggtttgctctcataaaattataatagtttagagactataaaacatcaaaacaatttccggacgcgtgggtccaaattctcacttagatcggttgggaatcgatgattttgatgtggaagaagaggtgagacctgattttccttgcccggattggtatgaagactttgacattgcgtctttggcttctcatcttggagattgacattcttgggaattaagg

SEQ ID NO: 12456 - DNA, 221 bp, Glycine max
cccacgcgtccgcccacgcgtccgcccacgcgttcgccagttacaatttaacattaacatcggcctaaacgccaaaccccccatgcccttttgatcccatcccacaattcaatgccctaacctaaccttccaaactacaaacccgttcggcagtttcccgtgctggacctcatcttgggggcgttctttggcctggggttcctctttttcatgctcgtctt

SEQ ID NO: 12457 - DNA, 178 bp, Glycine max
cacgccgttacgaagcttcgagttcagagggtcgacgcatcatagcattcaagctacggcggcggataccaccgttcgacgccgatctttttccaccgtttcttcatagagtaaagtcttcgcttctcccgttcatttcttcatatgaacgtcatggcattgtatccgtccaggtata

SEQ ID NO: 12458 - DNA, 169 bp, Glycine max
gaagaagggaagcagatagggttctagtatttataaaaaggtaatattgaggatggtgaaggtggaaattcatttaatgtaataagtaaagagtgattagtagtaattaggggtcaagaaacaaagtggagatcggagagagagagagagagagagaggtgggaaagga

SEQ ID NO: 12459 - DNA, 191 bp, Glycine max
atccgttacaattgcggtggtggactggatctgtgtgctggaaaatctgcttccttgaatggcctcattggacatccggctttgccaactggtgagaatggtgctaccagggctcccattagcattgaatcgaatagagacacctctttaagcagcaagtcaatcatcctgcatattgacaattcaactca

SEQ ID NO: 12460 - DNA, 359 bp, Glycine max
cccacgcgtccgcccacgcgtccgcccacgcgtccgcttttatgtggttggcttcctttcgcggtcttctctgcaaatgcttcattccaagatggttaggactctgtaggctgataaagacaacactcataccgttggaaagaaagatgctgctggccatgttgcttaatttagttcttgcttcctttgtcttcttgagttttatcagagacgggagtgcagggatcactagctctttcattcggtcagagtggccggcagttgacatcccccttgatcatgaagcatttgcagttccaaagggttataatgcacctcaacaagtgcacatcacgcaaggtgactatgatggaaaagca

SEQ ID NO: 12461 - DNA, 260 bp, Glycine max
acgaattatataactgcaaatgataaccatctgtgggagatgcagtatgttgcactgtttggtggtcgtgctaaactggttgaaggcaagaacaataggcttttgctggaacccatagatactagaatcattactgattggaaagaagctgttaaaggagcatatactggagcattatccaggatattaacaatccagtcgggatattgtggacactgcaaatcagtaggttgggtaaaataactaaaaatccccaaatg

SEQ ID NO: 12462 - DNA, 112 bp, Glycine max
cctagttcttgctgcatccaataggcctttctactgggatgtagctattattaggcgattggttagatggatgatgaggatgtcttccatctgtggagaacagggaaaagat

SEQ ID NO: 12463 - DNA, 253 bp, Glycine max
cttatttaaggatccatgctgacacatctcgtatcttgtcaagtacttgctgcaagcatgtcgtgtaaaacgatactagctatacatagatccgagcccataccacccaaaatggctaacgctctagatgttactagcttacgtacgcttgcactctacttcgttcctaataatatagcgacaccgaatctctatgcacttgcctgaagactacatcatctggactgggagaaccctgacccgacccaactta

SEQ ID NO: 12464 - DNA, 165 bp, Glycine max
cactcttatccttttgcaggagcttcaaagttaaagtgcgccttggggttgtttgggtagctggaatctccattacgtggatgaatcttctctgtgggggcacggaacagcaaaacaactaggaggaatatttggcaatgagttaattttattcatgtatacatt

SEQ ID NO: 12465 - DNA, 315 bp, Glycine max
agccctaactcatttacaaccaaagtcttaaatttcacaaacttatacaactattactgtcatgacatattacaaaatatctaaactaacataatactaaatattaataactattaacatcataacaacccatccttcactaactcaatcatttataccaacacctattcatatcataataccttaacaactattgaacctaatcccatctgatccctagttctcctacataatctctcccatcatctaaaacattccatatactaatatactctttattcttacctaaaaaatctttaaatatactcctataac

SEQ ID NO: 12466 - DNA, 321 bp, Glycine max
tcgccacaatgtattttattttatttattcttatcagtcacgaaaagcaattgccattgaatttagccaccattttttttaattctggtttatcaaccctaatttttaattatttttgcattttcattcaaagattcctttcctttccctctttgaaattcaagtgtttttaagaacaggccaattcagttgatttgcgtttcatattattcggctcggtatcaatcgagaagaaaaaaagcttctttttttttttttcggtttaatcggtaaatttgtcaagtttagggttttgtgcaattttgatttatgtgcgttctc

SEQ ID NO: 12467 - DNA, 324 bp, Glycine max
tcgggggaacatggagtggacaagaaaaaaacacgtttgttctgctgctgctgcacggaatggttcggatgatttctatgatggaatcccacggtttactgattctttttcccacaagtctaggtcagttaaatcaaggcatgctgtggcgaatgtctcagaggtgagtttacgcctgggcagagctggtattgacgttttggacactcttggaagcagtatgacaaatttaagtgctggtgggtttgtatctggagctttgacaaaggggaatgaaattggtattttagcatttgaggttgcaaacactattgtcaagggttt

SEQ ID NO: 12468 - DNA, 102 bp, Glycine max
gccagctggccttcgctggccccgttccggctttaccgtcgagcgtgaccccgtgtttgatagcaccgaggagattttgtgagcaatgtagtgctaatgatc

SEQ ID NO: 12469 - DNA, 412 bp, Glycine max
  modified_base (383)..(383): a, c, g, t, unknown, or other
  modified_base (390)..(390): a, c, g, t, unknown, or other
ctggctggttgtcgaagggtggatgcaagaaccatctctctttgatggaattgtcagcaaagatctcttggatggaactcaagtgcaacttaagtctacaaagtttaacaagtatctcacttctgaaaatgggggtggagctgatgttgtagccaaccgtgactcagcttctggttgggaaacattcaagctgtggaggatcagtgactcatccttcaacttgagagtgttcaacaagaaatttgttgggctggaaaatcatgggggtggaaacaaaattgaagcagtttcagactcaccaaacaacccggaaacttttgagattataagggatgacaacgaccccttcaaaattagaatcaaagcatcaaatggccactttntacaggntggatcagagacatcagtgact

SEQ ID NO: 12470 - DNA, 290 bp, Glycine max
ctctctctttctcgcgcgcgctacttattgtagatttctggttacatcaatttgtaagtgtatatgttggtgatcttcacgatcccgagtgtgggtttcagatactatctagtttttcttttaatttcattagaagaatggaagtactcgaaggatttcttttcgctttcaagttttggatctacacgacgaatcccaatccttacccttatgctaatgcaaggggaatttccgggttccgttccaacatgttcatgatattttaatctgatagctattaatataatgat

SEQ ID NO: 12471 - DNA, 284 bp, Glycine max
aaacttttgatcattgaagcagatttagaagaagcaggtaacgtttgttttattcgttgtttgggtcctttgagacgaaggattcgatttgatctgaaatagcttgattcgaagaagaatgaatggcggtgagaaagaggctatggccgaagtgaaggaatggcttgcgaagacgttcgaaagcgcgggtaaattcgttcctgaattcgaatacacgccgggcagcgtcaaacatttggaccatctcatgactcttttcaaagccaaagacgaatccgcgcgcc

SEQ ID NO: 12472 - DNA, 145 bp, Glycine max
aaaaaaaaaaacatagaaaaaaaaaaattcaaattgaaaggccggtcgctctaattcgaggctacgtgacctacgcttgcatgcgacgactttgctcttgtatagtgtgacctaaattcaattgactggcacactcttcacatct

SEQ ID NO: 12473 - DNA, 308 bp, Glycine max
ggggaacatggagtggacaagaaaaaaacacgtttgttctgctgctgctgcagggaatggttggggtgatttctatgatggaatcccacggtttactgattctttttcccacaagtctatgtcagtaaaatcaaggcatgctgtggcgaaagtctcagaggtgagtttacgcctgggcagagctggtattgacgttttggacactcttggaagcagtatgacaaatttaagtgctggtgggtttgtatcttgagctgtgacaaatgggaatgaaattggtattttagcatttgagggtgcaaacacta

SEQ ID NO: 12474 - DNA, 55 bp, Glycine max
acgcccacgcgtccgaaaacacagaagaataagaacttctcttcttgtaattacg

SEQ ID NO: 12475 - DNA, 372 bp, Glycine max
ctcgctctccgtatagcaggtcacctgtcagcatgcatgacagatcatactctgcgggtgaagtgcgatatgactcggcggatgcgcactcctacagaaggcaccgttaccgatctgtttcacgaagtgcctcgcctgatgatccttattatggaaggcaccgttacaggtctgtttctcggagtgcctcacccaggccaaggagaaggtcaaggaggagctactcacggagtgctacacctgtttcaaagagaagcaactcacgaaatgtgtcctccaggtcaaggaggagccattcaagaagctctaagaggagtggcaaatgtgagaaacgctacttaagaagctcgagtgtgaatgcaagttcaagat

SEQ ID NO: 12476 - DNA, 182 bp, Glycine max
caacaagaacgatcagcagctattctctcacggtcatttaaaatgtgccatgataagctggtgagaggagagagtattattcttcatggagactcaaggtaaatgatttgtgaagccgcatagcaaatgcaaattaatctcctagtcttgggtagccggggccttggcacgctcaaaagaca

SEQ ID NO: 12477 - DNA, 407 bp, Glycine max
ggcttcatcaacgttgctctcggagctgatggtggcgatcgggaagaacaacaacacgggagagactaccgtagtagaagctcctgggctgaagtcgtctcccaggatcaacaagatcaccctcttgctcatcaccaacacaaggaacaatatcgtcctcagcacgaggagccccaatctcaaagttcctacaaaccctagaaggtggatgaaggtgaagatggatggcagactgttggtagaaagccttcaaggcatgcacataaggttcaaaaggactactggaacagctattaacgacctgctgatgagcaagaatactctaacgaggttgaagtaggagcttatgtggagccctcacaagatgtacttgctgatctgtcaagagcttgcgaaaaactctgggc

SEQ ID NO: 12478 - DNA, 387 bp, Glycine max
cccacgcgtccgcccacgcgtccgctttgatttctgttatgtgaattcaagtgatgctgactcgatcaattttttttatggttgcgtttgcagcaaaacctattgccctttctgcgtcgatgtgaagaagctcttcggtgacctcggtgccaattacaaggccatcgaactcgacactgaatgtgcgtcccttttcaattcttttctctttttctttcgctaaacccttttatttaaaaaaatcgtgaagctgttcgccaccgaattgttgtctgataagacatgtgagtcagcctgttttcgaatcgtttcgcggcatgcttttttttattattattattgaaaaatggctgtagttctatgttaaaacatctttagtgaaagaac

SEQ ID NO: 12479 - DNA, 381 bp, Glycine max
tcggaggaaaacctctcattgtctctatctttctctctaaacacagatttcatttacaactgtctatgtctagaaaatgggaacaacaattcttcgttcccacgattgcctccaatgcctgttccttcacaacgaaaccttttacattgccgcatcaagtgtcgcatcgcgaagaaactctaaccctaacaataatagctacgtcttctacgccaaaccaaaccgctgccggaagcggagtccggtcaccaatcgagaccgccgtcgatctgcggccaatgccaccttgacggcaaatctcttcatagcacacgcttagatcctgaaacgaggccagaaaatgagcctccataataataccaaccaaagactcccggagaa

SEQ ID NO: 12480 - DNA, 440 bp, Glycine max
aggtcgtacatccatttgatgctcaagctgagggggagttaagcctatcagttggggattttgttgtagttcgtcaggttggacccaatggatggtctgaaggagaatgcaaaggcaatgctggatggtttccctctgcttatgtagagagacaggacatgataccagccagcaagataacagaataacttcacaggataccaacattggtcttttgattaggtgaggcaaaaattgtatattataatcacggaatagatgcagcatttgaaaagccatagcatgtgcttgccattatttttgggtggttctatcatctcatctgtgcaatatgttgtatatgcgagtcataattgaaataggaaatagcactggcagtttgaatatgtaattgatatgtttattattggcatttgctttggccctttggtcaggaactt

SEQ ID NO: 12481 - DNA, 414 bp, Glycine max
ccaaaacaaacttcaaacataacttctttgtgaaccaaattgatattatggcagaggctcagagaattcaccctgtgcaccatgatgttgaggcacaaaaccacccttcagcaccattggtgccaaggagcatgtccaaatctgatgcaggtgatccacaacgagtagtagtacaacaacaacaacaaaacattcctctgaagcaaaccaagccaccaccgaagaaaagaagaagctgctgctgcaggttcttctgttggctaataagcatattgctgattctgatagtggcaattggcatcactgttggaatactctaccttgtcttcaagccaaagcttccaaagtactcggtggacgaacttagagtcacacactttgatcttgcagacaacaacagcttatcagtgacat

SEQ ID NO: 12482 - DNA, 305 bp, Glycine max
tcgatccgttgctagaacataacgtgcatacgatttccaaatatgatccatgtctgagacctaaaggttacccattactgaccattcaaaggatgcactgatcagatgtctatcatcatctatggatataatcataatctaatctgatgcgtatgatccacacaatgttctggtacatcaactacctcttcaaatttttcggataatatcctatccaagtcttatgattggatcactctctagttcaacgagctctgttaacgattatgcatatggtctggtactattcagactatagtaattac

SEQ ID NO: 12483 - DNA, 152 bp, Glycine max
aattagcatccctattatggcgagggcatagtactccgcattgtttgtgacatgatggtacctgggcacgtgtatctacaactgctctgcaatcttatgatctgacgccctatgctatatatagcgttacagatagagccccataacaaagg

SEQ ID NO: 12484 - DNA, 172 bp, Glycine max
aaaataaataaataggtttaattgaaattcaatgtggtttcggctctggcactcaatgcaccagggctagcgtccccatgcatggagcgactgattgtcctatcgaggcgccataaatcaactacctggactgacgtatacacctgacgtacgtgtgaaaacggctgactcg

SEQ ID NO: 12485 - DNA, 343 bp, Glycine max
gaagttggctaatatgtcgattggtactcgaagacaatccttaggacaaacccgtccggctccgatgaaagctggagtcaattggatttctgaatctggaaatttcatgctcaagtccggacaacaaattccatctgaaagaagtttgacaagaaaagttgccgggtgagatgatgagaaagttttgctgactttggagattctttgatgatcaatatttttaagtcttctaatgatgatattgggtttgcacctcttgccctgatgcgtttggtgatgatttttggttctattacgggtttgatatgttttttttggggagatactgtcagttttacatttg

SEQ ID NO: 12486 - DNA, 238 bp, Glycine max
gccacgcgttcgtacgcctaccggttcacgaattccatacttacggcaaaccatcagcgacttcgagtcacgctgcagcaactgggacatctgcatctggtagactaatgctacagtccgaaccacataattgttccagtagaagactgatatgaagaggtccacaaccagatcatgacatgtatttactgactgtggagaccttatgatgaacaatccatttacaactattaatgat

SEQ ID NO: 12487 - DNA, 201 bp, Glycine max
ctcagtctgggattattgttgcccttgcaaacatcaaaacgaaattgaaatctctgtcccttgtgaagtgcatggcagtcaaagatatcgatatggaagtgccgctactttcatctagtgagtcttttcgatcataaatcattccaaagttaacctgtttttgtacctacttgcttgcccttgattggaaaatgctttccc

SEQ ID NO: 12488 - DNA, 405 bp, Glycine max
gtccaatattcctattattccttatccttctcgaccaatccatttcggcgagtgctgctataaatattaatggtctgagaaacaaaattagagaagttctaaacaagcacccgagcatcaatcttccggcagataaactgaagaaggtgaagagaccactgaaggcactggattatctgcttggcgaatgtaaggacaggccgcctcaagaatttcaagaattttgcccgaaatttaagaacgattatcaacaaaattgcccgaatgccgcgtatgaagcagtttgcccgttactgaagcaagcgattcaaatatgttgccagaaacacgcataactctgcaagccacggtgggcgtttggatgtgcttttagttaccactttctctcttggatttgcttacgta

SEQ ID NO: 12489 - DNA, 466 bp, Glycine max
ggttgagacttgagagaaattaaaaaagccaataacaaaacaaaacaaggaacctgagagagggtgagacttgagagaaagagagagctgaagtagagtccgaaccaagtctcatagctgagagtttaggatcggaattctgcctccgttcttcttcatctcacctaccaccttaacctcgggattaaagaagtcatggctatatggggtggttgatggaagatattagcacaaacttggtttgcttctatgagccaaatctcgtgtttccttctgcttcataatggtcttgaagggtctatgtgagaggattgtttcttcaaaatgctcttctaaaagctcaaccgagactgtagataatacacagtggttgaaacatatagtgaatcatcagcttctgaaaagaaagcagttccttctcgaagtaatgggtgggcagctgctgttaagaaaagttgtactggtg

SEQ ID NO: 12490 - DNA, 256 bp, Glycine max
ctttgtttgcaggcaaattctgttccgctagctaaggatgatgcaagttaactagctatataagttcaccaaaggcttgacagcagacataataagagtcatttatgtaaatataatagtctgcttctcgtgttttgaaatctagtgaggcgacctagaggagtttcatggaagacttgtcttgtctatgttaacttcgattatgtaagagatggcgagcactggttgttgaaattgggatgtctcttggtttcgt

SEQ ID NO: 12491 - DNA, 202 bp, Glycine max
acgggtagttcacacactaagttctgaaaaatgagttccaaagttcttcttattctacttatgttcatggccactatacttttgatctcctctgacgttgcacccgatgatgcataccagaattttgacaaaacagatgggaagcgtattgcaaatggggtagatgaaagctgatattggcgtgggggctatggcgactatg

SEQ ID NO: 12492 - DNA, 203 bp, Glycine max
cgtacattctagtggtaatgcgactgttgctgtcaaaatatagcctgatgtagacatgagtacgccaaatttgtagactggaacttcacttaaataatatgattttatatcaactaatctaccaaaatccattagatctatgcctgtataggatcacccttacactgtcagactacaggacttggatattaccttatcattta

SEQ ID NO: 12493 - DNA, 442 bp, Glycine max
  modified_base (381)..(381): a, c, g, t, unknown, or other
ctttccttttcttttctccctccaagatcacatttttctttgacccttttgctccgtgtatctgaaattcccctctccacccactttccctttaagtcaatttcatgcttctctgtctcagatcctagatcttgctgtcggtgggttgatcggagtagatgtcgccgtcaaacgggttgcagaacggcggcggcggcggcggtaatggggtgagttatatagagcaccaggtttcaaaacttgacactcttgctggtgtggcaatcaagtacggtgttgaggtagctgacatcaaaaggatgaatgggttagccacagatcttcaaatgtttgcactgaagacattgaaaattccattaccaggacgtcatccgccatctncttctcctggtccacatgaagaacctacaaaatcaagagatgctagcagtgagaggaaccc

SEQ ID NO: 12494 - DNA, 335 bp, Glycine max
ctgaagtccatgttggcacgcagcagtctctgcacgtgccacatggtgttctccgtcgaccgggttactcccaccttcgtgtctgtgttttctgccaaggccagagtgttggctttccgcttccaattgcggaggaacacagacctcgttaccggccaactttccaactctttcgccttcaatttcggattggattcccagagtttgaattccattgaatcccatgctgcaccacagttgccttggactggtccagttccaggtgacattgctgaagtggaggcatattgtaagatctttaggaattccgaaaggcttcattctgcgttaatgca

SEQ ID NO: 12495 - DNA, 302 bp, Glycine max
cccacgcgtccgcgagaacatcgtcaaaaagtttaagggtgaataattagcagctgcttctagttccggtgtcggtgtgggtgtttgaatctggtgaaggatgtcaattgttccaatcaaccagggtgatgccaacggctccaaccccttcgcttcgtggggtcaattcgtggattttcctctccctccttccatctccggcttcttccccggcttggaatacggattcggattctgatcatccgtgaacacacgtgtggactggagggagactactagagcgcacgtgtggaagctggtgc

SEQ ID NO: 12496 - DNA, 352 bp, Glycine max
atgaaatggggtttattcatttcttaatacacttagttcgagttacattttctcatggaaaaaggattgtggtaggaagaatggatttctcaatgggaaatagcagatgttaagtttgtttttggtatttttttggtgtatagcatatttttggtattttttttaacttacatattgggcctattgtgaaccaatggccacaaagcatttgactgtttggtccttaaaattgggttcctccttgtgaaacgtttgtaacatgcaaacttgccaaatgacaatggactattgcttcctgcaccttctttatggcttatggaatggtcaatccagaatgcactctctttttgac

SEQ ID NO: 12497 - DNA, 298 bp, Glycine max
ctttcatttgcttcggaattcgagaatgagagaagaggttatcagctccggaggcaccgttgatccaacacctgctgccagttctgctggggcatcatccccagctgttccaatgaatgttggcagcatagatgggtcaagtcatggacaagtctctaaagcggcttctctctcatgtgttggttcacaaccaccatggacttcattgagcacaagtgctggtggttctgcttttggttcttcaagatcttcatgtagaccttgggaaagaggagatttattaagacgtttggctaca

SEQ ID NO: 12498 - DNA, 76 bp, Glycine max
aataactccattttccctctgtcttccccccttcctctacacaaaaatatattattagcatgggggaaggtgaatt

SEQ ID NO: 12499 - DNA, 271 bp, Glycine max
cccacgcgtccggctgttgttgattgagttggtgactgtgattatattttgtttgtttggtggatagcggagattattttctgctttcctttgatggtcatatttgttattgtaattagtcaatttctcatgtttttcaaaattagttttgttcggtgatcttctgattatgtgtgctgttacacacccctggcagaaaacggttcattgtcccacagaacgataggcattaccatgattcagttttgttagcttatttccgtagttgaat

SEQ ID NO: 12500 - DNA, 174 bp, Glycine max
cccacgcgtccgcccacgcgtccgggcgaaattgacagggttttagattccacaagagactcaaatgcatcaaaggaggagacaaatggtatgccttctctgacaaaagaagaaacaaatggtagtccttcaaaagctgatgcaattctagataaaccagtagaagcagatctc

SEQ ID NO: 12501 - DNA, 245 bp, Glycine max
cccacgcgtccggtttctctgattttgttgagatactagatcatggattggtactatgggaacggcattaatgattatctggttcccagagatcaggatttattggacaggcatccttcaccagactattggtcaaactggggaataagtgcaactgaagatcattctagcagttcaagtgtatgtgggggattgcctgagcaatcttttcaacagacagcattttaatgcgatcagcttaatta

SEQ ID NO: 12502 - DNA, 292 bp, Glycine max
aaagaaaacaaaaacaaaacatcaatctgcattttggcattgggctcttcttgtttagtttgtttgttccaatccaacgttggtttggttgtgtgtgtgtgtttgtgttgggaagaataggaatagcattgggaatcaatcagcgaccccatgagacctcagagaacgtcgatccacgccgtcacgacatgtgtgaggcgacagcctccaaaggtgaaggcttttctcgccgtcgtttccagcatggcagctctcgtgctccttcgcttcatcgtccacgatcatgacaacc

SEQ ID NO: 12503 - DNA, 312 bp, Glycine max
gaagggggaaatctcttcttcaatggcggcagagtcatctcgcagtagcgctaaacgcccctggatggaagaagacgacaatgaattctccaaaaagccaccagaaaaaagggttaggtttccaaagggaaagaaagtgaagccaggagatgaagtggtggtggacaaagcaaatgttgaggagggtgaagttgacttggtgaatgctaaaactgccaccaatgctgcaaaagagcgggaaaaactcagaaggtttctaaagggaaagaaagtgaagccaggagatgaagtggtggtggacaaagcaaatgt

SEQ ID NO: 12504 - DNA, 455 bp, Glycine max
  modified_base (141)..(141): a, c, g, t, unknown, or other
  modified_base (148)..(148): a, c, g, t, unknown, or other
  modified_base (315)..(315): a, c, g, t, unknown, or other
  modified_base (424)..(424): a, c, g, t, unknown, or other
  modified_base (438)..(438): a, c, g, t, unknown, or other
cggacgcgtgggcggacgcgtgggagacctaataatggtttatatctctaacaatgacactgagaatttcttgcaaaaactgtgccgtcataaaataattaaaaaatcaattttctttcaattgattgaatttgaactcanaattcangatcatagaaatataaaatttagcctgctcaatattgatcaacaaataataacgtatggacacactataacaataacaaccaagatttatcccagtagatcagattggcaacatggattaatcatcgacattgagctataataaaaaccaaacttctcagtgaacanagcattcaaggttttttccaatgtcttaacaatatggacactaaaaacataaagttaatgtacaatatgtaacagtcaacactaaacagattgtaactcttaattattngtttataaaagcanaatcatgacagcaagga

SEQ ID NO: 12505 - DNA, 281 bp, Glycine max
gatagtccgccgcatgcaaccacagttatattacgattccacttactgtgaccctaaggatgagttgtactagctgtgctgacatctataactttccaaatccattctcattcaatgcattagatcgaacttccaactgcgagagtttctctactgtgacatagccatggctatattcatcaacggatttgaacgtttggacacactgtcgcaaatacccccatgactgcttccactagatgataaccctaacatacattgattataggccttgacctata

SEQ ID NO: 12506 - DNA, 336 bp, Glycine max
aaagatgtcaaattgctgaaaaagaagctgtaagggctactgaagtagctgacaaagctagggctgaagccaacttggctcagaaggagatgagcgagatgcagaggcttgcaattgagagactggcacatattgaaagggctgagaggaaaattgaaaatttggagagggagaaagataatttggaaggtgaattgcaaagagtgagggattcagagaaagatgcacttgttagggtttcaacactagaagaaaaggtgggacagagagagaaagatatagattcactcttggagaaagatggaacacagaagcgaaatagcacacagattcttg

SEQ ID NO: 12507 - DNA, 339 bp, Glycine max
  modified_base (230)..(230): a, c, g, t, unknown, or other
tggacatcagtcctgaagcaacagttgaggaggaagatgacaccgaagtagaggctgaaagtgagtcaaagcctgaagctgatgcggttcatgatggtgatgttgatgatgccaaggacgagttgtagatttgcatgacatccactatttaatgacggtgctgtcggttccctttgtttttcatggtttcagctttaagatagaccgtaaaagccttctctagcatgagntttttatttcacaagttgttaaaggagaacattagtcttactgtaatcatactatcccttggaattttgccgtaccatatcagtcttaacacaatgttcaagttcctag

SEQ ID NO: 12508 - DNA, 207 bp, Glycine max
atctaacctacttgcacacatgcataacaatcccgttttctcttgaactgccccaggggaactggtccgaaacccgattaaggcacctaaccattggaagattgggccctagaagtacctaaggcacccatctgttgcctaaggtcaaggtcgaaaaccctgacacaatactaactctcgacacatttaaaaccctgagcacacacc

SEQ ID NO: 12509 - DNA, 370 bp, Glycine max
aaaaaatcacaaaccaagcttaattacccaagagagaaattaagaagctagtttgcgtgttttggggtgaactcagggagtcagatagataatactgatccctcgagatattgagattcatctaagagattaatatcatcctacccaaccacaagcttagattgaaacaagatggaagtggtggtacaaagtcctagtagtccaaccatggataatttcgattttggtggcaacatgggttcgatctatcaaagtgttccttcttcaccaaaaggttttggtaattactacctaagcgcacccgcgagtccatctaggatgtctgaattattcagcgaatttgaatattattcttcagcttcaccctctt

SEQ ID NO: 12510 - DNA, 317 bp, Glycine max
gcagaggaatgcacctctaccactggagatacctcttctgcgtctgttgctggtgtctcagaagtggacacaaaagttgaatttgatttaaatgaagggttcaatgcagatgatgggaaatgtagtgagatgcctgggtctacacctgctgcaagattggtcagtcctgttccaattttctgcttcatccatgtctttttggtattctctcgatcacagtagctggttgttgcaaagagcccctttgtggcacctgaagatttattgaaaagtaaaaaggagcttggttggaagggatctgctgctactagtgcatt

SEQ ID NO: 12511 - DNA, 340 bp, Glycine max
cttagcaatagctacccctatcacaacaatactctattaggcaaaaacaccaaatgggagaggaaaaagagcagcctaagaatgaaaccgagaagaagcccgaggaggccgccgcagcccccaagaaagacgacggacccatccctgtcgtttacaaactcgacttgcattgcgagggatgcgtcaagaagatcaaacgcacatgtcgccacttccaaggtgtggaaaccgttaaggcagatctatcgtcgaacaaagtgactgttaccggcaaattggatgccgagaagctgcgagataagatcgccgagagaaccaagaagaagggtgacatcatctc

SEQ ID NO: 12512 - DNA, 356 bp, Glycine max
tttcattctcattgccgtcacagagagagacatgaaacaatgaagtttaaccctagggtttcctcaagccgtcgcaagagccgcaaggctcacttcaccgctccgtcgagcgtgcgccgcgtcctgatgagcgcgcctctctccaccgatctccggtcaaagtacaacgtgcggtccattccggttcgcaaggacgacgaggttcaagtcgtgaggggaacctacaagggccgcgagggcaaagtggtccaagtctatcgccgcaagtgggtcattcacattgagcgcattacccgcgagaagggtaacggcttcaccgttaacgttggcattcaccctttcaaggttgtcgtcac

SEQ ID NO: 12513 - DNA, 54 bp, Glycine max
tttcattctcattgccgtcacaaacatttactttaaacaatcacctttaaccct

SEQ ID NO: 12514 - DNA, 393 bp, Glycine max
gagagataaagttaaagaaattaaatagcaccaatttcgcccacgaaaccctctctgttgtctcgtcgcttcaaactcctctgcggtttccccttcttggtcttcttcacagaaatggaggtagcagtggccaaagcgttgaaaccgagtttaaggagagagttcatcgttcagcaaatgctctgcgaggatattttcagcctgaacgccaacaccgtcgccgccggcgaagatttctccgtcgacgacctatttgacttctctaacggctctcttcacaacgaacaacaacaagaatacgacgaagggaaacaaagtttatcggcttcagaggaccgcggagaagacgattgcaactccaattccaccggcgtttcctatgattcacttttc

SEQ ID NO: 12515 - DNA, 394 bp, Glycine max
gtttcttgagggtactaatatgaacagaatctcctctcaacacctttgccttgctgcagttcggaactgcaactgcactcaaatataaatatatatacatatatatatatatatatatatatgtattacttcatggtcacacatagttaagtttattaattactaggtagctggttttgaatagggtagttggtagttatagttgttgtcccagatatggaagaagcaggtttaggagattgttgttcctcgaattcgacgattacgaggaagagcgataagcgaaagcagcaacaccaacaacaagagaagccatacagaggaataaggatgaggaagtggtgcaagtgggtggcggagatatgagaccccataagcgttcgaggatctggct

SEQ ID NO: 12516 - DNA, 446 bp, Glycine max
gagcgtgtcatcaccgtggagaactttctgaggtatcatcctacctgtgtgaagcagctcttgagcaaaggctcaaatcacaactgagcagacaaatcaaatacaccaccaagtatcagatcattgcggttgctaaaagacgacgtggtcaaaccccaacaccatagaagtatctaaggctgagaactattcgtgctcaacggcgttctccaagtgaacttactcgtcgataccctagctattctacttatataaaaagctatagccgggctacctattcttcaaaccgaactaggagtcgttcttactctactgactataagacgaggaagtcaaactatccatatcactctaggcgaatgtcatactctccatactacagccggtacaggtcttattctcgatatgatcgacacaagtcatattctcactcttgctctccttat

SEQ ID NO: 12517 - DNA, 438 bp, Glycine max
gcttaccagaatttcgtagacttctaagaactgcaagcatgggttctcgaacagtaatgagcccaagtgagcgtcatcatcgaaagatttagattagatatgtttcggagacagggataattcaggagatgagagtgatggatttccttttaagatgatgatctcttatgcagattgtgctgaagccctccttgtgatatctattctgctgcacattttgcactctgaccatcattatatggaactctgaaactagagttaatattgactatggcataccacacaggattgtgtgttaagcttagtctagacgaccatgtcaagaggaatttaaatagtgtgtggattgacttgaggtatcagagtttcatcggtgtacatcattggcttggttgtgccatacatgtaatgtgtaatactgtaactataaataaaaac

SEQ ID NO: 12518 - DNA, 398 bp, Glycine max
cacagagaaccaagcaaacaatgggtactgacaagtcaaaccgggtcgggttagtgatatccagggctgacccgattcgggatttcctttccgacgcatcaaaagacgcgactctctccgacgaacttcaacgaacattctccgatctgctccttcagtcggagataccctacgtgccatttcgcactgtgtggatggcctctgacccatcaaccagacccgacttgacccgactcttttcgggcacccgcttcatcttcttcagccctaagcccaaggaaaagagtgaagaattgaaagcgaagcttaaaaagttggaagatatagcggagaggaaagcgtatcaagagcttgtgaaggatattacgccgcctaaggatgttcaagaacccttctct

SEQ ID NO: 12519 - DNA, 297 bp, Glycine max
gcggagaagaaggacaggcttctgtcttcgattatgcggcatgaggaagaggaatatgagtagggagaacccatgtggtggctgtcgaagtcgaacagtgataatcccgttcatgataaggcttgacatatggatccttctgagccaaggaagatgattttgtctgttaaaatgtgacttgctatgacccttatttcctatcttaattggtctacagaaccatcctttaaagatatgagccgctactactgctactacattctaactgtcatcggtgacttttgattcaccataggg

SEQ ID NO: 12520 - DNA, 426 bp, Glycine max
  modified_base (364)..(364): a, c, g, t, unknown, or other
gcagtttattctatcatatccttgttcaaataattttcttttcaattacaataccccaatcccagaaacttatgttcatgaccatcctcaaggtcccaataacatttacttgaagacaattttgagttgaccttacagcctagttccacctatacaaacacccttgatccttcattcttttttgagttgaccttacctagctccaatactggcaacaataatactcttgggcatctgaactatctccattctttttttccccctttctttgcagtggatttgcgaggttttaaagaaattaaatgcgtttttatgtgctaaagagctaggtaattatagaattcatctcacacatacttctttntactacctttaatcttttagattttattcttgaattatcgttgtttaacggagtaattaaat

SEQ ID NO: 12521 - DNA, 371 bp, Glycine max
ggggaacatggagtggacaagaaaaaaacaagatggttctgctgctgctgcagggaatggttctgatgatttctatgatggaatcccacggtttactgattctttttcccacaagtctaggtcagtaaaatcaaggcatgctgtggcgaaggtctcagaggtgagtttacgcctgggcagagctggtattgacgttttggacactcttggaagcagtatgacaaatttaagtgctggtgggtttgtatctggagctgtgacaaaggggaatgaaattggtattttagcatttgaagttgcaaacactattgtcaagggttttagtcttatggaatctctttcgacaaaaagtattaagcatttaaaaagag

SEQ ID NO: 12522 - DNA, 238 bp, Glycine max
cccacgcgtccgaaaatcaaaggaatcgtctacagccagctaaactgtaagcaaccatgatggagtggtgtaatttactaatcaactgagtcttaggttgataaaggagcctacctaaccggaactagttgcaatgacctttttccaaccaaaggattgaaaagccatttttgatgaatttaccattttcggatagctaaatagttgggccatttcctccgggtttttaacccctttt

SEQ ID NO: 12523 - DNA, 286 bp, Glycine max
cccacgcgtccgcccacgcgtccgcccacgcgtccgattgaaagttattgatgaagttgccagcgtgtaatttgaagttgaagcactagcatatttggcgttttgaaaaggataaaaatgtgccccttgattaatatatgcagttcaatagtgtctgagtgagcgaaatgcaggacgttggaaatggttctatgtactatttggcttgtatgcttgtattacaacgctaataagaatattaaatgagcttgctggagaaaaataaaataagaacatattatctatt

SEQ ID NO: 12524 - DNA, 228 bp, Glycine max
tccgaaggtggcagcccctacgacctactctgctacgcttgcggtggctcttcccattaacatggtaatgtggtattagccattagcattacatcctacaccttcaaaaggtctatttattatctggttccagtgacttatgtatccctctatagctgtattcctgctaagtttggcttatgatatctggatcctttggtcgatttttatcgggttaagacaatgatt

SEQ ID NO: 12525 - DNA, 460 bp, Glycine max
  modified_base (367)..(367): a, c, g, t, unknown, or other
  modified_base (377)..(377): a, c, g, t, unknown, or other
agtcaatttccccaacgaggacgaccctctgccgcaatacggatcttgcaagagcctcaacttggagttcgggtacgatctcaaccaaacagggcttttcccttcttctaacgctgatgagaattgcgggtcccacgtggcttactccgttacggaagccaacaacaaagtagagaagctttccgaggagcttatggcgtacgagaatttaatgaggttttatcagattccggaaaacgtcgttggggatttgtgggcctttcctgacacctctccacctctctgatttctgtcacatcgtttcttctatcattaattctccaattctgttcttaaaatatgatatgtacaatcagcaatttcaatntgcatgtatntaactttcagactcttaggagatgtttggttcgggtggtttctggtttcaatttcaactgaaataaaaaacggtgatgaaaat

SEQ ID NO: 12526 - DNA, 283 bp, Glycine max
ccatcgccttctaaaggacgagaatcaggagaggcatatagcactgctggaacgactttctaagcgcactaagatccgtgcacagagtgactagtcttggttcatactcatacgcttctagcatctaaaagcctgcatagagtgactaactaagtccaatgaacaatacattttctgagaccctttcaagctaagactggacattaagcaaagctacgaatctatctgcgaattagaagaactagtctcagaaaactgctactccctacgactggtacgacgt

SEQ ID NO: 12527 - DNA, 298 bp, Glycine max
tcggccacgcgttccgctggttcttcttttggacaccccagatttcgaggaacccaactttccttgggtctcaatgaaaaggtttggtcttttggcttttcttctggttgggtggattggggtatctggattttcaacaaccaccattggtaaagtcccaggtcctggcttggattccttgccagctggctccttgaggtgttttgtccgattggatggtgttcgaagtttttgcgaaattaaagaaacactgcatacaacacaactgtaacttcatccaagaatctcaattcaattt

SEQ ID NO: 12528 - DNA, 159 bp, Glycine max
cccacactaccttcaaaccctaatttacatctttttaaatctcaataaacctagggggcgattcggtctcatttaaaaggtgcatagatatgacttatctacaaagcctgtcaatatactaatattaaattctatcatcaacaattactcaactacaac

SEQ ID NO: 12529 - DNA, 59 bp, Glycine max
taacaatctcataaataaataatcagaacgatttagaagaataattgaattccaaaaat

SEQ ID NO: 12530 - DNA, 443 bp, Glycine max
  modified_base (332)..(332): a, c, g, t, unknown, or other
  modified_base (338)..(339): a, c, g, t, unknown, or other
  modified_base (426)..(426): a, c, g, t, unknown, or other
gggtgaagagcacacccacacatcacatcaacatggcatagcttatccttaaatcccaattctaattctcttcttcatttcctttccccaaacaaacatggctcttctctctttcaattccttcacactctcccctctccattcaccattactcccctcttcttccacttttgctcttcccaccacctctgcttcaagagcaaacgtgattctgcccccgaagcccttgaatggagttcgaatctcgacacccaaaaggaggactgagtcggtgattgtctccgccgccgcggaggacgcgagttcggctgtggagggtgggtcgccgccgncttctnncgcggagagcgagaaagagagcggcgcctccgtggagaagcttccgttggagtcgaaggtgaaagagaaagaggagccaaagctgangatgaagctggcgaaga

SEQ ID NO: 12531 - DNA, 274 bp, Glycine max
gacagacacatagacacgcgtccgagtacaacaagatcacgacacagcgagagtaatatagtgaggtgaaacaccatgagctgcaacctgtgagataaacagctgaagtcgtgtagcatacattgcacgtgctatcatgactacgttgacgtgcgttacggtttgactgcagacacagagactgttgaattgcctgttatggctgtgcagtcacaaattggggatgctaactactgtgaagcgtgatgaatcggaagcattgactgcgcatgat

SEQ ID NO: 12532 - DNA, 345 bp, Glycine max
acgaacagatcttgctatatactccatttgccgtatctgaaacttcaaacgcagaactgggactcgggcaaataataatttctcagagactcatgtgtatactatgtttacactaacgtacacacttccgtttatcaaatccaatctactgaattcaagagactactagctacttacaactagcatattctggatcatgctgacgcgactctatactctaagctcttgaatggagttggaatctatgctctcactacgaggactatactcagatattgtctgccaaagcgactacaaatctagatctcttgtcaatggcgagaacgccccgcatcatttccttga

SEQ ID NO: 12533 - DNA, 331 bp, Glycine max
aaaacagattcagttcctaattactcaactcaacagttacagtgatacatcttacagcgtcgtgtatcttccaaaaaaagaagataagatggttagaattagaacgccgtgtttgcgaaaaagtgggcgtttcgcggaaggctcgcactcactctcactcgttctgtccctaaaattaaaattcaccctatatgcactccaaataaatccaaaactcgaatatctacttatactctctcttcccaatctcaatcccagtgagtgctttctttctgtaactaaccccaatcatcaactcattcagcgaatgaatctgtggacggacgagaac

SEQ ID NO: 12534 - DNA, 437 bp, Glycine max
gagagagagagagagaggaaaaaaggaggaacaacagaactacggagagggagagggagagggagaaaaagagagtggttcttcacactctcgcattccgcagatcagatccaaacattctgaattcctagatctatttccgctctccacccgcgcttgaatttccgattcgcgatttcagtttcgtgttttcggcgcaattaggttttctgagatcgaatggcgtgcatcaaaggggtgaatcgatcggcgtcggtagcgctggcgccggacgccccgtacctggccgccgggaccatggccggcgctgttgatctgtctttcagctcttccgcgaatctcgagatattcaagctcgatttccagtccgacgatcaggaactgcctcttgtcgcggagtgcccgagctccgaccgtttcaaccgtctctcgtgggg

SEQ ID NO: 12535 - DNA, 223 bp, Glycine max
tcgcccacgcgtccgatcggatcgtgcaagagagttccttggtgtggctcggtgagaccaaagacgggtcaccggttgtgggattcttggccactgatgcttctgaatgggtcaacggtcaaattgtttgtgtcaacagtcgctatatttagtgatgatttttttttaaaataataacaattataataattagtgtattttctttcactttgtcactacttgg

SEQ ID NO: 12536 - DNA, 84 bp, Glycine max
  modified_base (43)..(43): a, c, g, t, unknown, or other
tggtgggtttatctatctattattctatctactattgggtcgntccatctcacaaaaaccagagagaaaaaaaaaaggaaaaag

SEQ ID NO: 12537 - DNA, 378 bp, Glycine max
cccacgcgtccgctggtgggtctggcagaaatgttattgacaatggtaagaatgacagtgatggagattgcaaggattttggtgtgtgcctagagaaagtaatttccagcaattcagataatgttggcatgatcaagtgttcaccagtgcatgttgatggagactttgatgatgttgttgttgatgatgaagaagaagatgaggagattgatgttgagatggagaaggggagctttgatgttaaggaaatcagtgtgccagaatccaaggttgtgaatgaaccagaaaggaaggaggttgtgaatgtaccagcaaaacagaagattgtgaatgaaccggaacctaaaaaggttgtgactaccaacagacaatttcatc

SEQ ID NO: 12538 - DNA, 446 bp, Glycine max
  modified_base (299)..(299): a, c, g, t, unknown, or other
  modified_base (416)..(416): a, c, g, t, unknown, or other
cccacgcgtccgcccacgcgtccgcccacgcgtccgaagaccaaggatcttagcactctgaaggagaagcttgaaaaaattaacggaaaaatacaaccactccttgaaaagaaggctgatatagaaaggcagattaaagaagttgaagctgaaggtcatgtggtcaatgaggagaacaagaatgaggtacagtagctgttcaggatgttcaggacacacttatactatattgcataatatacaaactatgtttgttctttttatgttgttttgacttttgtgtaataaagatgtctttntatttgagtaagaagtgatacatttgtacacattcttatgcttcatatgggagtgatttcattccctttgtcaatgaaaggctgtgctacttttaaaggctgctaacatgtcaactnccaatcaatggaggcattacttaacgtggc

SEQ ID NO: 12539 - DNA, 125 bp, Glycine max
cccactcgtccgtccactcgtccgaaaaaaaaatataaaaataaaaaaaaaaaaaaagtaaaatgtaaaaatttttaaacacaaattaaaacaataaacaaaaactattataaataatctttttt

SEQ ID NO: 12540 - DNA, 474 bp, Glycine max
  modified_base (459)..(459): a, c, g, t, unknown, or other
gggttctaaacttgccacattaccccgtccagatagtgtccttgaagtgctattgattaattttccacgtggtgtggtctatggatgtggtgatttgatattctcatcacacatgatctttacacttgtttttgtgctcacgtatcagaaatatggcactcgaaggtcactaaagcagctagggtggttgcttgctgtggttcagagtcttttgatagtagcatctcgcaaacattacacggttgacgtagttgttgcctggtacactgttaatttggtggtgttttttattgacaagaaattgccagaattaccagacaggtcaattgcagctgcaaccttgctacctttgagcaccaaagacaaagacagcaagaccaaagaggagaaccacaagctattgaatgggggaatctgagaccctgtaaatgggaggcagagaacacaagtgaatggcangatcatggaagatgc

SEQ ID NO: 12541 - DNA, 479 bp, Glycine max
atttctgtagctctatggccgaaatgatacagtttgtttccttattctaaaccccagggtagcaatagttagattagagtacatagtttttgtcacacctcacttctctccgatttgcgcttgttcttcttcttggtcaactcgatcgtaagtcgtagaactagaagggtgagggcaatatggaggtaacaaaagggaaggaaactaaaattgttttgacgaaacccttccaattggaagctgaatcagatttagaaccgtcttatagagccccccatctcctacatcgcttgttaagtttactcaagaacgtgcggccaggatcagatctcacaaacttccaactgccgcctgtgtttaatttcccaaaatctcaacttcaatgctatggtgaatcagtgtactgcacatcttccaacttgctaagccaatgcaacagtgggcagagtccactggacaggttcacatcagtagtagca

SEQ ID NO: 12542 - DNA, 276 bp, Glycine max
tccacgctttatctatctattattctatctattataatgactatccatctaacaactacaataggatatttctgaaaatttttactagaatctaacaccaaaactctacaatcttataataataacaaaaataacattaatgacttaaattttttatttcatttcatcaatcacattatatctattgaattcttaaacatttatactgactttactatatacacacatcaatttatactttatttttcaatttcttaaaatttttttcatattaaa

SEQ ID NO: 12543 - DNA, 200 bp, Glycine max
tcgcccacgcgtccggtgaccggcgtgagagagcatatatggtgtttcttggcaccacctcaccttggatttcctgcttgccgtcttcaactcaaaccgactacaaagcgcgtcgatactggtctttttcgcaacgcccacggccaagcccaagcgctttacatttcttttgccgattcccttttggttcaaatggcatt

SEQ ID NO: 12544 - DNA, 407 bp, Glycine max
aatgtttctactttcctagtacacgctggtatcttgaagaaggatcatatcaagagtgatggcgtgtgagcgacactagtctcaagagctatgcctagtgtctctgactatgtcttaggcataatagatacataaactaacaacgatctgtaaactgggaaattcagatctgttctaatggtgaactatgtcatgtggcattacgtgtaagacaccatctaacggataaacgatcaaaaccttcacctccgtaacatcactgtttacgtaactcaatcccgtactggctgccgccgactacgcggtccacgtcagcgtttatcagctgaaccctgttattgctcatggtgtacacggccaccttaccaaaaaacctgcagatattgcgctggtgaccagcgttacat

SEQ ID NO: 12545 - DNA, 339 bp, Glycine max
  modified_base (154)..(154): a, c, g, t, unknown, or other
cccacgcgtacggaaggctctgggcctaatttggctggagatggagaacttgttcaagctcctgtggggtggtttcctcggccatggcctacaaattctgatgcttcagagagtagccagttttcaaaagtcattgagtatttccggctactangtcgtgttatggctaaagctcttcaagacggacgactactggacctgccattgtcagtggcattttataagcttgttctctgccaagatcttgatttgcatgacattctgttcattgatgctgagcttgggaagactttacaagagttcaatgcccttgtttgtcggaaacattatatagaatct

SEQ ID NO: 12546 - DNA, 346 bp, Glycine max
caattttctagggtttatacaattctcgatggcttcttcagatgttgagtaccgatgctttgggggagggctcgcttgggccactgacgaccaagctctcgagagagccttctctcagtacggcgaaatcgttgaaacgaagattatcaacgatcgtgagactggaagatccaggggttttggatttgtgaccttcgcctcggagcagtccatgaaagacgccatcgaagggatgaacggccaaaaccttgacggccgtaacatcactgttaacgaagctcagtcccgtggtggcggtggcggcggatgcggtggaagtggtggatatggtggtggtcgcggtggt

SEQ ID NO: 12547 - DNA, 455 bp, Glycine max
  modified_base (391)..(391): a, c, g, t, unknown, or other
attctgtcgatcgctcgcgattccctcttcctccctctctcttctactcacgagcgtcctgctgctgcaggcaaaccgcgatccgttggtgatgaaatccaaggcctcaaccctagcttgccctcgtggtcggattgatgtggattacatgagtgtcggttctggtgtagagcctagcgatgatgaagacctcgtccaagtccagcgtcaccacgatcactgacgtatccctcaaagcacctaaaatttgaacgaacgaacacgaattaggttgaaaattggcaagtgaaagtgatgaaatgaaattaagggatggaccccaaaccactacaccttctcttttgttttcaaagcttgtgtctgtcgaccttccctctatctccattgatgncttccttcacgctaccatttcggaacttggtgtggcactcttcgtcacgcacacaacatgtttg

SEQ ID NO: 12548 - DNA, 302 bp, Glycine max
agccttcgggcggaacccattttggatttaacccttttggcattaataatttttttgaccactcttttcttgggccatggcggccattccacatttggcttgacccctcttggattatctaatagcttaaacttggaaattccaaagccttaccaccttgcaatcaacgagcggttcaactttttaaatggagtgcaccaaatttggggattcttcacggacaagccttatattccagggagcaattccaagccaccaactgagaatcgtatcgctggataccattattcattcggggtgtg

SEQ ID NO: 12549 - DNA, 93 bp, Glycine max
agttcatcgaaaaaatatttttttattctgttatcaaaactatattctcaattcggcctctggggatcactaggcagagtatatgaaactacc

SEQ ID NO: 12550 - DNA, 91 bp, Glycine max
aaaaaaaaaaaaaaaaaaaaaaaaaaaaaaaacttaaaaaaataaaaaaaaaaaaaaaaaaaaaaaggacaaaatggaaaaaaaaaaaaag

SEQ ID NO: 12551 - DNA, 415 bp, Glycine max
cccacgcgtccgcccacgcgtccgcccacgcgtccggttttatctgagctgggattggacttggggaagcggctgctaacttatgaccctgaaaagaggataacagccgaagatgctccccttcatgattggttccatgaagcccctcttcccaaatctgatttcaagccaatttttccttcttggcagtgatgggacagattagaagcggcagattgatgtatagacctgagaaggacaatttagtaatagatgatggatatttgctctggaaatgctcttaaaaaatttgggtgcattgatgcacaagcattggtagctgttggatatgtagaaaaataaaccgattgcaaggaatattcattttgaacatgatcaacaggaaatggctctgaaaatttgggtgcattgatgc

SEQ ID NO: 12552 - DNA, 233 bp, Glycine max
gaagatcggtagagggatgaatggaaatttacaactctaagatatagtcctgaagaggaggaacaccttgggcataaaaaaccgatcatcgagcttaacttctgatcaccagatacagaaaccaggctgtcataatgaaaacctattgagtcatctattgtaatcatgatagattgtcactattatacttctgctatcctacaagactctgcaggtttggttaatatctatat

SEQ ID NO: 12553 - DNA, 349 bp, Glycine max
ccacgcgtccgacgaaatcagaggacctaggttaaggttgcggtgctggtggtcgagttcacaggaagaggaagagataaaatttgaaagaggaagttgaattgaaggtataatggcgaggcgagagctttcaagcacgttgaagaacttaaagttcatgcaaagggcagctctgagggaggagagaaccaagaaagaagaagaggttaagcctgatgtcagtgttggcacatccactgcggttactagaaagtgtgtggttataatggaaggtgatccccatcctggagcagctaaaggtcgaatgtcatttcaaaagttcaatcccttaggtgataaattaaaatga

SEQ ID NO: 12554 - DNA, 419 bp, Glycine max
cccccggtgggtgacatgaacgacttgaggaagaagagaaaagccgcaggcgcagagtgagagccgaaacttctcatggaatcgcaaacggatctgcagaaccgacccggaatcttcattatcggatcctccaacgtcggcaaacgcaccctcctatcccgattgacctctgttgatgttgatgatgcttttgattcggcttctcaagtgaatgtccatgggtggactatcaacaataagtactacactgctgatgtttctctttggatggctcatcttcacgacgatttttctgctgccaacgtgaccctgtctcgacgaatgactgcactggtgatggtttttgacatgaatgaaccatcttccctagctgcacttcgagaatgggtatctcgcactgatattcagaactttgagat

SEQ ID NO: 12555 - DNA, 285 bp, Glycine max
ctttacaactttgtatatccctgtaaggtgaattttggcatcatttttaacaagtatacactcgaccaaatgtccaaatccatgggagatgggaatatgcaagtatacacacatcaatacctcttcacaggtgtcacaattctttaactggtgccacctttacaacatgcatgttggtatatgaatttgttttacactgacgattatttgttacatgtgatttctgcaaatttgtgtacagtttgattttacgatatatacaacgactctactatgtgttactcc

SEQ ID NO: 12556 - DNA, 310 bp, Glycine max
cccacgcgtccgcccacgcgtccggagattggcaaagtatcgctttctaaggaaacgatccgatcttttgctgaatgctgatgatttggatgcaatgtgggtgtgcttaagagagaactgcgtcattgatgatgctactggtgcagaaaagatgaattatgaagacttttgccacattgcctctgtatgtacagaacaaataggtcctaaatgccggcggtttttcagtccttcaaactttatgaagtttgagaaagatgagcagggaagaattgccattctacccttttacctttatgtgatgcgaacg

SEQ ID NO: 12557 - DNA, 372 bp, Glycine max
caactcctcaacaaattaaagatctttgttgaacaaagttaatttaagagtaaaatctagaagatagaggttgtaaagagaagtggtgtgaaatgaaatccataattagctagttgtttagcgcatgaaaaaaagtgtttaatttttttaaaatctcacaaaccctgcaaggaataaaaaagaaaagaaagatcggagatagatcatatgccctaatagtatatgaagaaatctttcccgtaaaacaaatataaatgatatacatgtatacatacaacattgtcacaactcctgagttaagcatttttattggtgaaaacatttttattttgtataaattgttgcagtttcgttattagatatattaaatga

SEQ ID NO: 12558 - DNA, 372 bp, Glycine max
aactgggacctctattagtcctcctcacggcttgtgccttgagagaattggtaatggatcttagctcaacatggtggctcatccggatggctctaaccgtgcattcttctctaaccaaatgggaaaggtttttctggcaacacttacggatgagggatcaggaggctcattgaagcttgatgaatcaagtccttttgttgatctgactgatcaagtttattttgatactcaatttggaatgatgggcatggcatttcatccagattttgctaaaaatggacgattctttgcttcatttacatgtgataagtccaagtggtctggatgtactgtaagatgttcatgtaattcatacgttaactgcgatccatc

SEQ ID NO: 12559 - DNA, 445 bp, Glycine max
  modified_base (433)..(433): a, c, g, t, unknown, or other
cccacgcgtccggcaaagagaaccaaagcgccacgcaattgcacttcttcttcttcttcttcttcttcttctttggcaactcagaatcgcttaaacaatgacagaggatagcatcgttagggtttcttcttccaacgaaacctccgcggccaacgaggcttcgcagacgcggcagagaaagaagagaaagtgggatcaaccggcggagtcattgatgccagttgggatgacagtccctggagcactccctttgagcaatgccgtgactcttggaggggttgcatttcccgccatggctccggtgatctccggcactcttttgacgaatcctctggcagcttctgctcagcttccgcaacatgcagctgcagctgctgttgccgcgcaaaagttgaatcaaatccaagatgaattaataattgctcgagaaatngtcataaatgat

SEQ ID NO: 12560 - DNA, 344 bp, Glycine max
cccacgcgtccggggaatagaaagaataaggcattttgcagggtgtatagtaatgggatggagagagaaacattgtaaaaatgaaatggtcaaggattgaagaagagagggaaattgaagagcttgagagagaggggatggggttgaagcacgcatggcgtggggtcggagatgagaggttgatgacgataaaaaaaaaggggggtaataataatcatcaacatccgtgcggggaaaggggagtaatttatgaataataataatgattaggtcgtaatgaagtgaaatctatctagtgagtaatgctgtaaaaaatccacaattcacctctgcttccacctttc

SEQ ID NO: 12561 - DNA, 407 bp, Glycine max
aagcatacagcaatttattctatcatacttcgtgttcaaataattatcttttcaattacaataccgcaatcccggaaacttatgttcatgaccatgctcaaggtcccaataacatttacttgaagacaatttttagttgaccttacagcctattttcacctatacaaacacccttgatccttcattcttttttgagttgaccttacctagcttcaatactggcaacaataatactcttgggcatctgaactatctccattcttttttttcccctttctttgcagtggattttctaggttttaaaaaaattaaatgcgtttttatgtgctaaaaaactatgtaattataaaatttatctcacacatacttctttttactaccctttatcttttagattttatttttga

SEQ ID NO: 12562 - DNA, 343 bp, Glycine max
acttaaagtacatataaaaaaaaaaaagataaaattataaacatagtaaggacatataagggggggataaatatcatctatcacgccagaaaactgtaattgtatcaaaatcccatggctgtcttgtacaaaaattgtaaaaattacggcttacgtcaaagcctcaagcttctctttgtatttcacattcccttaatcaacattgaaaaatgtcgtctgctgctgtcaccactcttagccctgttccaagggaactattgttgtccacagatggatactataccccattgcacttgtcattggatcaagagtttatccccatatatctgtcctattatggatc

SEQ ID NO: 12563 - DNA, 446 bp, Glycine max
atacttggacggataatgtgaaagatttccccactgctctatcttcattttcatttggacagagatcagactagagatgctacttgtttgattaaggcttcatggagttttacctcctgaatttatcaataagttgattctttattttgaatctctaaagagatgtttagttactttggatgaattacttttttgttttacagtgatatgatcagaacaaaggtgaactcattagccctttgttgagatagtagtaataagagcactacttcagcaattaataaagtcaaatagttagtttcatgggatttatttggcttggtgtcttcctaagatagtaaaaagcataatgcactggtaaaatttgctgcttgaatgatttgatactattgaagtttttgtgctgaaggggactactagacaatgctaaagatgcattgatatct

SEQ ID NO: 12564 - DNA, 60 bp, Glycine max
tcttcctataacacttcataagacatttcagcttattcataaactaattaaaacaacttt

SEQ ID NO: 12565 - DNA, 355 bp, Glycine max
taccacgcattcgcacaaatattcgttcctctaaatgatcatctatacatcatatcataggtagagctattaacccactcgtcagatcacactgctattcatataatgccataaaggattatacaaaacctactaatcttcccttaaattcctcccaaaccaaaatgtacgttatgacctcctactcttatcaacttccaactcacatatactactctaatgtcacatcatattcggtaacatcacacttcaaaccattctacatgattcttcctatcacaaggctacttatatcactattcgtgagacttgagaatctacttatctaccgtatatacaagattgtataattccc

SEQ ID NO: 12566 - DNA, 457 bp, Glycine max
gcgtttcacaaatagagagagagaaacagaaacagaaacagaagaagaaacttttcttattatgtacagtctctgattgatcggtttttcggaaactctttttccgtgaaatccacgctcgcgcttcggttatggatttggacgatttccgatccgtattggacaccgcgggcgtcgacgtgtggatgttcatcgacgccgcaatcgccgtcgcctccgcggattccgccggtgagctgaagcgccgccgcgacggaatcgtcgagcgcctctacgccgtcacggcggctactccgaagtgccggatttgcgacgactgaggcaatgacctcaacggtcaccaaatcaagaagcagagcagccccagccctgaacggcaaccgcaccaacgccgcgccgctgccatcgcagctgccgcttccccggcgacgccgcagtctctcgaaaacgacaacga

SEQ ID NO: 12567 - DNA, 451 bp, Glycine max
ccttgttgtgcatattttgttaaaaagtttcgattttgagcttgtttggtcatctgggtaggtgtctgtgtcatctcacacccaggcagctgtaattgtacaaatcccatggctgtcttgtgaaaaattgtagaaattagggcttaggtcaaagcctcaagcttttctttgtattttacattcccttaatcaacattgaaaaatgtcgtctgctggtgtcaccactcttagccctgttccaagggaactattgttgtccccagatggatactataccccattgcacttgtcattggatcaagagtttattttcatatatctgtcctattatggatctttgactccaatgcgggttcttccctgcgataccatcgagtctgtgaaactcaaaatccagaagtctgatgggcttccttcattgacaaacaaacaaaagttggtttgcgatggg

SEQ ID NO: 12568 - DNA, 362 bp, Glycine max
cataaatgaggctggagagcctgatgcagctgcacttagatctcaatttttggaaatgcatcggattattggagctatgagagagagaaaccttcagcctgctctcacatgggtgtctgctaatcgagagaaacttgtccagattggttccaatcttgagcttaagattcacacgctgcagtttgtagaggtcctgcaaaatggaacccgagctgatgccttaaaatatgcccgaacttaccttgctccttttgcttccctcaacaagggtgagttcccaaagcttatgggttgcctcttgtatgcaagaaggctggagagctctccttattctgaactgttgtcccaattcattgggagat

SEQ ID NO: 12569 - DNA, 238 bp, Glycine max
gaagaccatcctccaccatcgaaattcctcacgaacgctaccgacataacgaccgtcgcacccgtgaccccgatgtctccgacgactatcgccgccgccgcagccctagctacgactcatatgaccgccacccggagcgccgccgccgccgttcggtatcgcccgagcacagaaaccctaggcacaccaacggaactcacaacgacaacgctctggcaaagaaatttggccggcgaaa

SEQ ID NO: 12570 - DNA, 354 bp, Glycine max
aaaaaaataactaaataaacaaaaaaaacaaattaaattataaccaaataaactaaaaaccaaggtaatatttcaaacgttcgtgactatcaccacactataattactcaaaaccattcatccatattccctccttaacccacaatgcatacattacaaccattcatctatcaaattttacctcctaacttaatcaaatattgtagaccttctctaataacagaatcttggatacaaattatcaaccttctatatcaacatccaccaactgcagtaaattctacacactctagccagctacaacaacacctcccactgtgcaccctacctcaatatctcccatttccattactc

SEQ ID NO: 12571 - DNA, 347 bp, Glycine max
gttcactgtttggagatcatttgttgcagaatccaaactatatgtgcattatttggaccagaagtctgtttgaggaagggatgggcttatgttagaactctatgaagggagattaatgtagaatgaaaactgttagcttcgttctcaaacgtacaagtttgaggctcaattacacattgattcattatataaatgttttaagaacctgagttagtaattcaacttgtatttataacatctaactttcagtgaaacaaaatccatggtatgataaactatgcagacctgtgacagaccttattcctcttataacaaaaaaaagggcgacccttctataggatccaagc

SEQ ID NO: 12572 - DNA, 224 bp, Glycine max
tcgatttaccattgccaacagtactagttgtaattgtttctctcttcttccttcaatccaggcaagattataaggcccgtcgccatataatttccctatctttgaaagccttaattaattcatacatataatgttgtacataatatacatacatccctgataaaattgtatgaaaaggttccttccaaattagtccttccaatttaagttatatttccaaattg

SEQ ID NO: 12573 - DNA, 373 bp, Glycine max
cccactcgtccgcccactcgtccgattttaagtaattcaatggcttacactgcaagtcttgtggtcttagcttccacttggcttatcataaactttcctcttctggcaaacgctatcggatgcaatggaccatgcagaaccctcaacgactgcgacggccaactcatttgcatcaacggaaggtgcaacgactaccgcgacgtcggaacccacatctgcagcggcggaatgccgccaaatccgccaccaagcggcggaagctgccagtcctcgggaaccctaaattgcggcggaaaatcgtatcctcagtaccgttgctctccgccggtaacttcctcgacgccggcgatcctgacgctgaacgacttcagcg

SEQ ID NO: 12574 - DNA, 382 bp, Glycine max
tacaaagtaggaagatacagcttcttccttggcatataatgaaaacataagacattaagaacggagaaaaggatcgtgagttgactcttggatggttgaatggtttcctattactgttttgatccaacagaatgtgagaattctaacaaattttttggttgtgtagctcatgcatattatctgaaaagcctctgggttttatttcggaacttgtacatgctttccatttcttatgtcttgtgatggatgtcactcaagaaaatatttgctaaatatctccagtggaatttgaacctttgcactggaggtaaagtttgttcacacggaactcagtttgtcagctgagccacattttatgtgtgctagctgtcacattttaatg

SEQ ID NO: 12575 - DNA, 453 bp, Glycine max
cccacgcgtccgctccttctcaatgcaagagttctaaccaagcttctcacactaaggcctcgggtagaactgcagattctgatattcatcactcatctgtcataacatctaatgctccaaccctcaaaagtttttcccaggaacaagggagagttttgccaggtcatatgcaaatttcttttgggggaaattacataacgcccctgccaccccaagggcaaccactactcaataacaaccatcctttatgcgcaacagctcaaggaactccatacagtgggggcaatgcgaagtcaaattcagaaggaagtaaagttagttcgtcggtgaacgcttcacaactgcaacaaactgaaaattctgctgggagtggccaaaaatcttctccagtttgtgggagaaatgtcccgtcaatattaagttcatgccccatgcacctatcagagctaaagt

SEQ ID NO: 12576 - DNA, 452 bp, Glycine max
aacacacatactttattcctttggagtgttagccgccaccacaccatcgcccaactacagatcgactcttgttcttggtcgcggtctctaatccaggctcatgtggccaaccacgccaaagatccgcactacagaacacccaccaattgactcgtgaaaccctaaccttctcacacacacttgccacacctttgcttgttgcttaattggagttttagttgtcaatggttggaaatggcttgaagactgcagtattattgcgaagttctccagtagagattcctgagaaccgaaagtggatgtattagaggttggatgctaataaatgtcggacaaataagttcagagaaggagtgtttgaatttgtatagtgagttactagtcaagacatgcttcaaatgcatggagaacaaacaaggtgtacctgcatgaaatgcatatataatgttttc

SEQ ID NO: 12577 - DNA, 476 bp, Glycine max
  modified_base (24)..(24): a, c, g, t, unknown, or other
tcggctcatccacgaccttcatcngctccataccattgctttcacattgctgtctcaattatacaggaaggtcattgttgataataatggtattcttaggttcggcgtagcctatctatacaaataacacataccaaataatggatagcagaaataagagaagcattcaccccaattcacttttgaatttccagttgttaatttagatttaattagaaaaggattaataaagtaatgcttgtgatttgtgaacagcatatacggaagtaacacacactgaagtcttgtggataattatactctcataacacttttatgatactttttacaatttaaaagagaaatgttttttttttctttggataagatgaataatgtaataaagagaaaaaaaatattataataaatcattataagaataatattactcaaattttatttcaccaaatgtattagttgcagaggaagtctcacag

SEQ ID NO: 12578 - DNA, 470 bp, Glycine max
aattctctttgtgaaagcaacaatgaagagtcgtgtaagaataccaggtttaagagactggctgtgatggactatactgcagggcagaagaaaaagaagatgaaagcattgattccttagattatacaagctatttacttcggagtcctttccatactccagaggttcattggattgctatagcttggtttcatttgtgacatcgttgcttttcttgattcagccaatccaagtatatattgatatcaaggttcagctcatgaggaactgtctttggttatcatcaatctgaaaataaagaatcacacacgatgtatggaaagcttacaatgaatgcatgcaaggagaaccagctgctgaacgcttgcttgccatgagcaggttcaaaaataaagtggttgaaaaaccagatgctgctgatttgatttggaccgtgttacaagggacctgaaattcaatcgatgacatgc

SEQ ID NO: 12579 - DNA, 454 bp, Glycine max
ttacagagcattttccaacacgattactcgaccgaatcaaacccctctttctctccgaagctggttttaatatcgtactggccttcgattgttctcctctttaatacatactgttctctcttcgatttgagggaacagtacaagagtctgagcatcggttaacccaactgcacaggtagtctccaaataatggagcctcatgatgagactggatgccaggctcctgaacgccccattctttgcattaataattgtggcttctttggaagagcagctaccatgaacatgtgttccaagtgttacaaggacatgctgttgaagcaggagcaggacaaatttgcagcatcatccgttgaaaacattgtgaatggcagttccaatggcaatggaaagcatgctgtggctactggtgctgttgctgtacaagttgaagctgtggaggtcaagattgtct

SEQ ID NO: 12580 - DNA, 386 bp, Glycine max
cccactcgtccgcaattcccaacccaaaccgcctccacccttttccttcctactcacgcgtgcgctattctttgtcaacccagccaaaacgaccgtcgttattttcctctttctttcaccaaatgatgatgggttcaaccccgcctcgatcataagaaacaccaaactaacaaagaagcagaagaagccaagaaggcgatggttcatcaaaacgactacgactactacggcagctgcaccgtcaccttcctacatctcgcgtagtgatcgacgacgacgacgacgacgacgatcggcgattgaattcttcttccgcggtgatgatgtcgaacctgtacggcgaatacaaccacatgatcgactacgtgttcaaagtggtgctggtc

SEQ ID NO: 12581 - DNA, 466 bp, Glycine max
gattgtcatcctcagtctctctgcctccgtcggcgcccgccccttcgtccttatcctctcccaggaagactacaaggacgacccccccgccgatcccgactcgcccgccgagtgggatgagttcgcccacggagacgcccacaaatccgaggaggacctcgaccccggctcatggcgccccatcttcgagcctcccgccggagatccccaacccctccccgaatccgacgccgcctactactccgccgtccacaagctcatgtccggcgagcccgccctgatccaggacgccggcgaggagatcgccggcctggccgtgagcgggcaccctgcggcgcaatcggtgctagggtttttgtgggaaatggggctctttagagagcggagcaaggggaaggcctttctgtaccaccacttcgccgcggagggaggcaacatgcaatcgaagatggcattggcctacagc

SEQ ID NO: 12582 - DNA, 469 bp, Glycine max
cactatggagatgcaagcagaatcagatagaaaaaagagagctcaaattcttgagtctgaaggagaaagacaggctcacataaacattgctgatggaaagaagagttcagtgatcttagcatcagaagctgctaagatggatcaagttaacagagctcaaggtgaggctgaagctatacttgctaaagcaaaagcaacggctgagggactggctgttgtgtcaaaatccctaaaagaaaatggatgacctgaggcatcaagtttaaggattgcagagcaatatattcaagctttcagtaacatagccaaggagggcacaacaatgttgcttcctagctctgcatccaatcctgctaacatgatggcccaagctcttactatgtataaaagcctgcttggtaatccttccagtggtaagcttagtggaacttgcaccccttcaatagcatggcaattagaaggaaatgat

SEQ ID NO: 12583 - DNA, 453 bp, Glycine max
cccacgcgtccggaaacaaacgctcactcactcactcactcctttgtttgttcttttcgccctgtgcttcctcatccatcagcgctatcattagcaattaagaaaccaaggtacataactcacaccttcaccaccacctcttcaaagtttgattttttcttcacaattcaacttcccccaaaggacacgatgagctactagtactagtgcgtggtggtagctagtagtatttctcaagaaaaaaaacctaagcttttatagtttatataatagttttgtgctactactactactacacgttctcttgtccctttccttcttttcctcttttttttcttttttttctgccttagatcttgcactcactcaccaccttgcagttttcagacatggggtttctcttcttcttcttcttcttcttctcctccttctttttcttctctccaaccactt

SEQ ID NO: 12584 - DNA, 214 bp, Glycine max
ctttctctttttttctttttccaaacttggcaacacagtttttaattatttaattaataaatggtgggggcgatgacgtcgtcgatggcggccaagttcgccttcttcccccccaatccagcgtcgtaccgtgtcggcttggatgacgtcacggggaagctgaagatgaccggggttgccaccaaggaaaacgtcgacgtattgaagcttttca

SEQ ID NO: 12585 - DNA, 450 bp, Glycine max
gtgacggtgaattgggtagaagaagatgagaggggtgaagagagcagtatttgtaggcagagcgctaagaagcaattccaacaccgccgtgtacggtgttggtgccacccttcatcgagatcgaatggctccccatggctgcttaaccccatcaaatccaaatccttctgtttctgttactgggtttagatacctttctgcttctgctgctgccacgtctcttgcccaagacgctcagaccaaggccttcaaacccaaggaacttgtcctctttcagtaccaggcctgtccattctgcaacaaggttgcagcgtttctggactattatgatattccattcaaagtggttgaggtgaatcccataaacaagaaagagatcatatggtccgactacaagaaggtgcctatcctcaccgttgatggtgaacataatggtgactcttcagacat

SEQ ID NO: 12586 - DNA, 479 bp, Glycine max
gatggaagttgagaatgcaaaactgaaagctgaacttgctggtagaatagctttaatatgtgcgctctgtcctgagttagagtacgagtcattggatgatgaaagggtgaataatatattgaggaatgccgcagagaagacacaagaagccttgcatttgaaagatgaatatattaaacatgttcaatccatgcttaagatgaagcagatgctatgcgtgtcctatgagaaacgtattcaagaattggagcagaaattgtcagatcagtatgtgcaggggcagaagatgtccagtgtaaatgatgcagctgaccttccccttgtggctgggaagacagataattacaagtcagaatctatcagtggtgaagccaacatgccttgcatatctacttctgagcccatggatgaggtttcatgcatctcaagttccttggatgcaaaacttggtttgttcatgttcacagagcatactggta

SEQ ID NO: 12587 - DNA, 466 bp, Glycine max
aagcaaattacctttctaactaatctttaatcaatcctctaataatctccgattcaacagcaagctcaatctcaaacagcaggcgaaagctgaatcaatccttccaagttccaccaccaccgtcccaaccctcttcttattattcttcttcttcttcttaatataaacaacctcatccatactaaggaaacaaacgacatatactgcaaccatatacgttgatcacacgtcttcgatatctgactaagatgtcattatgggaaccttgtacaccgtcaacatcaaacctcccatcacggacatcgccctcgccgttacccttctctttgctacatactcagcatcgtcataagctccctcatggtctacaaccatgtcatcggcgacactgttcacagcatcttctatgcaattctgggacttatcttgttcataccggtactctactacacgcaaattgcgtatt

SEQ ID NO: 12588 - DNA, 256 bp, Glycine max
ggttcttctacgaagctccaaagttcacagagaatgaccctaactacctaatcctcagtcggcgctcattctacagcttcacttaacggtctcaaataactgaccatttatcgaagggatttgccatcagtggagtgctgtgttgaaagtgaaattaaacattaatgtgttgggatgctatgagaccgtattgtcaagctagtggtgcgccttaattactgcgttgcgcagatatacattgccatctaattacttt

SEQ ID NO: 12589 - DNA, 457 bp, Glycine max
atctttccctcaacagaaaggataaaattcacgccccttcgcaggaagagcccctcaactctggcggtgtcgccatcggcgacctcatcttctactctctcaaccctaccgtcttcacccttgaaaccctcctgcacaagccagaaaccgctcctcgtgatggacccaccatccaagactcatcggaaaccctcaccagtgactcccccttcgttctagacgccgaaaagcctccgactttagatgccgcggaactggaatccatggaaatgattgatgggtctgacgagacggtggtggtgggtaccaattccgagcctttcttcatgagaagggttttgaaagaagcgcctgggaacaacgttaatgatttcaagttattagtgcttatggctcatggtgttgttcttgaatctggatttgtttgaatcgacaaggattctggtatggcgtttag

SEQ ID NO: 12590 - DNA, 346 bp, Glycine max
catttatactttagttgttcagtacttctctattttctgtgcttccacgctctatcttcaaacgcgttcaatcgtcgtctttgtcattaattcccatattgtttccacggcagctttttctagcagtcgatggaactatgaaagatggggtggatttgattccaatatcaagccgcaatgcaaagcctccaggtgttgaattgtgggcagttcttgatgtccctgtacattaggttggcgcttcttggaaaaatttaagccattcactatcaggtctcttttgtgcttcaatcaacttcatggagtcttctaccacttattctactcctgaattggcatttcaatc

SEQ ID NO: 12591 - DNA, 454 bp, Glycine max
cccactcgtccgggtgaccatactgatgtccatcctgctcctttaaacaaatctagttgttgggaaggtctcagttactgtcaatcaatgttttcttttgcaaggcacgacgaatccaagatccaaatgttcgatccacatgcatcttatggtgtcatccatctacggacaaaccgtacagtcttccttaattgtgcagaaagagacttgtatatggataagtcgggcattgcaaatggatcttctacctgttactttgacgaagctgataatatggtcagtggtcattccatttcatgttctaataagtttcctgacatctcaagagcacaagtatcatcccctgcaggattctccattccaagcatgttgccaccacctggctattcttcccatgagagagtggatcatgctattgattccatttctgtgaattctctgcttgaccattctt

SEQ ID NO: 12592 - DNA, 471 bp, Glycine max
ctccattccaaactcaaccaaagtcgttcagagagagtgcttacacaaagcctgaaccggagcgtaaagtgaaaaacacacacacttgctagtcccttcacaatcacaaggttgaagaagacatggccgaagatcgcagcctgcctacacgcgccttcattccctccgtcgataactccgtttgggccgatgtctcccctgtcctccaagccgcctgccaagatcttcaagagggagagcttattcatggagacaacttcaatctttttgccgtcatgtccgcattggagataatggacccgaagatggattctggaattgcttgtacatactactctttcgatgaatccattgataatggtgttgctcctggtcctattaatgcggataaaactactgatgttcgatgcatgattgacatcattgaccatctacttgcctttgaggcaacatggcacaagggtcattcat

SEQ ID NO: 12593 - DNA, 308 bp, Glycine max
  modified_base (300)..(300): a, c, g, t, unknown, or other
cagagatggcccttagaaataatgataaaaactatatgtagtttcaaaacttcaaaatgatgtagtatgtattatgttgcactctggtgttttgtgtctaaacaaacacccttagaataaagtggtcatttcttgcccttgagcaagttcaagtgttttggacttgtgatgggtgtgttaaggtcatggttgccttttatatatatatatatataaatgtttggtaattggtcgcttctgtataaagttcggctagttaatctgaatatgaatctctgttaaatattaactagtactatngctggaat

SEQ ID NO: 12594 - DNA, 372 bp, Glycine max
acaaaattgaactttactataaggaaatcctctatccggagtatacagactccaatgtgctgtgcttcaatgcatgcgactgtctgcctactcttcacacaacaaaatctatcataacaaaacacgtgctacaagcccttcatgagagctaggtgcacagcaatcgaaagatgcaaggcaacaccataatttgtcctataattacatggttgccactatcgcgaataatcagatctcttcggtacaggatatctacatgtacctctacataaccttctgaaatcaacactcacatacactgcactacatctgttctttgctatgtgtgtgcatgattcatttttgacttgccttctacatcatatgaaatca

SEQ ID NO: 12595 - DNA, 385 bp, Glycine max
gtgtcttgttagttcacacactaagttctgaaaaatgagttccaaagtttttattattctactgatgggcatggccactatacttgtgatctcctctgatgttgcaccctatgatgcataccataattttgacaaaacagatgggaagcgtattgcaaatggggtatatgaaagcaaatattggcgttgtgactatcagctactatagtggttggcgtggtgtgaggatgccattctggctatggaggctgacgtggtgcctatagcactggacatggtctctattgtctctggcgtgatgactatgcgtgtaggcctgttgactactgacgttgctacggtggcttatgccctatctaacataatcaggctcgaatacatgcta

SEQ ID NO: 12596 - DNA, 329 bp, Glycine max
cacaagaccaaactcacgctaagccttataagttttgattgatcttccaagtaccactacaaagaagggtttcatctcactttatagaggtgcatttaccatcccgcataattgctgattggacaagtgacgcatgagcaatccttgtgaatggtgcattctaatcacctctcgctaaagtatgctctatgatacatacacaatatagccttttttaagtcctaatttatctaacacaatgcccagtgtacaattacacagctgctgcactgcctctatactctattatccatcatcagtaatatactcctgtacttctgttgagcatt

SEQ ID NO: 12597 - DNA, 464 bp, Glycine max
cccacgcgtccgcatgactatatacgacgtcactaaatgaatggatactacatggacaggtatgattaactggacgtaattcacaaatatgacagcttatgtgctccaaagcatactacttctatgacctcagttcaaaggttttagttttaggcagtttccttgcttttaatcgagataatctggtgatgggctagtagtaccatatgcattataattctatcataatttttaatcagaggctggatgtgtcaatcctttgggccattctttactcaaattgtcatctcgtgcatcaaatttcatgggttcttcttattaaatttttattttaagcataaaaggatagaagtagtgttcagtctgaagttaccaattttagacagaaatcttcctttggttccctttcccttataacaaggtccagggatgggaaaaggttaataaccaaaattgaaaatatc

SEQ ID NO: 12598 - DNA, 400 bp, Glycine max
tcacccttcttccctttctcacttaccactctcccccttctttccaaaacactcccttggccggtctattcacttcccctacccttccgtgatgatgtagatagagaataaaaagagaccagtgtgcagtgagaaagagattgctcacttcttgtgtgggtttgttttgttctttgtgttggaatttgttcatgggtgaagaaggagaagaggtgtcaagagagaaggaacaatacatgggagtttatggaaatgagtggttgtattgtggttgctctgcaaattggcgccgtttaagacaccagaattcctgttccatgccttttttcaagtgaaaaaaaaaacaattacttgttatctctcagcttttcttcttgagatcttaatatacattgactta

SEQ ID NO: 12599 - DNA, 325 bp, Glycine max
tcttactataccgtttttccctaacaaacttaccactctctaacttctatccaaaacactacattgttccgttttatttacataactctaccctaccattaatatacacatacacaataacaatctaccaatctacacttcaaaatatattccacacttaccataacacactatattattcttaacataataatttcatcatctaccaataacattaacacaacaccataaacaacgaacaccacatcacactcaacatcaatcactacatctttatccgcaactcaaacaacattctcccattaccaaaccacaaatccatatc

SEQ ID NO: 12600 - DNA, 290 bp, Glycine max
atacacttgtactgttctattagttcatactaagttctgaaaatgagttccaaggttttgctggttctacttatgttcttggccactatacttctgatctcctctgaggttgcacccgatgatgcatacgagaattttgacaaaatagatgggaagcctagtgcagatggggtagatgaaagcaagtattggcgtggcggctatggtggcggctatggtggtggttatggaagtgggcgtggaagctatggaagtgggcgtggaagctattgaaggggacgtggtggata

SEQ ID NO: 12601 - DNA, 392 bp, Glycine max
gttttgttagttcacacactaagttctgaaaaatgagttccaaagtttttcttattctactgaggttcatggccactatacttttgatctcctctgaagttgcacccgatgatgcataccagaattttgacaaaacagatgggaagcgtagtgcaaatggggtacatgaaagcaaatattggcgtggtggctatggcgactatggtggttggcgtggtggtggttggcgtggtggctatggaggctgtcatggtggctatggtgctctgcgtgttgactatggtggctctcgtggtggctatagtggtgggcgtcttggctaccgaagttgtaatagcggctttggccctaacgaacataatgaggctgggaatgatgctagccctcacatc

SEQ ID NO: 12602 - DNA, 400 bp, Glycine max
tctccgtttttttttgtttgatgatattaatgttttgtttctaaaagttagcatttagtctggaaacgttatagtctcaaacaggtttcacgtctaaaaacgtttgatgattgtaaattgtagtaggatgttgtctaactgtattgtgcacgttaaattgtcagcgattatggctgaaggtctattgacccttatctgaccattgatgtattgactgattatgttaagagatatttgaagctcaaactggaacgtatactagttcagaagatgttggaggagacactaggtggagatcaacctatagccataaaaatttctggcatgaagttgcaataaagagagactgtaaattgatagagcaaatttcatgatagacaggaaagaatgttcttatttg

SEQ ID NO: 12603 - DNA, 324 bp, Glycine max
ctcactcgtactaagatgatataaatgataaagtttcagaaaaaaataatcaataatacgtgtagggtcattatgatgaattgatagcaagtattacagtatcatagaacgggtgatgttgtagataaatctggtcttacatgatgtttcatgcagaacttatggttgctcacatttacaattgatcttgcttctttcagagctgtggggcactctaggaccattatctgcacccactttgatatgtttaacttattcatgttatatgagatatgtgtaagctataaactgcaacgtatactagtgcattaatatgttatatga

SEQ ID NO: 12604 - DNA, 306 bp, Glycine max
gatatcgtctcttgatatattattgctgttaagagatgaccttacctgcggtgccaagacaggaataaaatttcgtctatggttcccggggaaaaaaaaaaaaaaaaaaaaaaaaaaaaaaaaaaaaaaaaaaaaaaaaaaaaaaaaaaaaaaaaaaaaaaaaaaaaaaaaaaaacaataaaaatagaaaacactaaaaaatatgatgaaatcaactgatcattaagggcacctaccaagcatatggataacttataaatggtaaatcaactgtgggaaagacatggtatgaaagatatactgctg

SEQ ID NO: 12605 - DNA, 227 bp, Glycine max
tgatacgctcactagatatattattgctgttaatatatgaccatacctacttttccaatgcaagaattaaatttactctatggttaacctaaaaaacattaacaaacacaaaaaaaaaaatatcaaaaaaaaaattacataattctcaaacactaaataaaatcttacaaaacttacaactaaaaaacaattctctctaacatatacttcatccaaacataagtaaa

SEQ ID NO: 12606 - DNA, 228 bp, Glycine max
gccaggtggacctttctctctttcttccattccatcgcattgtatggtccccttttcatacacgacacatcacattccctcaacacaacactttccattttcaaacacccaccaccaccaccaccaccaccgcttttctctctctcgggttcggatctccgaccaccgtcgcaccgcggaacgagcttccaaactcagaatccagatccctactttcacaaacaaaca

SEQ ID NO: 12607 - DNA, 443 bp, Glycine max
cactgtcttccttctctagggtttttagctcctccaaattcttcgcccacccacgcgtgcgctggagagaatccgtttatattaaaaaataattatttatatatcaaatcaattattttttttattcaaacaaattgaagacacgttatgagctagaccttgacatttttttatcatttatatacacatgcaactctcacacacacattcctacataatgttattgatttcctaaggataaataccaattcggatctttttatcctcattccatatacttgttaacttgaatataacacactacacataataacaatgaactaagtctagatattgtattgcttcattgcccgaaataaactaaatttgtaataaactcaataatttaatttttttcaatcaatacttaatgattgtgtccaattcctagtggaaaattactt

SEQ ID NO: 12608 - DNA, 397 bp, Glycine max
tccacgcgtacgctttctcttgttaactaattaaaatgactctcacaaaggccttgttgtttgtgaccgatctatgctggacctctgccgcatatgctgcaaggtttgacatcacaaaccgatgctcataccctgtttgggccgctgctgtgcctggcggtggcatgaggctgaactcgggccagtcatgggctttagacgtgcctgcaggaacgaaaggggcccgcgtttgggcccgaaccggctgcaacttcgacagctcggacccccgtggatgccataacagtgactgcaggaatgtcctcgactgcaaagcttacgggacgcctcccaacaccctaacggaatacgcgcttaaccagtttagcaatttcgacttcttcgacatcttccttgt

SEQ ID NO: 12609 - DNA, 354 bp, Glycine max
ttctcgacgcacgcgtccgattaaagccaacattcaggttccatcaactgatacaggagttttatttggtaacataggctagtatacatcttctaatgttcttgagagaacagttattgttctaaatgatatccatattgacatcatggactacatttctcctgcatcttgtgccgatgtggcattcagaactatgtggtctgagtttgagtgtgaaaacaacgttgccgtatatacagtattacaagattagagggacttcctgaaccacattatcaagtctacacatatgaactgcctgactacaccatcggcattggaaagtgattgtggattcctttgctcaaaccttta

SEQ ID NO: 12610 - DNA, 316 bp, Glycine max
gtttgagattcaggattgaagagcaagcttatcgtttgaagaatgatgatgactttcggccagtttcccattgaatgccagtgaaggatggtgaatatgtaatagcattaacagtaatggtcatacatggaaactattatgactttgcctgcttttcatcaggtgctaccaaaggatggcgattttgtaagaagtaagaagtaagaacagtgtgcattcgtctcaaaaatgaagatagcttcccttaactctgggtctcttctagagattgttgaacacataaaaaatgagaagtccaactaaagtagaaaatgct

SEQ ID NO: 12611 - DNA, 363 bp, Glycine max
gtttcttagcattgtctcttttaaggggcatctggaaaaggaggattcgccggataaagacacatctgagtctctctctcagtgtgggaagaacgaagcagaagaagcatctcagaacagaaccaccgaacccactcagaagcaaatccgaaaacccctcatataatagtactggtattcagctgttcatgacaaaagcctgaaccgatcatgtcagaaggtgcagaaattgatgagcgtgtggaccttgacgaggaaaattatatggaagagatggatgatgatgttgaagaacaaatagatgatgatggagtggatggaagtgaagatgaaaatgctgaaggtagtgttgaagaacatgaa

SEQ ID NO: 12612 - DNA, 441 bp, Glycine max
  modified_base (381)..(381): a, c, g, t, unknown, or other
caaggtttccattctctctctatctgttcaatcttctctcccttctacttctagggttgagcttctgcatcggacatgtcttcttcaactcatcacagttgactttacgagcgaattcaatcaggcttgagaaggtatcctgatgttttttgttcaccatcatatccatgatggaatactgtaaagatgtcctcagctatcttgattctgatacatctattaagatactcatgtctctggatgatctggctgaccttgttcgggccacctgtgtctcgcgctcttggagagacattgtgattgcaaatggtctttgcaagcagctgtgcttgagaatgtttcctcagttatctagaagtgctttttagtgtgaactgaatncaaatggaacgaaggaacatgcaaaggttggatctagctattctatggaatggctatctc

SEQ ID NO: 12613 - DNA, 366 bp, Glycine max
gtggcaatcaatgaacaacgccaattctgaaacttcttctccttcttcttcttcttttgtttctcttgtgtacttctacttcttctgaacatggaactgttgtctctgagactcaccccttcaccttcgagttcgacttcatcgcttcctgcagcacttgctcactgctccaagctatgtgaatttcagccgacgaagaagaagaaggcgtgcttcgacgcgcctaggcttgcggtgcggcgtgtgaaggcctcggcggagcgaaccggtgatacgatcgatgatggtgaggctcgtagcagcttcaccacacctgccatggaagtcaccacattcaatcgaagcactattagcgatgctgctgac

SEQ ID NO: 12614 - DNA, 307 bp, Glycine max
tggactgaaccgaagacgaatagatgtttctcgccgtcggaatcgtcggtcttcatcgagaatggcttctacatgcaccgtgcattggactctaacaatgtcatgtacgctactaagtatttggcttatatgctctacgagctcaggacttgcaagcatttgcctcacaatcactactatctatacatgcgcccctgtgaacagttaaggaatccttagacgctcttagagtaacagactcgtatctgaaggtccattattgacctttatgaactcctacagaacaccggcaacattttgccccgat

SEQ ID NO: 12615 - DNA, 131 bp, Glycine max
gcgaaagaaaaaaatgcgcaccgccacaaatataacataaaaaaaaaggggcggccactttagagggtccaagcttccgtccccttgcatgcgacatcatacctcttctatagtgacacctaaattcaatt

SEQ ID NO: 12616 - DNA, 425 bp, Glycine max
aattggttaagcataagcccattgaagaatgcattagagctgggtgttatgcagccagggttatcatccaaaggcctggctgcacatacccaccgacgcctgattttcattgagtgattcctctttttctgttactgctatgaatttttttctttttatcattgagaaggattttaatagccacactctaactggtgtggggttttttaaccccccggctagggaaaacagcgtgaaaaagttgcagcaagagataaaacttgaataagttcatatatttgaagtccgatcaagcatcaattctcatattgctgtttgtgatcttttttcattttcattttttccaccttttcttctttttattacagtttatgcttgatttgtacccctatcaaagcacatgtatcttaattatgcctgttggt

SEQ ID NO: 12617 - DNA, 305 bp, Glycine max
cccacgcgtccggccacttataggtggggaagaagcagcttcttcagagagtgagtgcggtttctggacccgtgagattccatggcttcagttggtgcagtcaattgcaaattcttcttgtgtctacttctatggctctggaactttctacctgcttctcaaggtaataagcactggcatgaaaatagatacccttttatcagaaatgcaagctcattctcatcaccgtcaatttcaactaccacctgcaataatgcctatgactacataatagttggaggtggcacagcagggtgtcctttggc

SEQ ID NO: 12618 - DNA, 439 bp, Glycine max
gcctaagcctgagacataccatagagaaagtgattcaattaatatattatatggtgttgctcttcaattcccatggagcctaagacacaacctcaagcgaatagtcctccaccaaaaccttgggaacaagcgggttcctcttctggtccagcacctttcaaacctccgtcagctggcaacacaagtgatgtagttgaggcttcagggactgcaaaacctggggaaattgtttctagttctgataggagtgcagctgtcaacaggaatactcttgggaggcctgttccctccaggccatgggagcagaattatggaaacagcacctatggaggatatggttctacaatgaattataattctgggtatggatctggaatgtatggatcttcttatggtggactaggaggtggaatgtatggatcttcatatggtgggggga

SEQ ID NO: 12619 - DNA, 364 bp, Glycine max
gccagagcagggtcgctcctcaatggggctcttcattggtttgtcttctcggagagcagggaggatcatgtgattatcgcctttgatctcgtggaaaggactctatcggagattcctcttcctctcgctgatcgttctactgtgcacaaagatgcagcttatggtctgagaataatgggagggtgtctcagtgtgtgttgctccagctgtggaatgactgagatatgggtgacgaaggcatatacagtgcggtcatctcggactatgacctttcttatgcatacttctaatcggatttccccatatgcacaatcaaagatggtgagattataagatcaaattgcgcaggaactggaagatacag

SEQ ID NO: 12620 - DNA, 435 bp, Glycine max
cgaagcaagacgcacttgatctcttgcaaggacattatatagtttctgttggccgagatacagctgccactgctgagaaaggaggccttgaagctatagcttcatttcctctggctttgggtctgggtttgactggtttcctctgtgcaaccatgtcactgaggcaagttcaatatgatttccggcacatcttcttttcactaatgtgggcgggcattagcatcggcatagcagcatttgtgagggccaatggccgagttttctgcaacaggcctcgcctacacaacccccggtgataacttctattcagaccagtttgggcaatttatgcgaagtgtccagcttctgcagcatcagtcacctgcagaggccttagttctacatctagatcactttaacgatcaatatttacatgatgctccttcttgaagctta

SEQ ID NO: 12621 - DNA, 446 bp, Glycine max
  modified_base (401)..(401): a, c, g, t, unknown, or other
  modified_base (420)..(420): a, c, g, t, unknown, or other
ggagctagtgtggcttagtcgctaaatttgttacgataaagaaattaattcagcaacagatacaatgggttctcttatggcaggatgggactctctgatcttggatcctgaatcagctacaatagagaggaatcgatcactcaccaaagaagaaattaatgcttactggagagtaaagaaggagacagagttagaacacctcagagctatgtccaaactatctgagactattcaggcccgaaaatttgaggattcagagaattctcataagtcaagtaccgtgaccttggccagcataaaggagtccttaggcatggacgttgaccagaaaagtttagagcaacttatcaagaaaaatggctggtggaccaaaagcagctgggcatttctgaatgaaccgncagtgatagaagctgcttncaataagtatgcatcacaggttcacg

SEQ ID NO: 12622 - DNA, 420 bp, Glycine max
cgtcgctgctccgtaccagtttcactgcataaatttgagagaaaactctgcagacatgggggtttatcaggacctgcttacaggtaaactaatctctctcttttttttcctatcgcagcttttccttgtcgatctattgccaaagatctgcttatgttgcgcttctgatttttccattgtagagtattaaacttttatcgacgcttggatctggctttttttcttctcgatttaattactgattgtggacaagcgtttgtttcacgcgtatctgattattctattattgcatttcttgtcgctaattatagctaggttattgattattaccgatgttgtttgatttgattaacgtaaaacgctctgattttcaatagttttgggaagcctttagtcagtgattgagagttccacgttttt

SEQ ID NO: 12623 - DNA, 269 bp, Glycine max
aaaaaaaaaacaaacaaaaaaaaaaaaataaataaaaaaaaaaaaaaaacaaacaatagagaggaatccaaactaaaaaactcaaacatacaacataataacaaataacaaaaaaattacctaaatacaattaactaaacccaaaaattgcccccccttttttgggaacccaattttacttacccatctttaaaacctttcacttcttctttatttcccccaatatcaatctacctgccaaccatttaaaaaattgatctttggaaaac

SEQ ID NO: 12624 - DNA, 114 bp, Glycine max
taaaaaaaaaaaaaaaaaaaaaaaaaaaataaaaaaaaaaaaaaaaaaaaaaaaaaaaaacgcatatatataaaaatataaaaaaaccattaattaataatacacaaatattaa

SEQ ID NO: 12625 - DNA, 218 bp, Glycine max
atagattcatgtatgtgagactcagaatctctggggaaaattgtgtgtggtgtggactgcttgttttgtttgtcattgagctatatcgctgttaattaggattttgtttcaaaatgatgcttataagttgtaatctaggatttctccctttgaaatcctaggttgttcttgacatttgctatttcaaagaataaatatatagcatctttctatttctc

SEQ ID NO: 12626 - DNA, 393 bp, Glycine max
aaaaacctcgtaaattatattttaaaacaaaaataaataaataattggtcaaaaagatgattcacaaatgaatggattagatgtcacgtagctcttcccttgttgagttaaatggtagctaaacagaagggtctattgtaatatttttttaagttaatagattgggacaaatttaacgttgggtgatgccattttgcaaaagggtaaagtctaagaggctgattgtaattttcccttgaaaaatatgtgctatttatactattttatgtgaagaatctgtattgcatatgttttggtcataacatgcttgtttgtctgtgatggacttcttcgacttgactggtgatcttttttctcaactcctcttaataatttaacaagtttaatttggtt

SEQ ID NO: 12627 - DNA, 432 bp, Glycine max
ggatccttctcttctttttccctctttctccttttcttcttcttctcttcttcagactgaaaggtgttttgaaaagccggttttggagttctccccttccggtgtttcttcagtatgggagcggtgtacgacatcgtgaagagcggcgtcggggttgcgtcgatgggtcacgcctgagctggattgattttgtgcttgattcaagaggagcgtgaatttgacgagttgagtagcctagacagaataagccactccagaagcaccccaaacccccaccctccaacccccattgtccacaagcacactaaatccatgataaagagatcagatttcgagaaagatggctctgtctcttgcaacaagtgtagaccacactcctgcgacaaaatcttcatccttcccttggatcccataattatggctagtggtatt

SEQ ID NO: 12628 - DNA, 269 bp, Glycine max
atcattgtcattgtacgactctctgattagtttttcggagttcaattgagcgcaacgggatgatttacgtatcatgttgttggacatattagtcttatggggtgttgcgtataccctataataatgccttcggtgtctgctgatctccgtctagtttcttctatcaccacgatccattaggaaacttattttaatcgcctgaaaaatctcgaaaaatgagatcgtcgtagtaatcctatttaacactacgtcttgtcatactctttcac

SEQ ID NO: 12629 - DNA, 442 bp, Glycine max
  modified_base (399)..(399): a, c, g, t, unknown, or other
cccacgcgtccgctgagtcagcatattactgaattggaaaaaactatagaacaaatgagaaaggaacttggtatgactcaagattcagatgttgaagatggggggagcatcgaggaagatgaccataaccaaatagacatctcagaattggccctaagtgaggatgaagattctgatggttatgatgatgaggaagacagtgattgggacgatggcgaggcctccgagttttcagaattcataaatgatgagcacccttgaaggcaggttgacatatttgcattgatgtttccttgatcacatattccattgcctgcggctagaaggaccatcaagaaggggcaggctaaaatcaacttgtgtggttcttcctctatttgcacattctttagagctganaatatggagttccattttttcaaacttgtacaaagatgtgcct

SEQ ID NO: 12630 - DNA, 272 bp, Glycine max
cccacgcgttcgcccacgcgttcgtcttatctctgcctgttgtacgtcttacatgagcggctgcttaaagtactaacacatcaccacgattcgtgatcttctcatgtacccgacttgtggtcaccactgtgacccatatctgtatcttctggcgaagcactatccgcactttctgacggatcaccgttatcactgttcgacttcttattgctatctgcttaaacgatcagattattcatgggtgaaaagctcatttgctcacttgtataggt

SEQ ID NO: 12631 - DNA, 283 bp, Glycine max
cccacgcgtccgggcaaaacgtaacagtgagttgcaggcttcaaggagtagttttgctgaaactttgagcaaacttcaaattttggaagcacaagttcagacaagtaatcagcagaagggatctcctcaatccatcatccatataaatcatgaaagcatttacagtcaaaatgcaagcaatgcaccaagcttcatctccttgtctgaagatggaaatgatgatgtgggaagttgtgcggagtcttggtctacagcaattatctctgaggtatcccaattccct

SEQ ID NO: 12632 - DNA, 397 bp, Glycine max
acgcagtgttagtgtgtatttcctctcttctcactccggagatcgatattttcaagaagagaggcgaatagccgttcatcgatggggtggatctgtcactgataagatggttactaagacagatgatgactcacactgaacaagctcgaaaacctggtcgataacggcggttagatgctcgtgggagtacctctgactcgtgcggaagctcaaagttcggctgtctgagaaagttctgaatcacggtctctccatcttgaacgacctcaaacaacgatcctctatcagctccgatgaatggaccttgtatgagcatgctgctgatgctgctatggactgccaatgtctcgacgttgccaaggactgtacaaaggttcttcggaagagattcctagag

SEQ ID NO: 12633 - DNA, 392 bp, Glycine max
atcttcgtctactcctggcttcgtctgtcactctgtttctcccagcggcaacaaacaaggcagagctaactccttacttctttcactaatccaacgaacaaacaaacaaacacctctctctctctctctctctctctctctctctgcttctgcttctctctctagggtttggagtttcgacaccatgacgagggagaagcgttctgcgccataattctagtacagtttttgctctttctccatgccaattccattcaccgcgaacgtgaagaaagaaaaggaaagttgaaaagagaaagttcagatgacaaacctgtgtaagtatcacagtcacctggacatgatcagttatttcatactaagatccttaaatcatatgatagaagtaagct

SEQ ID NO: 12634 - DNA, 260 bp, Glycine max
attcattgtcttaatgttagcaatgtcttcctctttctccatccatttcttcctcctgctcgcaatagcccttttctcagtttgttgcttagcagcatctcaagctcccaccaccaaatcacacccctatatccttcccattaagaaagaccccgcaacaaatttgtactacacttcagttggcatcggaactcctaagcacaactttgatttaatcattgatctttctggtgaaaacttattgtacgattgtgacactc

SEQ ID NO: 12635 - DNA, 339 bp, Glycine max
aaacgtcgagggagaagccgaagaaaaaggagaagaatgttaaaaaggatgaaggacggggaaagattggaagtatttatatcccagatcagaaggttggagaaactcctttaccttacaaagcaaaaggagtgaagagggagcgccgagaatcgaagcggaaaaatgagagtgatggaagtgcttcaaaacggaagaaggaagattcttaatacttacaaattacacttgtctttccctggcatctgattataatagaatgatcaattgtagatcatatgatattaaactgcatgttgtttacgtgtcatgaatattcatgattttcccctataaggg

SEQ ID NO: 12636 - DNA, 194 bp, Glycine max
cccacgcgtccgcccacgcgtccgcccacgcgtccgcccacgcgtccgataagttctcggtgagttctgaaaaatgggttccaaggttttgcttgttctagttatgttcatggccactatacttctgatttccgctgcacccaatgaataccagaattttgacaaaaaagatgggaagcctgctccaaatgggg

SEQ ID NO: 12637 - DNA, 335 bp, Glycine max
gcgttttagccgcgacgcacttcataagctgagagcctatggcgagggccgagtactgccaagaggcagcgacaacaacgtgctcaggaaggagtatatacaggagcttagcaacgataatatacgtggggataacatggatacgactttactgaagacttgacataaggtgaattgaagaccgaaaacgggtacggatacggatgatagctctacagctgaagctgggctcgcactgctgtcgtactgaggcactcagacgaagcaactggcttagaccacaatgacgacacagactatgtcagagatctgacatcaccgggtcaagactggac

SEQ ID NO: 12638 - DNA, 177 bp, Glycine max
gagaagatgacatagtgtgtatggattctactggtgcatgtgacttatgcagggatgtctatgcaaagtatgcaagagggatcgactaccagtccatgaaagctgcgttatacgtacaaatactctcaactgtggaccagctattttgggacttaccgtagactgacgataggaact

SEQ ID NO: 12639 - DNA, 241 bp, Glycine max
attacactagaacttgtgcttgatttatttgcatgtcgatagcagaaggatggaagagctgggagtgtgccacagttagcacttgtaattaggtaaactaatgctgacatttgcctggagtgagtttaggaccatgtgaattgtcctgctactttttggatcattgtttcccttaatatctgaactcttcatagcttgagttaaggatcataaagacctatcatgtttagcatgagttttg

SEQ ID NO: 12640 - DNA, 224 bp, Glycine max
tccaataaaaaaaaaacttaaaaaaaaaaatataaaaaaaaaaaaaaaaaaaaaaaagggaagaaaaaataaaaaaaaaacaaaaatgactaccatattttaatgcccacatcttacctgggctgacattaaaaccctttccatttttacattcccccctaagcaatatttactcccctttattgtacaccttatagcctgggaaaaccccatttttacccaat

SEQ ID NO: 12641 - DNA, 342 bp, Glycine max
tacaaaccctctcaccaaacctacatcgatctatctgtcactttataaaatatagtcgggggactatgtcgtctctgtcagtatcaatccatagtccttacaggtagtgagtatgttcctccttacttaatctattgtgtgaccaaagtcattattattaaattacgataatgagataaccatgtcgatgaaactgctattaacttccctatacatttcagtgagtcttttcatagcaacattatgcgtagatcaatccaacaaccgctacgtcttttactcacatggcgaccctcttgatactgactatgaatattacatgaagccggccataacagacaa

SEQ ID NO: 12642 - DNA, 169 bp, Glycine max
acgctgaaactacttcttacgaaacgggactacatctggctcctgagcgtacgtactgtgcgccatagtctaaggtctgtggagatgctcatgcacgcactgaaccggatctattgggtcggcctcaaagacgcttgactggtggtttggcaacacgccgttatactga

SEQ ID NO: 12643 - DNA, 183 bp, Glycine max
cccactcgtccggcaaagtccacaactggattctggagaagaaaaagctaagctgagtgggtgtttttcgcattcattttgataagttctcttattattcttctaaagtatttcttacaggatcactggtgagattgtaattgtgagtttgagggacaacaatagtgatcttctccccccaaa

SEQ ID NO: 12644 - DNA, 184 bp, Glycine max
atcaagcatgtggcggtttaacgcagattctaggagacgcatgaacttcattcaccacagggcgagcgattccgatgtcagactgaccccgaagacaagatatgccgagtatcagctcgaggagaacacatccagtgctgatggttctgctactacgtgctcatagtagaccctagacgtgaat

SEQ ID NO: 12645 - DNA, 438 bp, Glycine max
aatgccttctgctgtgggttatcaacccactcttagtactgaaatgggttctttacaagaaagaatcacttctaccaaagaggggtccataacttctattcaagcagtttatgtacccgcagacgatttaaccgatcctgcgcctgctacgacatttgcacatttagatgctactactgtactatcaagaggattagcggccaaaggtatctatccagcagtagatcctttagattcaacctcaactatgctccaacctcgaatcgttggtgaagaacattatgagactgcgcaaagagttaaacaaactttacaacgttacaaagaacttcaagacattatagctatccttggcttggacgaattatccgaagaagatcgcttaaccgtagcaagagcacgaaaaaatgagcgtttcttatcacaaccttttttcgt

SEQ ID NO: 12646 - DNA, 73 bp, Glycine max
ccgaaattcggcgtttccgaacccctttgcctttaggctcagccccgacctgttggggcgccgttttgcaggt

SEQ ID NO: 12647 - DNA, 372 bp, Glycine max
ctgattcatggctagtctatagtctattgtgtcgtggctgacttctctctcgactcagcgtcacgtctggtttggcagtgctcttacctgcaacttttgtattcttcttttccttttctattctttctctgttcattcttgctacttccactccttgcgtactagtaatcccccttcaataccatccatcagcattcatattttcacaattgttctttcaattcccataagcataaactgaattaaaaattgaaaatcagagcaataagaacacgcattctttacttccaattcccaattcttcttctgccctagattgtaccccctttattattgcactacagcaccactgtgcatcgatcgatcgctggt

SEQ ID NO: 12648 - DNA, 406 bp, Glycine max
gcttgtggcagtagtgctcaagaaactagaaagaaaacaaacaaacaaacaaacaaacgaaaccctccctctctatatatcattcccctctcttctctttcgtttcgtcttcgttgtttctctctctcatttctcagccatcacagcctcgtctcaatttctatcttcctttgcgccgctccatctaatcacagatcgcaaaaatcaaaatcaggtactgcagggttgtgaaagctagatactaattagatcgctgattcgaagaaagagaaacaaaccatagtactagtactcttttttattagagatttcatctaatataatatggtttcacgatttaattaatcgcagaagctgccttggtgtgtgagggacgaagagaagagaaaaggaaagagatcggaaa

SEQ ID NO: 12649 - DNA, 368 bp, Glycine max
  modified_base (212)..(212): a, c, g, t, unknown, or other
tcggctggtttggagctggtagatatgaagtggatgggtacgtgtataattctgctgacgagcctgagatactgatgactggaaaatggaatgaggctatgaattatcaagtttgtgactcagagggagaaccacttacaggcactgagttgaaagagatttggagagttagctgataccccgaagaaggacaagtttcagtacacgcattntgcacacaagattaacagctttgacactgatcccaagaagttgttggcatctgactctcgtctacgtactgatagaatggcccttgagaagggtgacctattcacatctggttatgagaagagcaatttggatgagaggcaaagagctgagaagag

SEQ ID NO: 12650 - DNA, 373 bp, Glycine max
  modified_base (342)..(342): a, c, g, t, unknown, or other
cccacgcgtccggccaagcgaagccgagtcaagtgaagccgagctgtatgacagataaggcgggtccactttgatgaccgtttctttctttcaccttcccaacctgaacgaacgtgtacgtgtgcatcttctttctttgtatataaagaatttcaccaccatcattcttcaacccaatcactcttctcaattctcatattccaatgtcaaatcctcaaacaaacaataaccgtcaccagcccagccgcctgcagcgccgcgccccctcctccctgcaaataaaccgcgccgtcgagtggaacgtcgccatccccctcctctccccgctcgcatcctctccgncgccgatggagctaaaaccgccgcaagagcc

SEQ ID NO: 12651 - DNA, 417 bp, Glycine max
cttggcagcgcgaacctcggaggaccaccgcttgtcatggcggttccaccatccaaaagtgaggccgctgagaaaagaacattcctttcacaattttactctcactatctcggaaaccgaatccacgctctctatccctacttctccacaaattacttgtccaccttcgctctccgcttcagatcaacgcatcgtcgggaatgtctccctcttacgctaccttcctcttcactcgacgctcccttgttcatgaccaagagatctagaacgcatgacgtcttggaagatatattagagcgtgcttcgataaatttgcatagcgtccaagagaatccgcagtttcggcaatccagagctaaaaagtcagattccctgaacgcacgtttcatgatatttgagagggtccaaggcttttat

SEQ ID NO: 12652 - DNA, 350 bp, Glycine max
  modified_base (294)..(294): a, c, g, t, unknown, or other
aaaaagtaagacaacttttagcatcatctgcagcaaagtctaatgcatatgttctccctgcacgagtcaacatcaaagaaaccaaaactagctcagccccccacattagtgcaagtggatctttgcataatttgtggcattcttcccctttggatgaaaaaaagaatgagaaagatgttgatagtaaattgtcagagccgactatccctagagctcactctgttctcaaagaaagtaacagtgatactacatacacccagttaccacgcccttcagctgatggactctcacctncacaagttgatcttttcagtgctactgatacctaagaaaataaaagacaagctttt

SEQ ID NO: 12653 - DNA, 305 bp, Glycine max
tcgggaatgcctctcttgaatggaaaggtattacggaggcatggagatgtatttgagcgtagtgcgaaaggatactatcatgcccatggtcgatcggatgatacgatgaaccttgggggaatcaaggtgagttcagctgaaattgaacgcatatgcaatggagtagatagcagcattctggaaacagctgcaatacgggtaccaccttctggtggtgggcctgagctgttgactatagctgatggattcaaggattcaaatagcacatatcaagatttacaccaattgaggatgtcttttaattc

SEQ ID NO: 12654 - DNA, 317 bp, Glycine max
cttggcagcgcgaagcttggaggagcaccgcttgtcatggcggttccaccatcggaaagtgaagccgttgagaaaagaacattcctttcacaattttactctcactatctcggaaaccgaatccacgctctctatccctacttctccacaaatttcttgtccaccttcgttctccgcttcagatcaacgcagcgtcgggaatgtctccctcttccgctaccttcctcttcactcgacgctcccttgttcatgaccaagagatctagagtgcatgatgttttggaggatatattagagcgtgttttgataaatttgca

SEQ ID NO: 12655 - DNA, 433 bp, Glycine max
ataaaaatgtactctttactttcattcgagtaatgttgtacattccagtcaacggagctggctagacgcttaggagccacgctattacgacataaccaacgtgtacactatatttgatcaaatctagtctatttatcctttcatttgttatttctggcttctagtttggtccaaattatttatatatcaatcgatcacaacccaacgaattagttgaaataaaattggagatagaaagcaaacaacatcatgccatcaacaaggtcatgggaaatggagcacgatgagtgcatcagttgtggcggttttattgggttcaagagaaaccaagtgatagattgcagcagcgagataggagattctgatacagaggagttgtttgagataaatctgaaagagaaggagcctttggctttggatgcaataagagaag

SEQ ID NO: 12656 - DNA, 373 bp, Glycine max
ctcaaaataaaaactataacttttgattatctgcacgttttgcatttgtgtttctgaggggagggtacctaatcccaatccgtttcttttcaatcttctcttctaccccatttcctagatctgcttgtttcttccatcatcaactaatcatggttcttcacagagaactcgatcatctcttttcatcccctttcgttgaccctcccaaagatgatgcgaaatccagtggcatgtcaattgaaaagaagattgagttcctcgacagtttgactggaaaggtcacaaatcggacgtctcggacgtggttaaacgatcgtctcttgatggaactagtaccacgtttaaatgcagacgaaattagaggcttgtttgc

SEQ ID NO: 12657 - DNA, 379 bp, Glycine max
atttctctctcccgagttgctttctctcatttctctctcccgaattgttatctcccccgtctctgttccttctttccatttttttcatttttcccgtttttctgcattttcttacatctaaagctgtaattttttacatcaaaattgtgatttttatctcagattccatgacaacgatatcatatttgcgttcctttccaagtttgtatttctatttgaccgtgactaactattgttcttcctttgcaacacaaaagcttcaatttttttgtgttttctatttttttgtgttataatgacttttcgtaggacaaaaggttaaattttttggtgttcctgagccttctccgacgtacccaaaggttggagcttttttgct

SEQ ID NO: 12658 - DNA, 343 bp, Glycine max
gaggtgagttgactcagcgatggcggatgaggtgactcaggtgatggtggcagagaacgagtggagcatgataggataccctcatgcttcgatcaacagcaaacgggctttcgaatggaccatcaacaagatcgttcgcaacaacgtatgtgccttcaaccttctttttcttcacgttcaagtccacgatgaagatggatttaatgacatcgatagtatctacgcatcgtctgacgattttaagaacatgaatcagagagatagaattagaggggttcatctgatggaatacttcagcaataggtgtcatgaaattggggtggcttgtcaagcatggatcatg

SEQ ID NO: 12659 - DNA, 372 bp, Glycine max
cccacgcgtccggttgtatcttttggagggtacaatggacgttacaacaatgagaaaggcaaaggtgatattgtatcagtcttgaaggctgagaaagaagagttggaatcatcactgatcaaggagaagcatcatgctcttcaactaaagcaagatctggcagaagctgagtcttgtaactctgacctttacaaggtagtgatcaccatggcatctcccagttaaagcagcacctatgtcaccatttttcaaaccaaagatctgctacttcttagggatagaggtgaagacataggtaagaagacataggtcatacttgagttgtgagatatttggatgcaaattgggcaggttctcccactgataggagat

SEQ ID NO: 12660 - DNA, 345 bp, Glycine max
tttcctctctactcactccctccgggatcgatattttcaagaacagaccgaaaagctggtcagcgatctgttggatctgcgagtgaattgggcgaaagaaaatggttaccaaatcagaggaaactcaactgagcaggctagaaaatcaggtcgataacggcggctgcggcgcgtgggagtacctctgcctcgtgcgaaagctgaaagttcggcggtcggagaaagttctgaagcatggtctctctatccttaacgaccccaaacaccgatcctctctcggctccgatgaatggaccttgtatgagcaggttgcagttgctgctatggattgccaatgtctcgacg

SEQ ID NO: 12661 - DNA, 392 bp, Glycine max
acgcccactcgttcggagagaagcaggtccccataattattgctgggacaaggatcagatacggggagtggctctattcagacactgagggaattctgatctctacaacagatctgcctgtttgattctaattcatgaatacttcatgtaaggactatattcatgggcaactcacgacctagtatagtgcaaatcgacacttgtgttcttaacccggttccttgctttcaccaaattataaccgataaaatccccttgataatgaaagtatgttggaatgtttgtccatttcataccaacattatctgagttgcaacttcgtttaatggttgactgttactaaacctggagagatataagttcaaatgcaaagtatacacatatccatattt

SEQ ID NO: 12662 - DNA, 402 bp, Glycine max
  modified_base (389)..(389): a, c, g, t, unknown, or other
tcgcccacgcgttcgcccacgcgttcggaataaacccatgaatcaaaatattttgttgtaagcgcaggatttaccaattgctatgacatgcattcatgagttttctagttatatttgaatgccatacaaactccaacttaatattcatgcgccatagaattgagagaactattaatgctaaaaattaataaatgacattattacacatacgaacatttttttctcgcatatgatcctgaatcgcaaaagtagcggtttttttatatctgttaatatggaattagctcaattcccattcacctagatatttttttcactggctaattcttgctttatgagaagaatagcaaaaataattttgatctcacatagttaggagtatgacccgnatcgtagataact

SEQ ID NO: 12663 - DNA, 307 bp, Glycine max
ctgactcgtactctgactccttttcgactctgctttctaagtagacgatacacacttgcaggcaggttgcattatctcatctttatgtgtatctcagacctatcattcatcttacctatccgatcctaatattcccaatgctcctcacggacaacctatatatacaactaccgtttgcctcaccacatgccactataattctacgatcccctgatccagtctcacgcattgcttaatacggattcagatgttacagatagcatgatcataaacgccatcgacactcaagctgctgacatgacttata

SEQ ID NO: 12664 - DNA, 401 bp, Glycine max
  modified_base (338)..(338): a, c, g, t, unknown, or other
cccactcgtccgagcaaattgggcgttctcatggctccactgcttgtcgagttgtgagtatttggccacacggaaagatcaggctttgctttgctttgtgtgagatctgaagaagagaggtatggcaaaaagggtcttcttgtacaaggatttggttccttttggggccatggtgaccatggaatgcctcatcgtagccttgaatactctgttcaaagcagctaccttgagagggatgagttaccatgtctttgttgtctatgcttatgctgttgctgctattgatctcattcctggaccctttatctaccaaaggtgcagatcaagagtgcttactncgatcagtttcccgctactacgcaaaattggtcttatcgggctaataggatcgtgggatacac

SEQ ID NO: 12665 - DNA, 247 bp, Glycine max
gttatgctagctcacacactaagctctgaaaaatgagctccaaaggttttcttattctacttatgttcatgggcactatacttctgatctcctctgaggttgcacccgatgatgcataccagaattttgacagatcagatgggacgcggattgcaaatggggtagatgaaagcagatattggcgtggcggctatggcgactatggtggctggcgtgggggtggctggcgtgagggctatggacgctg

SEQ ID NO: 12666 - DNA, 318 bp, Glycine max
  modified_base (208)..(208): a, c, g, t, unknown, or other
aaaaaaacagtagtttttcagaagttggggcatgccccaaagaagcggcatggatataacttcttatctctgatgttgatttaaatagtcatccgaagattcccccatttatagattactatattacagttgactccttcgtgattacatgcccacctaacatttgaaaagttaattttatgcaacattagttagctaactattggtntgaatattgctacagaaatatctgcaatctacaactgtaagagtggatgagatgagagtgaagagacaggacgcagaacagtggatgttccaccgtatgctacctgagaa

SEQ ID NO: 12667 - DNA, 341 bp, Glycine max
ctcagaagcagaagcagaagcgcaagctcgtgtaaccctaattagggtttgcaagccgagttgggattcgcctttcgcgtgatcgcagcgctggatccgtaccgtgttcctccgtctacggaagcgccttttgctcgatccttcgccgatctcggaagcatgtactgtccccgaggggcaatgttgggaagcggaggggtttcggacgggtacgaggttggctcaaagagacatagaatgatggaatccaatccatacttcgcagtgagcagcggtacaggcaacttaccttatgggtatgctggtggcttacagccccctcccttatcttgtggtcgtct

SEQ ID NO: 12668 - DNA, 222 bp, Glycine max
tcgctggtagtttagacacctctgcaagtgcaaactccttcaccaacttcaccttctgcacagaccctttcatgaccacttatttctctgaccttcttgcttcttccacagacaacaacaaaccaccacatggtggtggtggtggtttgtctgagagaactggctctggtgtacccaaatttaagtgcacaccaacaacttgtttggctattatccccctcc

SEQ ID NO: 12669 - DNA, 415 bp, Glycine max
gtttgaatgtgcttcaaatacttgaaaccccatgatctctattcaatataactaatttgaggagttaagataacatgatggctaagaaaatggattctgactttctctgatcatctgagaagatacaaaaagttaaaagagcattctggataggtgaacttaggccggtttgagtggatgacataatttaaaataattatgcactctgttatgtttcaattcagatgtgactaaatagatatgatttatcatgtttatatattgtctcatttcaacctcaatgagtatttaccactttcacaggttcgtgtttgtgcttttccagcaagtcgattgggattgcaagggataggaaatagtccagactgcaatccttgaaacgtgtgtagcccacgacagtttttcaactgggcac

SEQ ID NO: 12670 - DNA, 382 bp, Glycine max
ccggacctacccgctcgaaatgctcaaggtactagtaatcctattgttcaatgtaattgtctggccgatcgcatgggttgtgactgtgagcagatgaaattcctttggctttttattttatatgtaggatgtgcatctggtaccccccccctccctctcttgtgacaattagtggttattgggcctgtttgttacagtttttatttttcataaaaagtctcctttttgtttttaataatcacttttagaaggttttcatgcatttgtgtgagcttttcaaaataatcataagctgaaaaaaatctaaaatctgattaaaatcagaagctattttgaaatagcttctaataaaaaccaactcttttaaaagtgattttatgat

SEQ ID NO: 12671 - DNA, 381 bp, Glycine max
gatctttaaccgatagtaaatatcacttcttaggagcaattttccatggggatatggtatttgttctacctgcgtaagtatgcactgtggctttgaaaccaaagcagtcccttgtcatgaacaaaaggttcaatgagttgttgtaagccaaaacgacactaaattaggggggaaagaaagatggtgtagagaagagtgaaagcaaaggaaaaaaaatggttggtaccagctgatgtatcaagaagagctagaggtagaaactatgcataaacaaccatactgactgccttgtggctctaagaatttttctctaacttataaatgtttgtgtggacattctatattataagcactatgcaatttgcttttaagaatttatct

SEQ ID NO: 12672 - DNA, 68 bp, Glycine max
agtgatctctctatctatctttctgtctgtctttctgaacacgttgatggattccacctctgggccct

SEQ ID NO: 12673 - DNA, 437 bp, Glycine max
tgcagtttattctatcatatccttgttcaaataattttcttttcaattacaataccccaatcgcagaaacttatgttcatgaccatcctcaaggtcccaataacatttacttgaagacaattttgagttgaccttacagcctagttccacctacaaacacccttgatccttcaaagcctctcatagttccaatactggcaacaataatactcttgggcatctaaactatctccattcttttttccccctttctttgcagtggatttgcgaggttttaaagaaattaaatgcgtttttatgtgctaaagagctaggtaattatagaattcatctcacacatacttctttttactaccttttatcttttagattttatttttgaattatccttgtttaatggagtaatttaattcgttgaagggttgtggaatttgtgt

SEQ ID NO: 12674 - DNA, 290 bp, Glycine max
gccggccagccgacaatcacgggaggttatgtgggtccctccacttttatatacggaacaacgacaacacacatactagtcatttgttgttgtgttctcctttcattaaggttgtgttgtgtttgttgggcttcgttactgtactttggtttcattattatggcgccgtcttcttcagcttctgcttctcgtgaggtacactacatatgggttaggaagcgaccatgttgactctacgccgcataaataagagacccatggaagaagacacgtgtctggctgggcacatt

SEQ ID NO: 12675 - DNA, 93 bp, Glycine max
tcgaaaaagaacaaacataaatacaaatctaatatatataaaaaatatatacaaaaaataaaaaatagggaaaattggaaaaaataaaaattc

SEQ ID NO: 12676 - DNA, 307 bp, Glycine max
aacatcatctggatccacaagaatcaggtaacttgaactagtagcagctcatcgggctttgggagaatgctaaacacaaatgctgctttcactagttaccaactgttggactatcatagatatgctgactggtttactacactaacatttaccacatgttacacatgatagacttacttatcatcttgaatatcagctgactagatacaaactatccgaaacttgtaatccgttctgacaactacgcttgtacatgaatgctgattaggaaccagaagaacatgaaacgcctcagaatactacctga

SEQ ID NO: 12677 - DNA, 365 bp, Glycine max
aaaaatgcaatctatgtccctgacgctgagcaagaggctctccaattcaaagcctctcttcgggatctcttgcaacctcgtcgctcacgcatcctccgccacaacctctccgccgccaccttcgccgccagtcccctctccatccgccctcaacagcctcctcaccgctccgtggtccgtcactcagtcacgcggaatcacgctctctggatctgatgttcgagtcgggaatctcattggaaaccgaggacgcgctcacgaggttctcaaactgtatcgccctctttaaagaacgggcaaagccactcttgaagttccgcctcaaagtgtagctggttatgccacagttgctactacagaagatg

SEQ ID NO: 12678 - DNA, 332 bp, Glycine max
gccacgcgtccggaagttattatcggatcaccttgggagatttcaaatgacatgatcaccagggtcaatagctgaatagttgtgcatggtactgaagctgataagacattgaattgtgaatgagatccatatgaggtccctaagagcatgggaatattccacttgctcgaaagctcaaaagatattactactgccacagtgtcccaaaggataatggctaatcatgaagcttatgtgaaacgcaatgctaagaaaactatgagtgagcatagatactactaagagaaaaaatacgtgtctggatactagagtgtatataatgatcttttaca

SEQ ID NO: 12679 - DNA, 455 bp, Glycine max
gaaccgtacctctttcttcttcgccttcttcgttcgatccttctccctttcgatcctcgatgtgggcctgtggttatttttcctaattcttcaatcgagtccctgtttcgttcaattcccgttttcttcttccgtttgatcccaaaatcgttcccttttcataaccttcgtcgttttttagggttagggtttcgattcggtctttcagggtcataagatcgtcgtttttttgttctgttacctccaaaactcctggctttggttcttattcgcttgatatttcgtcccaatctggcaaaaatttatggcccgcttacgaatctagggtttcgttccggtccaattttatggctttatgatctttgaatatctggaggggttttctgtcaatttcttggggggtatgattccttcctatacctggcaaaattctatcgggcgtattggttttaatt

SEQ ID NO: 12680 - DNA, 148 bp, Glycine max
gtcaaaacttgcttgcttcccatatatctcataagtcttttatagaagttaatgaagaatgcggttaaggtgcaactttcaacgctgcaactatacaatatgtgtgtgccatatttccaactgaaatagactttttatcttgccaccc

SEQ ID NO: 12681 - DNA, 122 bp, Glycine max
ggctaaccaaccctgacactccttcttctccgcttcctcttcgatcatcgctggagaatgcggccgaagttcgacccctcccagatcgtcgacgtcttcgtacgcgtcaccggcggtgaggt

SEQ ID NO: 12682 - DNA, 178 bp, Glycine max
acgccgaccgcaacgtccgaatagaacaaagaagtttccaagcctgaacacacaatatattctccacaaaatggggtcaaacgagatatcacatcaaaacaacacacaatactaattccttactgataatcaaggtccacaaactactatcacattcacacgatgcgattaaatagca

SEQ ID NO: 12683 - DNA, 245 bp, Glycine max
cccacgcgtccgcccacgcgtccgggctaagaacctattggttttgttggggctgggtttagggggaatagttctcatcaccagaaagctcattaagtccgtcagagaggatttcggcgctttcattcataatcttcagctgcttccttcttcctagccttcttcttccaatgcttcttattctcttactctactcaccttcgcactttccgacctatttcacatccatggacacgtgccctcgt

SEQ ID NO: 12684 - DNA, 103 bp, Glycine max
aaaaaaaaaaataaaaaaaataaaaaaataattttaaaaaaaaaataaaaaaaaaaaaaaaaaagtaaaaattgaaaaaaaaagaaaaaatttataataataa

SEQ ID NO: 12685 - DNA, 469 bp, Glycine max
cgagaataggctacccaatctatccgagtaacttctaaatttaacggatcaaaataaaataggattcttaatctttatgacaaaattattttacctctcagagtactttttcacctcgagagtaaaaatcaagcgaaagacgtggtttcaaattggggaaaaggaagaaagggcaagagagtcgagaaacggcgcactccgtctgttcctcaccgtcaccggcgcgcgcaccctctgttccagcgactcctaattaagttgggaaattaaaaagacttcaaatttcccagatggctgcagcctttgcttccagatgctctcgtgtgggccgttctctgtctggtggattaagcaacagttcccctggtttatttacctcatcacatggcatgacatgcaacaatttgttttctcagcaacaacgtaccttcatacagatgaggactgttctcaaggttgtcgataactc

SEQ ID NO: 12686 - DNA, 114 bp, Glycine max
acgaagaatataagatagaatattttagttagattttgatcttacacaataaactatcaccaagagccacccagtgccacctgcaatgggctccttcttctacctatccttctc

SEQ ID NO: 12687 - DNA, 134 bp, Glycine max
acgatacgccacgcgtactgcctggttctctctcataacattacgcaccagacagatatcggggatcgttgaaactatgtccaagacacatacaccataataaaacctttataccatctgaatctaacatctat

SEQ ID NO: 12688 - DNA, 403 bp, Glycine max
accacgcgtgcgaccacgcgtccggatttgtgcacatagagacaccatctccacctgctgctggtggttatggcaatactgcatatagctacggaaaaaagccccattcctcctctgagaataccccgaaatatggttcaaagaaagcattgcttggagataatggagatagaggaaattcaacaagggatgctaaggctttcaagaaatcatcaccaaagatatgtaaatactggatcaacaacaattgtgcacatggtgaacaatgcctgtatctgcattcatggcttcatggtgatgggcttttcacagtaacgaaacttcatgaacataagaaagttatcactggcatcgcactttctgctggatccgacatactttattctggcagcactgatgggac

SEQ ID NO: 12689 - DNA, 388 bp, Glycine max
gaaacaaacaaaagaggcagaagatgttgtgggtggacaaatatcgtcccaaaacgctcgacggggttatggtccacaccgacatcgctcgcaatctcaagaaattggtaacggaacaggattgcccccatttactcttctatggcccatctggctccggcaagaaaaccctaatcatggctcttctacgccaaatgttcggacctggtgccgaaaaggtgaatgtggataatacgacctggaaagcgtatgctgcgagtagatctcttgatttagagctgacaacattatcaagtgccaatcacatcgaaacgagttcgactgatgcaggctatcacgacagatacattgtccaggaagtactccaagaaatggcttagaacagacc

SEQ ID NO: 12690 - DNA, 283 bp, Glycine max
cccacgcgtcctcccactcgttcgtcactttcattttaaaatgggtatatctatgcgccttgggtaacctgtttgctgtatgcctctcatcttctcacaatgtctcgtttgctcaaaatttaccatacttagttgtgaatctaggaaactggctggttgtcaaacgctggattcaacatccatcactctttgatggaattgtcagcatagatctcttgcatggaactcaagtgcatcttaagactacaaagtttaacacgtatctcacttcttaaaatggaga

SEQ ID NO: 12691 - DNA, 392 bp, Glycine max
aaatttctatcttcttcaccttgctctcaccttctgggtaatgtaagaaactgggtgttagcgtgagctgtttgacaaaaatgaatattgcacaagttacagcatggcagcctgggatttgtgtgaaaaatatgtctcagttgcaccggctttaatctaaaccatgtgttataccaaagagtttaggtcctataacttgtgttctactgagcttaatagcaagacaatcgtttagctcgaaatgttggcccattttacaatctcggaaaccttttcatatttgcttagccggtggaaaatggatgatgggaaatgatgagaattccttatggatatctattgataaagctatagtaaaatttaagggagaatcatcaatagatgatgtatta

SEQ ID NO: 12692 - DNA, 52 bp, Glycine max
accaccttccacgcgttctccacgcttccgcccagctttcgaccaacgtccg

SEQ ID NO: 12693 - DNA, 476 bp, Glycine max
cccacgcgtccgagcaaatcaaagagaaattgaaagaagctgatcaatatgatcttgaaggcgagtcagagctcaagattcgagctttagaggttgtagaggaacttagaactaagagagcggacaagcagtgctatgcttcttttagatgccttcaacaaagatagggcatctttgcctacacctctgccaaatccaccacctttggcacctcttcctgtagttgctcctgatgctcgaacacaggagatgataaatgaaaagctgaagaaggctgaagatcttggtgagcaaggaatggttgaagaggctcaaaaagcattggaagaggctgaagcacttaagaagctttctgccaagcatgagccactgttggattcttcaaagtatacagctgtggatgtgcggattacatgatcagaagctacgtgtgtgcgacatttgtggagcatttttgagtgtttatgacagtgatc

SEQ ID NO: 12694 - DNA, 496 bp, Glycine max
  modified_base (1)..(1): a, c, g, t, unknown, or other
ngtgtttactttgaattttcggcttcatggccacgtacgccaagttggatctcctttctaggaagtgatgataccttttgttcaagttttgctcgtatttttaaacggctagtacaagaatgtggcatgcctgtcgtattggctcttaaaggtgcagtagatgagtttataattgctaaggataggtctaaacaatgtgtagctgctgaagcgttggcgggtgtgctacattctgatattgatggtctatcaggaacatgggaaagttggctgatgcctcagttgaagaacatcattttagcccaatctgttgaatcagtttcagagtgggcatcttgcatacgatatgcagttactggtaaaggaaagtatggaacaagagttcctcttttaagacagaaaattctggattctttgatgacacctttaccttcaacagtagctactacagtaacagtcaaacgatatacttttctggctgctgcacttatagaaa

SEQ ID NO: 12695 - DNA, 136 bp, Glycine max
gacgaagaatgctttccgtgtcttctgatcatgacacacaggggatttcgatgttgggaactgaaggagggtagggtcaacctattgtgggttgcactgatccatgtaatccataagctgtagcagaccttagtca

SEQ ID NO: 12696 - DNA, 363 bp, Glycine max
  modified_base (267)..(267): a, c, g, t, unknown, or other
gcgcccacgcgtccgttaacatatatatatccgtaattatcccttcatttttccatcttctttccgtcgcgaggacagcaatatccactgcatttcccttttgggtgcagaatgggatcccttgatctgaaatggaattcatcgggatgcatggttttgaagaaggtagagtcaactaaaactaaaggggaagatatgtcttccctgtgtggtagttcagcctatctgtacaaaaggagaggaagaagaataagatgcagagaacanagagtaaatattgttgctacggggccagccatagatcatgctcctgttattgccaagcccttgactaaagatgatctaattgactacttcgtatct

SEQ ID NO: 12697 - DNA, 391 bp, Glycine max
  modified_base (227)..(227): a, c, g, t, unknown, or other
cgcaactatcactgtataatcctgggaaccagttttatgcatgcatgttatcaggagtattggggcttctgctgttgtaaaacatgacagagtatgtatatcagtatctgaccatacttaaggttgtgagtgctgtgttgttttaattataactacaacatatatgtctcgcatagccagttatcagatgtcaaattttaagtctatgcctgactgacttagaccangctttaaagttggtgttgtatttctatatgtaccacttgccatacctacctacccctcatcataattcatgttatgtctatcattatatgagattcatacataaactatcgatttttaatttgaatttaagtatgttctgggtttctgcggaaaatttaacata

SEQ ID NO: 12698 - DNA, 473 bp, Glycine max
cagaagacctccctatttttgcccttcaagatgacagggtggttgaagtagttggggatccggctggagtgcataaggcattagagttaattgcctcccacctaaggaagtttttagttgatcgcggtgtaattccaatttttgaaatgaatatgcaaacagccaatccccaccatgcagagcacatgccaccccaccaatcttggggaccatctcagggtcttccttccaaatgttggtggaggtcctggttttggacctccttctcaatacatgccacctccacgacaacttgatagttataatccatcagctgaaatgcttcttccagtggacagacagccccatcaaggtatatctgcttatggaagagatgcttcaataggtgttcatgcatcttcaaatactcaatctgcaccttccttagtcacacagatcacgcagcaaatgcaaatcctctatcttatgctgat

SEQ ID NO: 12699 - DNA, 383 bp, Glycine max
gcggccatgacacgatctggaggagtgctaactggaaaggtcttggatggccaaaaacaacaagtgcgcctatagtaactacaaccacatttacgaactaaccaacaccaccaacccacacatcaagaatccttctttctattcttatttcgcttactattccgacgactccgcccacaacaaaccacatggccgcatcctagtcctaacccgacccactctcaaacccatcacgccctccaccccgcaaccgcaacatcaacaaccaccacctgcgaccccgatccagcacaaccacccctggtccgaaccatgatcggacgcgatcttgctcctacccctgggccgaaccggaaccggttcaccgctcttgacgctccccg

SEQ ID NO: 12700 - DNA, 371 bp, Glycine max
ttcaaacattattttgtaaaaaaaaaaaaaattttaaaaaaattaaaaaaaaaaataaaaaaagaaaatatggaaaaaaataaaaggaaaaaaaaaaaaaaaaaaaaaataaaaaaaaaagggctcccattttaaaggttccaaacttacgtacccttacattccactacaaaactcttttataaagccaccaaaattcatattactggcccaaattttaaaacatcttaactggaaaaaccctgacattccccaacttaaaccccttataaaaaatacccctttttccagttggcgtaatatcgaaaaagccccaacatatggccctttaaaaaatatacacatcctcaatggcaaaaggaaccccccct

SEQ ID NO: 12701 - DNA, 450 bp, Glycine max
cagaaccaagcgagttgttgtgactgactcagtgagcgagcgagcaaccgagttactcatggggaacgcggcgcttcggaacgtgaaggtgctcccgaactcggcaaatatggaggaagctcgtcaccgagtcttccaattcttcagaacggcttgcagatcgttaccctccgtcatggaaatctacaacctctacgacgtcgtttccgtctccgaactccgctcctctgtctcctcccagatccgtaagaacatccacgtcaccgatcccaaagtgatcgatatgctgcttttcaaggggatggaagagctgaagaacgtcgtggaccattcaaagcagaggcatcatatcattggtcagtatgtagttggtcaacaagtacaggattcagccacaaaagaccagggcacctctacttttctgaagaatttctataacaccaattactt

SEQ ID NO: 12702 - DNA, 196 bp, Glycine max
cgctattcaaatcatgcacccatgctgagacataacagatatacactgctcgtacgactccggagtccctacggctcgccgaatcctattcacaattacatcgcctcttcacacgcacaaccttgcgtccaatacgccagctattacttcaaagatcgctaaatctgactatagtatcccggagttcataccctct

SEQ ID NO: 12703 - DNA, 324 bp, Glycine max
ctttgcatctctctctacaataatccatccttttcctctcaagtaaattattgtaccttaacgagcttcttggggagatctaatatcaatgaaaaattttaagacagaactcgcattcacagggaaatctaatcgcatagaaacagtaaagacaacacctttttatctctacacaagtgattatcgccgctgctgtgaatagctcgtgccataaatgattctcccagccaatatatagtattcatattatcatcctccgactcgagcgaggattatataatataaacctgattctaacccatcaactaccagcttattcttaat

SEQ ID NO: 12704 - DNA, 445 bp, Glycine max
ctaagtgtctgtccactcttgcctcattcctctctcaagtttctaactttggcccacattcgcaatcaactctccaattcccaagtgggtcccaacccaattcggatttcgtttctggatttccccaattcgaagctctgcacttccccttttgaagtggatttttcgttcctgggaagttcaattccaaattcttggaatgggtctctaacacaagcttccaatttggagagaaagtcccaaacttttgggttcaatttttcagttttcgcaactgggtctgtgatcgtgattttggcctcaacttctaaggttttgggagttaccacaacttcaattgtggttgcatccgctgtaatatcaaaggatcgtgacgaaaccacaactgcaacaaccgcaatttaaaacctttgtgtgagaataatgcgtactacagcagaatttc

SEQ ID NO: 12705 - DNA, 426 bp, Glycine max
cgtattcaatatcgcaatacgtcagtaaccaacagctgttggatcttatgatgaggagtgtggaatcgcgtaactattctctgtatgccacgaggccatcccaacgttattactagctacaaaaggccaacttcgagcatggagcaaaaagtatatgaataaaaaacaaggaaacaataaaagaagaagcaaaacttcttcgtcctccattgccgcgtgtgaatgatgtgttgatttgtgtgggttttttagtttattttattgtttgtccgtgatcagtttggactaggtaatgcatcaagtgctttccatactcgcccattgagtttattaatttgtgctgattgaagaggtgttgattcttcattcttcaatcctatccacttgtattgtcgtatttttaataaaatttaaattaattttcct

SEQ ID NO: 12706 - DNA, 448 bp, Glycine max
cgagtctgacaagtcaaagtctgaagtcaatgacgacaaggcacgtgtcaatgataacaatagccctttcaaagaaggaactcgatacatcgtctgtggggtatcagcctccactaccagctgaccaggtgaaggctgctacagattttgattatgaaggagagggttcacctaatggtcgtgttcgtggtcgtggtggccgaggcaggggaaggggcagaggtaatggctttatttcagctgattatgaggatggaggttgggatcgcaataggggaaatgctaggggcaggggtagaggaagaggacgtggctttcgtggtcgtggaaggggagggtacaatgggccccatgttgacatgcaagatggaggatacaaccaagatgtacctcaaggccgtggtcgtggccgtggcagggggggatatcgtggaaggggtcgtggctt

SEQ ID NO: 12707 - DNA, 418 bp, Glycine max
gtggggttatgacaagtagtggtgtcgcttctagtggaagcatgtatccctggctgcgtggggaggtttctgcttcttgacgaagtgtagagaaaattagttgcctcaaattgctatattatgtgactgctaaacatcaaaagtagtctttgtcttgactacgataagagagagggagcttcaacctgtaaagttgacttgttgactggagaaccattggggaatatgtgggtagttaggattgatgcttttatatgccaaggcatggttaagttatctaaataatccgtgaaataggactcgttgtttccttgctctgaatgggaatcgctataatttcctgtgccaaataaaacaaaatcaacatttatagaactattccttccaaacttggaaacctgaagaaaaaaaggggcgg

SEQ ID NO: 12708 - DNA, 459 bp, Glycine max
gaggatatccccctccccttagctttttcccttttaatttttgcaaattcattctgacttaagacttgctaagaccataattgtaactcaaattttgaaccttaattttccttaaaacaagtgtattagaagcagtaataagagaaattagatagtatcaacgcataggaactcatgctttttcctaaaagtaattagtcaatcatcaatcatataatacattttggcctaattagttgatatatcgatatagaatattggtgggaaagagaaaggaagaggggaagagagaatagtaacaggagagagagagagagagagataaagagagatcaaagagttgtgcactgcacttgttattgtttcagtctgtctaaaatgtacaacaccaatgcttatttataggcagaacccaacagcttctagttatgaaatcttaactaacaatagctgcctaac

SEQ ID NO: 12709 - DNA, 455 bp, Glycine max
gaaagagagagaaatggctttcacgatttccagatctcaatctgctttgacagatagagagagggagaatcttgacaacttagttgacaaggagtgtgcaaccacagagggtatgatatcgagccagctcaagttgaagtcttctttgtcatccaaagcgtcttctcatcaaagcatggacaaacatgcaatccttcgacgtatcaggcaacgcaggtttaataacaaagccaaaaccgctctggaagctctcataggcacctcagaagccaacaataccggcactgcccaagaacagaagtggcttcaactgggtgactctttctcatctccttaactggaaacacaatctccccccagtttgcaacccatctataaataccctctttagtttccttcacccaacaaagtcatcttttccatacgcttgcatggctaggaaaggaaatccaacc

SEQ ID NO: 12710 - DNA, 86 bp, Glycine max
ttttgattctttatgtaagaggcttggacatgccatcaactatgtcgctatgaggttataatgtggtcttgcagatcttgcttgct

SEQ ID NO: 12711 - DNA, 458 bp, Glycine max
gaagaagggtaataacaataacaacaatcattgttcacctgctatactttatcactacccttgccctgatggtgcttttgctgcccttgctgcacacctttactttaaggccacttcatcattctctcctcttttctttcccaacactgtcttcaaccccctcagtgctgaagatcttcctctgaatgaaattggtgatctttatctcttagattttgtggggcccgatggttttgttcaggaaatctccaccaaagttccaagggtgattgttttggaccatcacaaaactgctcttgagaggctaggcaatgaggcttcacttggtgagaatgtggttaaggttattgacatggagaggagtggggctactattgcttttgattacttcaaagataagatttttagtcctgatgttgcggttaagcacccctcaattctcgaagaattcgagcgtg

SEQ ID NO: 12712 - DNA, 267 bp, Glycine max
acaaaatcaccacctccaaagtcttctctatttagaatcatctaatctaactgagtattctggtccttttcgagcagaatgccgactaacaatacacaattactaaagaaccacattctcattatgaactacgctgactaccagaaccggcatcttctgttcaaggaactacacatcttattactcacaaaatactcctgatgcttatctactaccttttctaggcaatattcatcgactgcaccaaatacctatcacacatccaag

SEQ ID NO: 12713 - DNA, 250 bp, Glycine max
ctcaatcagactttatcatcatctccaaataaaatacagttgaattcaaaagcctcgtccatgaatggtactgctcttgaatctgtggagcatttggttgcacagggacaacaaattggcagtaaaatggaattggataatcttcaatccaagggtacaggtgttgctgtaaatggaaaagctgcagtgtataccacagtggtggatggtgtggaaaagggccaatttgtacaggaggacaatcatgaaa

SEQ ID NO: 12714 - DNA, 462 bp, Glycine max
  modified_base (380)..(380): a, c, g, t, unknown, or other
  modified_base (385)..(385): a, c, g, t, unknown, or other
gctgcaactcctagaccacttggaatgcaacccttaaaatctgatgccgtggatcatgctcctgcgagtgctatgcaaggttccctttacataggggtcccgttgtggttggcatatgctacggggtgaggcttgccattactgtgccaactgcctcggagttattcggcctcaaatattatggtcttatatacaacattctcattcttaaccttccccttggctctttcctctcttctggtcttcttgctggcattctgtatgatatggaggcgactaccaccgtaggaggaggcaacacttgtattggagctcattgctacagactagtattcatcatcatggctgtagcttgggttgttggcttcttcttagacatnttatngtcattcagaactaagaagggttacaacaagatctccttcagcaaaaactcccacagaaactctctgaattcaagta

SEQ ID NO: 12715 - DNA, 449 bp, Glycine max
gagaaaagcagaaatggcggcggctacggcgatttctcagctaggctgttttggcgccgtccgccgcagctcacacctccggcgccgctcgtttctgttcccttcccctcgctccaagttatcggttgttatgagtctggagaggcatgacacggatactgctgggtctgataccaaaaatacactaagttatgcagttgatgtgtcaaagctacatgttgaagaaaagaagaactcatattcaacaaaagatggccatgatgctgaaaaaatagggtttggagaggcaacacaggaaagtgtcgatcaaccgaaaaggactgcaaagattcatgacttctgtttaggcattccctttggtggatttgttttaacaggagggattattggattccttttttcacggagtcctgcaacactaagcagtggtgtgctctttgggggtgctt

SEQ ID NO: 12716 - DNA, 164 bp, Glycine max
cacgattacaaataagcttcgtttggctgtgtctttctctttaaccaagcccctttcgcctgtctctatcggttctagctgtagagattactatttttccaaccctctctctttctctaatcatcccccttttccttctttttcttcttcttcttcttcctcct

SEQ ID NO: 12717 - DNA, 460 bp, Glycine max
gtctatagccttggccgacaggtccgggtaatctttgaaatttcatcgtgatggggaaagagtctatacggagtattaagctatcacctcctccagcaccactttcacctgttttcggcacgcagaagtctccaacaaactcacctacaaatctcagccttgagaaaactaatatagttgagactcctaaaacagttaaagacacagaacctgaggattctcctgaaaaacaaagcacagaggatgtactagatgatgattttggcgatttccaagcagcaggttaagctatccattgccgtgtgtctctgaatttgtgatgattagaaaacatgcaaaattgtcgattccttgaacatctggtatataccaatgacttctgattcagctgggagaatcaattatgtcattccaaaaagtgaatcctacatagccaccaacaaaatatcattaaagaatc

SEQ ID NO: 12718 - DNA, 454 bp, Glycine max
aactttcacagcctaggtctggacagtcctcttctaggcagcatgcatcaaggccggaagcagcacctttggattttgtggtccggccccagtctaaaattgatccagaagaaattagagcacgagcaaaacaagctgcacaagatcagcagcgtatgaagatgaataagaaattgcagcaattgagggcaccaaaaaagaagcagcttcaggctacaaaactgagcgtggaaggtcgtggtatgatcaaatatttataaatgtgaccacgttgatactggatgggtttgtttgtcctgctgcaagcttttcatataatgtgctgcctgcattgatgtggattcttctaaaggtgggctattcgttcagtgatctacatggaaatttgatggagagggatgttatgaaaataccatccgtatgctgcatttgtgtattcatctagtgcagtagg

SEQ ID NO: 12719 - DNA, 453 bp, Glycine max
  modified_base (352)..(352): a, c, g, t, unknown, or other
  modified_base (362)..(362): a, c, g, t, unknown, or other
aacacgtcaaaaattcatctcatctatctgtagatcggagaaaccaaaaaaaaaaaatggagtgcgacgagaagaaagcaatgatccgcgacgtggcgttacaagtcgttttcatctcgctcacgattttcagcttcctctggatgcacggcatccctcaaaacctctacgccaagctccgccaccgtcccccgaacccacgggccgtgcaagccaagcgccatttcgtcaaaggcgcgcagctcctcgcccaagccagaagatccaaaagcgcttcctccgcaacttccctcgccaaacaagccctagccgaggccgagaaggccatcgcgctcgaccccaaggacgccgnctcgcacctnctcaagtccatggcgctcgacctccagggcttccgcaccaacgcgctcgatgcgctcgacgccgcgttgtctccactcgcagcgggttcgc

SEQ ID NO: 12720 - DNA, 453 bp, Glycine max
gtgataagtttttgatattctttcacgctttgtaggactacagcaaaaacattttatgctgcgagtatcttttttgagattcttaatcaatttggagcagttcagcctgatctggagcagaaacaaaaatatgctgtgtggaaagcagctgaaataagaaaagctttgaaagaaagaaggaagcccacagctggcccccctgatggtgatgaggatctgtcagttcctttgaggtcttcaagtgatagatatgaccttgggactactgaaaatactgttttcagtcctggaccagaatctgattcatcaagaagttatcataaccctgctaactaccagaatctgccaagcattcatcctgctgctcctaaatttcatgatactgttaacgaccaacattctgctaatattccatcatctatgccatttcatgatagagtagataataacaag

SEQ ID NO: 12721 - DNA, 462 bp, Glycine max
aaaaatcgttgcccaattaatcgtgttctttggactccaacaggccggcgacttattaccgggtcacagactggggaattcactctttggaatggacaatcttttaattttgaaatgattcttcaggcacatgatcaagcaatcagatccatggtctggagtcataatgacaactggatggtctctggtgatgatggaggcgcaataaagtattggcagaacaacatgaacaatgttaaagccaacaaatctgctcataaagaatcagtccgtgacttaagtttctgtaggacagatttgaagttctgctcgtgctctgatgataccacagttaaagtttgggattttgcacgctgtcaagaagagtgttcattaaccggccatggttgggatgtgaagagtgttgactggcatcctacaaaatctctattagtatcaggtgggaaggacaatctagtgaag

SEQ ID NO: 12722 - DNA, 327 bp, Glycine max
cttcattcttcttctcattctctattctaaattcttatctaagctaacgatgatgatgaaggagaaattcgtggtttccctaaaccaaactcgattcaccctctcattttctgaatttcaatgcccgatcactcacattcttttcctctcgtgcctcccattcctctcaccgacccttctgagatcgacctcgaagctggcccctccgaacatttccagtgccgaatttgcctcgaaactgacggcagagattcctttgccccttgtacgcgcaaatgtacttcatattatccgcatcgagaatgttggtacctttgtcgtgctttt

SEQ ID NO: 12723 - DNA, 327 bp, Glycine max
tccaatctcgcttcgttttcgtgttgaacctgaaagagaatcttctccccatcaaactctaagcctaactcacagatttgagttttgatcacaagaattcaatcaatcaattaatcaatctttctcttcaccctgagaaaatgcttcaatctccagggcactcgccgctccacatctcgtcgccgtccccttcaatttcccaggaatcggcgcacaagcctaacgatccaccatcatcatcgtgtgcgaagcaccctgcggtgctggacgaggacacgtacgttgaggcgttggagaagatcatcgagcgcgactacttcccgacat

SEQ ID NO: 12724 - DNA, 383 bp, Glycine max
gctgggttcgtggcaacctttgtcaccatggtgatgatgatggtgcccaaaaacgtgagtgcgcaaaacataggtgatgacatcgtcacacaagacttcttcaacagcataatcagtcaggctgatgatggttgtgcagggaagaacttctactcacgagatgctttccttaatgctcacaattcctacaatgagtttggtaggcttggtaatcaggatgactccaagcgtgaggttgcagctgctttcgcccatttcacccatgaaacaggacatttttgctacatagaagagattaacggtgcatcaggggactactgtgacgagagcaacaccgagtacccatgtgcccctaacaaagcgtactatgggcgtggaccaat

SEQ ID NO: 12725 - DNA, 328 bp, Glycine max
ccgaaacatgcctcttcgaacgcattccttttgagctcgttaacaatcgcagatgctctggcttactatgccaatgatgctgcgcttgatactggtctgaagagtgccactatgatgtgcacgcttatggttatgacccttgcaatgacctttggcatggatatatgtgcaattagactgacacatatactcactcacatcagcactggcttcttaaacatcaaggttgaccacaaggcatgcccggaacctaacattgaaccttgcgagataccttttgagcattaccctgagcatcacacttacaagcaggctgaaagtgctttgc

SEQ ID NO: 12726 - DNA, 392 bp, Glycine max
tccacgcgtccgcccacgcgtccggccacgcgtccgctttcttctggtcaatggtttgtctacaattattctattgttgccattcagtattcttcactaggtgcaagtattcctcttagcgccaatcttcagcaaatttgaatacttttcgcggattcatcatttttaattttgtttgggttctgaatactcaaggggttttaaggatatttcgttactgggtatccattttctcaaaaaaccatgtctttgttccttaaagctttgcctttgatggcctttcgcacgaggccatctctggtgtttctgcgcaaagtttccaacaccattccattgtcactttccaaaaccagaaccgtgtatttcgcttctgcttcaacacaaccaccttc

SEQ ID NO: 12727 - DNA, 358 bp, Glycine max
ttctagttcagaatctcaatctcagtctaaaccgctccaagaccgagttgcaatcgtgaccgggtcgtcccgcggaatcggccgagaaatcgcgcttcacctcgcctcactcggcgcgcgactcgtcgtcaactacacctccaactcggcccaagccgactcagtcgcggcgcagatcaacgccggttccgccaccacgacaccgcgcgccgtcgtggtccaagccgacgtgtccgatccggctcaggagaagtcgctcttagactcggccgagcgcgccttagactcgccgatccacatccttgtcaactcggcgggcgagatcgacggcacgtatccctgcgtcggcgacaccacc

SEQ ID NO: 12728 - DNA, 55 bp, Glycine max
taaaaaaaaaacaaaaaaatatataaaaaaattaaaaaaacaaaaataattaaaa

SEQ ID NO: 12729 - DNA, 449 bp, Glycine max
agcaaacaacatagacccttttacatttaatagctaaaattatagtatttgttggtatatagaagaaaaattaagtaatatgatgatatataggagttgagtgatggaaggggcttattttaggatggtcctttttccttgtcatttgaattgtgttttgtgaggaattttgttctgcctagcatttgaaaaaggcagagatagtttaattagggggcaggggtggatgtttaaggtttacctaccacccgccaatttcgtttgttgtgtggttcgtggtgttatgttatgtcatccacaattggaatatgagaaaaaagtgatatttttctagcttagcgactgagaatagaataggaaagagacagaagcgtttttgcttctataggaagtcattttcttcaactttatgtaatttaatgagtgtaaaaatgagtgtatgacatgta

SEQ ID NO: 12730 - DNA, 449 bp, Glycine max
cccacgcgtccggatatctttcatcgcctacggcaacgcttcatttgaatcaacgctcggtcctcttcctctctctggtccattttagttcaactttgaataattctccttcgtatcaagtcttcctcatcttcaccacctttttgtaagtggatatttatgtgtctaagaacataaactaaaaaaccaaggcgagtgaaagaaaaaaaatgtcaggtgtgtctctagcagtgtctggtccaccatcagcaacagtggctgaagcagcaggtacaaagcctaaactaagaacagaacaggcaccaatgggtggcatgatgggttcactgcgcgtgatagaactttagctggtggccttcatcttggtgttctcaacaagtggccctcttccacttcttgatctagtgttccctgcattcgccttttgatacatcttggcactttcacaa

SEQ ID NO: 12731 - DNA, 448 bp, Glycine max
cccacgcgtccgcccacgcgtccgattcaatcccatcactcttttttttttttctctctgcttccacccaatggcttcaatttatacaatctccttctacccaatatttaaaattgaggcatggctgttgcacacagtgacacacttggttttaattccattgttacagtacgatttaattaaacaaaaagaagaagaaaaaaataaatgggacttactactaggtgttattaaattttgttggtgaggggttggatatttaaaaaaggggtttagctttaaatttctcttgcgctgtgttgctccgagagtcttaaaacaccgactctcctcccttaaggcaatgaatgaagaaaggtcctccttctgcattttgtaattgcgatatttactccaaatttccccttcctgcatacttcttgggatttttccaaacaattaatacatt

SEQ ID NO: 12732 - DNA, 451 bp, Glycine max
  modified_base (441)..(441): a, c, g, t, unknown, or other
gcagaacattctttgtttcgctctcgcttttcaggtccaacaacgccgaagaagaaggagattgtgtctccgatgattatttgaagatttctgaaacaccagagtgtttctgatcatcgtcgtcgctgatctctgtttcctccgttactgtttctgattgcagaggcgaaaagggtttccgcatcaaaatcgaattttgtttgctccatcatcaccatgggtagaatcacgaaactgggttttcttcttctacccagataagtaaaagggttttcttctttctcatttattccgacaagtgcacaaataacaacatcatcatcgtatcaatcatcggacaagtgcacagacaaacaacatttgtgtctgattagcagaaaaaggggtaaagggttgttccgtgtttgtttgatgaattatgttcaaacagatattcagtanactccctcgg

SEQ ID NO: 12733 - DNA, 436 bp, Glycine max
ggaggtgtctgcgagcgttaacgcaaaaaaacgacaccgtttctcttccgaaacgcatggtctctgcgctcactcaccgtgcctccgtttcccaacgccaacgcttcttcccccgttttcaccgtacgcgcctctgtcttcgcgcaatggccccacctccgctatttctcttccgagaaaaaagacgaccacagcgacgaagacgatgatggcgatgaggattacgatgatgaagaagaggattatgttgatgacgacgacgatgatgacgtccctgtgtcgagagggaaaaaagtgtacactgcggaggagaaagaagcggaagccgcggcaattgggtacagagtagtgggtccccttcaaaaggacgaagatagccgttttaagccttacgagccttgttttgctgttgttcagattggttcgcaccagttta

SEQ ID NO: 12734 - DNA, 451 bp, Glycine max
ggccaacgtctccaaagagctcaacgctaaacacaaaaagatactggaaggacttcttagactaccagagaataaggagtgcgctgactgcaaagctaaaggtccaagatgggctagtgtcaatcttggcatctttatatgcatgcagtgttccggaatacatagaagtcttggggtacacatatcaaaggttcgctctgcaactttggacacatggctcccagagcaggttgcattcattcaatcgatgggaaatgagaaggcaaatagttactgggaagcagaattacccccacattatgatagagttggaattgaaaatttcattcgtgcaaagtatgaagagaagagatgggttgcaaggaatgagaaaccaaaatcaccttctagtttccgagaagagaaaagtccttcacattggcaaaagcctgtggaaagaagtgggcatgat

SEQ ID NO: 12735 - DNA, 381 bp, Glycine max
acgcccacgcgtacgcggacgcgtgggtggttatggaggtgggcgtggaggctatggaggtgggcgtggaggctatggagggggacgtggtggatatggcagcggacgaggtggctatggtggcagacgtggtggctatggcggcgggcgtggtggctggcgtggtggctatggtcctaatgaacataacgaggctggggttgatgctaaccctcacaactaagaaagcaactttctaaagcttatatatgggtttaagttatcgcaataaataaaacttcatgagaaagttagttgtaatagaagtggaaaactttgtaaaggaataatacctttcatgaatttccttaacaaaaaaaacaatttggacccctatatttt

SEQ ID NO: 12736 - DNA, 169 bp, Glycine max
cccacacgttctataaaaatatactatcttattctctgttctaccttcaccatccaggtcaggtcttataatttgtctacctttcttaacatactacaaccttatacaatccctacttactttcaaaaaccctatctttttatacatcccagcttatactccctaactt

SEQ ID NO: 12737 - DNA, 433 bp, Glycine max
ctcttccaccccatttctgcatatatacacccaccaaattccttccataaaagcttccgaaaaaaataatgggtcagccatcactttttctcgtgcagcttcttgttacctctctcctctttctctcttttgattatggattcggtagggtggaactgacggagactcatcaggattttcccattcgcacgattgtaaagtatgacattgcggattattctgatccacagccaaataccaatccaaagaatgggtatgttttgagtcctccttcatctccaactccaattcatcctccaagtccttaaatggaagctcaagattggactttcaccacttgtttatgtctttctgaacggttttgtaactggtgtagtgtgtgatcgcttccagtttgacacgggattcgtagaattaggatcatgatacttgt

SEQ ID NO: 12738 - DNA, 391 bp, Glycine max
aagcgaggtattatatcattcttcagcattgatcttagcagatttacccaggttgatgggattcggtgtgtgccccattttgataagcactcatggggtttgtttcgccgaagaaccaagcttctttgacgcaaatgtggcaaccatattggaaatgcatacaatggttacacttcgatctttcctcttgtgacagacggagctgaatcatctcctagctccaaagtggtcagtcatacaaaatacgacattcgcattcgttgccctacaaccttcatcttctgaagaatctggaaatcctgtgtatgcttgaaatacctcggaaaaatattactttctacaccggcaaaattgatgacagggtggttagaacttataagttattaatata

SEQ ID NO: 12739 - DNA, 305 bp, Glycine max
cagggactacgatttgtacaagggtccttcagttgatgtagacaccactgagtggtcagggcgatcattgcatgcgaggagcagtgtaacaactgatccaattgaatctggacttacggtgagtcctgatcatccagtcaaccacaataggcttccttacagtggcatcacctatacatctggcacaatattcttaaatatgcctgatataggggaacatacctttataatagatgactcaaatgggccacattggaagatgactagaactaatggtttgatcaacattagacctgctaataata

SEQ ID NO: 12740 - DNA, 440 bp, Glycine max
cccacgcgtccgcccacgcgtccgcccacgcgtccgctttcttctggtcaatggtggctgtacaattattctatttttcccattcagtattcttcactaggtgcaagtattcctcttagcgccaatcttcagcaaatttgaatacttttcgcggattcatcatttttaattttgtttgggttctgaatactcaaggggttttaaggatatttcgttactgggtatccattttctcaaaaaaccatgtctttgttccttaaagctttgcctttgatggccttccgcacgaggccatctctggtgtttctgcgcagagtttccaacaccattccattgtcactttccagaaccagaaccgtgtattccgcttctgcttcaacacaaccacctacttctgcttgtgcttctgaaacactcactttcagtgctaaaccaccttt

SEQ ID NO: 12741 - DNA, 242 bp, Glycine max
cccacgcgtccgggaattggcaggccttgcaagtttactttcagtcaataattgcttcgaaggatcttttatacttgatctactgccttacatttgttacatctcatctttgccttaaatttgctttgatccctatcttatgttggtcctttgaacatgttgccaagttccttagacgtaatttcagtcgttctaccttgtacagaaagtacttggaaaagccttgggtttggctggagtca

SEQ ID NO: 12742 - DNA, 324 bp, Glycine max
gtacaacgctcgctgcaaccattaacatttccattaccttgtgggtactaaactctatggtgaacttttttcatgacgatcttcttgccgaactcattccataaacatgcccctgtaactccctattctaccatgcattatttatttcatgtcttatttgaccaatgcttatacctaattctcaatgaaactacaaagcaatctactggtcattccattgatgttcacttggacccacaattggacccctatttcacaaagtatttcccaaacaatcatcgattccactaatgaacctactaattctattggcagcaactttaa

SEQ ID NO: 12743 - DNA, 342 bp, Glycine max
cccacacgtgcagcatgatatggaatatgcaagtgatgagacataaaatgagctctaaatatacctctgtatgggcatgagtcttaaaattatgctaaagtggctgatagatcatgagattaaccttaaagctaaatggaaagctctatcctaatatacctactaatattcaagcatagcatagactctatactaagaactaggcaaataatcatgctggatctaatttctgagcatgaggagccaatgatgataccacagatgaactatctgacgcttaatatgaccctgctagcagaatagcatacagtgaaacatagaagatgaaatatagtatgacag

SEQ ID NO: 12744 - DNA, 93 bp, Glycine max
aaaaaaaaaaaaaaaaaaaaaaaaaaaaattaaaaaaaaaaaaaaaaaaaaaaaaaaaaagaaaaggtaaaaaaaaaaaaaaaagaaaaaaat

SEQ ID NO: 12745 - DNA, 365 bp, Glycine max
cacgaacttaagtctgtacccatttcaatagtaatcaaagtggcggctctctcggattgccttataaaagcggcataccactcaagccttatccaagctgcaattgaactgagcaaaggggaaattgaaggaattgaaattgagttcattgaaatttcctaactttccatcttgaacactgatcttgagatcaatagtacctacccaccaatagttgaagctattcatcaaaatattcttcaagctgatagtattctctttgcttatactgaatataattactctgtcacagctctacataagaatgcaatttattgggcctttaagcccccaaatgtttgagctggcaaaactgcttcaattgt

SEQ ID NO: 12746 - DNA, 442 bp, Glycine max
caaaccctctcaccaaaccttcatcgatctctttgtttttttataaattataatattggtacgaagttgtttctggaaatagcaattcagagaccttaaaggtagtgagtattttcctccttacttaatctattgtgtgatcaaagtcgttattattaaattagataattgataaccatgtcgatgaagctgttattagcttccctatccatttcggtgtggcttttcatggcaacattatcccttgcccaatccaacaaccgctacgtctttgacacacatggcgaccctcttgaaactgacgatgaatattacatcaggccggccataacagacaacggagggcgtttcacattgatcaacagaaacaggtcgtgccctttgtacgtcggtctcgaaaacaccgacacgccgcaggctacccgatgaaattcaccccttt

SEQ ID NO: 12747 - DNA, 420 bp, Glycine max
cccacgcgttcggcgaaggaaagagcgcttaaaagtaaaacagagggaagcaactggtgcgggggcagaaggagaaaggaaaggaagagaagagaagagaaggagaaggagaagggtttggtagttggttacttagtttgtttgattaacgacggcgcactacacgatccccacaattcagaggcttgttattatctccatccatttaatttaatttccacaaccacgctcacctaagtttcaatttcaatcccttttctttttcttttttatttaaaattccaatttcgcgaaccccaaattccctccctccttttccctttctctctgttctgtaacgtagcatttacagcgatcagtttatagtgagtcacttataggagttttaggtatcatcgatcatctatggcagggtacaag

SEQ ID NO: 12748 - DNA, 309 bp, Glycine max
cccacgcgtccgcccacgcgtccgaatttgtctaggttcgtgttttgtccttgttttgtgatttgcgtttttgtttacatcttgtttcgttcttgtttgcgtcttgtgttctgttatttgcgttcttgttcttgtttcttgtgtctttcacactttgtgtaaaaaaacataaggttgcagaaatttttaaaataataaatataaaaactgatttactataaataatcatacataattaaaaataatagggcgacctttttataggattcccatcttactttccctttcattctactttatatatttttt

SEQ ID NO: 12749 - DNA, 460 bp, Glycine max
  modified_base (293)..(293): a, c, g, t, unknown, or other
ctctgatgtgaccattctccattcccatggcaccaccatcctctcctccgctcgtcgacgattgcgatgccgagcgccgccttcgcgaagcggaggagcgcctccgcgacgccatcgaggagctccagcgcccgcagcgccgcgccgccgctcacgcccagcagcaccgccacgtggactcgctgccttgcgatcaccgccccgacgagtactgcgtggctcacgccattggcgacctctgccagaccatcctcctcttctacggcgtgagagtcggcattggcatactcctncgcgccttcaagcttgttcgaggccaatcctactcctctctgctcgatctcaagcaacttgtttcagaaaaagatctgatagtaaggggaagaagcatgccgcattggtcttcttttggtggtttcactggatcttatcatgctcttagatgcttggtgcgaaattg

SEQ ID NO: 12750 - DNA, 391 bp, Glycine max
  modified_base (145)..(145): a, c, g, t, unknown, or other
  modified_base (310)..(312): a, c, g, t, unknown, or other
  modified_base (337)..(338): a, c, g, t, unknown, or other
  modified_base (353)..(354): a, c, g, t, unknown, or other
  modified_base (382)..(384): a, c, g, t, unknown, or other
cccacgccgtccgggcagtccaaagccatcatttggatgatatatgttattagtatcatgggaagtggtagctggcaatctcatcgtgtttgcttagggctttctaagcattctttcaagggtcgatagttagatagggacccanatattctaccgtttcctgtacgtctgtgcacttgatagcataaggtggtaccttagtatgaattgcacgaaataacgctagcacttctcttaatttggataacctagctttaccatatgtggaaacctcacatggctttacacacatagttgtcgagaccattcnnntccgtctaaatagcttttctgcttnntcttggaatgaattnnatgacttttcttgaaatttctgtgattnnngctggat

SEQ ID NO: 12751 - DNA, 144 bp, Glycine max
ggaatagcttcttttacgccgcctgcgtcccaaccgttatgaacttatagtgtggatcagtgctagacttgcgctctccacgtacgttgctccctcaaacgattaccagcagtctgccatgttatcatcgaatgcaaatatcac

SEQ ID NO: 12752 - DNA, 354 bp, Glycine max
gcccgaggcgttgtctcttctggatatttttgcataacaagacaccttcaatgacactgtgtagggtttgccggcataaaaggagattaatagcaaataatgcaacaagaatatcactcacagagacaatatataattacaggtttttgttggtttgaaagttatattaagtatggacttaataatagagttctaaagacaaaacataatgaatattatagctgatggcgcttggatattcaacaacctatatataaagtattactggtacttttgtatagaggatagtccattataagtattattcacattatatactaatataatagaattataattaactatttttgcata

SEQ ID NO: 12753 - DNA, 387 bp, Glycine max
cacaactcaccaccttctctctatccatcaagtcccctattggctattagtctattacgaatgacaactaattctcctcgatcatctttcatttgtcttgataatttcttagttacatcaaagtattcccggttaattatattagttcattcactcatctgcaagcatggccgataagcacggaagaagctgctgttgctgcctctttggaatcttgtggaagattctggttgcactcatcgtcctcgttggcctcgtattcctcatattctggctggtggttcaaccccgctccttcaagttccaggtcacggaagcggacctaacccaatttgattactacaccaacaatcacactctccactacaacatggtgctcaacttcac

SEQ ID NO: 12754 - DNA, 435 bp, Glycine max
  modified_base (366)..(366): a, c, g, t, unknown, or other
  modified_base (390)..(390): a, c, g, t, unknown, or other
aaaaactgcatttgtagaaacttcatttgaaatgaagttgctcaatcacaacagtaatgtaggaatacacttgttaaatcaagttttaatcaaattatatactcaattgatccgttttccacacttctcttcacctcttagggggtgcttggtacaaggaattttttttatgcccgggaatctttgtttcccaactttagattcccaggaaactaaaactttctcttgtgacaaacacccccttaatggttggtagttgctactggctatatattgaaagtgagataattaacaaatttaaagttaaaaccacagctatgtgcaagggtcaaacttgaacgggagatatttgcattaacatttgtntatagaactatacatgcagtttangcctgtgtttggtagtgttgaaatggattggaaaggaagggaaag

SEQ ID NO: 12755 - DNA, 426 bp, Glycine max
cccacgcgtccgtaaaattgatgtgaagtaaatattgtggggaaaaagtatgggcttgggttaagtggcccaataatgttatgctctgaaaccaaaaattggaggcccaacaatgacctggttttgcatcgttcctgttctgttcttcaccgcgcctcggtttccattccttcttcttcctttgtgtttctttgcgttcattataccattcccatggctcaataatcgttgctttgttcgttgggttcaagaaaaacgctcaaaatttcaaccatggctgcaacccttacttcaagatgttctcttctgggccgttctttgcttggtggattaaggaataataacttgtctggttcattaacatcgcatgagataaaatccagcaatttcttatcccagcaacattacgttcatacagattatgac

SEQ ID NO: 12756 - DNA, 459 bp, Glycine max
cccacgcgtccggttgtgtttatgcattggtgattactgattagctagcagtagcatcgtccccttctccaaagatcatattcatatgccctccaaatccaatccatcttcatctccatttccgctactttggtatcttattgtctgggtcagttctgttgaattccttggtccaagactttgcagctgaaccaacagcatggcgggtcagtcctccaatgaaggctccagtactggaaacatttcagcagaatgttcagattcaactgttcagctcaatatcaagactctagattcccgcatctacagttttcaagtggacaaaaatatgcccgtctcgttgttcaaagagaaaattgcaaatgaaattggtgttccagttaatcagcaacggctgatatttagaggaaaagtcttaaaggatgagcacgctctttctgagtattatgttgagaatgg

SEQ ID NO: 12757 - DNA, 361 bp, Glycine max
cttcaacaagttgaatcaaacagtgaaagtaaaacattgtgcaattaatcatcagactggaagtagccagtgcataagatcaatggcgtcaagacagcaattcaaggaagacagagccgaggcagctgcaaaactcgcagcgaaagacatcggcgacatcaacagaacaaacgagcgcgacgaggggtacgacttgcacgacgaagccaacttcaagcaagcacgagctgaagcagctgcaaagctggcggccaaggatctggaggacgctaacagattaagagacaacactttcaacacatggaaagagcaacatcagcatgatgagaacaaacccggtgtgatagggtccatgtttaga

SEQ ID NO: 12758 - DNA, 284 bp, Glycine max
atcttatatactataccattcataatattactacttcatacaacttactattcctctgagaatgcatacaacctgactgggacatgctttatataagatccaatcttacttactcttgtatattaattatttattaatctacctgatcttctatcaacaattatatattcgcttcatgacaacataagaactttgaaatcccagacattacacccattaatagactatcatgctataactctttcaacagctagcatgttctatatatatgtacatacactata

SEQ ID NO: 12759 - DNA, 179 bp, Glycine max
cccacacgtactatttcagcatgattatataattaatatttaaataatcactaaagtgggacgtacattaattatggatgaacaattagaatataatattcatagtaactaactctaacgtacaaattttatattaatcattattgaaaggtaaaaaatatatattgactaatatttaa

SEQ ID NO: 12760 - DNA, 373 bp, Glycine max
  modified_base (269)..(269): a, c, g, t, unknown, or other
  modified_base (331)..(331): a, c, g, t, unknown, or other
  modified_base (344)..(344): a, c, g, t, unknown, or other
  modified_base (346)..(346): a, c, g, t, unknown, or other
ttttatatgtacaatattaggattggatttgctatgattttctatgaacttattaacgaatcgaattggtcttttgcagctttgccccatatgtctgaccaattcaaaagacatggccttcggatgtggacatcagacatgttgtgaatgtggacaagatcttcagtcgtgtcccatctgtagaagccccattaacaccagaattaagctttactaggcggcctcttccgttgtgaattaattattttgttgtgtaagctaaaattctntgatttttttaaccttctctggttgtatacaaacgttagatcagctgtgtctattgatgaanaatggtacaacananaaatatccaaaccaattaaattaaaaa

SEQ ID NO: 12761 - DNA, 417 bp, Glycine max
  modified_base (313)..(313): a, c, g, t, unknown, or other
  modified_base (373)..(373): a, c, g, t, unknown, or other
caaacacgctgaatcagtactggggcttcttcaatgacagatgaagctatctccacattgaatttgaaaaatccagttagtgctacaacaagattatgcaaaaccttggtgtaaaatctatgttcaatcctctgttttgttgctgacattgaagactcttaaacaattaattaaagattactctatagtgttttggttctggcagcagttgatctacaactgggaattggtaaggccttaatgtcagtatttttttttttgtactcagataagtattggggtatgcttatttcatctcatatattataattgntattctcttcaacatattaggtaaccaggatcactttctcctacaagattcaactagatntctggtactttcattttcataaaaattacattcatctatggatg

SEQ ID NO: 12762 - DNA, 386 bp, Glycine max
  modified_base (381)..(381): a, c, g, t, unknown, or other
cgaaacgaaaacactttctctgcgactcttagcatgcaatcagaggttccattgctcgggcttctttcgcaccgaggttccaatcgctcattactgcactatatgcttgcaactaagagaccttgcgaaggactggttgcagaagacgagatcgaccacaacatcaacaacaacagcaacagcaacagcagttctctcaagacgaaacggattgccgacggaaccgccgattcgacggtgaagaacgacgaaagcaccgtccggagcttcaacaacagcaacagcgacaacagcagcaacagcggggacgcgagtgaaggagcgtcggatatggctttgggcgaatcgaacccgccagacatcgatgaggatcttcacagncgaca

SEQ ID NO: 12763 - DNA, 64 bp, Glycine max
gccttatatactgcgtgagttttgatatgagactccgaattaaaatatcattttccttggcttg

SEQ ID NO: 12764 - DNA, 394 bp, Glycine max
  modified_base (359)..(359): a, c, g, t, unknown, or other
ccgtccgtcccacgcccgtccggctcactttcgcagaaagtttggtggaatggggagtgtcaatggatcccaactctcagggctgaggtggcttcaactgtggagtttttaaataagcgccagcggatgagtaaaacagacatggtggtaaccccaagagtcacgcaggaaagactcgtccactgatacctcatatgcaaacactgcgtgtagaagcatggcaataactcaaactaaacaaatgggttttgctgcatagcaaaacctcttcttgccgaatcatagcatagcacatggttgctcctgtgaaaaagcctgaacagtaagaacaattgtttgtgtaactaagtgtcacagtnattcttctcttaagatatagaagctgtagaagtca

SEQ ID NO: 12765 - DNA, 299 bp, Glycine max
gctaggcgctctggtgaagatggtcagctaggaatcggaagcaacgaatagaaagaatgggtctgcctcgtcaaagccctgcagccccaccgtattcgctccgtcgactcctgcagccgaaactccatcgccatcgatgacgactgcaaatcgttcactaggtgttggaaccaaagggccacacttgggcaccctgctgagaccaagtctgagaacaagactgagaacacttccagccaggtcaaggctcttttcagagttaaaattgttcaggccgctattggggggtggcactgttt

SEQ ID NO: 12766 - DNA, 424 bp, Glycine max
ctagttccaattggatctaccagtacaaaaaaaggagtaatttgcccttttttcaagagaaaaaaaagtgagaatggggtgtgaaaattacatgggccatgatttgcaaagatgaatattctaataaatttttgggctcaattcagacaattgtgccaatcccgtccattaaaaaagcaaagaaatacaaatcgaatattaatttgctttctcctttcggtttaaaccttggaggcgaagacattcttaattgacgttcctacccttggcttggtggggtttcggaagaggaacgtgtggggctttatgtcatttgacgcaaacgcgcgagcaataactaacgaatagaaaaggatgtagctttatattggagaatatcaacgaaacatcatcttgggtcactttgtaccaaaaccacaagcgc

SEQ ID NO: 12767 - DNA, 439 bp, Glycine max
ggaactactgcttttggagaatcaagttctcataacgtgttttcaaatatgagaggtgggtctcagtcaaacttccgttcctcgagtaccgatctacaagaacagatgagaaaccagatgaaagatccagccatgcggaagatgttctcatccatggttaaaaatatgagcccggaaatgatggctaacatgggtgaacaatttggtgttaagctttcaccaggagaagctgcaaaagctcatcaagccatgtcatccttatcaccggagagcttggataaaatgatgctttgggcggacaggattcaaagaggagttgaatccgcgagaaagacgaagaactggctgctagggaaacctggcatgatctttgcaatattcatgctcattttggctgtcattcttcaccggttaggcttcattggtggctagagtaaga

SEQ ID NO: 12768 - DNA, 365 bp, Glycine max
cttggcagttctcttctctgattacgaaattttttcagcaaaagcaggcaatggacttgttttttaagggaatgaacagggatggatctgagtgtccctttgatgtgaaagacatccaacggtgtccgtgtttaagaaacatcaatgaacctacaaacttctctttctcctcaactaaaatctccattcctgttcatggatccaagggtcctatatttgaagatggtcctagttacggcatggcatgtaagctataccatgggaaagatggagtcattcccctatctcagaaatctgactttcacaatggcagcacaaaaagcgattctatgtcttgtttcaaccctttggcaagaaaaacttgc

SEQ ID NO: 12769 - DNA, 205 bp, Glycine max
aaaaaaaaaaaaaaaaaaaaaaaaaaaaaaaaaaaaaaaaaaaaaaaaaaaaacaggaagggaacaataaaaagaaaaaggggcaaacatttttacaatttccaagcttacttcccctttcttacaaattcataacttttatatatatacacctaaatacaattaactttcccactttttactaactatttaacaggataaacct

SEQ ID NO: 12770 - DNA, 478 bp, Glycine max
  modified_base (83)..(83): a, c, g, t, unknown, or other
  modified_base (276)..(277): a, c, g, t, unknown, or other
tcgcggacgcgtgggtttactaacctaggggtctataaaggtcaacggtcaaggtcttgaaaaatggggtcccacaaggtttngcttgggtgtaggtatgttcatagcggctatacttctgatctctgctgaggttgcacccaatgaatacgaaaattttaacaaaaaagatggaagcatgctccaaatgggttatatgatagcaaatggggttaccgtgggttgggtggtccttggtatggcggctggggtggcccttattatggtggcggctgnngtggcccttattatggcggtggttgtggcggtccctggcgtggtggtggcggtggtggctggggaggttggcgtcgacctaatggcaaccctcacaactaagaagaaaacttgctaaagcttctttacgggtttaggttttcgcaataaataaaacttcatgagaagtgtagttgtaataaaagtggaagtctctcttctc

SEQ ID NO: 12771 - DNA, 141 bp, Glycine max
gtactttcaaaagatagtcaaagagtgcttttaatagtctttagagaagccgttttattctagttatttggatattctctatacttttgaactcctcttataattcacccaattattcataccataattttgacaaaacat

SEQ ID NO: 12772 - DNA, 484 bp, Glycine max
  modified_base (459)..(460): a, c, g, t, unknown, or other
  modified_base (465)..(465): a, c, g, t, unknown, or other
tcgcttcctcaccaaacccactctagcacaacccttcagaaccaacacatatgagtacccatccaaacgcacgccattttcgagcatcaagcagagcagcgccaaaaaaatgatggttttggaggacaaaggttaccaaaacctcatcatgccttgccaccctctgcggcggtgatgactccatctttgcaatcttctctggtggaacacgcatctgtggggctgacgcagtgcgtagggacttaacttggagaagatccccgtggcacgaaggtgatggtgtggttgagcaccgcaagacacagcgacaagtttgagagcgtgcaacccttctcgctttcttcgtaaacccttatttcccccctttttctccatcactcaaaaattcggaaattcctcatatggaacagagatctgaatgtgttagagtcaaatctgctcgtaggtaaggtgccatanngtgcngtgatgagtgagagcccac

SEQ ID NO: 12773 - DNA, 451 bp, Glycine max
gtcacgcttccgccaacgcttacgcttccagagccaaccgaaagctaccatcatgggctaagttcaaatacaatattggaagtcacttaccgtacgggtcggctggatgatactgcatcagtttgaagggatcaatgccattgttttttatgcaaactctatatgtatctcttctgggttttcagaaagcatcggaacaatagcaatcgttgccgttaagattccaatgacatactataggagtacttctaatggatcaatctggaagacgaccacttttgctggtacaaaagtatgaactattgttcctactctactattttgcagtgttttacaagttgagtctaaaaaattttgattctcatacaggtgtctgcagtgggaacatgcgtatgatgcttgctggcagcctagacattcattgtgcaggacttacataagtggataggag

SEQ ID NO: 12774 - DNA, 324 bp, Glycine max
tcgaccaagcttacgaccatgcgtacggattcggtaaaaccgatcctatccgtttacacgtgacaggtacacatttgaggttaatacaccagctctgtgggctcaatagagacagtgccaatttgtatatagcacatgacaatcttaagccacgtcagattgtactgtctctaagcctttagcggagaaaacctcacattggctagaattattccctcactctctatatacaatacaaccactaatttcggttcggctatgatctactacaacgatttaactgtgagaaccagggtttactcaatggttcgtcgaaaagtccag

SEQ ID NO: 12775 - DNA, 342 bp, Glycine max
gccaccgatgccccccaatcctgggatgagattagcaaaacactccaagacctcaaatcccggttcacctgaccccaacaacaacctcaacctccacaaaagaccaagtccttccacacggtggaagagctagacgccaagctcaaccccaagcccgagcccaagcccaatccagaattgaaaaagcccgctgatcagataattaacagtagcatagttaccgagccagtccgagggaacaagttgaaggaaaacatgttcatagttcgggacaagctggagagacagaaagaagagaaagagctcaccttcgagcgtcttcgtcgggacccgctgagcgcg

SEQ ID NO: 12776 - DNA, 469 bp, Glycine max
cagggtgggagcatggtgttgcccaggacgagagaaagaagaaggtcaaatgcaattactgtgagaaaattgtcagtggaggtattaatcggtttaaacaacatttggctagaattcctggagaggtagcaccttgtaaaaatgctccagaagatgtttatctgaaaattaaagagaacatgaaatggcatcgtactgggaggagacttaggcgacctgaggctaaggaattgatgcctttctatgcaaagtcggataatgataatgatgatgacttccagcttctaatgcactgatgggggttttaggcacttgtcattattgtgtattttagtggacaagattatcatatttaatatttccactgtcgcttcaaaaggttagatgtcattagttgattagaggaacaactagtgctttttacctagtgaggtgtcttatcacatttttataatccgtagtttatgtt

SEQ ID NO: 12777 - DNA, 482 bp, Glycine max
  modified_base (465)..(465): a, c, g, t, unknown, or other
gtcgatgaaacccaaaagcctggaggaagggttttaacctccaaaattgcaatgccctgcaaccctgggccttcaaatccgtgggaggaccatggtccggccagctccaccatccaacatacgagaactatcgtgggtcggcgatgttggttttgttgttgatgcttggtggcatgatggatggtgggaaggcattgttgttcaaaaggactcggaatctaattgtcatgtttatttcccaggggaaaaagtggtgtcggtatttggtcctggtaacttgagagagtctcaagattgggtggggaatgagtgggtatttgtgagggaaagacctgatcttgtggcttctgttttatctagcttgaaaacaaaacataactcatgcatatccaattccaataacatccaatcaactggagcaatcaccagagatggaatacaatttgggcaatcggatacttgctnggattctgataaggata

SEQ ID NO: 12778 - DNA, 460 bp, Glycine max
cccacgcgtccggggagaagccaatcatgggttgcacttcactgccatcttttattcagatgtcatctgctacacactccagcttcagtgaaaaactccgcaaccctcaaaagaagtctcaaattgtgatacctacaactacaagagagacacacacaacaatttcttggtctttttcttctcaatgcaaagctcttcacaaatcagttcctttggctgcttcacttgcaattcttctctggtcaacccctgcacatgctggtttcatgtcaggaatttctggaatagaggctattcctggtcctcagctacctcagattgactttctcaagcagctcaatgaagaaaaccagaagaaatatgctgagaatgatgagagaattaaatcatcccccttgatgaaggaactgcttgagaaatccaagttgaacaaagagaagaaccgtaaagaaattgagaa

SEQ ID NO: 12779 - DNA, 457 bp, Glycine max
cccacgcgtccgctcacattcatccacttttcttcaaagtcttcatctcatatcctctttggtgtgtcctcacacgagtgtaggaacggcattattgtgatggagagccaggatctttcttcgccaccccacgtggacgcatctcgaccgtcccttgggttccccttgggcactgcccttctcttgatcatcatcttcaccttgagtggcgtcctctcttgctgctaccattgggatagggtgtgttccctccgtcaatctttctctgattccgaaccccaaatgccttcctcacccaccaaatctaagcactccaaggaattgaagcaaaacaggggacaaagcttgccagtgttgatgccaggggatgatgtgccaaagttcatagccatgccgtgtccgtgccagccttcaagaccagacagcatcgttgtcaccgtcgaaatggagaagccac

SEQ ID NO: 12780 - DNA, 476 bp, Glycine max
  modified_base (429)..(429): a, c, g, t, unknown, or other
gtggaattcttgtatatacactagttttgctgtgttcccctcttggagtagtgctgattggagctgcattaatcgattttgttgttgctgatttcaattggtctgcggcagtatagaagaaagcaacgatgcgttggtgtttacctggcttgatagggtgactaaatatgcctttagaagttttaggattatttctaatgtgttcctacatgcaggtccctaagcttacatcctgcttctagatagttggtaatcttatctgagggtagtagctagtaccatgggagaagtggcagtaatgcactctgagcctctgcagtttgagtgcaatgacattaatgtgaatatgactgagaaggaagtgtatcctccagaatcaaatgtggagcacttacctggagaagaatcgagtcaatcaacagaccacanaaatatcaatgacttgcaagagagaggatatatggagtatggatgtc

SEQ ID NO: 12781 - DNA, 474 bp, Glycine max
agaatattacgcagtgaaagattcccgaaacccaaatttacgcagtgtgccttgcatgcccatcaaggctgatttgaagtggccgaaagaggcatggattctgggtcaagatgtttctgccgggttcactcctagcatgtatattattcttttccctcacttctggctcccgctgtgtgctctgcttcacactactgcctctcatccactccctatcgctgcaattttatatttgtcattttggttccggccttgcctcttaagcctcttaagagggacaggctcatgagtaaaattggcgtatcttaatgtcctgtgcttatttggagcccattatggcttgcacaagttgctcacacttccatgatctattggaaatgaacttgcctagcgtttgatgaaagtgtggtgacataacagacgagatctaagaggtccttggaaaatcaacaatttgaggagcgtaagaaagag

SEQ ID NO: 12782 - DNA, 474 bp, Glycine max
gaaagagaataagagaaaaaaacgtaattaggtctagaggttgtgagaggtgtatgactatgggaacgtttccaccgcgaaaaccttggtcggcgcatactccttattcttctcctgcttctgcacctcactgctataccccctttcaagcaggagaaaatctctcactcctttctctttctctccacgccgccatcaccacacatccatgccttcgctctctctctctgaccctgacacccccaaacctattgccaagaataataccaatacccagtccctcaccgatcccgacctcgatggggtttcggggaagaagacgaataagcgcacggcttcagatttagaacaagaggccatgccccccgccgcttacaacaactatggggactactagaccagctccgacctcgttcaacccgaacctgctttcagagaagacgacatcatgaatacgaagatatagaagaaaac

SEQ ID NO: 12783 - DNA, 480 bp, Glycine max
  modified_base (332)..(332): a, c, g, t, unknown, or other
gatccttcaatttcactttcctctttctctcttcaaatcaaacacttattccccaagcacacggaccaacacaaaaccacacccgattctttttctctttttttcttctaatacaacttgggaaccggttccaatggctttttcttacaccctaccatttctgggggagcattattccacaccccgaatcaatgtcggtcttcttctaattcatcggttcccatgaaacgaagggtcccaggaatccccttaaagctcgttaggtccacctcattccagagctagacatgatcctcaaggtggtgcacactttgttgaggatgaaagcacanagatttttgctcggaaagtagcagatcattatagtgcgagatccaaccagactttggaagaacgggaggctagtccgataattcatttgaagaaactcaataattggattaaaagcgtcttaattcagctttatgctcgtcgaggaga

SEQ ID NO: 12784 - DNA, 393 bp, Glycine max
tccacgcgttcttatcgagtatgctaccacacacagaagccatacccttccctgggtgattgacgtcttcagtgtccacagttgtgtccaaagacacgcagtactaccggtcctaaacctactatgaggctgacagatccacagtaggattcaaaggtttgatcaatacgggaatcagaaccattaaacctttcttcgtacacgcggacgaagacctagtggacattacactccgtaccataacccagatctgtgcaagagatacccatcaacgcgtgttgcagaatgtccacttgactgttagcacagcggggataatgcaaatggacaaccacagcattagggtggaacttgtccttcggacactgttagaggtgaatgtatttaacgatc

SEQ ID NO: 12785 - DNA, 442 bp, Glycine max
cccacgcgtccgcggacgcgtgggctcgccgcaaccttgctcttgttggcatcttcggcatcgctattcccgtcctcgtctacaagggcatcgtccgtgaattcgtaagtagtcattttccaattcccaattagggcttttcattctacctatgcattcgattctttttcttccttctttatgttatacttggattttcactttcttttaacaactatatctctccttctgctgaaacatgttttattttcaaaaacaatcaatttctgattcagaatctattcagttttgaaatttgtttctacaacaaacacaccctaattctgtgtgcttaattggctgcaagtttgagatggatcatgggtgacaactaaaccgtgtacagatattgtcatcagtagccgctaattgatatttttttttggccctacatgaattatca

SEQ ID NO: 12786 - DNA, 358 bp, Glycine max
tcgcttaaacatggcctttggaattcttcgacaggaagaacttgccggttccaaaggtccaaatgggggaggaggacctatgccccaaccaaacttgaagtttcaggaatgggcatacaggaatatggtttttgagcttcttccggttggaagcaagagcatgctatataccaatggccacaagcccattaaataccacaatgatactagcacttcattcattctgaaaccatcatctcctttcagattcaggagctttttcaagaaatacgtgtgccttgacggggtctggtttggagtgagaaagagaacatagtacattagcgcagcccacaatagacagagcgaaatggaggtc

SEQ ID NO: 12787 - DNA, 452 bp, Glycine max
  modified_base (399)..(399): a, c, g, t, unknown, or other
cccacgcgtccgaactttcttctttatggttaagatgtttttccatgtatcgatcaccatctccaggtgcattgaccttttgcttacactcatgatttcaagttacttcaagatttttcttattgccatgatggtctgggactttccatcttctgtgatcttcatcattgaattattttgtttatcatctaatgctgcggcattgaaagtgatgactgagtcaactatgcgtcgatgtgtttggacctgcttcagtgcatatgctataaaatttattgtcactcgaatactggagctcatattgttggggcaattaatgcaaggctggagtcaaatgccattcacattctctaaagccaccatgatttagtttagcattctcatgctaatgtattaganattagaagcagaatttcgtggcatgtgtttctgaactgtatatatgctcattg

SEQ ID NO: 12788 - DNA, 386 bp, Glycine max
acgcagcaatcaaaagtgaaggagtcccttggcacgcttaagccttattttaaccatgaaagcccagtcactgcaattgcggcaattcaagagttggaagtactgtcaactttggaccttaaagcgccattgagggatgagacccagcaacagccaccgccactgccacagacacagacacaggtgtatgaacagcaatatccccagccacagtcacagcagctgccgcaattttttcaaccacatacatcagccccgagctaggcctgaacatgatgaaggacaacttgtacaagtgttattaacaaggcacaagaggtaaaagatctgtaaagcggttaggaagtagtggtactgatttttctgagggtgaaatgactctggct

SEQ ID NO: 12789 - DNA, 340 bp, Glycine max
ctcccccttggcgtccaatttccattttcattcttctctctactataaattctgcttcgccttcgcttctgtctcgttctcagctccttcaccatgatgagtttctccttggattcagtttcggtgttaaaccctaaactctcccactcccatttctctctcccattcaacaggttcccccattccctcaacttccaccccttactcaaaccccgcgcagttaacgccgacgtcccccctaacggcctcgccgtctgctacctcacccttcaccgacggaaaccgttaaccgtcgctttcacagcttctccccaagactccgaacacggagagattgaag

SEQ ID NO: 12790 - DNA, 377 bp, Glycine max
tcgcgcggcttcaaccttgtagttattctctttcttcttttttagctatccctctcttgaaaaatctagatctcgttcttccttgatctacgttacgcttttagtgaccggatctgtatggatctgaaccagatctacacgccgatggtggttttggcctggtacgataaatcttccatcggagttttgctctgtataggttcgattcatcgttattagcgtcttgatattgttattttcatttgtcatataggtctttcatagatctgatgcatggaggctcagatctactgtacagaggtgtgcgattcatgttcgtctctcttttggaatctgtttcgtagaaagtcgtttggtcttccatgtcgcatggctct

SEQ ID NO: 12791 - DNA, 370 bp, Glycine max
gtgttctataagttcacggtcagttctgaaaaatgggttccaaggttttgcttgttgtagttatggtcatagcggctatacttctgatctctgctgaggttgcacccaatgaatacgaaaattttaacaaaaaagatgggaagcatgctccaaatgggttatatgatagcaaatggggttacggtggttggggtggtccttggtatggcggctggggtggcccttattatggtggcggctggggtggcccttattatggcggtggttggggcggtccctggcgtggtggtggcggtggtggctggggaagttggcgtcgacctaatggcaaccctcacaactaagaagaaaacttgcttaagcttcttta

SEQ ID NO: 12792 - DNA, 379 bp, Glycine max
cggtcatccacattcacaacattactttgctaatcaacccaaccctaattctgggttggtaatcccaattgtcatcccttcggttttcctgatcagaatcttccacccatgtctcgagtcttcggtagatggaagaatgcgaaggaaatggcgttgctttcggggtccctgccacgtgggcaccatcgaaccgggttcaatttttgcccaatttcgacccacctgaacatgatcgcctgccaccgctggcgggaggctccggtgggggttcaggagcggtacaagtgggaccgcggcgggtcggacgatacctcgtcccggaagatccgggccgatgcaaattgcccacgttgcaccaaagacatgaaccttgttttct

SEQ ID NO: 12793 - DNA, 138 bp, Glycine max
gcagccccaatcgggcggtaaattccgtccaaggctaaatactggcgagagaccgatagggaacaagtaccgcgaaaaaagaaaaaaaaaaagagaaaaaaaaaaataaaaaaaaaaaaaaaaaaaaaaagaagaaaa

SEQ ID NO: 12794 - DNA, 445 bp, Glycine max
cttcctgaaaggtgttatctcagaaggtcaaaatgtgtatagcttagtgactgggacgagaaggaaaaaactagtaaggacagtaaagtctaagtgatgggaacataagcgtttcagacacttggacgaaaagtcaaaaactagcttattaggtttgaccaaatcttacccgactgcttgagctaattaagtatattgcttcaatttagaaccaacccaatgaatgaactctagtattgagcatcaagtggacgcggcagagatgggaatatagcgtttcagacacttttttctcttattaatgaagggtttcttgacctataaaaaccaacaatggtattagtagtatgtggcagagcttgatataaaaatgtaaggtggctaaaatagtttagtttataatatgtattagaatggagatatctcattttgatgtacacataat

SEQ ID NO: 12795 - DNA, 381 bp, Glycine max
ggaaaaggccatatgaacggtgtaatatatgcattgttatccgacacaggagatttgaggtttctagaccttgtagggaaagattcatatgatggaggttctagtggttggattgatgatctaatcaagagcttagtgagggacacaatcattatgggccttatatgaattagtaaatggaggaacatgaagcaggcccatttagtttttcatcttttattataatttccaagattaaaaaaataaagagcaatagatataagctaagagatttttgttgtacctcgcatacagtaggcgggcgtggttcatttttataaagaaataggaaaaaagaaggaaagaatgggattgtgttagattaattgatgttttccaaac

SEQ ID NO: 12796 - DNA, 391 bp, Glycine max
aaagtaacaaatttcagcattagcttagaaaatggagttcgttcctgaagaaggcaagcgccttcacgaggattgctccactttgattttgcctgctctgtcgattggcaatgtggggcagctagttgcagatcttttgatttcatcaatgggttctgagagagttgggtatttggatgatcctaacgttttgccctgtgttggcaatgatgcttatggaccctttcctcaaggagacctggctcttcctcttgaagcttatgattccccttctaatgctctcactatcatccaacagagatcaccggtggttaagggtatgatgattgagtttgcaaaaaatatggctgattttcttgctggtagtggaaagaagcatattggtggtctc

SEQ ID NO: 12797 - DNA, 154 bp, Glycine max
  modified_base (72)..(72): a, c, g, t, unknown, or other
tttgaatacttacattttcttcttggtatactacattatggtttccttatacttgattaatggaatatgagntagtttgctgaaaaaaaaaaaaaattatatagaaataagaaaaaattaaaaaaaaaaattaaaaaaaatatattataaaaat

SEQ ID NO: 12798 - DNA, 427 bp, Glycine max
cccacgcgtccggtgaattagagaaaccaaacctgaatgccgcaccgttcaataatccattcttgaaacaatggctgaggaacatcttcgccctactacgctacttctttttctcgatcttcttccataatcaatcatctcatcctccgcagcattgtcatcgttgttccgctttcgcgttgttgcggttggttgcgatgggcgaggtggggaagatactgtacatagtggtggtcgaggactccgaaaagaaagagtcctttcgctactcgcgtcccgttctgcagagcacgctccagctcatgggatgcaaagcgcgtcacgccttcaagatcagccaaagagtttttgaacaaacaagggaagagaattctactgatattttgaagctggaagtagaggctttatcaagttttgatgctttcaa

SEQ ID NO: 12799 - DNA, 400 bp, Glycine max
cttgttttctttcttcctttcaatctttacccttccaaaccaacacataaagggccagccctcttcttttctctccgtgggttgaacttgaagaacctctgaaaatcctttctttctttcatcgatcactctctctctctagatctgttcaaatctccgaacatttccgctccaattttcatttccctgaacaaaaccaaaccctaaccctttctttctgtatgatacctgattcccccccagaggcgtagtttttgtgtcgatttgtaaattctttcggtagtttaggttacaattttttgtgaagtttttacggttttgaatcggtgagatgaatcacaacatcaacaatagagcgaggtaccctcccgggatggggattggtcgcggaagtttcaat

SEQ ID NO: 12800 - DNA, 348 bp, Glycine max
accactcgtccgaagaatgattaccagtctgtggtttgacctttatggccgtggtggcggttctggttcctcttatgcttttgaacatgtttttgttggataaaccaaacaatgtggtgaagtttctggctttcataactggctgcagttttaccttgaagaagcaaatggtagagttgattatcaaggatatatttttccccatcgactgggagaaactcctgactctgaagctcagcttctgactattcaatttgaatggaatggtgtcctaaaatctgtatccagcactttggtttgagtgagccctgaatttgaaatcgctttgtataccctgtgtttctatgt

SEQ ID NO: 12801 - DNA, 299 bp, Glycine max
accactcttgacagaatcattgatacacttcatgaacaaacaaatgagcattgttaaagctgattcagcgggtactgttctatcatcacataataaccctgaaaatcgctgttttaccattcataatcggaattgataacaccctgttcatatttctgactcccaaactgaagtatacaatgatatatctgatatttcaactattgatctactaactgtttataaactggcactctatcatggtatatcactttataatacgaagcctacgaaatgaaaacactttatgatcaatgcca

SEQ ID NO: 12802 - DNA, 335 bp, Glycine max
tcgtaaatattacatgcactatttactcatttttaatgtatgaaatatttaaattgagggatgaaattaagaaccaaagtaatcaagttaagaataattggagagttgctagttcatccatgtgatcaaacctcgcatggccatgttgatgttaccaatgcaatgcgcttcgctgttcatgtttcccatcacgattgataaaccctaaccccaatccctccgaccaaaatggtgaataagaaggtccccgattggctcaacagctctctctggtcctcatcatcgtcgtcgtcccctccctcatccgctgtcgacagccctttcgaacagccacc

SEQ ID NO: 12803 - DNA, 424 bp, Glycine max
  modified_base (347)..(347): a, c, g, t, unknown, or other
aaaaaaagaaaaactatatcagcgattctcgtgatcttcggcctcgaatcgagaggtaaaagacccaactccgcctctgtttttgtgatcgaaaaccataaaaaagttgtttccgatcactgccttaatcggattcagctgttgttcctcctcctcaatttcgaatattgaaaggctttagttgttgattttggtcaagtctctagtcaacctgtgaattttttattcaagtttaaaaatatatagagcaatgagttttgtttttcgaggaacaagagcagatattgaaaatgggtttccaggatttatacctgagaggcgagcattgcgcgttcatgcaacacgtnctagtaattccaattcactcacttttctcgtgacaagtcttctggtattcatgatactgaactcttaccagatgtcc

SEQ ID NO: 12804 - DNA, 413 bp, Glycine max
  modified_base (371)..(371): a, c, g, t, unknown, or other
caacatattgagttcacgagttcaaaaataaaaattattactcaatttggtatatgaacgagtttggacgaattgcattaaatttgacctaaacattcaaaatctaaatctatactcgtaattaaacaccggcccatacttttacatctgtagcttacaacaatttctttttataaatgatgatttatatgatgtcatttgtagttttttattaaggatttcatgatgtcgttttaagtatttcataatatatagacttgttatgtgtgtgtcaccacacaaacatacatttttttaaaaaaaaaaccttaaggactttgatgatgtggttttaagtattctttaacatgtatgtatccaaaaaaatattntcttataaacatgcaaacttattttttttagtggaatttaaa

SEQ ID NO: 12805 - DNA, 405 bp, Glycine max
acggtgaactcaaagttactacctcaaggtagtggtggtattataagtgggagaagcagtgccctggtgcatggagctggtgctcctgttcgttcgccaaaccttggttttagtgctgagcccacacctcaaatcccttcacctgttaaagctgtttctgccataccctctgagaagccacaacctccagctgcaaaattgaatattgatgaacttcagcgtaaaactgtttctctactggaagaatatttcagtgtcaggcttttggacgaggcattacagtgtgtggaggaactaatagctccagcttattaccctgagtttgtcaaggaagccatttcccttgcactagataagagtccaccatgcgttgaacctgttgcaaatctttttgagtacctgcta

SEQ ID NO: 12806 - DNA, 460 bp, Glycine max
ctccttcctctcatcctctataaagaaagtgcttaatttgtgttgttacttggttcagggtccatggattgggggcttgctatatcttctcatcctaaaccttattcagtcacaactggtggaaatctctggcggagtaaacacaccaccaagaatatttactttgcaagttcttggatatcaaaagcttcacgacacaaaagggaaactcaaatagaacataatgttttgaggttccaacaaccaagtttggatcatcattacaaatgcatcagaggagggtctacatatcaagaatgcaatagaaaatttgttgtgaaggcaatctctaaacaacctcttggttttgaagctcatgcttccaatcctaagaacattttggactctgtcaaaaatgtattggctgctttctactggtttttctatccatacaccatgaatgggataacattatgcgcat

SEQ ID NO: 12807 - DNA, 450 bp, Glycine max
gagagttctttttttcttctggttcttggtttggtttgttgctcttgttctagagagagagagagggataagtgcctgctccttcggcatttccgtcagacaaagttaacacttccaagaccgattaatcaattcgccccttcaccattccctattacatgaactctcccaagattttaatttgaagctgaaagaagaatgggagaaaatgaagaagcgatgcagaggcttcactttctgaagcagccgttaaacatggagcaacttagcatcccgcaattcaacccctcgcaaatgcgcgcgaagcagcatcatcatcagaatcagttcgacggtggggacagtaacaagcgggctggtataccaccctccaacccgtactcgatccttccatttcccctactttcagatcccggtggtcggttaacacaccaccatttcccttaaacc

SEQ ID NO: 12808 - DNA, 435 bp, Glycine max
  modified_base (282)..(282): a, c, g, t, unknown, or other
acagtctttaacagatgctgtgattccaaccactcagaagaaaactgccttggataggttggttaaggataatgttgcactaatagttgttttagaagcaaaagttaacaatcagcctgttgataatccagggaaaagacagcttctttgtgtggcaaatacacatgtaaatgttcaccatgatttaaaggatgtcaaactgtggcaggtgcacactctcttgaaaggattggagaaaattgctgcaagtgcagatattccaatgttggtttgtggggactntaattcaattccaggaagtgctcctcatgcacttcttgcaatggggaaggtagatccatcgcatcctgatttagcagttgacccacttaatatattgcgttctcacagcaagtttggttcaccagttgccactggtcaatgcttattcgtctt

SEQ ID NO: 12809 - DNA, 182 bp, Glycine max
aaaaaaaaaaaaaaaaaaaaaaaaaataaaaaaaaaaaaaaaaaaaaaaaaagggaaagggaaaaaaaaaaaaaaaaaaaaaaaaaaaaaaatgggcggacgttttaaaggatccaggcttacttacccgtgcttgcaacgtcatatttcttctatggggactcctaaatccagttcattgc

SEQ ID NO: 12810 - DNA, 326 bp, Glycine max
  modified_base (157)..(157): a, c, g, t, unknown, or other
gccaccgtcgccacgcgtcgggcatatacagatgccagttgcgcctaagaaagaaaaaaaggtttcaaggggctttgggcatttaacagaaggcggttgatctccagagtcaaatccatttgaacagaaccaccaaacgacgatggaggaaagcgtnttgcagcgctaacagatacatcgcctctcattctggcgaagctagacgacgatccacgacactgggcgcgcgcggcgtgcgtctcacccgattctcaccctcattcgcactttgctggagaccaaatgctcccaaaccttcccctcatctctcatctcctccgattccc

SEQ ID NO: 12811 - DNA, 463 bp, Glycine max
tcgctcagtttctctccgtcatcaaatctagggttcctgcagttgtagttgccgtggccaccgcgagcgccacctccagaatagttgccgccaatttctgattcgtgatggggaaaaatgagtttctcacacctaaagcaattgccaatcgaatcaaagcaaaaggattgcagaagcttcggtggtattgccagatgtgtcagaagcagtgccgagatgagaatgggtttaaatgccattgcatgagtgaagggcaccagcgtcaaatgcagatttttggacaaaacccacaccggatagttgagggctattccgaagagtttgagagtacttttctggagcacatgaagcgcagtcaccgattcagccgtgtggcagccactgtagtttataacgaatacataaatgacagacaccacattcatatgaactctactcatgggccacgcttactgagttttgt

SEQ ID NO: 12812 - DNA, 285 bp, Glycine max
cccacacctccgcccacgcgtcctcccactcgtccaaaaaaaaaaacaaaacggtcgagatataataaaaaactagtatacaaatataacatatcattcactactcccaagttctacaacatactattttaactatcttaattatgctatttccctctatagatcaaatatacttttacacattcacatctttattcacaataaattctttatctccgcccgatatatcatcctgcttcgactcctctattaccactactacaagtcttacatcatcctctaata

SEQ ID NO: 12813 - DNA, 416 bp, Glycine max
cccacgcgtccggttcatagtcccccgtatatatccgttcttttttcttccttccttccgtccttccttcaacgctcagcactcaaatcctctgagagaaaaaaaaattagggttttgcatttcgggtcagacagactcagacatgggaggaggcaatgcccagaagtcaaagatggctcgcgagaagaacctcgagaagcagagggctgccgctaagggaagccagttggattcaaacaagaaagccatgtctattcagtgcaaggtgtgcatgcaaacatttatatgcaccacatcagaagtgaagtgcaaggagcatgctgaagccaaacaccccatatctgatctccatgtttggtttcctcatcttaaaaagtgaaagaatgcatgttgagacatgatatatcaatatatg

SEQ ID NO: 12814 - DNA, 450 bp, Glycine max
atcatctcataaccaataaacaacaaaaagaacatcagcagcagccatggccgtgaagtttgcacctttctgacacacccaggttctcccaatttgggttgggcaccatggaaactggaataatccagggaccttggggatttcgctctctatccaaattcgttttatgcaccatttctggggcccttaccgtgtgttttgcccttgctggggccctgacaggagctatagctggtgctctagcagctaaggccactaagagtggtcttctccggggagtttcattgggtgccattgccggctctatactctctgtggaggtgttggaagcttcccgtgcctattggtgtatggagcaaactggctcacggagtgcatcatctatggcagatttcatagaggaacttgttcgtgggaggcttgttgaggaatcccttacacctgctattt

SEQ ID NO: 12815 - DNA, 386 bp, Glycine max
tcggaagatggtgagaaaaccagctttgatcattgctgttactggtggcattcatagttgtgtctgcgaatgcagacaacacaaaggttcaccccccaacttctaagaatatggtgtattatcctcaaggttgtaggtgctgctggttcatatggaagccaatgatcaaatgtgggaaagtttgttgtgaagatggatgttgctcttaaacttatgcaacacaaggttgaagcagacctcctataatttctacaggtctatatatgtttctcttcatccagatgcttatataatgtagtgctaaataatcattcaggaatccagaatttgattatgtgccctgcgaagtagttgaaagggtaattgatgaggttaatgtgatcaaa

SEQ ID NO: 12816 - DNA, 429 bp, Glycine max
tccacgcgtccgctttctctctctaaaaccctgctcgttttctctctctaatggcagagcaggccgcaccaaccgttgtggttgtggattcggttggggttcggagtcgctatggcttcagcttcgtcttcgtcctccaagctatgcttcaattccgactgcaaagagttgaagtccgaaagacctaagaaagggtggagactccgcagcggataactagccgagctttgtgatcgatgcggctctgcttttgaagaagggaggttctgtgaaatttttcactcaaatgcttctggttggaggagttgtgagacttgtcgaaagcggattcatcgtgagtgtattgtctcaagtcatgctcttatgttgttggatcccggatgaattgaatgttatgcatgtgcccgcaaaagtattattttgccatct

SEQ ID NO: 12817 - DNA, 211 bp, Glycine max
cttatttactactctaaaatcttctacttattcattaccaatttaaaccttcagcacgatcgactacatcgtggctacaaatcatcctacaatataaacaaccacatattaacacatactcatcatctactactatcacttttcctcctaacacaccttatctatatacaccatacaatcacaactaacaatactcttgattttatttata

SEQ ID NO: 12818 - DNA, 410 bp, Glycine max
tcggttttcatcagagtgtaacatctagtatacatatatagtataacatacttacattgtgtgaaatgagatttgtgctgaagctgaaaatttcattgatatatgaagaaattaatactgatgcaggtggaggaagctgatatgaggagagttgccttcctccctcacatgctcaaaatgcagtggcttatattcaaagcgataccaccaacaagacctgcatcaccaaatggactgtcgagcataaaatggaagctcctatttatatctattatcaactagataattactaccagaaccagttgcagaaaaatcttctttcatatttctgtttgaagttacatataagatatgttaagagtagaaacgacaagcaactgcggagtaaggcagcatatggggaaacaacg

SEQ ID NO: 12819 - DNA, 370 bp, Glycine max
cccacgcgccgtctcaattgtgtgtgcatcagtggagaaatccgttgatttttacgtgagtgttcttgggttttctcctattaagagacctagttcattagacttcaatggggcatggttattcaattatggcattggaatacaccttcttcaatcagaagacccagaaggcatgcccaagcttgttccaattaatcctaaggacaaccacatttctttccaatgtgaaagcatagcagcggtggaaaaaagactgcagcaaatgaagatagagtacgtgaagaacagagtagaggaaagtggaatcttcgttgatcagctattctttcacgacccagatggcatgatgattgaaatctgcaactgtgac

SEQ ID NO: 12820 - DNA, 390 bp, Glycine max
  modified_base (327)..(327): a, c, g, t, unknown, or other
  modified_base (347)..(347): a, c, g, t, unknown, or other
atacccttctacccttctgggtcgtgagagggccatcgtcatcaacttggagcacatcggggccatcatcaccgcccacgaggtcctcctcctcaactctcgcgacccctccgtcacccccttccttcaggagctccaggccaggatcctccgccaccaccaccagactctggccgatgccaaccccaaccctgacgacgccatcaagattctccccttcgagttcgtagcccttgaggcctgtctggaggccgcttgtagcgtcttggaaaacgaggctaagactttggagcaggaggctcatccggccttggacaagctcacctncaagatcagtactctcaatntggaacgcgttcgtcaaattaagagccgattagtcgccatcac

SEQ ID NO: 12821 - DNA, 247 bp, Glycine max
gaaagaccggaacataaggcgggcaagagagtttgtttcttctctcttcaatggaaggcggggaccaggtcttcctttcggcaacaaccgtggccgccgccggttttccaaacttttttcttcttcggttggttattccggccgtgctttccaacttggttcttgttgctttgaccacctttgttccggacccggaatttacaccctggtttcagaccaagagcgccatcaccatcaccatcaccag

SEQ ID NO: 12822 - DNA, 433 bp, Glycine max
gccgctgtcccgtgcaattcgaagggaatgaagaacaagggtttagaattagggtcttaaagcaactcggccaactttgtgggtaaaattagggattcaggtgtaaagtgaaaaactagggttttggtaaatctccaaaatgtcgacgggcaaacccagaggcggtgattttcagatggtcccggcgccggtaacgtcaaagcctacccttccgccggcagcagcatcgaatgcgatagtggaatatactccggtctctctcaaagatgaagaggaggatctggaagtcaagctccgacggattatcgacaatgttcctgtccgtgttagcaatactttcggtagttccgccggttcaggctccggcgactttcaccagtatcggcaaatgagacgcatggaacaagatcgtcttgccaggatggaagtcgac

SEQ ID NO: 12823 - DNA, 403 bp, Glycine max
cttcaatctagtaaaaattttgtgaactggtgaatttttcaaaattgatattttgaagtatgatgtatggctgcattaatattttgctgatctcactgttcatgctcattcaagtgtcattctgaattgaatgcttccaggttcactcgctgttaaaggacttggttcacaaagctatcagtgagactttggtatgttccgggcagtacttatttcatgttcctattgtatatctttatgctgtatttgatgttcacaaagctattgtgaaactttggtatgttcccagcagtacttatttagtttttctgttgtatttattgttgctgtagttgtgtttggtaagttttcgtgcttcatagtctagtgacaaagtgcagtttttaatatcatttacaacaac

SEQ ID NO: 12824 - DNA, 299 bp, Glycine max
ctcaaacgtactaacactcttgcgaactggtgaatcattcaaaatcgatattctgaagaattaggtattgctgcattaatattttgctgatctcactgttcatgctcattcaagtgtcattctgaattgaatgcttccaacttcactcgatgttaaaggacttggctcacaaagctatcaatgagactttggtatgatccggacaatactgatctaaagttcctatcgtatatcattatgctgtatattacgttcacacttctatagtaaaactatgatatgttcccagcactacttat

SEQ ID NO: 12825 - DNA, 361 bp, Glycine max
gcgcttttacccttgacaccaccacccctgagggtttctgtactcaattgagcatctggcggcttgtcagttctggccaccatcatggctttacttggagctacctgtgctctgtgctgttctatagacatggtgtgtgtcacttcgagtttggctggcgacatactacaccctgatagtattgctcccagaatgcctggctgtgacaacaactttgacctggttaaagatcctacttggatcgatggtgtggaaagctgttagtatgttagcatttgcagcaagacttggtcctacattagaatcaaaagaaaaacatgctgaccatacttgatttgcgatagcggaccctactgattgt

SEQ ID NO: 12826 - DNA, 464 bp, Glycine max
  modified_base (410)..(410): a, c, g, t, unknown, or other
cccacgcgtccgcccacgcgtccgatcaaatcacaatttagtaattggttcagttaatttccatggattcggggcttgctatatcttctcctaaaccttattcagtgatcacaactggttcttatgcatcaaaagcttcgcagcacacaaaaaaaactcaaataaaatataatttgaagcgggtacaacaattaagtttgggccatcgttacaaatgcattgaaggagggtttgcatatcaagaatgcaatagaaagtatgttgtgcaagcagtccctgaatcatcttttgattctgaacctcatacttccaatcctcaaatcattttgcactctgtcaaagatttcttagctactttatgcacactttcctatccatatgcaatgattggcttagcattatgtgcactntcttcgtctctccttgcagtggaaaaactatcagacatatctctatcatttttt

SEQ ID NO: 12827 - DNA, 386 bp, Glycine max
cacacctattctttttaagggtttatcttaaaccaggatttttggcactaattggtctatgggagaagcaccagcattgcttgttgatgacgtgcaggatggggctctgaatggccttgaattgaaaaatggaacttgcaaaacaactgctactgttggcgataagatgtatgtcattggtggagctgatgatggaactttgtccattgaagttcaaatttttgacggtagtcttggagaatgggttcgtcccactgagcgtggcaccaaacccgtgttgtgcaatggcctctcagcagtgcctttggaagaccgaatactgattcttaagaagggttctaagcctgatgatcggatatggttcctggagattgacacccaatatg

SEQ ID NO: 12828 - DNA, 252 bp, Glycine max
  modified_base (160)..(160): a, c, g, t, unknown, or other
cattgacggagtatactatgatagaactggtgaaataattcaaaattgatagtaccgaagtattgatgtattgggtcctttagataatgagcagttcttcactggatcatagcacatttacgtgacaatcattaatgaggatgaccttacagttcaactntctatctatgcgaacaggctcgcaacgctattaatgaaagagctgaacgtacctagctttaataatggcatcaacactactgatgggcatat

SEQ ID NO: 12829 - DNA, 407 bp, Glycine max
gcaagcgcaagagggaggaggaatgggcgatcatctagacacgcttactattaacagccatgtagtacatactggtaactatatcacgcaattaccttagactatcatatctatcattgcaaaattcatctcatttatatcgaatggctttgctgcaattctgatcatcattgcttttctagatgagtctctgctggagggtcatatatttggtcggaacttgttctggtatgctgctgtttttggaactataactgctattagactggcttcaattacagatgagcttctagtcatataccccgaaagaacaatgtcaatggtagttgagcatacacattatatgcccaataaatggctgtgaaaagaaagtactgaaatggtcccgattgaatttgaaaccttat

SEQ ID NO: 12830 - DNA, 334 bp, Glycine max
aacgtgctcacgatgatacagctgttcagacttttgcttatggccacttgaaatatcatgtcgctctatgttcctactctgccaggaagaagatgccgataattgacctttccaccgagccgaaagcatcttacgatcttcccaccaattatgctgctcacgatgccatcaatctgggctccagcccctaagatgctgattatgattcatctactgaacattctgtagaacaagccataactgttgcacttacgcagggtctaatttcttccatagatctactttctattactaccactgcttctcacaatgatgacgatgcgcatactatgct

SEQ ID NO: 12831 - DNA, 202 bp, Glycine max
gtgacagttccgttctcatcatcttacgcgtctaattacatcatctccacactggtccaacaaggcttataatgccatcacattctcaccttatagtgatcaccattacttagatcgacttaacaggttatataaacctgcattttatatacttgaatacacaaatactattacacactcatatggaatatagtcttaataa

SEQ ID NO: 12832 - DNA, 184 bp, Glycine max
gcggtggtggctggggaggttggcgtcgacctaatggcaaccctcacaactaagaagaaaacgtggctaaagcttctttacgggtttaggttttcgcaataaataaaacttcatgagaagtgtagttgtaataaaagtggaagtctctcttctcttgtgatataaaggaataatagttttatat

SEQ ID NO: 12833 - DNA, 169 bp, Glycine max
gcgctctctctctctctctctctctctctctacaatggcctcagccggaagccccaaaacctttgggtttcttcgactcaacaacccgggcttcttcttcttcggcaacttcggcttccccttgggccttgcagttttcttcttccttcggttggggccggttgggccc

SEQ ID NO: 12834 - DNA, 320 bp, Glycine max
accacacgtacgtccactcgtccggcagaggatacgaaataagagaaaggaaaggagtctctgtctctcgagataagactgagaggcctcaaacgcatatatctgtccctttcccacctctatctactaccacccactactcttaaggcaaagatggtgaatacaaataagacgatgatggtacagccaccgacttgtttctcaacagacacatacaccatcagttgcatatccattatattctgattactcctatggctacccatctgatctcatttactataaattttatttggcccaccctcatattgaagactccc

SEQ ID NO: 12835 - DNA, 432 bp, Glycine max
  modified_base (392)..(392): a, c, g, t, unknown, or other
gttagtggtatcagattgatgagaatgttcagagggagataattaaccaccgatctttaaggcatccaaatataatcaggtttagggaggtgttactgacccctacacatttagctatcgtcttggagtatgcttcaggtggtgaactttttgagaggatttgtactgctggtcgatttagcgaagatgaggcaagatatttcttccagcagctaatatctggggttagctactgtcattcaatggaaatttgtcatacagatctaaaattggaaaacactctcttggatggaaatccatctcctcggcttaaaatttgtgactatggttattccaagtctgctctactgcactctcaacctaaatcaacagttggaactcctgcatacatngctacggatgttctgtcgcgaaaggagtatgatggaaaga

SEQ ID NO: 12836 - DNA, 433 bp, Glycine max
cttatcttagcaatagctacccctatcacaacaatactctattaggcaaaaacaccaaatgggagaggaaaaagagcagcctaagaatgaaaccgagaagaagcccgaggaggccgccgcagcccccaagaaagacgacggacccatccctgtcgtttacaaactcgacttgcattgcgagggatgcgtcaagaagatcaaacgcacatgtcgccactttcaaggtgtggaaaccgttaaggcagatctatcgtcgaacaaagtgactgttaccggcaaattggatgccgagaagctgcgagataagatcgccgagagaaccaagaagaaggtgacatcatcttagctccgccaaaaaaaagagccgtcggcacggaaattcaccggggaagagggtgaaaagaggaaaccttgagagaaaaacccgaggaaa

SEQ ID NO: 12837 - DNA, 432 bp, Glycine max
  modified_base (385)..(385): a, c, g, t, unknown, or other
tgcttctcatctctgttgtggcaactgagccatccaaagatgagacacaagaagaaccaaaggcacagccagatgcctggggaagaggtggaagtggggggcatgatggaagctggggacacggtggagactgggggcatggcggaggaggacacggtggaggacatggcggaggaggacacggtggaggacatggcggaagatgcagatgctgcggtcgaaagggctgcaaatgttgctgaagtaaaaatcacaaatatatgaactgaacacactcatatacttgagtgtactccatgtaataactagtatatatgtaagaaataagaaataaaagcatggactctatccgtgcttgagctggcataggttgaatgttttccgncaaccatgcatgtagttgacacatcttgttactattcagcatatata

SEQ ID NO: 12838 - DNA, 460 bp, Glycine max
cccacgcgtccggcccgtttgacatgatgaacttaaagatgcaatcaccaaagggcctaaagagctatgaccttggtggtgttggtctaggaattgtggtggcccttgataaatcatcatccgaggaacaaggccatgtttgcacatcaaattcaaaccgatccgtaccaatcccagttactaaccaacgtgggtttcaaaagggtgtgaatgaaattcccgctggaagctccgaggattacacgtttgtgacataccatgtacctaacaacaagaccatcactaaggtttattatgatggcggtgaaggtggaattctaacacatggctactataatattaataataataacaacaacaacgttggtgttggtggtgttagaagaatcccaccaacgcaaactttaattgaagaagatgaacagtcatatcccacctcggatttctcagctcgtgtcac

SEQ ID NO: 12839 - DNA, 282 bp, Glycine max
atcaaataaaagttcacagaacaagctggggtggggcgacgcgctgcctggaacgggacagagacagagagggttccttccggtcgctgtaattggtttggcgttcaattgaagaagaacaatgtcggtgacagcgggtgttagtgatactgtaatagccattagggataagctcagaggtaaaattggccaaactaaagttaagcgttattggcccggtaaagttcctgaatgggctgatgatgagaacgaagaagatgctgaccctgacgatattagacc

SEQ ID NO: 12840 - DNA, 421 bp, Glycine max
cccacgcgtccggccacgcgtccggcaaaggataggaaataagagaaaggaaaggtgtctcggtgtctcggtcttggactgattcgcctcaaacgcatctatctcttactttaccacctctttctactaccacccactactcttaaggcaaagtcggtgaaaacatagcataggatgatggtggtgccggtggcttctttctcaacagacacagacaccatttgttccatttccattttcttctgattccttctctttctacccatgtgatctcatttactatatcttctttttggtccaccctcatattgaagactacgccttataagggcatctttatttctctatcattcttcttgagtgtttgtgattattgccctgtcctctgacattgctcattcctttaattcccccacccatt

SEQ ID NO: 12841 - DNA, 330 bp, Glycine max
aaaatatccatcccaaactcctcagcggtatttcacgttcgtgttcttcgcttacagttcatgcacctgttgctttctctgaaatggtgggaaaacgtgagagttcaaaacgctgagtttcgggttccacaacactgggctcaagtgtacttaagtcgtgagttgttcaggtcctcaagatgcttgcactgacagattctcctctacttattgctaaaacatttgaagcaacttaaataccaacaagcacacgaagcacttgggtatgtgctgcaaaaggtccaagaccaagatattcccgagtttggaagacccatgaaaaaattggga

SEQ ID NO: 12842 - DNA, 415 bp, Glycine max
catcccatggaatccgcaacatcatggagtgaccctctcccactttccagtctaccttcccggtcgcatgcacgccacccctgcgacttcaaatttatggctttttcaactcttcacactttctcactcccttccctttcttctccctcttctttccacccatttcccctttcctctctctctccaaaacccacttctttcaaccctcgccctctcttccctcgcaccatgcacgcctcgcgcatccaagatgccgttggaggggcactggccctcgtccaatcgttccccgctacgtggcagtccgcgcttctcagcaacgcgctgatctttttcttgaggtctccgattctggtcagcgggttgtctctgtccgggatcggtgctgcgtttctgctcggaacgctcacttggc

SEQ ID NO: 12843 - DNA, 360 bp, Glycine max
gcgcaattttcttactctaacatcttttctctttcttggcgatgaagatctcgtacgcaatgagggcgaggtcagaattggggaggcttggtgagctggtcgagcagagaagggaggtcgtctgtgacggagacgacgacaggattcggaggcattatcgacgatggtgttggcattgactctcttggagtggcccgatgagagatgtgtgaagagatgagcctgtcagtatggtgaccaaaatgcatagaattcatggttgtgatgaaactcaattcgaaacatacaaattgatcgaagggaatcgaacccatgactgagactcaattatggttaaccattgagctactgtacttagtt

SEQ ID NO: 12844 - DNA, 392 bp, Glycine max
cccacgcgtccgctttctataaaggtagagagaagagaggacccttctcttgcatagttcaagtgagtgagagtgccaaaaaatgggaaggcctccttagtgttccaaagtggggttgaccaaaggtccatggactcctaaagaaaatgcattgttaacaagtatattccaacctattgaaaaaggccattgaaattaattccccaaaaagccagttatttaaggtttaaatacctaaattttccaatataattcttaaattgaaggcccaatgtcctggtttagatcacaattttttatgtgaaacttatataatagttatataaatatggatatatgagagattgacagtatataattatatgggtataatcataaaatgcataatataa

SEQ ID NO: 12845 - DNA, 454 bp, Glycine max
tacggcctctcgatatatatacacgatagcagttatcatactcatactcaaacttactacgagatattgggccttacaaaaacggcaaattacaaatactttacattaattcactcttaatcatccgttcaactccatctacgtagacatcaatgatcaaccactgattactaacacatacctaaccttgagcagtattaacaccgatgatacgcctctaagaataccacaactactacactgaaacactgcatttctagaaacgatgaagacttcttcttcttcagacaggaacaagatcaacatacttgtcagtgctcagaaagtcgatgtcgatatccgaatctacctgcgattctactaccgcatcgctgacaacattctacgacaggctgatatcttttctgcagagaagaatattattgacctatatgtcatgcttttaagattttct

SEQ ID NO: 12846 - DNA, 67 bp, Glycine max
gcggcttaatcgaactattcagattctaaaaaatgagttcttggtcggctggaacaatctttgctgg

SEQ ID NO: 12847 - DNA, 71 bp, Glycine max
aaaaacatacaaataaacataaaaaaaaaaaataaaaaaaaaataaaaataaaaaaaaaaaaaggggaaaa

SEQ ID NO: 12848 - DNA, 395 bp, Glycine max
gtgttttgttagttcacacactaagttctgaaaaatgagttccaaagtttttcttattctacttatgttcatggccactatacttttgatctcctctgaggttgcacccgatgatgcataccagaattttgacaaaacagatgggaagcgtagtgcaaatggggtagatgaaagcaaatattggcgtggtggctatggcgactatggtggttggcgtggtggtggttggcgtggtggctatggaggctggcgtggtggctatggtggtgggcgtggtggctatggtggctggcgtggtggctatggtggtgggcgtggtggctacggagggttgggtggtggctttggccctaacgaacataatgaggctgggattgatgctagcccttacaact

SEQ ID NO: 12849 - DNA, 400 bp, Glycine max
gatctttgctctttcgatatgatatctctgtctcttgtcctcatggctgagaacttggacgagggcgagtgctggctcccgccgcagatcctcgccgactgacgacgttttgccgacaccctttgaagcaaagttcccatctttgcccgacgacactgttttgttcccctccgagtggccatacggatccccagttgattctaccgctggtggctccagtgagaccgagagcgacgaggaggagcaactcgtcgctgagttaactcgccgcttaactcgctcctctcttcaatctgataccaagtctgcgggtcgggatgtgtctagttctacacaatccacgctttgcgcgttcagaagtgggtgtggttgcggcaaagggttgagccagggaagccct

SEQ ID NO: 12850 - DNA, 159 bp, Glycine max
gcgacaatacttccgataaccacgaacgttacgcttttctcatacttacctttattcgatttttttagcaaatggtggctactatgatcagattctttccacagacaagctttctccccatattgcatcactgttctatctgccctaaatctctatata

SEQ ID NO: 12851 - DNA, 208 bp, Glycine max
gcactccatcttccagcgatttcgctactagtaatatattctttttactaagtgaccctcttatggtcatagctaagttttccactatgctttcgtacatccttattgttcaaacattatgattctttcctacttaaactattactattacattacttacattgtactttgccgtatgacagactgcattatattcaacatcaacatt

SEQ ID NO: 12852 - DNA, 462 bp, Glycine max
  modified_base (448)..(448): a, c, g, t, unknown, or other
ctagtttgcaattgtttgacattgagttaggaaaaatgggttccaaggctttgctcgttctggttatgctcttggcttctgtcctccttctttcagcggaagttgcatccaaagatgtagataagaaacttgataaaaatgatggtaaccatgatacaaaaggagtcgatgaaatgaaatattatggtggttgggggtctggttgggatagataccgccgtggttggtattgccccaatggttgttgtcaatggagctactactatcaaacctgttggaggtgctgctattatcctggtgaacatgttgatgtgcgtactgatgctcaacctcgcaactaaacatgaacattgtgcttaaagtattaagctattgtatctatataaataaaacttcatgggacgtgtacttcatgagacgtgtacttatctagttatgcatgaaatanaagtgaaaatcttt

SEQ ID NO: 12853 - DNA, 445 bp, Glycine max
gttgcccgccgagatggccggactgctgcagaatgtgccctcaacttgtcaaagcaacagaggtgtccaaatccggaggccttcatagaggaggtggaagagtcgtttactttttggggcaccccagaaggtgatattgttcatcctgcagagtgcatggagcaattacttgagaaagttaggcgtcatagagttaatattgatggcaatgtttgtactgttatggtgacaaccttggttcttgagggttggcagagaaagcttgatcctgggtacaatgtgatgcagacactgcagacattgctacttagagctgattgggcaaagtctctttcttacacaattgacggactcatggccccttagggaggaagttcctttctttgttgaagctcttgagaaacaaatttgactaacataaaacccaaacacaaacatatgtcct

SEQ ID NO: 12854 - DNA, 437 bp, Glycine max
  modified_base (404)..(404): a, c, g, t, unknown, or other
ctcgtctgcaactgagggccgagtgggtcgttgcctggttcttatccaagctgcatccgatggtcaagggcaaggatgagttcatgacagtgatcattttttgcatgctattagagacatgctaaaaatttattcatatactcaagctcaagctacactgtccacatatgtatcagctcctggcattgtccaacagatatcagctcttcattcagatttgttgagccttcagtcggaccttgagaattctcttccagaagacagaaataggtgtattaatgaactgcgcaatcttattaaaaatctgcagaaactgctctttgcatcttcaacaacagcacagccaatactgacccctccgccattaatgaaagagcttgatgaaatggaaaagattaacgcanagctgtctgttgctgatgaaaggtgacactaga

SEQ ID NO: 12855 - DNA, 410 bp, Glycine max
gcgatttacggtttaggtgtatcaaatacaataaatgttttacaatatctaaccttgtgattgaacaaagtatagggcacgtaaccatggattcttgttaaatttacaatggctttcttggtgggcatgcattataaaatcttgagtggggaatgactctgcaagattcctaatgggtgaacaataatctcatttgcatcaatgcattttgggtcgttgattgtcgtcagtgctatattggccactacttttctagcacaaatatgaatcttttaggattcttaatgagtgaacagtaacctcgcttatatcaaggtgttatgggccattaattgtcatcggtgttattccagccactacttttctggcacataagacaaagctctacatgattcctaatgaatgaacag

SEQ ID NO: 12856 - DNA, 267 bp, Glycine max
aacaaaaaacaaaataaaaaaaaaaacaacaaataaaaaaaaaaaaaacaaaaaaaacaactaggaaaaaagaaatacttacactaatcaacaaaacaaacaaccaatacttaaacaaccataaaaaataccattcaactctttatacattatatctcaaactcataaactcaaaccttacaaattcctctatcacacaaatacactccattacctacaatttcaactacaaaaatacacactcttacccacctcaactaattacct

SEQ ID NO: 12857 - DNA, 355 bp, Glycine max
cgcagacacagtctggatttctccagacgcaaaccctaggaaagaagaaggaattggatgcatgcaaagccaatcacagtatcgaacatggcaaatcttccggtggaagttgtcaccgaaatcctgtcccgtctaccggtgaagtcggttatccggctgcggtccacctgcaagtggtggcggtccatcatcgacagcaggcacttcatcctcttccacctcaacaaatcccacaccagtctcattctccggcaccgttccaagctctactccttgaacctaaaatccttcttaaaccccaaccctttggaacttagccacccgctgatgtgctacagcaacagcatcaaggtcc

SEQ ID NO: 12858 - DNA, 341 bp, Glycine max
gcggttttgagtggaaaaggactactaaaaaagaaattgatatgactgaaggaaagggacttactgtgtcaaaagaatatcccttagaagctatgtgccaagtgtgccaatcactgacagttaaagatatttataacttctagtgctgttaaaagcataaacatcttataatgtttttgaggaacttatatatgtaaaataaaatttatagtagtgctttatttattcaatgttttgagtggaaacgaactagtaaggaagaaattgatatgactgaaggaaaagggatcactgtgccaaggaaatttcctttagaagctatgtgccaagtgtgtcaatca

SEQ ID NO: 12859 - DNA, 388 bp, Glycine max
gcgactagctagtgttctataagttcacggtcagttctgaaaaatgggttccaaggttttgcttggtgtagttatgttcatagcggctatacttctgatctctgctgaggttgcacccaatgaatacgaaaattttaacaaaaaagatgggaagcatgctccaaatgggttatatgatagcaaatggggttacggtggttggggtggtccttggtatggcggctggggtggcccttattatggtggcggctggggtggcccttattatggcggtggttggggcggtccctggcgtggtggtggcggtggtggctgtggaagttggcgtcgacctaaaggcaaccctcacaactaagaagaaaacttgctaaagcttctttaccggttt

SEQ ID NO: 12860 - DNA, 352 bp, Glycine max
gcgaaaaaataacgaccacgcatacggaaacaaaaggacagcacatgatgaagcattacaagaaatgggccacttgtatgacattgttcgcattgacaatgaagaaaaacataaggaagtgcaacaggagtaagtatttccatcagaatgttaatggcagcaaacatcttggtctgaggaaactggcataagcatggcagcaacaataaatagaaatgtcatttgaggatcaacgacttttgtctagatacctccctttactgagagagtttattcctaatgcggctgcataggtcgaaactgattcgattgctcacttggctggtcattccaaagataaaaaatatgtgta

SEQ ID NO: 12861 - DNA, 68 bp, Glycine max
aaaaaaaaaaaaaaaaaaataaattaaaaaaaaaaaaaaacaaaaaaaaaaaaaaggaaaaaaagaaa

SEQ ID NO: 12862 - DNA, 417 bp, Glycine max
gcggaatcacaatcacccacttctttaccacctgaactgattcctttttatgacagggaagtaatgaaagaccctgaccatttatgggtaaaatatgtcagtgattggttagagcagaatggacccaacaaccgaagcctcttggtttgggatctgcaagcttcagaagatgcaactagaggcatatttcaattgtctcgttcggatattgaaaagctgaagcaaatagtggtgtccaagaagaaagggaacaacatcaaccttcgcttgtcaacctttgtgttgtctattgcctatgctagtgttttcagggtgagagcatatgaaacaaagaacatgagagttatgttggctttgaatgttgattgcaaggcacgtttggagccacctatttcaccaacatattttggaaactgt

SEQ ID NO: 12863 - DNA, 429 bp, Glycine max
gtcgttccatgcttgtgttgttgcattgaccctgaatttgtacttgattctgggacgtcactgagtcggagtctgtttctgcaaatttcaaaaccctctctctcgttactcgccatcactagcgagtgctccttcttcctcttcgcgaaattcgtatgcaaagaaggaggtagggattcgcgctcctgctgtctcagactgcctaattatcttttattctgcgaagtaactgagagattgaagatgggaggagatgattctggtctggagagtgacactcatgattggaacactgaagatgagcttgaaattcagaactatgactcgacgtattcatgtataacccttcctaatggagatgctgttactggctctggagaggcaagctcggctgcagctttggctaattccaacgtgcttgatcacttc

SEQ ID NO: 12864 - DNA, 376 bp, Glycine max
ctcacgcattctgaaacaaatggacagcacattataaaccattgcaagaaatgtgccacctgggtgacattgttcgcatggacaatgaacaaaaaaataaggaagtgcaacaggagcaagtatttccatcactaatgttaatgtcctcaaacatcttggtctgggaaaactggcaaaaacatttgcacaaccattaattgctatgtcattggctgatcaacgactcatgtctatgtaccttcttatactgaaagagtttattcctaatgcggcttctgaggttgctactgactttattgctcataaagtttgacataccgaagaataaaatgatgaggtcgacctctacaccgttaaaaatgaaatggatataaac

SEQ ID NO: 12865 - DNA, 53 bp, Glycine max
aaaaaaataaaaaaaaaaaaaatttaaaaaaaatacaaaaaaaaaaaaaaaaa

SEQ ID NO: 12866 - DNA, 473 bp, Glycine max
gtagtattgcagtttattctatcatatccttgttcaaataattttcttttcaattacaatacgccaatcccagaaacttatgttcatgaccatcctcaaggtcccaataacatttacttgaagacaattttgagttgaccttacagcctagttccacctacaaacacccttgatccttcaaagcctctcatagttccaatactggcaacaataatactcttgggcatctaaactatctccattcttttttccccctttctttgcagtggatttgcgaggttttaaagaaattaaatgcgtttttatgtgctaaagagctaggtaattatagaattcatctcacacatacttctttttactaccttttatcttttagattttatttttgaattatccttgtttaatggagtaatttaattcgttgaggggttgtggaatttgtgtaaaagattttctataagaatttttaattc

SEQ ID NO: 12867 - DNA, 435 bp, Glycine max
acgctcgcattattatgtgtgcagtcatactcgctaatgtcgactgcccccgcgccgacttcgccgtccgcgaataacgggaccgcgcctccgccgacagctcctgccactgccatcgtaccgtctatggtcacaccttccgtgcctgcacctgactgcgtcactactccgtcggcgactccgtcgtctgctccggcggcgacaccttcctcgccaccttcggctactcctacgtctgctcctgcggcgactacgtcttctgctacaccgtccactgcttctagttgtacttcaccggtcactccgaccacgccatcgacttctccgccgtcgtcggcgtcgacatcggcaccgtcgccacccagtggcggcagcactccgagtccaccgtctcggagctcgccctctactacgttcggatcgagcccgaccact

SEQ ID NO: 12868 - DNA, 399 bp, Glycine max
ggtactcattcacctcaaggcttgcggaatcagatggagatagagtccgcaaagttgtcatctggtggttttgttttacttgattgcccccaatcaataacgattgagagcagcaatgcatctcttgttggttcagtaagtgattatttattatctttatctaatggttgggacctgactagttatctcaagtctctttcaaaggcacttagaggtttgaaaattggctcttgcttttctacaaaccccggcgaaggaagtaacagttcatgcttggtaatctatgtggtgtgcccatttcctgatcccactgcaattttgcaaactgtaatcgaatcttctgttgccattggatcggttgcccaacagtcagatagagagaggagatctagcttgcac

SEQ ID NO: 12869 - DNA, 366 bp, Glycine max
cccacgcgtccgcggacgcgtggggttttccgttccgaaacgatgtcctccatgggcatcacgagccagagacagagatcgagagcttctcatccccgtcgccgacacccccgccggcgatgccgtcgtctccccttcccccaagccatcgtcgtcggcgtcgtccccgcatcattccggacgcgagactttttacaaagctgttagaagctgggcatcaaaaaagtttatgactggatgtgtcattctctttccaattgcaattaccttctatataacatggcggtttattcatctcgtggatggatttttctctgctatctatgctcagcttggaattgatatcattggtcttggattcataac

SEQ ID NO: 12870 - DNA, 400 bp, Glycine max
ctcgaatctagtaaaaaatcagagaactggtgaaataatcaaaattgctattacagatacctcagtgccagggacttatgttcatgagcatacttaacggcccaagcacattcacttgacgacaagaatgagatgaccttacagtctatttccacctatagcgaaacaccctagatcctctattctgagacgagtggaccgtacctagctgcaatactggcaacactcatactctagggcatctgaactatctgcattcacaaagtcccccgtgatctgcagtggatttgccaggtttcaaagaaatgaaatgctgttgtatgagctaaagagctaggtgattatagaatgcatctgacacatacttctttgtactacactgcatcttttaagatcatat

SEQ ID NO: 12871 - DNA, 424 bp, Glycine max
accttctctattttaagtaattcaatggcttacactgcaagtcttgtgttcttagcttccacggtccttatgataaactttcctcttctggcaaacgctatcggatgcaatggaccatgcagaaccctcaacgactgcgacggccaactcatttgcatcaacggaaggtgcaacgacgaccgcgacgtcggaacccacatctgcggcggcggaatgccgccaaatccgccaccaagcggcggaagctgccagtcctcgggaaccctaaattgcggcggaaaatcgtatcctcagtaccgctgctctccgccggtaacttcctcgacgccggcgatcctgacgctgaacgacttcagcgaaggcggcgacggaggggacccgtcgcaatgcgacgagaagttccataacaacacggaacgtgtgg

SEQ ID NO: 12872 - DNA, 332 bp, Glycine max
gcgtcttcttatgttcttcttcaagattgcgacgacgatccaagtgatagacactcggtgcgatggaacttgtatctgaatccgagcgaactctgtacccatacgtgactggatcctctgtagtcgctatcaaatacaaagatgggattctaatggccgatgacatgggatgatcgtatggatctaccctgctgtataagaatgctgagcgtatcaagcctataggaaagcattcttttgatggcgctagcggggagataagtgactcacatgatatattgcgctaccttgacgagcttatactgtatgacaacatgtgataggataggaat

SEQ ID NO: 12873 - DNA, 425 bp, Glycine max
cccacgcgtccgcctacctacaaaactgaccaagtcccatactcttccgtcatatcactactgggcaacacgctctaatttaaacaatactgccactaccgcacatggatattttcacttcctatacataaccctattccgccatctcttttttcacacttcatgtgcttcttcttctctgattttggttcatggcgtgggcgaagaagccaggtgactcaaataatgtaggctttatgagatggttagcgttggtgtcggtgttgctgtcgttatcgggcttttgacgtgattcgggtgtgaaagaaggaaaaaggaatgcgtacgcgacaatgatgtacgtaggcactccgagggactacgaattctacatagccatacgcgttgctttgaaatcgctggctacgctcgacgctcaagccgat

SEQ ID NO: 12874 - DNA, 458 bp, Glycine max
gcgcgcatgccttgggcttgtcgtccattcctcttgtttccggtcgatgacacatatataccttcgtcccccggtgggaatgatgcgcatgctgtaacttttgccgttcattgcattcaattgtcatcttggcggagctattttgatccacggaaaataaccctagctgactagaaatagatcatgctttcatagtgctgttccgagcctgaaatcgttcatttggtgaactaatactatatagcctgaaagctctattatctagatgcgacagaggatcacggatcatcaacctgacaccttggatagtatctagacaggtcactgttaaggttttatggaatctgaatacattggacggactatggatcgtacattgctaggatcttatgatgaattgtatatagagctgtcaggcatgattggcatataaaaatctgtggtgctaagtctcatgc

SEQ ID NO: 12875 - DNA, 445 bp, Glycine max
  modified_base (418)..(418): a, c, g, t, unknown, or other
atttactagctagtgttctataagttcacggtcagttctgaaaaatgggttccaaggttttgcttgttgtagttatgttcatagcggctatacttctgatctctgctgaggttgcacccaatgaatacgaaaattttaacaaaaaagatgggaagcatgctccaaatgggttatatgatagcaaatggggttacggtggttggggtggtccttggtatggcggctggggtggcccttattatggtggcggctggggaggttggcgtcgacctaatggcaaccctcacaactaagaagaaaacttgctaaagcttctttacgggtttaggttttcgcaataaataaaacttcatgagaagtgtagttgtaataaaagtggaagtctctcttctcttgtgatataaaggaataatagttntatatatgtattctcttatctttatat

SEQ ID NO: 12876 - DNA, 447 bp, Glycine max
atttcatacacctagtatcctccatggcccacttattagtctctactattattgtttaaaaggaaaacagagattggcccaagtttcccctttttgagaatgttaatgagtaaactattgaattatacgtgtttgtgcaggtgtagatggaacttgaagcaagtaatcaacccaagcaagagcgttcaaggacaagatggacagcatcccttgacaagatatttgcagacttggttgtcaagcagattcaactggggaacagaccaaacaatgtttttgacaagaaaacatggaatcacattcgtgatgagtttaataggcaaacagaccttaatttcaacaataatcaattgaggaagcatctagatgttcttcggactcgcttctataattggaaatctgcttatgatcaaaataatgactttgaaatggatgattcctgttgca

SEQ ID NO: 12877 - DNA, 448 bp, Glycine max
ggcacgggtgacaacgtctcttgcttactgtccatgtcaactgctactcaaccttcaaagaaagtggatgatgtgaaggcaccccaattggtgctttttggccaaacaattctcaccgaacagcaaatttctttgaacacctctgctaagacagatcctactcgaaataattcatttgatggaaatgctgataaaatgtgcaagttttcagatggttttggttatgctcttcacccacaaggctcttctcttgagaggttacagtggtacaaggatcaacaaaaagaaaccatggctagtttggagacaggtcactgtaaagtttttatggaatctgaagacattggtcggactatggatctcacaatgcttggatcttatgatgaattgtatagaaagctggcagacatgtttggcatagaaaaatctgtggtgctaagtcacatgc

SEQ ID NO: 12878 - DNA, 458 bp, Glycine max
gcgaaagccccaaatccccttaaaattttggcagtctgtgtgatctaagaaccagagggcatccgcactaacccattttgtgttgtggaataagcatgtgtgagagacctgtccgtcgtatccctcatgaattcatccctcgcattataaaacctcgccgtgtcacggtctctgagctgtggcctaacttactgcgtgatcctatcattcataacttcatccctactcatataactacacccacaagtgcctctctttttgcctccaagcctcactcattcgattcactcaccagagagtgtccatgtacccttcaaaacgacatgtcgtcgtctattcgcttcgttaagcagactcggaccgcatccgattctcattgtagaaactggaaccaagtccacccagagttcaatatgggttacagggttcaagttcagcaagaatgcagattacccgga

SEQ ID NO: 12879 - DNA, 349 bp, Glycine max
ctgatggattcccaattacacaaagaacattttaaatatcaccaagcatgcctactatggaggcaggagtcatttggtggtcaaaagtctatgatcgagaaacagagaagaaagtatttaattatgtagtacactgtactcaaaattcaaatctggctgagtggttcatctgcaacaccacatatgaacttgaacctaaagcattatcttttgttccaaagctcctaccaggtggtccattattgagaagctatgacaatacaaataccaatgcaagttcattggggcagttctgtgaagaagatcactatcgcttaaattggctgaatcaacaacctcatggttctga

SEQ ID NO: 12880 - DNA, 340 bp, Glycine max
gcgagaatggattaccattgtgtgtgggtagcagcatttgggagcatgggacagaagtgtgggttggtgttagacgaccaacagatattgatgcatttggtcggtcagatagtgaaagggttgaatctaagatgcatattatggatgcctctctttgtggaacgggctttactgatgatgatgattcttctgtctataccttaatggcttcgggagacttcagggcacttgatttccctgaaaatcattaggctctggcttatataccttcgagggttgatggttgagacagtgatcccgatgatttagatttatacgactgacatgatgtagattgtga

SEQ ID NO: 12881 - DNA, 150 bp, Glycine max
cccacgcgtccgcccactcgtccgaaaaaactttaacactaataaaaaacaaaaatcacaaattggacacaaagcaaaaaacataaattattgcctttccacttttcagtttctcatctttcaaacgcttcattatatgttactcatact

SEQ ID NO: 12882 - DNA, 452 bp, Glycine max
tcgcaaaaattactttttgttgacttgaacacttaagttgtcatctttacacaattgatacacttgggaaaaacataaaagattggtttaaaaatatgaatatatcatcatttaaatatttcattatatgttactcatacttcatttagttagaatgtctttgtttgtgtgtgtatgcagtgttcctgtgtattttagatgttaattgcattaaagtgtatgtgttgtatccgatgttcaagtcagagttcatgcttcatagatctatagtccctcctaagattttggttttttcttggagattattacaagacagactgcccacgtgttagcaactacacagaagaagggcctactatatcaacctttacaacaatcttgcagattatgtaaatctaaggtggagaccaacatctttctttatcatgttcttctccttccatatatggaat

SEQ ID NO: 12883 - DNA, 427 bp, Glycine max
gcacgtttgtttgctttgatcgtgcacagagtaaccctagagttagggtttaattgccctcggaatttccaccacgagaaagtatctttctctaattagattgatattttgtgttttattccatcgagatttgtgttggtgaaattttgctgctatctcttcaatcggctttattgtccactatacgttcaaatccatgattgctaggatggatccctctcatcatattgaacatcaagaagactactagtgggacactgaaggatttgtgattccaagtttgggaattgaagactcacatcaagagtaacctcatgttcttgatatagaatcttctgattctgcatcaaaggctatagaggatgaacacatctatttgggtccgcatggagcgcatactttactagcaaagcagcacgagctaaat

SEQ ID NO: 12884 - DNA, 349 bp, Glycine max
ttcttcttctctcccaataattttctctcattttccttcactttctatccattcgacatcttgcaccagatcaccatcaccgtacatatcatacgttggtaattgattgattctaaattcaattccgaaaagatctagggttctgcctgaatccgtacctcccaatccaaatatctccaccgcatctgttccctacctggtacagtatcttgcttattataggttccgattcgcccgtggcattgaaattcaacttgctccaatggctttttctaatggagaaaggatacatgaaattgacgattcgtgttgatcttcgtgcttagtgatttggtctgtgaatgataga

SEQ ID NO: 12885 - DNA, 446 bp, Glycine max
gcgcccacgcgtccggcacgacacagacactggtccacacagccaagaatggcagatccagctactgaattggtgcgcaccaccatcttcacccaccaattcatccatttcctcctctgatcttgacaccgagaagcaccacactgggcactcttatgggtgtcagcttcccagctattaccttcagagcctccgacccccatccaaattccgccaccgccaccgccaccgctgctgccggaggccctcgtagggctgcgggctccaagaagaagagggcgatcgcggtggcggagaggctgaggaggtggtggtggctgtgcagggacggtgacacgaggccggcttcgctcggtgagtttctcgaggtggaacggcgctgcggggactgcgccttttacggcacggcggcggaactcgaaggaatggtgatggacccgcagagt

SEQ ID NO: 12886 - DNA, 458 bp, Glycine max
gtgaaagacaaaatgtaactgaacctgccaaagctgctccgctaggattgggtgtgggtgggggagagcgcgggaggagaactagacttcaacctcctgtaagtaaaggtgctgatgatagatcatccagttcttctgccaatcaaaatcagcaaaccagaacagatggtcaacatatattgcaaactcttgcaagtcatggatctggtttgaattcaagaaatgctaatgggccatcccagcggtccttgccctccagtgatcgtccaattgatgtggctggtttaatgtctcacgctttacgtagtcctgccttgaatggtacgttggaaggagtttctcagcaaaccggagttgactcacctgatggcttgaggaatatgttgcagcagttcacacagagcccacagatgatgaacacggttaatcaaattgtccaacacgttgtcaatcaagat

SEQ ID NO: 12887 - DNA, 453 bp, Glycine max
ctaccatgctaaactttctgcaattgtatgagcctcttcttagttttgtcaagggccgcctgggccattctataaatttgaagtatccccccatacttgatcctcagttggaagctttggcagcagatctatatgctctgtcaaggtatgccagtgccaataccagaccctctgtactgatttctgaagcttctcaagctgaatctgaacaagtggagaccaagcaaaaagaggcagagactggagataaaacatctgaactaagacttgctcaacttcagcatcaacttccttctaatgaacctggtgcactaatgcacctcgttgaggaagttactggtgaagatgaagaggaccaggatacaaaagaatgtaaaaagctctttaaaaatatgaaattcttcataagcagggaggtaccgagggaatcaatgttttttgttattcctgctt

SEQ ID NO: 12888 - DNA, 383 bp, Glycine max
ctctctagcttgcgtgcgtaacataatcgattaagaagctgctatagtgattcgaggtcagggggttgcgaagatggagcgcagcagtcactccaatctccaaatatggatcgtatagtcatttgaatttcgtgaacgacatctcgcgccaaacctacgcctgagtcgcagcccactccaacgtatagaggacaaacctcaccggcccgtggacaacctagatgacatgtatgggtctataccctgctcgttgtcctggccccaagactaacgcctcaaacttgaagaacctgatgatcaactcatcaagcgtataatgctcaaactcatgctggattatagtaagcatagcaagtcaattcgtgtggctaatgttgtgtacc

SEQ ID NO: 12889 - DNA, 435 bp, Glycine max
aaagatatggcgacgcgggagcagccaaacataccctgaagcaaccccacgttgcgcatatgtgccctaacaacaaccacaaattacaaatccttggcattaattaaccttttttgtccccttcaactcgatctacgccgacatccatgatcgaccaccgataacttcgccatccttcgccttgcgcagtgttgacgtcgttgttgcgttcctaggattacaacaacaacaacggtaaaccgttgcgtttcaaaaaccaataaggctttttactctttggacaagaaccagatcaacattggtgtcacagcttaaaaaggccatgtccataaccgaatacttcttcgatattactaccgcatatctgacaacatactctccgacaggctgatatctctcgcgcagagaagaatttatagacctatatgacacgct

SEQ ID NO: 12890 - DNA, 348 bp, Glycine max
ctgatctgagattcgagagatgggtttggaagtagcttccagaaactgtatataggtcatcgtgctgttgtgacagttaaaggtagtgtggtgtggggaaggagcctagtgattagttgtttgagaccactaaggaagtgaacaagaggatgtcaaacattacgaacactcattggtgttatagttgcaagaggccagtttggctgcgacggcgagatgctgattgtcctagctgtaacgagggatttggtcatgaacttaatgatatggtgcatgtgaatccatttgacttatttgacatggacatcagttaagaactagatcaaaggctcgtactcatggaaacat

SEQ ID NO: 12891 - DNA, 270 bp, Glycine max
cccacgcgtccgggaagtatgctaacacacctccaaaagattcaaaaatctcaacctgacgcggccaaccaagcctttggttagggaatctaccaagtcatcatgaattgagggtaacaaggctggcaaaggctaatatcaggatgctatttaaatatcaataatgtagcccttcttgatgttggacttcctagatatttggttggttaaaatttttaatttagactgtaatactattttatatgcaacagataattatgagcagtttcg

SEQ ID NO: 12892 - DNA, 440 bp, Glycine max
gcgaatcttatagccgggcattggtttatattcttgatatctctccctttcctgtattacaatctgcgattgtggattaaaagagagcacttatcagatgttactgaaatctacaataagctaaattgggagaaaaagaagcggctgttcaaagttgcatatcttgttttggtatttgcattttgtatagtcagcttggtatggacccttaccgaggatgtgcattaattgatggcttgccttccatgcctgccatatgtttcgcttacatttttgttcgagaattgtgttattctttgtataaatgtaccagctaattaaattcttggtaatatcaaagaagttacaggctgatacattccctacattgagggcaaatccatcttatgagctgaattccattggcaagagccatggtgagagcaatccgtgatgagcca

SEQ ID NO: 12893 - DNA, 217 bp, Glycine max
tgcatgccttgaggtgttagaacagaattgtagttgactgcattattgtcagaggtttgaagaggtgagtatgttgcttcgcggctagcaaatgtgttaatcactactttgataaattgcgccctaggcttggttgattattgtcttttataattcgctactctctctcggctacttttaagcaatgaatgaattggaaatctaatcattgttcgtc

SEQ ID NO: 12894 - DNA, 393 bp, Glycine max
gcgcccacgcgttctgatctctctgcttctctctctcagactcaaaaccctattgcgggctttggagtcgaccccgattatggccaacagtaacctacctcgaagaatcatcacggaaacgcagcagtggctcagtgagccaacacctggaataagagcgtacccttccgaagacaatatggcgtatttcaatgtgatgatccttggcccaactcagacgccttatgaacggagagttttcaagtcggaattatatttgccagaagaatatccaatggctgctacaaaggttaagcttctgacaaaaatatatcattcaaacattgataagcttagcaagatatgtcttgacattctgaaagattaatcgagtactgccctttacattcgcac

SEQ ID NO: 12895 - DNA, 249 bp, Glycine max
gcactcgttcgggcgatttacagcctcctcgctcaactatcgcttctacttctatgaacatctcttggactttgagtcatccttcactggtatccagccctcacagtctatactctaaaagatatcatatgacttcgaactagacttcccaatatagctgtctaaacttcacatctacccttgcaaactcatagatactgccattcactctattatcgacaacttcaacaacattgacttctacaagat

SEQ ID NO: 12896 - DNA, 437 bp, Glycine max
gcgtgacttgtacagatgacattctttcattaattcaggagtgatttttccccttttcttttcttggttttaatgtaatttttgttgtcattgttttatttatgcatggttgaatgctcatattcaataatatcagaagcccaagttatacttttttaatatttttcttaatgattgcaagtacatgcatcatgggttttcgtgaccagatttcatgtgaaatcttcttgcagctcctgttccctccaaattccatccaataaagcaaaataaaagaacttaataaagaattattatgtcatgtctactttttcattacttggtttctgtgcttttttaatcgtcatttggaggctgatgtatgcttttaaagtacagtttttgttttcctcgcctatttggaaatcctcttatctatgcctattaaccatctggtg

SEQ ID NO: 12897 - DNA, 464 bp, Glycine max
gcggccttgcctttctctccaacaacacaagcaacgcttcgttctctgaacacttcaacaatgccaatggaggaggaggcaacaacaacaacaacaacaacaacgagggcactaactacttcgcaacttcaagtgcaccttctctcttcagcaacagtgtcaatgccagtgccttatctcacatgtccgcaactgcactgcttcagaaagcagcacaaatgggtgcaactacgagcaacggcggcaccgcttcgctgttgaaaagcttcggaagcgcgtactccagcagcggcggcggcggctcgaaactggtgaatgctgcaaactacgtcagtggcatgttcggagggaataatcacgtgaacgaacagagtaacagtaacctacaagacctgatgaactcgttcgcttgtggtggaaactcttccattttcgaagatgggtttgaagcatatgaacatagt

SEQ ID NO: 12898 - DNA, 415 bp, Glycine max
ttttgtttctatgtcttgtcatatgttctaagaaggcaatgttgggctactagggccactgggctgacaatgggcgtgagccgacatctgtagcttttatgtccacggaggaatcaatgcacctgtttttggtcagatcactggggcaaatcctacaattcctggaatgtttccaaatatgtttccgctggctacaagtcagatgcagcaatttagtgctctccctgtcatgccagtgcaggctatgactcaacaggctacacgacatgctaggcggttgtatgttggaggcctacatcctacagctaatgagcagtctgttgcaactttcttcagtcaagttatggctaagattggaggaaacactgctggcccaggtgatgctgtggtcaatgtttacattaatcatgacaag

SEQ ID NO: 12899 - DNA, 458 bp, Glycine max
cccacgcgtccgccaaaaaggagattgagcaagagcccaagtgttactccaaaaaggagattgagcaaaagtccaagtgttagaagccctcctccatcacagaggagtttgagcagaagtcccgccagaagcatcagcaggagtccaagcagaagcatcagtagaagcccagtgagaggcaggaatgggagaagtgtcagtagaagccctgtgagaggcaggaatgggagaagtgtcagtagaagccctgtgagagtcaggaatgggagaagtgtcagtagaagctcagtaagagtcaggaatgggagaagtgtcagtagaagcccagtaagagtcaggaatgggagaagtgtcagtagaagcccagtgagaggcacgaattggagaagtgtcagtagaagcccagtgagaagcaggaatggtagaagtgtcaatagaagccctgcgagaactcgttc

SEQ ID NO: 12900 - DNA, 114 bp, Glycine max
aaaaagtaaaaaaaataacaaaaattaaagcttatgataactacgacataaataatggacctggtataaataccccttgtctctttcatatgatcaaccttaatacataccctc

SEQ ID NO: 12901 - DNA, 399 bp, Glycine max
cttttctttgccaacactccttcgattaggggtttcgatcccaaattacaaattggtcgccgtgaacgcaacctcatactctgctcttccttctacgttccgcagtctccatcatcggaatttctcagcgttttgttctgatatccaaaatcctggctatgttgattgccattcaaattgtaataagtctacatctcaagcgtctttgtttttgtgttccgactccaacagtagaagaaatggtgtttttggtagaccactttgtgtgaacccctctggcaggagaaacctagttggtccagctttttattctctggagactagtgcttatgacgtggctgctttagaatcttcttcccgtgttgcagaagaaaaagttggtgtgctgcttctcaatct

SEQ ID NO: 12902 - DNA, 409 bp, Glycine max
gcgggttttcgtaaaatcactgatcttgccatgaaccaagatactcctggagataatctcgtttgcgaaaaaatggagatgtgagatgccatcttatgaatgttccatctacgcagggttttcaggtataaatgaagccatgtcaatgtcacctggttgtttgaagaaaaatggtggctttgtggaattttcttcataattttcatgatagatggtaacaaacatatcttgtaaaagaaaaaaaaagtcaattcacagctatagcaggcagttgttggtcagcctactgtgcttgaactctccacttattttttagtgtacaatagtcagcacttcatacatactaccaactcaattggactctccacttatatatgcggctttgaagcatgaatgattcgcttaacga

SEQ ID NO: 12903 - DNA, 416 bp, Glycine max
cttgtgtttacatttaagatatgaggtgcagttctcataacattgtattaatgcattgaacgtgggagatctgtctgcatatgaattcctcaaggtcatagtatagtgatgcttatgcatcataataatatagtctattctaggacttatcttctatgaagaacattggctcgtcatcttccacagattgcaagctcgtttatactagcagatgaacgtattaactatcattgatcagctacattactatcctgatgaactaccgccgctcttgtaacatgcaatctgatatctactccgtaacataatgtcgaattatgtcaattctcaaaagattctatacatttaacacatacatatgtacctaccttatctgcattgtttatgtactcgtcactgcaatgtacatacttatg

SEQ ID NO: 12904 - DNA, 446 bp, Glycine max
gttcgagatgcagaggctcgagttcctcttcccactaatgaggttcaaacagtggggcaagcgcccaatcaattcattcagtggccgagaagacttgtgaagtctatttcagttaagactattgtcgaatctagcaaagatgttcgacacaaaaggttggaacctcaacttggtccgcttgaacgcttgttgataatagttagcaaaattaggaaggatcatgtacagctaccttgggatcctgatgtactaagcaagccctctaccatgtcatttcatatctatcggagggatatttttgaattatgtatgggtagcgagatgctaaacatctcagttatacaattgtggctgatgtatctgcatagcttatgtactgataaggggaatgcacatatctatggatttatggacccgcaatccattcaaagtgttgggaataatgc

SEQ ID NO: 12905 - DNA, 453 bp, Glycine max
gaagaataatggaattggaaactgagcttcgtgaggtaaaagaaaagctatggatgcaggaggaagaacatgtagatggatcatctaggggatcaagaagtgagaatactgaagatgtttataccaaaattaatgcatatgaacaagaactgatgactgtgaatgagaagttaagactttcagaagaagaaattactaaactgaagattgagcttgaaaaatacagactcttcaatacagaaaatttggaggctggttttgagtcatcatcaatgaaagaacacatcaatgaaggaggggaagccctggaacacaagactatagagcttgagggaagcattgatggtgtggataaggaattgtttgaccaaaatggtgagatcgagacacttgtgagggagctaagaattaccaaagaaaatctcaaagcttcagaaatgcaaattacttcac

SEQ ID NO: 12906 - DNA, 298 bp, Glycine max
ctcaggaaaacgcaaaacccgcgcggcaccatttcatctcattgcccgctcaatatggcagagaacaaattacgccagcgcatggacttcgcactctacgagctacaactcaagaacaagttgaaaccagactcatcagtcatggaatccctaaagcagttctccaactgacttttgctcctactacgactgacaaaccctatccctacactaccattacaatccattacgataccaagaagtaccacacttctaccagttcttcatgcatgcaacatcgagtacttcatccacagga

SEQ ID NO: 12907 - DNA, 228 bp, Glycine max
tcgactacggcaagatcattcttacagtcaaaattatcatccttatggtcatggcggatatactctagaactactatgaggttgcacccgatgatgcataccacaattttgacaaaacagatggtaagcgtactgcaaatgggctagatgaaagcaaaatattggcctcatagctattgctactatggacggtgacgacatggacgatgaccaagtggctatggatgc

SEQ ID NO: 12908 - DNA, 447 bp, Glycine max
  modified_base (381)..(381): a, c, g, t, unknown, or other
  modified_base (394)..(394): a, c, g, t, unknown, or other
cggatttaaacgtgatgaacacccgaaccaatagacaccagtttttattggtttggtttgaaggtaacgtgaataggcaaaaataccatatgtatttgcagtaaaaaaattatttatttttagtataaatattttctttttgaaagggaaattttttttagtataagtatgtatttgcagtaaaaagaaaagtataaatatacatttcaaaattacttatttgtttcaatgattttaaggataaaaagtcatagtgacctttcctaatttttggcttttaccgtttagagttcgccatttgttgagaatgaaatttttgtggcagcgtataactgcatcatgtgtatgtttactaccttacttttttgggaaaattatatntatgctgaataanttatattaatggacaaataccgtatacatttcatttttttaggcaatgtacat

SEQ ID NO: 12909 - DNA, 288 bp, Glycine max
aaaatgaaaacaaaaaaaacacaactaaaccaataaacaccaaaagaaaaaaaaacggtataaaatgaaaacttatatcagcaaaaaacccaaaaatactttacaagaataataccatctccactatcaatcaatatactcatgatgtaaatcacaaacaaatataccccttatcttctatcgctacaacgctagttgacaatatataccttgactaataacctatatacgctaatgacttgactctctcatattccaagcaacccctcctacctgacatcttatatc

SEQ ID NO: 12910 - DNA, 392 bp, Glycine max
ctttcttcccgatcgatcgatttcttccgcctagggtttttctgcattccgattacccatccgaccgcattcacaatcacaattgcaatagggttttcgtttccttcggcttgcttctgtggtaattgcagctttctcgattgaattttggatttagggttccgattccgagtcttacttctaaaagccgtcgattcgtcctggaatttcaggctctcggagccgcagagatagggttcttccattttgtcatgttccccaaggaaaaagagagagagaggggtcaacgaattttttggtggtgagttgtgggctgagcctgcaaccgttgttataaactggagttatcgcaatgttgggtgtgaatcgtactggctttaatttctgtagcc

SEQ ID NO: 12911 - DNA, 385 bp, Glycine max
acgcccacgcgtccgcaacatcgtattctgcaaattcaaaccgggtcttggttttctgaaagagtggatgtggcaaggacaagcgtcatgatgaatctgacaaaggaattttttcacaccttgctcatggggtagctggtgcagcacatggtggacatgggtacccacctggggcttacccaccaccacctggggcataccctccacaacaaggatatcctccagctgggtatcctccacaacaagggtatcctccagctgggtacccttcacatcaaggctatcctcctgctggttaccccccagctggttatcctggttcatcacatgcaccaggttctcatgggcacggcggtatgggagcaatgctcgctgggggtgctgc

SEQ ID NO: 12912 - DNA, 448 bp, Glycine max
acctacgcttctacccaattcctctgtccattcttcattttctcactaaaataaacgaaaaaaaaagcattgttttctgctttctctgataacccttttgtttctctccttgaattttgcatcaagaaactcagttctcacttctcagcatggtttcacttggagctatatatagtgtggcctatgtgttcatgcttgctgctactttggtcttgggtggggatatagttcaccatgatgatgttgcccccagaagacctggttgtgagaacaactttgttttggtaaaagtccccacttggattgatggtgtggaaaacagtgagtacgttggtgttggtgcaagatttggccctacattggaatcaaaagaaaaacgggccaatctttctagagttgtcatggctgatccgcctgattgctgtacaaagcctaagaataagctcac

SEQ ID NO: 12913 - DNA, 326 bp, Glycine max
gcagttgacatgtttggagtcttaccttccaacgaatatgagtgagagcaactcccacctgctgcttctcttgttctctacacacttgttgttcgaccattgacaacagcttgtcgatgagctcagcaactacatcagacctgaaattgggtccaacaagacctgtcagacactctgaagcagatggcaataataatgctgacaaaccagacggtgacagtgcccaatctgacagcgagggtccaagcaatgggtggatgatgagggtctcaaacaacgtggacaaccaggtggtcctggcagaggacactatgtactaccccact

SEQ ID NO: 12914 - DNA, 392 bp, Glycine max
gctgtgggttatcttggttcgaatttgtttgtgaggaggatctacagaaacatcgggtgtgactaaggcttttgtaggagtctgagaccagagcacttccatatgtttgttgctggagacaataaatttcttagaggaagcctctggtcatgtgtggggaccaaacaatgtttacaggtagtaagtatcacagggttgaggatgaggatgtattttttctctatattagttgatgtattctttctctatactagggaggccctgagattttttccctgactgtgtttgaaagccttgatttagaatgcatggattggtctttataattagatagtcagcaaaatgtcagactcgttgctactttttcattccttttttttataatataaata

SEQ ID NO: 12915 - DNA, 363 bp, Glycine max
cccacgcgtccgcttcctcttcctgcatttctccgcgtgtgtgtatgtgtgtatactctcgcaagtacgcacatacatacacatccattcgtacataaatacttatatctcttcttccttcgccgttaattctctgaatccctagctcttctgttctccgatccgatcatggcctcgcttgtcaacaacgctaacggcgccgtcaatggttttcctggaatatcccagaagctcattatcgataccgaccctgggatcgatgatagcatggccattcttatggcttttcaaagtccagatgtggaagttctgggtttgacaaccatttttggtaatacaactaccgaactttcaacactcaat

SEQ ID NO: 12916 - DNA, 440 bp, Glycine max
  modified_base (384)..(384): a, c, g, t, unknown, or other
cccacgcgtccggtttgcaattgtttgacattgagttaggaaaaatgggttccaaggctgtgctcgttcttgttatgctcttggcttctgtcctccttctttcagcggaagttgcatccaaagatgtagataagaaacttgataaaaatgatggtaaccatgatacaaaaggagtcgatgaaatgaaatattatggtggttgggggtctggttgggatagataccgccgtggttggtattgccccaatggttgttgtcaatggagctactactatcaaacctgttggaagtgctgctattatcctggtgaacatgttgatgtgcgtactgatgctcaacctcgcaactaaacatgaacattgtgcttaaagtataggctattgntatctatataaataaaacttcatgggacgtgtactttatgagacgtgtacttatct

SEQ ID NO: 12917 - DNA, 383 bp, Glycine max
cttctgtccaagagacactgaaaaagcacgagcttactagacctcttgctactaaggagttggaatggtttgcggcctctgcccttttggctttacctattattttagtggctagagtgttttcagctgttttctgtagcaaaaaagtgaataaacctgctcgaaatggaaacaatcaccatgcacgacgtaaacataagcgagggcatctagacaagcacacaacatgaagttggttcctgctttatttttttccctggaaagtttagataatttttcctgttcgcactggcttattgagggggatgtatctttcctgtcgtgtggggttttgaatattttacttctcttttttagggtgaggtaactctaggatgtttcac

SEQ ID NO: 12918 - DNA, 451 bp, Glycine max
gcccttcttttttttattttaacattaaacttgaccattttatatatatttttttggtggatcaaaaagtagtataaacataaatttatcacatatatcctaattcccaccatcccaattacccattttagagatgggttgttaacgatattatactactttcacaatacaagaatttttcaactactacctctacccataattcctaccctagataaaggaggtgttcactaagattccataaattcctagtatcttaaacacttgaatatatgatatttaggtgtaagacatatggaaattcaagatctcttatgtttttaaaccataaaggatcttggatttccatacatcgtatacacgaatatatcatattcaagtgtttcaagaggcttggaatttatgattccttaaacgtgtgaggaggtaaaattaaaacaaatgcttaatc

SEQ ID NO: 12919 - DNA, 324 bp, Glycine max
cccacgcgtccgcccacgcgtccgaggctgggttggtttcttctacccttagaggtcgtggaagaggcggtgctccccgtggtcgagttggtcgaggtaggggagtagtacgccgaccacctccaccacctggcagtgatcaatgaacaacgagttcaccgtctgtgattgatggttaatgaaatgatttgacttggtattgtaaacttctcccttcgtctgaacgatggcattgtagaccagttagtaggcgtaaattggcgaccagttttcgtcaatgtaaatacaattttgcttttcactcatttctccccttacctatct

SEQ ID NO: 12920 - DNA, 219 bp, Glycine max
gtaatggccatgggagatggctgatgcagactttttgtatgtgggaagcactcccgggagagatggacctctatgttgggaagactgtggtgaaacgtggaattgcaatggagcatgcaaccaatgccttgatcgatctaataaagaacatggaccaatggttgacccttcttgccagggagtaaagccagaacctaattttgagaatggcattcaaag

SEQ ID NO: 12921 - DNA, 265 bp, Glycine max
gcgagatattgtgtgcttgcttagagaggttttggttccgcagaagattctgaattctcgtgctctagtgcgattccatgggagaggtggtcatcatgagtggagagaagaagtcagttagagtggagggggtggagaaggaagatagtggtggaagtgggagcgaggctggtcaatgtggagtgtgagatgccgagggagagggtcttagacagtagagtacagtgggggctggatacttgccaggagtgttggacatgacgat

SEQ ID NO: 12922 - DNA, 76 bp, Glycine max
cttatgggaatattgtatctgattaccatcgatattgtgcatccaatattgaataaaaatgcgttatttctgtgat

SEQ ID NO: 12923 - DNA, 440 bp, Glycine max
gttctataagttcacggtcagttctgaaaaatgggttccaaggttttgcttgttgtagtgatgttcatagcggctatacttctgatctctgctgaggttgcacccaatgaatacgaaaattttaacaaaaaagatgggaagcatgctccaaatgggttatatgatagcaaatggggttacggtggttggggtggtccttggtatggcggctggggtggcccttattatggtggcggctggggtggcccttattatggcggtggttggggcggtccctggcgtggtggtggcggtggtggctggggaggttggcgtcgacctaatggcaaccctcacaactaagaagaaaacttgctaaagcttctttacgggtttaagttttcgcaataaataaaacttcatgagaagtgtagttgtaataaaagtggaagtctctcttc

SEQ ID NO: 12924 - DNA, 449 bp, Glycine max
aactgcttctagagtaggttaaccgctttcctttgtttttggataaaatggttttgatagctattggcattccaacaatattatattgtggaacagtctgtgatgtcattgctgacttggcaactagctttccaagtttcaaataggtgaggttgattgtttgcaatcatgtttggaaattgaaagtatgagccgagcaatatgtataatatttaagtttacttttaatgtttgtcctccatagtaaaactcacatatgtggtataagaggttgatgattccattatttttgtggttcttattgatgtgtattgatatatgatttttctcaatgtttaatgcactgatgtgtgggattttgtgttgtgaatgtatgattcagctggaaaaggcatatgacaaactcatgatggctcaattgtctaatcggaaaaagggtgtgacttttt

SEQ ID NO: 12925 - DNA, 453 bp, Glycine max
cccacgcgtccgcttggatggaaagggtctgctgctaccagtgcatttcggccagctgaacctaggaaaaatgctgagacaccgcccactactaatgatattgcttctgttgatgtcacttctatcaaacaaggtcgcgctcccttagattttgatttaaatgtggcagatgaaagatgttttgaggatgtgggttcgtgtgcttctttagaagctgggccacatgatcgtagcactgggggatttgatttaaataaatttgatgagactcctgaaattggtactttcttgataagcaaactggatattccttctttaccaagtaagccttcgttgtccagtgggttatctaatggcggaagtgtctcaagagactttgacttaaataatggaccaggccttgatgaagttgggagtgaagtcccaacacgtagtcagccaatgaaaagtact

SEQ ID NO: 12926 - DNA, 458 bp, Glycine max
cggacgcgtgggcggacgcgtggggcttgtgttactgctgttgtccaagagagccttatggctattcacgtttggcctatgctttgtccttgatcttcctcgttctcttcacccttgcagcaatagttggatgtgttcttctttacactgctcaggggaagtttcatgggagcaccacaaacacgctgaaatccttggtgagtcaggctgacatcaccgccgaaaacctcaggaacgtgtcagattatcttgatgcagctcataagatcggagtcgaagcggtttttttaccagccgatgttcagaagaacattgacgaagttcagatgaagattaattcttctgctgcagatctttccagcaagactaaaagaaattcagagacaattaaagatgtcattgatgcaatgagacgggatctggttattcatgctgctgttatgctctttcttgcattt

SEQ ID NO: 12927 - DNA, 125 bp, Glycine max
ataactttatatttactattcatgtcattgtaataaagacaaatcacatgcacccctgtggcaatgttatctctgaatcggttgattttttttttaaaagagaatggttaataaatagtagattg

SEQ ID NO: 12928 - DNA, 446 bp, Glycine max
ctaaaattgaaactactacaaaaaaatcatatgagagttcaagtaacaatcctgccagggggaccgcagtggaaaggagcacccctgcacagaatgcagacaaagaatcagatagtcatgataaagatgatgtgttttcagatggtgaggcagagcaatctgcttcttcaagaagcaagcaaacaaaagcaccttctcaagcagttgaaaaagttaaaaatgacaccagagtctacgaatcaagcagagtttcaaatgaaattgcaaatttatcacatgcaacagaacaagtttccttgggaaacaagagctctacgccaattcgtcatgctagtgagccaagaactaacgttgaaggaaaaacagtgtccagtctcgaggtgcccagcacagaaagtgagtttaaggccatggctgcagatagcttctgttttacctttggagat

SEQ ID NO: 12929 - DNA, 418 bp, Glycine max
acgccggagaacagcccgagattgataaccatgctgatgaagtctcatcagccaaccatcctggtaccggtgtagaggaaaactttgttactgagggttcaagatctgcatcaggttatagcaacagtccacgccatgcaaccattgcaagtgcaacaaatagttacttttttgatagaatttctgcaacatggccagaggaaaaacttcttctggctacaagaacccaaagccctcgtgtcagtatggatttctctaacggggtaagtcaaaaaatgtcagcctgaggtatggtgatcgtaactgccggcctacgaggggaaattagaactttccaaaattttggactaccacttcggatataaaaggtgaaagaatatgcatgcttgtgagcatggctgagaatgagttgatgata

SEQ ID NO: 12930 - DNA, 472 bp, Glycine max
gacaacaaacttttctgggaaggaacaaattaaagaaaacaatggagtagctgggcccaggccggaagcagcttggatgaaatctatttattcagaaaagccacctctgttagaaaggcctgcaaatatccttcctaccttcgaccagaatgataaaagaactcttgtgcaagaatttcagatgagtagtatccagaaggacttctgttttgatgaattggagagtatagtaaaaattaaaccagccgaagcttaaatggttcaatcacctgctgatgatgctagaagagaagctgaagggttgaagctcattgcccttggcaagaatgagaaaattgaagaagaatataccaatagaattgccaagttgcgattgactgagactgatgaaattcgtaaacaaaaatttgaagaagcccaagcattaaagagggcacatctggagtatttgaacatgaaaatgagaatggag

SEQ ID NO: 12931 - DNA, 364 bp, Glycine max
accacgcgtccgcccacgcgtccgtccacgcgtccgaaatttcatttcttttcatggtatggtcattacgtcatagtcattgcaacttatatctcctagtccggggttattacaacttaacaattgtggttttgagtttgagtaccggatatgtagtagaattcaatatttaggatatatttgttgctcacaataattatatttgactagagcatgaatacctgacccatgagaaattatatgtggctgtaataatcttatacaacgaatggagcgacaaggtgattgaggtcaaaagaatcgtttgaaataacgtgattgatgttataaaacatacattatttaagagttcactctgaatttt

SEQ ID NO: 12932 - DNA, 464 bp, Glycine max
caaaaataaatcgagccaacgcatttaattgtaagtgtcttcatattacctgtgttctgtgacatctttttgcataatattggcactaagtcttttttgatagaaattgtgaagatgtactgttatcattgtatcaactatattgtgcccttctttttttatttgatttggcaaacacggctacttttctccaaataagatggatcatttgtattgccggctttgtgcacaattatctacttgtaagaagtccaatttcgggcaacaacgtttgtaatgcagaaataggtcattagcattgtaaatctccaggcgataaatggaatatcaaatggaagacgccgcatagcttctggtgtgacaatatcattgtgttgggcaaagcattttcgaagaaattacgtggatttaagaagattctgattattcttctacatctacaattattaaggtgaagataattt

SEQ ID NO: 12933 - DNA, 421 bp, Glycine max
acaagctgaagaagggaaggtggctttgaggaatataagaagagatgcattaaaagcttatgataaacttgagaaggagaaaaagctctccgaagataatgtgaaggatttgtcaagtgatttgcagaagctgacagatgagtatatgaagaaagttgacaccatcttcaaacagaaagaaaaggagttgctcacagtttgatgctttgttgcaaaaagtaaatgctgagttctatctaaagaaggtcaaattttgtgcctactttgctccagggttggatgatgaatgcgcatgttcattggttatacagaagacaaacttttgaattaaatagatgtttttcaaattggaaaggtgagttcatgtctgtaaattggatttatttcacgtaattcttcattgaaattagaccctcaccga

SEQ ID NO: 12934 - DNA, 451 bp, Glycine max
cagcatatgtctcaaaggcccacggttcctcactcctcttccatagcctgcggccttcactctcatctcctggtctccagtgagatgaaccctagctccaattggtccctttaatcaattacctcttaattagtaattacttaatctcaattagcctttcactctcccacacaacaacatcatgggcgtcaaaggttttgtcgaaggaggcatcgcttccatcattgcaggatgttccacacacccacttgatctcatcaaggtccgcatgcagcttcagggcgaaaacaatttgcccaaaccggttcaaaatctccgacccgcactcgccttccaaaccggttcgaccgtccacgtggcagcggctattccgcagacccgcgtgggtcccatcgcggttggggttcgcctcgtccagcaagaaggccttgcggccttgttctccggcgtc

SEQ ID NO: 12935 - DNA, 443 bp, Glycine max
atttgatcattcctctgactgagttagagctgcacatctccgttacattactttcccatgtcattgttcgatccccaattcctctcccacgcagaagaatcatcaccccaaaacccaaattaaaaaaaaaacccaaataatacaactgaagttattttaattttcttagtaaaaaaaaaaaagagaagaaaaatgacttcgattcatttgataaacactctcgctgctccgcttcgttctttttctcctccgtcgctttttccgcaatgccattctcctctccgttcttccgctgccccgaaacggcgtcgtttcgctaactcctctgggttccgccttgcttcaagccaaaccgtgaattcggttccgcgtgggaatggaacttacaccgttgctgatttcatgacaaagaagcaagatttgcatgttgtcaaaaccaccac

SEQ ID NO: 12936 - DNA, 150 bp, Glycine max
acgctatctaatcaaactaatagcatatatgaataccatgccctttgtcaccttgagctaactgtgcggactgcttctcatctgtgtggtggcaactgagccatgcaaagatgcgacacatgctgaagaaccaaagacacggccagatgc

SEQ ID NO: 12937 - DNA, 76 bp, Glycine max
aaagaaaaaaaaaaaaaaaaaaaaaaaaaattaaaaaaaaaaaaaaaaaaaaaaaaaaaaaagaaaaataaaaaaa

SEQ ID NO: 12938 - DNA, 456 bp, Glycine max
ggacgcgtggggaaaatatggagatggagggtggtgttgtgattgggatgattcgctcgtgagttgtttttggtattgggtttcattattattagtggagtttggtggagaagaatctaatctgtttgtcctgtccactccattccactccaccatggctatctatctttccctttgtttgtgtttctttctaaatataattgaataaatagtaactctaatctaacacgctttctctgctgtgtctttgcagtgagtttcattgcaaagctacttttctctgtttggggataaataaaatgggttgcttttcatgtttcgattcgagttccaaggaggatcacaatctccgtcctcagcaccaacccaatcaacctctcccttctcagatttccagattgccctctggagcagacaagttacggtccagaagtaatggaggttccaaaagagaac

SEQ ID NO: 12939 - DNA, 422 bp, Glycine max
cccacgcgtccgaccgcatgccagaatggaaattattcaagccttttgaagcagcaatcggagatagagcttatttttcgcagaagtccaaaacaacccctacagatgagtttgctataagcactgtagctgctgtccttaaggagaaaccacctgcatggttcacctatgggcattactctactgtcatggctatcatgtatcatttaccgatctctgttagagattttgttttgaagaaagcaatgaaaggctgagctatagttaggtggtgcatctatctttccacatggacaccttataaagcatttactttacctttagcaacagaagagatattttctatttagttccattttatcatattttagtgaacaaagtttttgaataaaacttgaccaaactgaggacatagtttcttg

SEQ ID NO: 12940 - DNA, 440 bp, Glycine max
cggacgcgtgggcaagtgggtcatcgttggaatctgattcttttgaagaagtaacatccggtgcctcttcttctccctcatcatcagttgatgatcaacttgtagttgttgctgatccattgagtgacatgtcttctctctttcaacaacttcccatcaagagggggctatcaaaattctaccagggaaagtcacaatcttttacttcactaacaaatgtgaggagcttggaagatcttgtaaagccagagaaccctcacaacaaaagattgaagtcttacaagagctatgcaggagggttggcagagagccattcaacaagggttgtttctaaggggggaatgatgcattcaacaagttcaagaggttcatgttcttctttgggaaggggcagtgtcactaacttcatgggtagtaatagtaggccatcaattccttct

SEQ ID NO: 12941 - DNA, 435 bp, Glycine max
cccacgcgtccgcggacgcgtgggtgctgatttcatcacctcgctctcctctcccaaacgcgtcaccgcccaaccatccgttgccacgtggtggaaagccaccgataaatactacaaaaactcgtcccccaaactcgctctttccctcggcaccacccaaatcctggacgagaattactccttaggcaaatcgcttacgaataaccaaatcttaaaacttgcatccaagggtccacagagaaacgctatcaacattgttctcacttctgctgacgtggcagtggaggggttctgttccagtaggtgcggaacacacggatcctccgtgggggcgcgcgtgaacggaaagagatacaagttggcgtacatttgggtgggtaattcagagacacagtgcccgggtcaatgcgcgtggccgttccaccaacccattta

SEQ ID NO: 12942 - DNA, 301 bp, Glycine max
acgcacttttcagcttcagtattcctctgatggatccaagtctggtgtacaacaacagggtgaaagatgaaacaacaagcctttgccagcagcagctacagcacctgttgcattctcacagggtactgaagcatccaaattgatcttcatacagcataagcttcaaggtatgactttgatgctagaagaagcatcaggtggaggcaaatctgctgatatgatggcaaagttagagagcgagatgaaggctcttttggaggatgctaacaaaatcggtgaagctactgtgttttagataaag

SEQ ID NO: 12943 - DNA, 318 bp, Glycine max
  modified_base (87)..(87): a, c, g, t, unknown, or other
  modified_base (188)..(188): a, c, g, t, unknown, or other
aatctctctcctctttctttccctctctctttctcagactcataacaaccaaaagcacagaagtattaagtatgctgtatgccgcanagaaagagagattgcgcatacatttcagtgatttttgggtaattatcctcgtgatctgtgcacaatcgtctgctacttcatataccttcttccttctcccncacctcttttcctcctttctttgttcaacaccattcccataggagcaacccttttaaaagttttgggatttggagggtgcaaaagggccttaattttgtgaaaataatgctttaaaagcaatggggggac

SEQ ID NO: 12944 - DNA, 451 bp, Glycine max
  modified_base (395)..(395): a, c, g, t, unknown, or other
caccgttctctttctctctccaaaaattatacggtgggtttgaacttcgaactatgaagggcgaaatcatgcacagtaccatgcagttacagggtttttgaaaatctcaatggacactaccgctgcacgtgattgagtagaattagcctcctgctccaacttgcattgctgtttcaaatcttcaattttccttttttattttttactttcatgtaatgggtagtgttgaaatccccaattggctgaaagggttgcccctggctccggaatttcgccctacagacactgaatttgccgacccaattgcttatatttcgaagattgagaaggaagctgccaactttgggatttgtaagattatcccaccgtttcccaaaccttcaaaaaaatacgtnttttccaatttgaataggtcactcttgaagtgccctgattttggtccagataatag

SEQ ID NO: 12945 - DNA, 465 bp, Glycine max
cacagctgtttattttcttcctcttctcaactgtgttcgtgtgtatgcatttgagttgaaggccagactcaaggagctgaaagacaaaagaagaaacttggatttgaatcagccaaaatttgagttacacgtaattgcaaagataagatgagtgttatgtatagtcctgttctcaattactcagatgtggagcatcagctaaggaaaaaccaagacatggattcaagtattggacatccacaacaacactgtcaccaacccaattctggactattgaggtattgttctgctccaagctcattgctggcaagcctcattgacaacaccattcatggctgtgtcaacgaggaatcgttcacaagtgagaatcatcatcatcagcagcagcagcagcagcagcattatcttccatctacaagttcagaaatggagaccatgttatccaaattgctaccatccaacaat

SEQ ID NO: 12946 - DNA, 427 bp, Glycine max
  modified_base (304)..(304): a, c, g, t, unknown, or other
cccacgcgtccggacaataagagaattgtttgaatttattgtcgatgcatccattactgatgatgccgtggatagttacctagaagaggtgcaccaaaaaattttggcgagagatgtgtctgctgaggatgagattgcagactctgtatttgtgcagtcctatattccgaagacactagaggatgtgaagaatgctgaggaggatgtacaacggataacaagtgggaaggacaccaaagatttatactatcagaccattactggacttaaacatgctctgtcattaacacagacttcacagcanaaaacccatcagcagaaatcaagtcctacaaaggattcaccggttatttctgatgataaatctaaccttttagaggatgatgccgagggtcaatctgggcaggatgaagacgatgaaagtgat

SEQ ID NO: 12947 - DNA, 404 bp, Glycine max
  modified_base (359)..(359): a, c, g, t, unknown, or other
cccacgcgtccgattgtttacatttttttttcaaacttatccgatacaatcgagcaaatgcaacaaacgaaaccagagattcataattgcacgttctcttttgttgtctccagctcatagaatattacattaactctgattcattcagaatttcagattcaccttttcttcttctcttttttttttcctctgaaagctttttgcagaaagttgtgatttttccttgaaagatggcatctttgagcatgacccagatcagaactgggaattgtgcatctgggtttggcttgaattgtgctgggaaggttaaggttggtcccagcagagttgggtttaaggtgtttgcttcagagactcangctacagagcctgatcttagtgtcactgttaaatgggtgcacatg

SEQ ID NO: 12948 - DNA, 155 bp, Glycine max
aaaaaaaaaaaaaaaaaaaaaaaaaaaaatttaaaaaaaaaaaaaaaaaaaaaaaaagaaagaaaaaaaaggacgaccgttttaggggttccaagttttcttccgcttgcttgcaactgtattagcttttcttttagtgtctcctaaatttattt

SEQ ID NO: 12949 - DNA, 310 bp, Glycine max
gtttgtcaagggctatacctactaaaacttttggagtctttggctttcagttggtttctgttagttatttatcattccttcttagcagtgaattcgaaggggacttagatgtgctgtattttattttttttcaacttctagcaaatgagtttgaataaattgaagctagaaagaaaggttttcttggtaaaatggaggttggggattagtaaaaacccaaatgggaaaagaacatgagaaaagaacagaagaaaaacaaagtttactgcatagttattgtttatttgcctgttcagatttcgctcttggc

SEQ ID NO: 12950 - DNA, 258 bp, Glycine max
ctagatcgccttacaatcaaatgtatgctattagctccaatgctcatccaggtgattagctgcatttgacgcagggacaattaatattacaatcctgtgcctattcactcaaagatgctattgcaggactcttcttccgactccctttactagccgaaatgcaccttcaatctctatcacttcgacctcgtcatcaccaacaagctcatctgcttctaactcttactctcaataaacaagcggctcattgtaaacatc

SEQ ID NO: 12951 - DNA, 450 bp, Glycine max
cccacgcgtccgcacataattttcattttgaacttgaagaaagttttagtgtatgttttgttccttaaagaaacagaacatatcctgttctttctttctctgtttgcatttttgttcacttctttctttctttctttctttcttattatctagttaagcatgacaacatttatggacatgtacaacactactagtagcatcatgacaccggatttcttagaccagtgtagtgatcaagagctgatgaaagcacttgagccttttatgaaaagtgattcatctagcactacttcctcatcaataacaacatacccttcattctcttctttttcttcttctcccaacttgtcctcaacaacatggagcacccaattttgctcctcaagctaccaccaaaagggtccaactccaacccaagctagttccttcaaactgaaccaactcacccca

SEQ ID NO: 12952 - DNA, 251 bp, Glycine max
cccacgcgtccgcccacgcgtccggttgaatagaagtgtctggaatccaatccgaagtggtttggtgtttgcgcgttcactcctctctcctcccctcctgcaattacccaagcgatctctctctctctctctctctctctgtttcatatcatgaaacgctcaaacgacgacgtcgctgcccccgtccccgccttaaccttcaagccagtgttcctaaccaaagcccaacgcgagcaattggctcttcaacg

SEQ ID NO: 12953 - DNA, 434 bp, Glycine max
ctccttcgacttttactctttcctatatctctctctatctctctctacactcgagtgctggggcgacgcgtgtccctatctctctctagtcgacttctacgatcacctccatggggcattgctgcagcaaaaacatcgccgtcaacaacgagacgctccccgccgatcacgcccccaagccgccgcattacgcggcggcggtggcggcttctccgctgccgccgtcggggagctcggtctccgccgcaactcccgggaggaacacgccggcgcaatcgttttccatgagcccgttcccgagtcccctcccggcgggcatggcgccgtcgccggcgaggacgcctggaaggaagttccggtggccgctgccgccgccatcgccggcgaagccgatcatggcggcgttgcttcggcggcaggggaaggcgaagccg

SEQ ID NO: 12954 - DNA, 403 bp, Glycine max
ggaagatatgatatgagatatgagatatgagatgggagtctccattctcaccggtgtccatttctctctccctctgccacgcgccaccgccagaaagaggattttccatttctgccctccgattgcatgccgctcatccatggatcagtcttctggcctgaatctggaagatctgaaatgggaccattccttcgtcagagaattgcccggcgatccccgccgcgactcctttccccgtgaggttctgcatgcttgttacacccaagtctctccttctgttcaagtacacaatccccaacttgtagccttctcccaaccagatgccgacctacttgatctcgaccataaagaatttcagaggcccagattttccccttttcttctctggtgcccacaccttaat

SEQ ID NO: 12955 - DNA, 436 bp, Glycine max
caccattagggtttttcatttgaaatgtggaagggcaacaatggagcccattgagtccgaatcagttagttcctccgccaaagaccagcaactgggtgaaccttcttccactgttcaccccctcgatcacgatcctcaaccttcagatctcaatcgcgttacccctgttgatgatgcacttggtgaggagtttcagaacaagttggatttgaaggatgggggtgagagtgagaataatggttcgaacttggaagatgggggtgaaaaattgagcgaggataaaggttcaaacttggaagatgcgagtgaaaaattgggtgatgaaggtgctgctgccccagaatgtggcaagggagaagggtgtgatggtgatgttggtggtgttgctaatgattatggtgcaatcggtgatgatgcagttgctgctgaggatggt

SEQ ID NO: 12956 - DNA, 445 bp, Glycine max
gttggctaggaattatctcaacattgaatcacacaatctgtttggcagaatatgtgaattgctcaaggaaaccaaaatcaccccagctgaggttgcagaacatctgatgccaaagaatgcttttagggatgcagacctttacttgaagagtctgattcaagcacttgaattggcaaaggaagatgcaagaaagagccagcatgatcctcattggactgaaaatgattcagaagacaaagcaacagaaaagtcaacaaactacacatcaacttgatgcaaagtagagtcactaagataaagagtgtgtgaaaggagtgaatcatagtgggagggagtagacaagacaagcacactatatgctcattttgttgtttataacctcagaaaattggtaagctaacaaatatcctaaagtattggttgagtaaacagaagtatatttaat

SEQ ID NO: 12957 - DNA, 441 bp, Glycine max
tgcagcctcaatattgaacccttttgcaatttacagattgttcaggaatccaacgtctagtaatgctgggacattgttggcattatcagatttcttgtccttgacaaaaaatcagacttctctatcaggtgttgctatcattgttgaggtgtgtgcttccatgcctattcattctttatagtattcattctaccggctgttatttgaacatataattttttttgaagaattatgacaaatttttgtgagaatggcttaaggtcgcttaagttatttaataattcctatgattgatttcaccttggaataataggtgaaatagaaatccgaaatattaagactatcatgcattatttctatcaaattgttacaagacctggttctcacttgttcatgttggccatactttacttctaaatttctttataacttggccaaaaa

SEQ ID NO: 12958 - DNA, 411 bp, Glycine max
ggaataaacaatgccagaattgttgatcagttttttgataaatccaactggtgtattattcttgagaagacagtgtgaccaagaaaaccttgagggagtatagcaggccagagtgtagtataacaacttttacaacatttatcttgcaagttaactttgtttggcatctaatttactatcgattaaaaaaatgggcagctgcagaagttggacagaatgattatctggccatttcatcatccagaccaggctgcattcttctagaaatcctgatgtattgtttttttggggttcttttttaaatttttgcgaagcccaattttggttgtaacaatagggcacgaaggatgccactgttctgcagtgttggtattatagcttggcacactgtctgccctacaatgctgaata

SEQ ID NO: 12959 - DNA, 440 bp, Glycine max
gagaaaagctggatattacaatgaagagacctaattttcttctacaagaaatctggattttgaactgggccagaaagtctttgttttaattgtattttaccatatgataaattttcttttgggattggcttcaagaagtagtagattaatagtcactaaagcaaagtgtcattacattgaaagttattatgttttggtatctcatgttcagactttggtaaatatacaaagtgtagtttcagcagataagattgatcgtcatagtccatttctaatcgaattagttttagttcaatgttatggaatgacaccattctagtataggtcttttagtttaaagaatctgttaatgtaggtgccattagattgagtgatgatttgatatcctagtcaaatggtcagttttgaatccaagatgatgttatattcatgtctatcgg

SEQ ID NO: 12960 - DNA, 444 bp, Glycine max
tgcagcctcaatattgaacccttttgcaaaatacagattgttcaggaatccaagatctaagaatgctgggacattgttggcattatcagatttcttgtccttgacaaaaaatcagacttctctatcaggtgttgctatcattgttgaggtgtgtgcttccatgcctattcattctttatagtattcattctaccggctgttatttgaacatataattttttttgaagaattaggacaaatttttgtgagaatggcttagggtcgcttaagttatttaataattcctatgattgatttcaccttggaataataggggaaatagaaataagaaatattaagactatcatgcattatttctatcaaattgttacaagacctgtttctcacttgtttttgttggccatactttacttctaaatttctgtataacttggccaaaaatta

SEQ ID NO: 12961 - DNA, 102 bp, Glycine max
aaaaaaaaaaaaaaaaaaaaaaaaaaaaataaaaaaaaaaaaaaaaaaaaaaaaaaaaaaaggaaaaaaaaaaaaaaaaaaaaaaaaaaaaaaaaaaaataa

SEQ ID NO: 12962 - DNA, 443 bp, Glycine max
cccacgcgtccgggaaaaacttggtttccttctaatgcgaacctctcttcttctgcgctcgcacaattgtcttcaaggcagccacgatgtcttgtccctcactccatcttccatcagatcacaaagaaaccctaacccaaaccctagccccaacccttaccagactcgccggcggaagctccacgacggcgaccgctccggcatggtggtgaaaggcccctgcgcgaaccttgtcatgggccaagtcaagatcctcaagagaggcgagacgctcagccccgagaacccccgccgcgccaattctttcgacgacgacgacggtggtttcgattttgtattgggatccacgaaccggttgggccccgatccgagctccgttccggtccctgggttcctcgcgttgaggcggtgatgatgaattggttgattgattatgctgttgg

SEQ ID NO: 12963 - DNA, 440 bp, Glycine max
cacgcttaaggctttttaaggcctgaagctcttgtagcctcagcataataaaagagaggaagaattaaaaaaaaagaaaagaagaaaaaactgtggattttctttctgattctcctatgttctaaagatcaatcttacctttgattgatacaaatcttgcttcaatcgggtttcaggaagtcatatattctaggctgcaatactgagattcagagataaatggcatcattggtagccagtggtagcagtcaaatggctccttcagtttctgtccaagaaaaagggagtaggaataagagaaaattcagggctgatccacctttaggcgagccaaataagattattccttcccctcagcatgaaagcctcagcaatgaattctctgctgaaaagttcgaaataaccacaggtcatggacaagctagtacttctgacatgtg

SEQ ID NO: 12964 - DNA, 439 bp, Glycine max
  modified_base (430)..(430): a, c, g, t, unknown, or other
accatcttttaagtttttcttttttcgtttggttttgtcttttgtttgattcctccttgttgtgatgttctgttcttaccttttgtcaattttaaggattcggtagggtggcactgatagagactcagcaggattttcccattctcacggttgtaaagtatgacatggccgattattctgatccacagccaaataccaatcccaagaatgggtatgttttgagccctccttcgtctccaactccaactcatcctccaagtccttaaatggaagctcacgattagactttcaccacttgtttgtgtctttctgaacggttttgtaactggagtgtgtgatcgcttttagtttgacacgggattcatagaaataggattatggtaactgtgttgctgttaatttgtatccttctatagtttttcatgtgttntcagaatgc

SEQ ID NO: 12965 - DNA, 432 bp, Glycine max
cttgtcaataccaatcccaacaacttccactgctcccaaatcaccgacttcaccggctggaacttcaaacaagtcatcaaccttctcaaccgcaccggccacgcccgcttccgccgctctccaccccaagcccaagcccaagcccaaacccaaacccaaacccaaacaagtcttcatcctcaaccagaaacccaacaagggttcagtttagatttcgtgaagcccaccattctaaactcaaaacccagcaacaaagacgagactttgaccctctccaccacctcctacttctccttcacgtcctccgtcaccaacgactccagcgtatccgacggcaagatctgccctttcctcccttcctccggcgccaagccaactctatcctgcgtccactcgaaaaagtgccgtgacgctgccgacgcactcttcacc

SEQ ID NO: 12966 - DNA, 435 bp, Glycine max
cccacgcgtccgatttgcaaatggtggtgtaggtcttcatgaaattgattgaatgaccaaggggatgcaactgattcctgattgagaaattaagctactctttagttggaattggatgatgagtttggagttgatgctacgagaagataaacccatttgagcttgaaaacagttttttctggaactggtcatgcgttatttgagtggttgaatttgcagggttgagcgaactagttttcatctacaccaccctaagtgctttatttcaagtgaatctcttccttgatttttcttctgacttttaacctgcatcaaaatcattgttttaatcatcctattgtgtataattgcccctaggctgtttggtatccatataattctttttcctgcatacttgcttttctaggctggggatccattgcgattgatgaccca

SEQ ID NO: 12967 - DNA, 445 bp, Glycine max
cccacgcgtccgcccacgcgtccgcgttcagcattgtgcctacaagtgcaataagcggtgaaggaattcccgatttgttattactattgattcaatggacccaaaaaacaatggttgagaaacttacatacagtgaagaagtgcagtgcactgttttagaggtgaaggtagttgaaggccatggaactactattgatgttgttttagttaatggtgttcttcatgaaggagaacaaatagttgtctgcggaatgcagggtcctatagttaccacaattcgagctttattgacacctcatccgatgaaggaacttcgtgtcaagggaacatatcttcatcacaaagaaatcaaagctgcaatgggtataaaaatcactgctcaaggccttgaacatgccatcgctggcactggtttatatgtggtgaagcctgatgatgatttgga

SEQ ID NO: 12968 - DNA, 428 bp, Glycine max
gaaagatgaggccgattctgatgaaaggtcatgagaggccattgacgttcctgaaatacaacagggacggcgatctcctcttctcctgcgccaaggaccacaaccctaccgtctggtttgccgacaacggcgaacgcttgggcacttatcgcggccacaacggcgccgtttggacctgcgacgtctcaagagattcggctcgactcatcacgggaagtgccgatcagaccgccaagctatgggacgtgcaaagcggcctgcaattatacaccttcaacttcgattccccggccaggtccgtcgatttctctgtcggcgataagctcgccgttatcaccactgaccccttcatggagttgccctccgcaatccatgtcaaacgcatcgctaacgatccatcccaacagatcggggaatctgtgcttctc

SEQ ID NO: 12969 - DNA, 281 bp, Glycine max
gagaatcagatccctactctatatttatgtatattaatggatcacgtgatttttgtgcagagactaatttgctaccaagcttaagatcttttatgcctagtgccctatcttaaacttcatcaactgtatcttctcctttactgatgtggggtaaatcggattttgctgcatttcctataatgctataaattttctgatcgtatcgcttatccagcctcaacagaagaatgactacttgccatgcaacgaggacgacaataattcatctttgagaaccactt

SEQ ID NO: 12970 - DNA, 303 bp, Glycine max
acgcaatttcatcgaaccaatcaataaatcatatacacattttttggtgaattttggatgccgataaaaaatgccgtcgaagcagcagcaatcgaaagctgatttagcgatgaagcagaagattgtagaggacaaaaccttcggtctcaagaacaagaacaagagcaaaaatgttcagaagtatgtgcagaacctgaagcaatgcgtgcagcctaagcccgatgccgccaaagtcgatgccaagaaaaagaaggatgaagataatgccaatgaaaatgatctgaatgagttgctcaaaatcgc

SEQ ID NO: 12971 - DNA, 435 bp, Glycine max
cacacacaccaaccatctcattataaattgctaagtttttcaactcatcatcaattggcactttttgcttcagaatgaatgcttgaggttgaggagaaccagaaccagaagcatgaatcaacttggtggtgttagcgttatccttctggttctctcagtcttgtgtttccatgttagagcacagacttctgcaccttcttcaggagatgctgtctccaatttccagccaagccttgctgttgtcataggaatccttggtgtcatgttcttactgacattctttcttctcatgtatgcaaaattctgtcatcgccgccatggcggcgcttcggccgttggagactcagaaaatcaacttacttttgtgagatcaaggtctagattctcaggaattgacaagactgtcatagaatcactccccttcttcagattctc

SEQ ID NO: 12972 - DNA, 251 bp, Glycine max
cacacacacccacccaatctagtttaaatttttaccattccaacacatcattaagtgagacatcatttttcataaaacattccctaacaacaccaccaccccaatcacacatactaacctacactaagctcttataacagataccatcttcctcttacaacaatctgcacatcccttctcacatacttataatctttcatttaacgataccccttacaccatccagactatcactatcattgacaaacgaa

SEQ ID NO: 12973 - DNA, 418 bp, Glycine max
cccacgcgtccgttcactttcattttaaaatgggttatctatacttcttgagtttcctgtttgctttatgcctctcatctcctcacaatgttttgtttgctcaaaatttaccatacaaagttgtgaatctaggaaactggctggttgtcgaagggtggatgcaagaaccatctctctttgatggaattgtcagcaaagatctcttggatggaactcaagtgcaacttaagtctacaaagtttaacaagtatctcacttctgaaaatgggggtggagctgatgttgtagccaaccgtgactcagcttctggttgggaaacattcaagctgtggaggatcagtgactcatccttcaacttgggagtgttcaacaagaaatttgttgggctggaaaatcatgggggtggaaacaaaattga

SEQ ID NO: 12974 - DNA, 325 bp, Glycine max
gcagtactatgacaggaacatttacttaacaggacagaaaacatgcaaaatatatttaggaaagtctatgacacatttgacaaagtctaatggagatgaaaaaaaaccaaaaaaaaccacgaaatcagtggtcttccttcaaaacctcagggaagaaaattcccacgatgttctattgggataaacttcaattcgcttgacagagtagcaacaagttgccactaaccaataacagggtggtcccttcttttatgccgaactgcaccaagggattatatcaccccttatgaatttggaagggttcatactctaaaaggatttcttt

SEQ ID NO: 12975 - DNA, 300 bp, Glycine max
ctatatgctaatgagcctgctaatgcggattatccagttagcatgcctgttggtacagcgtagcgtgaactaacaagagatgctggtagtggtggcaatactaatcatgccagacctgctagcaatattgtaaacattgtaaagccagtaggctattcagcttcagtagccagtggaatgcatgatgttttagtaacctttgaggcttcaaagtctgatggaacataagtgatggttgacaacaagtatctaaaagcatttaatccacttcttctgatcaatttctatgagcagcatttt

SEQ ID NO: 12976 - DNA, 413 bp, Glycine max
aaccgctccacaccgcaccggatcatattctaatcctatcactcttacgctttaggtctggcgaccttgcaaattctctctttcttctaacctaaccctacatatcatgcccaattaacacaaatcgaatttaccccaaattgctaaccctaccgtagatcgatcatttatttcttcctgaattctggcatagggtggctgccatgcatcgcactcagtatggaccctacgtgcagattagggctgattatgtcgtgtctgcttgtagggctccaacgccgggagttgtgaatggaacctcagcgtcgacaataagtgtcacctgggtaagatgatcacacgcggctacttagcggagatctattgaggcactaatattcccacgaatgaagacgtcgcaaataaccttgaca

SEQ ID NO: 12977 - DNA, 443 bp, Glycine max
ctttctttcccattttttcattccactttatctcaacctcgatttttccattttgcgatgaactcactcttttcacgatcttatctacatataatttcaaaatttttaatttctcaattgattgtttgtgacggtgatcgatcggtcggcgcgatcgtacctgcatctattctcttccaggtttggagaatgagttctgtgcaaggaccagttgtgtgcccttctgtccgtgccaaacaagtagggttctgcagcattcctatgattggggcagtgaaaatgaacgttagacgcattagaagtgaattttggggtctcaatggcgccaaggctaaacccggttttctttcttgccgtataaacacacgaaagtacaagactgtgcattgtacttttaactcaccctccaatgacagtggaagtactgctgacaatttcaatga

SEQ ID NO: 12978 - DNA, 359 bp, Glycine max
cttcgtttaccattatgtcatttttctgtttctcaacctcgatttttccattcgcgcatgtgctaactctattcacgatcttatctacatataatctcaaaattcttaatttcccaattcattgttcgtaacagttatctatcgacctccccaatcgtacctacatctattctcttacacatttggatactgacttctgtacattgaccatttctttgcccttctcaccgagccacactatcaacattctgcacaattcctatgactagggcattgaaaatgatcgttccacgcattacaattcgaatcctattctctacaatggcgcccaggctaaacctcgattttctttcttgccg

SEQ ID NO: 12979 - DNA, 409 bp, Glycine max
gaaagagtctcgcctagccactactcctacttcatatcatatcattcacattcatctctcttcgtccatccatcatcgaagtaataacaacattcgcgcgctcttcgtattttccttcttcaatccgcgcgacaccaaaaccctagatccggcgcaatcatcgcgaggattttgaagacggtaattgttgttggaattggaggagagggtcccagaaggtggtggtaatgggtttcatggtggatataactgaatctgtttgtgcatatattacagggagagagaaagtttttgactttgagacaatattgctagagagaggaccggtggtgggcttggcaagaaatggatcctggtcgctatgctctgcatcaaggctgggataataacagcgctcttgagggataca

SEQ ID NO: 12980 - DNA, 415 bp, Glycine max
cccacgcgtccggaaaattcccagactctctcgcttcctcaaaatttcgccctctttcattcaattctcttctctgctcttctcttctgttcccaccttctgatccatcatccctcgttttctccgaacaatggctgctggtgtcactgtcaagtccgaggttctagaatcttctccccctgaaggagtatgttccaacacggaggaaaaccacctggttcagaccaatttgtctgatgggtcacccaacaagtctgtgccagcatctggacttaatgcagtgattcctagtgcaaatcagcttaccatcttctataatgggagtgtttgtgtctatgatggaatccctgcagagaaggtgcatgaaataatgcttattgctgctgctgctgccaagtctacttgaaatgaagaa

SEQ ID NO: 12981 - DNA, 394 bp, Glycine max
gtagcagcgaggcagagagagcagtaatccaagtaaagcgacgtcgtgaaggcgtggaagggaaattgggaatttgatctccgtcaatgtgatggctccgaatccgatgaagcaatctgcgaattccactacaactaccatcgctaataaggagattctggtccgtgaaacgatgcgtatcagtgccaatttggcctcccaccctcagccgccgccgacgtctcccatcgtcggaattatctgctgcgaagaaatggacgggcgtcgttggaagtacttggctgagagcgatggctttggcggattcaagaagaattcatttctccctgtcagcctcaactccaaccaccctcgcgaccctcttcacgaagtcctctctttcgttacatcctat

SEQ ID NO: 12982 - DNA, 348 bp, Glycine max
tttcatttcaagcacgactaaaaacacctttttcctctcacaccgacagtttcaagaagcaaggaggagaattcacataaatcatggtggagattcacgaagaaatcgacccctttgatcaagaagaacatgaagaggaagaaaccgactatgatcagctaaagaagcggatgcagaaggatcggatcctgctgcagcagatgaaggagaaacgccccatagaagaggcaggccaacaagaaaaacaagaagcatctaggcggaagaagatgtcaagagcacaagactctatcctcaagtacatggtgaggattatggatgtttgcaatgctcaaggttttgtgtatg

SEQ ID NO: 12983 - DNA, 409 bp, Glycine max
  modified_base (379)..(379): a, c, g, t, unknown, or other
cggacgcgtgggctcctaccccaagtgtccttacgttaaggaaggtgattacgacagcgcctgctcgatctgtctgtgcgagtacaaggattcggagatgctgaggatgatgccagagtgtccacactactttcacttgtgttgtctcgacccgtggctcaagcttaacgggtcatgcccagtttgccggaactctgccatgccaacgccgctgtcgacgccgttgcacgaggtcgtgccgctctcacagtacgccgatgccagggcgaggaggtgaattcgaattgtcttctacggtgcggctcgggttgctgggttcagtgggaaatgcatacaggacacaacttagatcagttatttacatgttgttgcatgctgntattatcccatcaaaattggagttgtacct

SEQ ID NO: 12984 - DNA, 293 bp, Glycine max
tattgccccaaaaatttcagaaggattgctcccactattttattggatgttccgcaagagtcttcgataatgggtgaggagatatttggtccattgcttcccatcatcacggtatgaataaaggcacatgaagaactgtttgtatgatgcatattttcttcttcaaatttcatttatgttctttgattgcttttccaatagtctaataggtacaatgttcacatagttttgcaacatgttttcaacctgcaagagtaattgatatgtgcttcttcaagtgtgataagagtcac

SEQ ID NO: 12985 - DNA, 286 bp, Glycine max
cccacgcgtgcgcccacacatactttcacttttcatatcttacttcactatttcgtcaaggttcattttatcctaaatcaacattacacactattacattaacgtcaagaatagttgtgtttttaactttttgcgtaatcaaaaatgactaatgaacacaacccatatccttatgtaagacgccatatcacacccacttttaataagtcacttgtctagaccaaagataaaactagctcaaccttttacaaaagctttacctatctgacagaaaatttatctctta

SEQ ID NO: 12986 - DNA, 369 bp, Glycine max
aaggagaagatgaacgtggatctggaatcattggcagaggcaacttctggggccataggatcactgatcagcaccactattctctacccacttgacacctgcaagaccaagtaccaggctgaggctcgttcctcaggtcgaataaaatacaggaatctcactgatgtattattggaggcaatatctaaccgtcaggtgctttcactttaccagggccttggaacaaagaatcttcaatccttcatttcacaatttgtctacttctatggatacagctattttaaaaggctgtatctagaaaaaagcggttataaatccattggaacaaaagcaaacttggttattgctgctgctgctggggcttgcaca

SEQ ID NO: 12987 - DNA, 412 bp, Glycine max
gtcacggcgtgagctcatctcatcgttgagtataataatggattcggacactgaagaagcaaaacccaagcatcccaagaaggagaagaaaaagaagaacaagaagaaagaggttgaggttgtccaacctcaatctgaacagattgaggttgaggtcgaggttgtccgtgagcaccccaataaaacacctcctgttgttggttatttcccttccggatttgatccggtcaagaatcatggcggcggtccctccaattttcaagtttaccggcacaggagcatgcccaagaggctggagcttgtggttcgccctccccggtcttcagtggaatttgttggaaccagttatgctggcgaggctgcggccagacaccgtgccaagtacgcacttggggttcttgacaaggaagcc

SEQ ID NO: 12988 - DNA, 438 bp, Glycine max
attttagagtctcagattgaaacggctatgcgttctcgcgtctctcacttcaaggaacagtctgactccttgacgttcgagggtgttcgtcgattgctcgagaaagacttgggattggaggagtatgctttggatgtgcacaagagatttatcaagcaatgcttgctcaagtgcttagaaggggtacgagatgatgatgggccaaagatatcagggaaagaacgggaaaaaggctcaagtatacaagagtcagaagaaccaacagaagaatgtgaatcaaaagatgcgaaggatctttgccctgaagatgaggagaagatggaagactctccagtcttaggtcttcttaaagaacaaaacagggctaaacttgaaaccaaggatgataaaggcaatggaaccaaagtagttccaagtgaggctctaattaagaaagct

SEQ ID NO: 12989 - DNA, 190 bp, Glycine max
atgacacacaatcagactcacacgtatatgacagctccaatgttgcactacagggaataggatgcatggatcacgctagcgcgtgctacaaccctgctcaagaacgagatgctatattggtagtcacctatgcgtacaccaaagccatctcccaatcggatgctgctcatgatgcatggatctgctgcta

SEQ ID NO: 12990 - DNA, 447 bp, Glycine max
cccacgcgtccgcccacgcgtccgtgcaaggtgcatcttctttttgttgttctcgcaaactttaataatctcataaattagcagaacgaagaggaacaaaaacaagaagaagaattggattcgaaaatcgtagcgtagcgttggtgcgattgaacgatacgatgggaagaggaaaattcaagagcaagcccactggtcgccgccagttctccaccccggaagatatgcttgctggaacctctaaccgtcctcgaacttttagacagaaagaagctgagcatgaagaggaagaacccgaggaagtatctggagatgaatctggagaagaatctgaagaagaaacttctgttagtatcttgcagtaattactaatatagatggatttcatttttttgcttttaagaaaggatttgtttctttctatggtctgaccctgtcaatatgaaa

SEQ ID NO: 12991 - DNA, 258 bp, Glycine max
ggcacgcggattttctgcccagcagtccctaaaatcacatggtatcagagcttcggctctgatcttgtggtgtcccgccatggaaaaaagtgctgcgactggagaaaattcctccaccacttctacgaattctggtggtaatgaaactgtatcatcccctatcatatctgattctctgtccataggtaccaatttacagcttgtgattcaaaagctgaatggtaaaaattatgttgaatgggctcaatctgtgaaact

SEQ ID NO: 12992 - DNA, 337 bp, Glycine max
gctaactaacatagtattaaaagctcaatacattggtacaaacaccgttgattaatattgaacgcaaaaaaaaaagggctaaacaaaacaacaatgacgtacaaaaaacaaaaaaaaacgaaacaaaaacaacaaaaaaaaaaaaaaaacagggaactcgatcaagacaacccagaattactacaccgacatgccagtgatgcagctgatcaacaccaacaccatcatcaataaaatcaacaccaacgtacagctatctgactcatgaaacccgcggatcaccaaacctactagaactccaaaacatccgcctttggccagatcgactcttctcaaa

SEQ ID NO: 12993 - DNA, 446 bp, Glycine max
tcgcccacgcgttcggagctctcaaaatctgcaaccctttgtgagaagattggttctatcaatggtgccattcttatattagtagggatgacaagcagcatatcagaagatcttctcactgttgagaaggctgataaaacattggagaatctggagaagtgtgagagtaatgtgcggcagatggccgaaaatggcagattacaacctcttctgacccagcttcttgaaggtccaccagaaaccaaactctccatggctacataccttggtgagctggttttaaacaatgatgttaaagtccttgttgctggaactgtgggttcatctctgatcaatataatgaaaagtggtaatatgcaatcaagagaagcagcactgatggcactaaatcagatatcatcatgttatccaagtgcgaagattttaatagaggctggaatactttc

SEQ ID NO: 12994 - DNA, 450 bp, Glycine max
accacgcgtccgctgagatagagctccagcacctttatcattcatctgcggtacgtgcctaggggatcctcgatacctatatcacatagaagacacatcaccccagaacccaaggattctgaataatacaactgcaattatgcttatcggctcagtccaaaacacgctacgagaaatgagttcgattcattagttaaacactctggctgttccggttcgtgctgtgtctgatcaggcgatatctgcgcaatgccattctcctctccgtgattacttcgacgttccaaaacggcgtcgttagtctgactactatcggttccgtctagcttgaagtccaaccgggaatacaggctcgcgtgcgaatggaccttacacggtaactgatatcacgacaaagcatcaagatttgcatgaggtcaagaccacgaccaccgttgaaaaagcttctgt

SEQ ID NO: 12995 - DNA, 413 bp, Glycine max
tttgtatttgacattagttggtatgagtggtgatatttggacacccatgagttacaaacacggcgaccaatacctatcatttctctctatctctctcttcacatcacatcaccaatcttatctgtcacttatctctctcaaagcgcctacatgaccacaccctagggtgtcaaaatcttctacttgtcgtatatactcgtatgttctggttaagacacttctgactattcatggttaaataataatatgaatataccttccataatttaaccaatgaaaaaaaaattcaaattatggctaatccggtttaccctaactatccatgggggattttgagcccaccggtatgtgccgctattcaggatttaaaacattgggtttgaatattttacaattgcctgactatttgggat

SEQ ID NO: 12996 - DNA, 250 bp, Glycine max
ctcacacactccagatcatactcacattactttgattctttcctgttactccacatgcgagtgcaatttccaaacttaatgagccacctatccatcctacctctttaataactaaacatttacttattttccccaatcacccctttcttttccatttataaaatcattctatcacttcatttaaacccttctctgtataaaccttacctttattactataactccatcttcttatttcccaaaaatgcta

SEQ ID NO: 12997 - DNA, 462 bp, Glycine max
tgaatctggtatagtgtagtagcattgcaacagcatacttgtagggtttataagctataaatggaagaagccttctgtgccataatacatttatatcttttcttttttaatttaattgcttgcacttttagtataatgttttatattgtcaaccaattagaaatcatagtgggtatgacttttaagtggtttttgttaaagtcaaaacactaaccatacacggaaattgtgattggatgatagtgtaaaacactttatagtgtcaatgcttgcactattttctcttcttttttctcctacgctgtacatactgctttgtcctggctattttttaacaagttctgaaagttcttaaacattttctcatgttttaggttgaaatagatggtcagatctttggtaaagggtttggattaacatgggaagaggctaaaatgcaggtatcctactttctttttatga

SEQ ID NO: 12998 - DNA, 352 bp, Glycine max
gaaagtcgaaagagagagaaacatcgagctgctgttctgttctagggttacacttgtttccagtgctggtaaagagtctccaatcttccaacactgcgtcactcgctttgttcccaattcagtccacaatttactttttccactttcccctaacctcccactcggaactcgtcgttacctatcgataatgaatttggggttacctcgctcacatccatcggtgtttactctgtaattaggaaccatgtcgaggcccatgttgcttgttatcttgctgattatacttataatcacctcacagttcgagtggaagcagcagcttgtggccgatgttgactctaaccccagcgtg

SEQ ID NO: 12999 - DNA, 436 bp, Glycine max
gtactgctctattagttcatactaagttctgaaaatgagttccaaggtgttgcttgtcctacttatgttcttggccactatacttctgatctcctctgaggttgcacccgatgatgcatacgagaattttgacaaaatagatgggaagcctagtgcagatggtgtagatgaaagcatgtattggcgtgtcggctatggtggcggatatggtggtggttatggaggtggacttggaggctatggatgtgggcgcggaggctactgagggggacgcaggtggatatggccgctgacgacgcggctatggtcacggtcgagctggctatggcgtccggcgtggtggcatgcgtcgtggctatagtcctaatgaacatcaccaggctagagttgatgctaacgatcacaactaacaaggcgactatataaagcttatcta

SEQ ID NO: 13000 - DNA, 459 bp, Glycine max
gggatacatactcctggcaatggctatgccaggttccctttacatagggtccgttgtggttggcatatgctacggggtgaggcttgccattactgtgccaactgcctcggagttattcggcctcaaatattatggtcttatatacaacattctcattcttaaccttccccttggctctttcctcttttctggtcttcttgctggcattctgtatgatatggaggcgactaccaccgtatgaggaggcaacacttgtattggagctcattgctacagactagtattcatcatcatggctgtagctcgtgttgttggcttcttcttagacattttattgtcattcagaactaagaaggtttacaacaagatctcctacagcaaaaactccaacaaaaactctctgaattcaagtatgcgatgatccaaaatggcccatataaagagggtatgacacttgcg

SEQ ID NO: 13001 - DNA, 251 bp, Glycine max
ccgatacatactcctggccaaggctatgcgattttgcgtatacgtatgttccgttattaaggggggatgcttctggggcagtttaacaaatactgtgccgacctcctctgaacaacgaagcctgaacaactaaggtcacagacacatcggaaccattattaaaacgtccattgactatatgatcttagatgtactattcgacaatatccaatactatatggatgcgactaccaccgaatgatgaggcacca

SEQ ID NO: 13002 - DNA, 450 bp, Glycine max
gatctagtgaaattgttctcaaagcaatgggacgtgcaataaataagaccgtaatgattgctgaactgatcaagagaaggattgttggtctgcatcaaaacacccaaattggatcaactgatataactgacacatgggaaccactagaagaaggccttcttccgtatggatttttgtttcttctatgctaccttatcaaatactaaatttctgcgtttgggagtgattcctttggttttgcgttgtacttgcccaatttggagactactcgccatgtttcaatgatcacaattaccttgtcaaagaaagaattggatacgtcatccgcgggataccaacatactgttccagttgatcaagtaaaacctttaaatgaatatgaagaggaaggaagtgagttgataagttattcttttaatgcttcaagactggattttgtagcatgttgac

SEQ ID NO: 13003 - DNA, 278 bp, Glycine max
agatgataagccttctgacaaggtgcaacgatattgtgaataacctgacgagtttattaggggacgtgccctatcatccactttgataaatatggcaccgtactcaactgtagaccgaatccaatacaagaaaaaatgcgggctagttggattgtgaatgacttgctcgaggaaatgcatgaacctagaaatataatccttcaatagccgtttattttgagatttttgtatcttcacaatgtaaatgtactaccatattgatagtggcgtctcattta

SEQ ID NO: 13004 - DNA, 187 bp, Glycine max
cccacgcgtccgaaaaaaaaaaaacaaaagatctataaaaaaaataaaagggaaaaaccaacgagaaccgatcaaaaacacgcaaagaccaacccccaaaaaacaacccaagacggaacaacagaaagaaccagacacagagcaaccaactagaagaaggccgggtcacatgcgagacgaccagaac

SEQ ID NO: 13005 - DNA, 409 bp, Glycine max
gtcccgtggatctacgaaacccacataaaccctctctccctcccaacgaccgaggaagccatcaggatcatcgcaacgtgaaagtgagagtgagagtgaaagagatctgattgtgttgtgaatcaatctcagacacgacgctatgagaagggtaccttccattctcttcagaaccctcacgtcccctcgcgtcgccacctctttctccgtccccaaccgccttctccaggccgcgctctaccgcagcgccgccgcccgctctcaccgccgccgcttctcctcgctcctcggtcctctcgccgccgcgtctctcggcgttgctggggctctggtctctcaggaagtcctcgccaaggagcccccgccgccagaggctctcccgaacgacgtcgttctttaccagttcgag

SEQ ID NO: 13006 - DNA, 464 bp, Glycine max
gctacagcttctgaccagttgtcaaagtcaaaagaatttgattcagctgttccagattacattcgtaatccttcaagatacacccgttacacttttgatgattctccaagtgacatggatgacaaatcaaataaggaagcatgcatgagcttccttttgcagttgaaggggtcaaatgctgccaagagaactggacctcaagaagatgaagctttggaagatcttccatcagtaacatttatatcgaagaagaaatctggtgatgccaatatgtgcgacagcgagatggtgtcaaagccgaagcttgatgctggcacggaggccatgaataaaagagccttccctgttggcatagctgccagtgactctgaaaacagtgacgcttgtgcaatggaggaagatgaaccagaagttaaagacattaaaaagagctcacagaaggtgaaccgccagtacaggaagaa

SEQ ID NO: 13007 - DNA, 442 bp, Glycine max
ctgtaacaccctttccttttcatttattgcctcaggagtgtgagcaaacgaggcagagaaaggcaccgcaacacaaaagcaaccaattcgctctctctctctgatttcctattcctttatatcagtttcctcaccttctcactttttgaacgagacacagtgaggaaactgaacccttttgtttgatttttcagctgaaaattcagaccaatatatattttgagtatttattttcctttgatttcgtggaaagttattatcacagaatctgagggttttgtagacagaacttcaggtttaacactgaagaatgttcccaagaacagctgcaagtctgcatcacacaggctctttaaggacaaggctaagaaccgtgtggatgacttgcatctgatgttcctggatctgcagtttgctacgaaggatagccgtacggttgatg

SEQ ID NO: 13008 - DNA, 422 bp, Glycine max
acggctggtgcgccttggcttgccctatattggaccgcctgccgtggatggtgctcagtacttacggctgactgtcgcaatagatatgtcaggagcgttaatcggggatcaaccgtcggggacacgatgctaacctggacctactatcaatagcagagacagactactgggaagctgcacaccatacccaactggtaagcattccaaatgacacacttaggggagggccttaagaatgagcacatgttcacattatccacctgtgtgatccaagtgcttgcttagatctgattcatgaatctaagagtcatgagcgacagcatacgtgtagcgacttgggattaatacttagctttcacgtctgtggagataccgaatgacgatactcggtataagtgttccccacccattcgcgatgcata

SEQ ID NO: 13009 - DNA, 445 bp, Glycine max
agacactttaaatttgcctgactattaaactatacagccaacataaaacgggtcaatataccgacatggatctagttttattgtcataagagggtacgtacttgctatatagaatatgttcttcaatgtctggaatggcaattttttcctctcaggttctttgcgatgtactacagtataggtttgattatcagctgatatgcttgtactactatttttaaaaaaattcttccttgttttcactttgctgtctactttaagggatttgaaaaaaaaaatggtgaaaacagcaaattctcgcttctccatatgctttacaaactcttagaaacaagaaacaaattgaaaataaagtggacactggacaatggactttataattaatagcaaacacatatcagttaaaatgatctcaaaaagctagcactgattgcatgtataaatg

SEQ ID NO: 13010 - DNA, 360 bp, Glycine max
ctattttccctttctctgcatccctgttggcggagctctaagccatctcttgtctctctcgagaggggaaagagagagagagagagagagtgtttcggtgtcacaacgcaaacccagaaagtagcaaatgccaaatggtagtgcggtattagcattgtagcgtagtgttagagagagaaagagaagaaagaaaaaaggcactaccgtcaccacaaccaactaggcctcggtcggaaagttgctacaaaaaaggtttcgccttctgggtcactctttacttttctgggatctccatttctgaactaaagtctgaatttttgaaggaatttgatcgtggggtttctggtgcttaattctggg

SEQ ID NO: 13011 - DNA, 433 bp, Glycine max
cgtacgacccgtacctctctctctctctgactctccctcaccgaaccctagtactaacctgagagagcgctttagggaccgatacgccgctcctgtactcgctccccttcttcttcaagcattctgtcaggcgctacctagatcaatgtcccacaccagatctagatcactggtagagcgcagaacacattaataatggcacaagctgcccttagagctgctacgccaggcgataccagataacgtcaacagaagctacagagaattctatacggctttaatatagcccacacagcatgctgaacaggcagcatccgaagcccatatctcagctgtattcaaagctatcacctttacaagaccctcagctgaacccgaacactgtattcactctcttgacaggctaataccatattcaccgaactcggcacta

SEQ ID NO: 13012 - DNA, 405 bp, Glycine max
acgggttctggaagacggcagagctgccgccattttgcgggaagaggaggctctgtacctgcggtgctgcttttcttgcggagactctaggaactatccgagctccactccccacaacatactcaaaggaacggagagaaccgggacccccctgcggggacccggaactgatctgacaggatggcatctgatgactttgacatagtgattgaagccatgctggaaacctcctattaaaaagaagaagattaaccaccaaagaaaaaagttaaaaaggattatcctagcaataccaccagcagcaccagcaacagtggcaatgagaccagtggaagcagcaccatcggggagacaagcaagaagaagaggagtcggagccataataaaagcaaggatagaaagccc

SEQ ID NO: 13013 - DNA, 467 bp, Glycine max
cttagcaatagctacccctatcacaacaatactctattaggcaaaaacaccaaatgggagagggaaaagagcagcctaagaatgaaaccgagaagaagcccgaggaggccgtcgcagcccccaagaaagacgacggacccatccctgtcgtttacaaactcgacttgcattgcgagggatgcgtcaagaagatcaaacgcacatgtcgccacttccaaggtgtggaaaccgttaaggcagatctatcgtcgaacaaagtgactgttaccggcaaattggatgccgagaagctgcgagataagatcgccgagagaaccaagaagaaggttgacatcatctcagctccagccaaaaaagaagccgccgccacggaaaatccaccggagaagaaggttgaagagaagaaacctgaagagaaaaaaccagaagaaaaacctaaagagagtatggtggttatgaagatcaaa

SEQ ID NO: 13014 - DNA, 320 bp, Glycine max
acgggctgctgcaagaaaaggtatggctagtgttgtcaacaagaccaaaacgcgtgactgacaacgggcctctgatcaccagctgatacacagacatacactaacaagggctaacacgaatcgcgccacgatacacatcatgcagctactgcgcatgactatcaaaccttacttccaagtgaacaagcccatcatagtgcatttacactgtgcccattccgaaactgcactgcgctaggtatccactattaatgatatcgactcaactgctgcactcactctcaaagacaagaccgccgataaaaccaagaagtaaggcc

SEQ ID NO: 13015 - DNA, 361 bp, Glycine max
gccagctctcagcctcacttacacactgagacaagatcatctaaaaaatgctcagatgagactgtatcaacaagaaatgtggagacatcaaccttgtcagttaaggataaggaggagaaggcaaaaagatgcgagtttgttcaagggctgttgctgtccaccatacttgatgataatttatgaaggaaattcatggaggtggctgcttcagtagtgggctaattcacacgcgatacctgctatgtatgatttgcctgatgaaattgtttatgtatttgatcagagtggaataataagtagtagaaaatgaatgtaatttatgttatatgtgaactgatgcttttagttcaagagtttcatc

SEQ ID NO: 13016 - DNA, 288 bp, Glycine max
aaaacacctttttctttacaacggcagtttcaagaagccagggggagaattcacataaatgatggtggagattcacggagaaatcgacccctttgatcaagaagaacatgaagaggaagaaaccgactatgatcagctaaagaagcggatgcagaaagatcggatcctgctgcagcagatgaaggagaaacgccccaaagaagaggcaggccaacaagaaaaacaagaagcatctaggcggaagaagatgtcaagagcacaagactctatcctcaagtacatggggaa

SEQ ID NO: 13017 - DNA, 454 bp, Glycine max
aatccttccgaaccaacacatataaatccagcactctcttcttcttcttgtgctctccgcggggtcaattgaacctcacaaaaccctctttctctctctctagatctggtcaaatcccgaatcatttccgctccaatttcaatttccccgaacaagagcaaaccctaaccctttctctctgtatgatacctgagtatttccctcacgcgtgtagcattcgtgccgatttgtaaattctttcggcagtttaggttagaatttgtttttgctaagattttagggtattgaatcggtgagatgaatcacaacaacaacaatagagcgaggtaccctcccgggatggggcttgagcgcggcggtttcaatccgaacccgagccagaacccgaacttgaaccagaacccgagcctgaaccagaatcatcacgcgttccaagctcggccaccgtaccatc

SEQ ID NO: 13018 - DNA, 452 bp, Glycine max
  modified_base (425)..(425): a, c, g, t, unknown, or other
gggcaatagtctcagaaatgcggaaagccacaggggctaacataagagtaattgggaatgatcaggttccaatgtgtgtatcagataatgaccaattggtacagatatcaggagtgttttcaaatgttcaagctgcaatacataatgcaactggtagactgcgagatcatctttttgtcagtacgcaaaacagtggtggagcaaggagcctttcctctgttctagctggaggccaaccaactcttgctatttctcatagtctcaatagacattctttgccaggattacaggcaccacagacagtggctgggataaattccagaggcaccaatggtgttagtcggggattgatttctcgaaaaggtggcttagaacttatcagtgggagtaaaactgccattgttactaatacaactgtgcaaatngtggttcctgatgatgttattggctct

SEQ ID NO: 13019 - DNA, 392 bp, Glycine max
tgtaaaatgaagagaactagagatttcagtttggatgggtttgttgaaccgttacataattgcgtatgtattaacgattgctgtggactttcaaaaaaaaaaaaagaaaaaaaaaaaaaaaaaaaaaaaaaaaacataatactagaaaaaaaaataaagactaacaaaatgctatacaataattcatattatcagtatatctggcaagaagttaatgttaaataactcgtacaacaatgacacaaatggaaaaagaagttttttgcgtatttgaatactgcttggaaataactaagaatcaactttttgaaaaataacaaattggccctaaccgaaaagccataaaaaaaaaatgggcaaccaaaatagaaaaatgagacaacaacctaaaa

SEQ ID NO: 13020 - DNA, 429 bp, Glycine max
  modified_base (29)..(29): a, c, g, t, unknown, or other
  modified_base (44)..(44): a, c, g, t, unknown, or other
gataggcggaagcaccaatcagcaacagnggcgagggaggcaangaacgggggccgaaagcagggcatggatcaacacctgatattgacggaaagaatttggcaaatccaactgctttactgctaagcggtgttacaatgttgcaccatttgaacctccatgacaaagcacaacagattcaaaaagccatactgaacacaattgcagaacggaagtaccgaacagctgacctcggtggcacttcaaagacaactgaattcacaaaggcaattattgatcatccttagactttggctttggagtcagcaagaaactctagcttatgatttcgaatatcagtcaattgtctatgtattaacccaattaatccgaaagagtgggattaccttagctcaaaagaaaacttacccatgtgtgtgacattttaca

SEQ ID NO: 13021 - DNA, 424 bp, Glycine max
aaaaaaaaaaaaaaaaaatataaaaaaaaaaaatttaaaaaaaaaaaaaacaagaaaaaaaaaaaggaaacactaaaaatactgattttcactgatatattatgcaaggctccgatttaaaagctttctgttatatgcataatactttacttatttgtacgactcacaaatgctttgcattttttccccttctcagcatatctggctcgaagttattgttaaataacttgtacatcaatgacactcatgcatctagaagttctctgcgttcttaatttctgcttgccaatacactcctaatcaactttttgcacacccccttgacctatgcattaagcccttgaactttgcttaatactctccccatttcttgttcgctctcaaactccctatttcacttgcctttccctctttacccttcctt

SEQ ID NO: 13022 - DNA, 234 bp, Glycine max
cccacgcgtgcgctgacgcgtccggccacacgtccgatcacgcattcgggtcgatatgccctgccgtcaccagcaagatcgcgtattcgagatggactacgaaaacccttgtctctgaaatcgacagccgaatagtgaagtgtactaagcgaagccattgcaggcttgagaacgggcatgaaagccgaagggacaaggaatggttagaaggcatggacggctgacattatctcc

SEQ ID NO: 13023 - DNA, 318 bp, Glycine max
acgcagggactgtgatatacccacatccccggatctaggtgatcgcggtgcatgaacgaggtgtgccttcgcgggatccatgcgttgaggcccatgaacgccccgccgccagcatgccgtgggacgcgcggcggcctgggggtggcgcggacggcgggcccgaggcctcgggcgcggcgcgctcgcgagcgcagaagcagtgccgcaagtcgtcgttcgccttctaccaggcggtgcgcgacctgctacccgtgtggctgctggaggatatgcgcgccagcgaggccttccactgggacgagcgcgggcgcgcccgcg

SEQ ID NO: 13024 - DNA, 451 bp, Glycine max
atttttcttttatgcgagggcaaggcttggtgcaatggtaaattgttgccttgtggtttggaggtcatgggctcaaatcctggaaataacctctgcttgtaggggccttgataagggttttgtggatactggttattatctcaaatcaattacaatatatccaataaaatcctgtggaggtttcagtgcaagcagttggcctcttagcaacaatggcttgacacatgatcgcgagtggattctcaaaagcctaactggtgaaatacttacacagaaaaaggttcctgaaatgggctttataagcacctttatagacctcagtcaaggaatgttgtttgtagaatctccacgttgtgaagaaagattgcaaattcggcttgagtcagatgtttatggtgttatagaggagattgaactatatggacagaggtacgaagtatatagttatgac

SEQ ID NO: 13025 - DNA, 440 bp, Glycine max
ggaaaaatggttctgtcggatgccgttaattttgctcggaatttcgcagttatggtcagaggtcgtggccctgacccagaagggttgaagatgagaaatcacgcttttcatcaataccgttctggtgaaacaaccctttcagcttcgggggtacttgtacctgatactctttgtgattctcaagtagctacgcgtcttaatggtgataactgtgaggatagggtattggttgtaacggttgcttcagttgttgagccttttctgtcacctcaacagagagacaatattcctcagggtaggccagacttttgccggtgttcagattgatgttatgaccgaagaaaccaatgaaaaatccaatcggggaactcctttgtggcttttggcacagcttttgtcattagttgatattcctgcttcatcgaattgtctccagtcac

SEQ ID NO: 13026 - DNA, 338 bp, Glycine max
cttagtcgaacaaggtgcgatgctgagcaccatggttggctcctatgaaaaatgctgctaggacccgggcaagttacgaagtgagaagtggatattgtctgtgtccatgtctatgacacggtgattgacacgattatagggaaatttacatggaatgaaacaggctatgaacagttgcaaacaatgggaattggactgtgtattgcagtcctgatcatatcagcatccactatagtggctaatgtacgtgtgcttgttccgaatcagcatggcattgatgatgaacctgttgatgaaccacttaatatactatggaatatatctcagcatttcttata

SEQ ID NO: 13027 - DNA, 188 bp, Glycine max
cccacgcgtccgagttattctactaaaacctgagcattagacatataagtcggctgtgtggattttcaggggaaaaatgccggattgcatagacagcgttctgatttgagtgtacgacaagacccccctatatcatttgggttaatattacataattatgactttgctaaacaaataaataaacaaat

SEQ ID NO: 13028 - DNA, 324 bp, Glycine max
tgtgatctccacgcgttcggcagcaccttttgtccctctcctccttgccaccacactttttaaaatgttgttgttggcagactcagtcacccagccttggcggtgggtaactttaataacacccaccacaaagaggtaattttgatgatttggaattggtcatggccaaagtcagaggtggacctctcttccccgcggcgcacgttagcccccctcccaagcggtgctcccctcctcattcacccacgtcacttattcagccgcactttaacatgatcaacaagttcaccaccacaccctaacctaaaaaccctttcttttctc

SEQ ID NO: 13029 - DNA, 341 bp, Glycine max
acacgacacactactctaaactttacctactgcactttttatcacgcatcctgttcctaataacgaattggttcttaattacagtccagatatcgattcttccaagttgcctgaaccacctgatgcgtatctgcttctggatttgtatattccttcatatacactacgcctctgagggcccatgattcaggtgctttaattcaacatattcaagggttcctccgtgggcatgcatttcgcgtgcaatcactttcaggaatggatttagatcaatgtgtatctataaagcacgcaattcaggcggaatagattgtatggaaggttcaatcttgcatcatgcg

SEQ ID NO: 13030 - DNA, 383 bp, Glycine max
caggaatcggttacgctctggtagcactaggaccctctctctccctcttcgtttccgtcagttgcaaaaaacccttcctcagtctcacagttctctccagtacgttgttgtggcttattagtttgattgtgctgtctggaatatggagggggattttgcctctcatcacaacagcttcgtggccttttggaatactcattttctcatctgttgcttttcaagaagccctcagacttttcttctggaaaatatataagaggttagaagacatgttagatgcctttgctgacagagtatcaaaaccacatcttcacctgacagataagatgctgattgctctggctggtgggttgggtcatggtgttgcccatgctgtgttcttc

SEQ ID NO: 13031 - DNA, 456 bp, Glycine max
aaattctatatatagcttataagctctatgacttgtgcctgtgttagacttcaacattggaggtagaggcttacccagctttagatgaattgacctctcagcttagcacactcaatcttgaacgtgttagacagatcaagagtcgtttggttgaactctccggtcgtgtgcagaaggtatgtaatattcatcgcccaacacctgtcaccatgcacatatgattttacataagaattttggaaaataaatgaaatgaatacactctatgataatattctgtagtactcagcagtgttcaaattgatttgagcattagcaactaaccgtaccctttcattcttcttacatggatgccaacatgtagcaacactaaacaagtctttaagctgttcaatcgatcttaaagaacttaattgtaacattttgcctttcaccgtggctatgtgcaacttctgg

SEQ ID NO: 13032 - DNA, 257 bp, Glycine max
cccacgcgtccgctccgaaggattcaagttcagatggattcaatgtgccctccccaaaaggacatgactatgttaatgatacactcttttttagtattttttaattcttttgcgacgaagcgtaagttagctttttatattccgtcatccacaggacaaatttcgatgtattagtatattgatactatacttatacgataagcgtggtaaattccaatttaccagcgaacataatatttctagcaaatgatataaat

SEQ ID NO: 13033 - DNA, 165 bp, Glycine max
ggcagtcgtaccaagaagtccacattacgatatttcatcgtcgtgcaagtccactggcggcgaggatttaacacttcgggcaattctaacacatgtcttctcgacttctgactctactgtatcttctgaatctgcatccactaccagctgtcatattgtaagccc

SEQ ID NO: 13034 - DNA, 438 bp, Glycine max
gaaaagaatgtagaaaatatatagttatcagttacaactttcagcttacagaaattgctggtacttgttggtgttgattttttagtgagatcagagtaaaactccaagtaattagcaaatagaaaagtacaacattataggagcaactaagattaaaccaagattaaaccagtagttgtaaaagtttacactaacagtgaatcaagattaaaccagtagttgtaaaagtttgatctatgattgtaagtatgtttattttaactaaggtttctctagcatgaaacttgaaatttagttctgatgcttccgtggtcattatcaagttttagatctaatatctgatggtgacaccccgagagctctccctcttcataaaaaaccttatattgtgcatgtataggaagatttattttatttttttcataaaaaaagaagagg

SEQ ID NO: 13035 - DNA, 430 bp, Glycine max
caactacatcgcttttgcttcccctgaactggcgtaaaccaaagccctctggctttggggcttcgctagggttcggggattcaccatttccaatgatcttcttctctcggttctacacttctcaacttcagagggaaattcaatgcagctgtttctgaggagtttcaagtgatttctgtggttctggttcggtttattgaggatcttgagggggcttttgcagaaggctgtgactctgtgacaatgccttctacagaaaatcagggcttttcgttgtccttttcctcgtttggccgttccatatttggtgtcgggcaggagcaggttcattctgtggaagcaagtaatgaatctgattcctgtaattatatacagctcgggtcattccaaaagcgtgttaccgatcgatttcaagacctttctgtagcta

SEQ ID NO: 13036 - DNA, 350 bp, Glycine max
gcggaagcacgactagaatcgaatataataggttagttagggtaccgtcacaattacgaagagggttgtactaagcctcgaaatttcggttgcagagttggtatcggattgtttcaagtgttgcaccgaagactccaatgatgccactaccaagattacgtactctggagctttgctggaagtctgcatgaggaaacttgttttctatcctgaagttgttggctctattgaagatgaaaaagatcaatttccatcagtaaagggttcaatatgtttttaactcttcaccaaagctaattatgctggatgaggtgggtcagcaaaaggaaacaatcagaattgataatggg

SEQ ID NO: 13037 - DNA, 198 bp, Glycine max
acggttcacacactaagttctgaaaaatgagttccaaagtttttcttattctacttatgttcatgaccactatacttttgagctcctctgaggttgcacccgatgatgcataccagaattttgacaaaacagatgggaagcgtagtgcaaatggggtagatgaaagcaaatattggcgtggtggctatggcgactatg

SEQ ID NO: 13038 - DNA, 308 bp, Glycine max
cccacgcgtccggttagttcacacactaagttctgaaaaatgagttccaaagttcttctggttctgctcatgttcatggccactatacttatgatctactctgaggttgcacccgatgatgcataccataattttgacaaaacagatgggaagcgtattgcaaatggggtagatgaaagcaaatattggcgtggtggctatggcgactatggtggttggcgtggtggtggtagtcctggtggctattgaggctggcatggtggctatggtggtggtcattgtggctattgtggctggcgttgtatcta

SEQ ID NO: 13039 - DNA, 429 bp, Glycine max
attttaggttcttggatatcaaaagcttcacgacacaaaagggaaactcaaatagaacataatgttttgaggttccaacaaccaagtttggatcatcattacaaatgcatcagaggagggtctacatatcaagaatgcaatagaaaatttgttgtgaaggcaatctctaaacaacctcttggttttgaagctcatgcttccaatcctaagaacattttggactctgtcaaaaatgtattgtctgctttctactggttttcctatccatacacaatgattggcataacattatgcgcattttcttcatctcttctcgcggtggaaaaattatcagatatatctttatcatttttaattggcgtgttacaaggggtgtgctgcctcaattgtttattgaaatttatctttgtggtgtgaatcaactgtatg

SEQ ID NO: 13040 - DNA, 268 bp, Glycine max
tcggagttctccccggcgggatacagtcccgttttcccttctttatcctgttttcctaaaagggtgatgttcctaatcgaacgggccttgagctctgacccctacgttctggaactcgtctaaaccctagacgactccttcccattctatccctccaccccactccctctccagaaccttcgcctctcctccttccaatcccttctcttcactccatggcccttcctactcgacgagcccttccgcttcacctacctatgcttcattc

SEQ ID NO: 13041 - DNA, 213 bp, Glycine max
accacgcgtgcggccacgcgtacgctcacacctaactatgtattacggagcctcagggcagaatggtgtgaagccaatggcatatagccaccaaaacgacctaacgattcacaacctaataaaataacatcaagctactcttctggttagcaaaataagattgaaaggcttctacaaaagctcacatgagtgagtactgaagaccagagatca

SEQ ID NO: 13042 - DNA, 220 bp, Glycine max
gaatgtattagctgcggatgtataatgtactttgcgatgtaactatattagctgcattggacgttgggatgaagaatgtgagagattagcccctgaatcttcagaataggtcacaatgcattggaaaactcttgactttgtgcactcaaattgcgtggttatatgattttatcggtttgtttcactccgcaaaaaagaagaaaaaaaaagaacatataat

SEQ ID NO: 13043 - DNA, 375 bp, Glycine max
gcttcctactgttcaagaaggctccgaggcatgagatggcaaattcgcccgtgactttatgtaatgttggaaaccgaacatgaaagattgtttgtgacaagttgcctacaaaagaggctgcagcaacagccatagtagcttcatgaagaatgcattgattggtgatgatttgtaagctccaatatagatgcaaacttagacaagtggggtggatttgttaattcatgtttcttgttgcttacatttttaattttcctcttttgttttttgagctgcttgtagagttggctttagagatttgttacatatcgggaagccatggtgtactttgaagcaagattgtatgtatgggtagagaacctttactgatatata

SEQ ID NO: 13044 - DNA, 205 bp, Glycine max
acggtcggccttaacgtacttccgtctttgaatgtatcttatcatgactgatcaatccacaggggtggatactatacaatagtctcccacagcattacttacacagcatgtatataaaacaacttataaaacatactcatcatcatcacaagatgatgatgaatactattaaccctagaactctaaaatccaataacattttcca

SEQ ID NO: 13045 - DNA, 255 bp, Glycine max
cccacgcgtccggcgataatgcgctggcgaagggatccaaggaggaagtgctgcggtggtgatggtgtgggtggtgtcagagaaagaagggtgatcggagaccagtgcgagaagctcggaggagagagaaaaaagaaaaataatctcatattttttattttatctgatgtaaaaaatttcatcatatcttaatcaattttgaccgtttgattttctaattttaaaattgaacggatgcgatgcattttaaaattc

SEQ ID NO: 13046 - DNA, 368 bp, Glycine max
  modified_base (324)..(324): a, c, g, t, unknown, or other
cagtctagttgatgtttcgagtccaaacagacgcgtggagagcaatcctcaactttgggggaatggtgctgggaaaggtcatgtcaggtctttagttagaaatttatggtcaactatagcgggacgtggtagtttgaagagtcatattgttcactgtcaggttcttcaagcctgagatccaaactcctctgatgataatcttggttatacagttagggaaattgttggtattttgggaaaatcaaattgaaacaggtttatccactttcctgtgtgggaaagagattgtgcttcattgtaaagaagaggttaattgtatgattntggctatagaatgaggtcattcctttacaattatgaataggggg

SEQ ID NO: 13047 - DNA, 367 bp, Glycine max
  modified_base (252)..(252): a, c, g, t, unknown, or other
cttgctgggtttgctgggtttgccgtgtttgcgttctttggtccatcggagaagaccctggtcggttttagcttcactctgtgctctctctttatctgtcaacgatccaagtctacttctgaagcatctttttactgtcacttgacatggcatcaagacaccgtgttcacagagaacccttgaatgctcgaaggggttacccaccggaagggccatatgctcgggtggctcccatgcctcgaccactgcctnctattcctcctcatccgtctgtgttggaagaggaacttgaatttcagcatgccgagatgcgaaagctcgtggcagacaacatgagggtgattgatgaccgaatggcgttgcagcg

SEQ ID NO: 13048 - DNA, 381 bp, Glycine max
gcggctcttgaatattctcagcttcagcaaaactactagaaaacccatgtgatcaacttttggaggtgcgaggtaccatgccatgacatttggaattatgctgattttctggtgctcctaagttaatgcaagcagggatttggagtacctcttcaaattagccatttagatgaatgaataattttgcttttagaatttattgatagtaaaacttatctaagaactgtaaaaggttgagatatattcacacaatggttagtgacaatgacgtctacaatcaggggaaactagcatggtatgaatattggtgatagtttaactgagcatttatctgtatacttttacaaaacccaattattttcaatatatagtttaaaacag

SEQ ID NO: 13049 - DNA, 333 bp, Glycine max
gcatgcaaacactaccatttcctgatttcgttataacagctacacctctaagagtaatcttggtgcttaaggatactattggaagaccttttataattagagtgacatctctgaacttattaatctgatacatctacaccatgaaatgacacgacgatcatgagtttaattttacctgcaaactctgctatagtgtgttactcctcttgctgaacagtatatcgtgccatagcctatatagaggtctacatcagcttgggtccacataactccagctaagtttaagagctttctaataacaaaaccgatgagcactaatactaccctgatcga

SEQ ID NO: 13050 - DNA, 303 bp, Glycine max
ctcacgcgtacacacacgctttctgtaaggttcactttatatatatgacaatagcgatgatggataatagtggaacatatatgaaaaggtcaccgtcatgtctgtactgactcaaggacttgctgatgctgattcaatcacttgcattgcatgggttatcttctacctcaatccaaagttagagcttgtatctcttgcttaacgagcaatcgtcctgggacgtgaactatataaagctctacatgaccttgagacgtcagaggatttgttatgagtatgagcttcatatccagctaacttatt

SEQ ID NO: 13051 - DNA, 360 bp, Glycine max
aagacacttattttgcattcccctaagttggtgcattagaagtaaccagtccctagtagagcctagtcgtgtcccagacgggccagagtcagtttccaacaccaacacatcagctaccctcaaacgccacctagggttagggtttctgcaattccccaatctctatcttccaaaaattagggttttttcaagccatggcggacggctactggaaccggctacatgcgtttctgcctcactccggcatgctcaaactgtcgcgttccgactacgatatgcctgcttacggtctgtctttcaggtaatgagatgcataatcatattgctcgtgatgatgaccgtactggtcaccgaatgcta

SEQ ID NO: 13052 - DNA, 384 bp, Glycine max
  modified_base (269)..(269): a, c, g, t, unknown, or other
atcagcattcagcatcgcttttttctattcaacgactccgttccgttctctttcttcttcttcgaaaccctaataagcttctgcacttccttctgattccacttttggtaatataagcccctcctcttcttctcagatctgaaactacttgttttaactttttctattcaacgactccgttccgttctctttcttcttcttcgaaaccctaataagcttctgcacttccttctgattccacttttgcttcaactgggaagatactgtanggcctgggccacctaatgatgagatatccaatttctacataagttgccattgatacttttttaatcaaatggattcagtgcctgctgatgtgtctaattcacatactattaatga

SEQ ID NO: 13053 - DNA, 142 bp, Glycine max
acgcccacgcgtccccccacacgtccgcttttttttttttattcttttttattattaacttatttgttgtttattacattgggtttttttttaccactaacctttttttacaaacccatctaattttatcttcaatcaatca

SEQ ID NO: 13054 - DNA, 380 bp, Glycine max
acgcacgcatgaggccacccgtccaaccacgcatccgtcaagaacactttttcgcatgcctgcaactccaccgagtaacgaacgacgaatatttacgctattcactttcactcctctccaaattacgttaatcaaccatacaatgaaccacaccactgacaatggaacccccatctctgaacacaaagttcttattcaccaatccattgcccgttacttgtaactcagtgccttctccaaaactctcaaaaaatttctcttcgaagcgcatatcgagaaaaacgatttcgagggatcaccatttgatctggaacaaatgtgtctcaagtatttagaaatatgtgacaaatatggtaagtcaaatattaattatcaaaatg

SEQ ID NO: 13055 - DNA, 261 bp, Glycine max
cgatcttctgcaccaatgtgcaatccatacaataacactggtcctgcagcaatgcaatggtgtccgacaccaatggttgcaattcctggcatgtgcccaccaagcattcctttgcaatttgtaccaccatcatactggagtggcacacaactttggaatgctggaaccgggacagtgtcaataggatccaatgcttgcctttaaaaaaaagaaaaaaacaaaaaaacaacaactaaaaaaaacacaaaataacaccaaatc

SEQ ID NO: 13056 - DNA, 146 bp, Glycine max
agttaatctagtgatgttaaatttgtcactaatctgaatatttttttataattaatcttgaacttattgataccatattctctttttcataaacaaaaaaaaaaaagaaaaaaaaaaaaaaaaaaaaaaaaaaaaaaaaaaataat

SEQ ID NO: 13057 - DNA, 441 bp, Glycine max
  modified_base (338)..(338): a, c, g, t, unknown, or other
gtctactcttgagaagagtagacaatattctaccatggcaatggagatggtaatttcctgggtttcgagtagaggaaggaccaagcattggaggtgggaaactttagctggagttgtaactgggttcttaacttcattgatctccataacctttattaggttccttcaactacttctgccttcgctatatcaatctttcacaacatggatattttcttggcgtgtcaatgctgttctcatcaggcgcgcttgttttcttttggcatacttatcttttgtggcctgggtagctatagaatatgggaagaggcttggtctcatggatatattcagacttnctaaatcatagcactggtttttgtgaagagcaatgcacttttccgtgaatccccatgtaatattataactgtagcaggtgatattcttgtcccgtgataaatg

SEQ ID NO: 13058 - DNA, 425 bp, Glycine max
gactactcttgagaagagtagacaatattctaccatggcaatggaagatggacatttcctgggtttcgaggtaagtaaggaccaagcattggaggtgggaaactttagctggagttgtaactgggttcttaacttcattgatctccattgcctttattaagctccttcaactacttatgccttaagtatatgaatatttcacaacatgggtattttattggcactgtcaatgctgatctcatcacgcgcgcttgttttcttctggcatactaatattttgtggcctggatacctatacaatatgggaagaggcttggactcatggatatattcagacttgctaaatcatagcactggtttttgtgaagagcaatgcacttttcattgaatccccatgtgatattataactgtagcaggtgatatt

SEQ ID NO: 13059 - DNA, 447 bp, Glycine max
  modified_base (424)..(424): a, c, g, t, unknown, or other
gaggtttcgctctctcagtttcttttccccaaattgtttttcatctaacagtgttactttggagaaccctaaccctagccccttcgcctaccttgtaaccttcctttcgatccttcatctcgcagacaatgggtgaaactaaggacgaagcatacgaggaagagcttctcgattacgaggaggaagacgacaaggcccccgactccgccggagctaaagtcaacggcgaagctaccaagaagggctatgttggaattcacagttcgggatttagggacttccttctgaagccagagcttcttcgggctattgtggactcgggatttgagcatccatctgaagtgcaacatgagtgcatacctcaagcaattctcgggatggatgtaatttgtcaagcaaaatctgggatgggaaagactgctgnttttgttctgtcgactctgcagc

SEQ ID NO: 13060 - DNA, 282 bp, Glycine max
aactactcttgaaaagagtaaaacaaatattttaccatgacaatacaaaatggtaaattcgtgaatttcgggtaaagtagggaccaagcattgcaagtgggaaactttagctggagttgtaactgggttcttaacttcattgatctccataacctttattaggttccttcaactacttctgccttcgctatatcaatctttcacaacatggatattttcttggcgtttcaatgctgttctcatcagtcgcgcttgccttctattggactacttatcttctga

SEQ ID NO: 13061 - DNA, 417 bp, Glycine max
cccacgcgtccggatccaaatccaagtactgttgggttggagagaaaatgcgtccctgcggaaaacacgcaaaccctaaaacgcgaaaagggttctaagaatttgcgaaggaaagagctagcggagatggagattcactacagtaacagctatttcgagaggcgccccatcctcaagtccaaggctgccgctgtcaaatgggtcaaagaatgaggataccttgaagaccttgaaagaaaaggtaaaagagccttcagtgccagagccagaacctgagccaactactgaagtactttttctttgcagctatgatggctgtggaaagacattcatagatgctggtgcattgaggaaacattctcacatccattgagagaggcagtatgtttgtcactacgatggattgtgaaagaaatt

SEQ ID NO: 13062 - DNA, 414 bp, Glycine max
cccacgcgtccgccattttggaacaagtatgtcaattatacaaatgattttggtaggaagggtcacatcttggattcatagtctgccatgagatgcactatggttagaaagaaaaagtgcatgaattcgaaagggacgagtaaatacatgtttcatctaaaattttgcggcttgagaaggaaatataaaattggttgagagggcaaagtgatcagtacatagtgggtggaaaatttgctgccaccccctaacatttttgcacacacaattgccatcctggcatggccttaagaatcaaacagtcttgtgacatacaaacacgtcctatatttttggtggtgaaaggatatactattattggtcttatgtggtgctactatatcaaaaattccttagtgaatgttcgagaataaa

SEQ ID NO: 13063 - DNA, 326 bp, Glycine max
aggagcctatgaaaaaaaaagaagctagcattgctgcaacagtgctgaaatggccagtggtgatcaagttacttttgttctttttgatgggcttcgaaagtcacaacaagggaaagacaaaagcggtggatgggtcaaatttttacccttttgtatttggtgctttagggtaaaaataaacaaatcaatttggaaggggctggaccatatttgcagagggattacggctccttccaattgttgaatcacagtggaatcattttgggggaatacttgtcagaagtaacatctgattacaacctgtccacccgtattactttactaca

SEQ ID NO: 13064 - DNA, 410 bp, Glycine max
cggacgcgtgggttcgcaattcaatctctttctcttcctcttcctctctctctctgtctggctttgtcgtacctttccttcatcctcagggcgttttgtctcattttgttattcaagaatcaattaaaaaaaatgactcatatcctttgatatggaacattttcattttctgtattcttctttttcattctttcttttttaatggattgtaatggaagttatatagtttaacactttgccttcattccaaacgagggatatgtaaataatttattttgccgcgttttttctcttttatttttttattctttttgggtgtgtttgtttgggttttggttctttgtgatgtggaatccgttgtttggacttaactgaagccaacgcggtaaccagagggaaacgagatcgtg

SEQ ID NO: 13065 - DNA, 397 bp, Glycine max
gtttgtacacattcgaaaacaaatccttctttcacttaacaccatttcactgactcacgcgctcttcggatctaatcgtagagaaactatcatttctcttcaaccaccgtcgccgatggcgctatcggcttccgacgttgcagccatgtactcgctgctttcgaattccatgagtaccgatcaccgtctccgcggtccggcggaggacgcgctcgcccaatcggagtccaggcctggcttctgctcctgccttctcgaagtgattaccgcgaaggatttggggtcgcagacggatgtgcgcatgatggccaccgtgtatttcaagaacagcgtcaaccgctactggcgccaccgtcgcaattcctctggaattagcaattaagagaaaatgcacctg

SEQ ID NO: 13066 - DNA, 450 bp, Glycine max
cccacgcgtccgctcccatggccctcaccttcgagctctgccgcgccaccggccaccacgtccgccgcatcctcagctacatctcccaaacctcaaacctcaaagcaatagtcttggacttcatgaactacagcgccgcacgtgtcaccaacacgcttcaaatccccacttacttctactacacttccggcgcctccaccctcgccgctcttctttatcaaaccatctttcacgaaacctgcaccaagtccctcaaggacctcaacacgcacgttgtaatcccagggttaccgaaaattcacactgatgacatgccagacggagcgaaagatcgtgaaaacgaagcttacggggttttttttgacatagccacgtgcatgaggggcagttacgggattatagtaaacacgtgtgaagccatcgaagagagtgttgtggaagcgttcaacg

SEQ ID NO: 13067 - DNA, 428 bp, Glycine max
cggacgcgtgggattaactggtttcacgttcataggcgtcaatgggagtaattcgatgtggcgacataatattattggtccaactgggcctcgctatttcctctgcaccgatggaaatcactgtgaaagaggccagaagtttagtatcagcgttgagtctcatcctgattccgctgctcctactacactgtcattcagaatcttatctgcatttctctctagcttggctgtgtatttcttcactgttactagttagttactttgtcgtgtaactctacgaggattttgcattcttgatcctagcaattctttgaacatattcactatagatattataggattgctgggttgattgcttcaataaatgttgtactgctacttacaacatactattgtaactttaaatttaataaagacgttacttcaat

SEQ ID NO: 13068 - DNA, 194 bp, Glycine max
gttgatgtgcatactgcatacctatgctcattagtacattggcgattgaaagaaaaatggggaaagatgttggatgtgcaatacagctattttaaacaagttaaccgatttcatatggatatttcaagtgaaaaaaatggagcattctattaaccaagccaataaaggttgatttggaagattatttgggtaca

SEQ ID NO: 13069 - DNA, 239 bp, Glycine max
gggttaaaagaaccttagaaaaataggggcgcctatgattattttgataaaaaaaaattggccaccaaggaaaccccacatgctcgttgggcatggaactttgaactaaaacatttaccatgcaaacacaactgggggcccattccaaaaacacacttaacttgccagcagtagtacacaatttacaacgcatacgagggccaccaaacttgggtttttcatcatcctcactagcattt

SEQ ID NO: 13070 - DNA, 261 bp, Glycine max
gtgcttatcaaataagcacttatgtatatgttataagccttattgaatgaaggaggaaagagggctaacttgttttcttataagttgtaagttattattaaaagctatattgaataacctattgaaataagctttcaagtttttttaaaaaaagttcatgaacatgtcaagctatttttataagctctgtcaaatatttatgcaagtgctcaggtcataaaaataactttaaacaagctctttcaagtactctaagttact

SEQ ID NO: 13071 - DNA, 174 bp, Glycine max
ctgcttatctaatatgctcttaagtatatttaataatctctcatttaattaggtatctactgaaatcttgccaaatttcttatgaataatcagatattattaaaccccatatctaataacccattgaaacactcttacaagactttttaacattaatcataaacacgatacact

SEQ ID NO: 13072 - DNA, 436 bp, Glycine max
  modified_base (413)..(413): a, c, g, t, unknown, or other
ctctcacacactcaaccaaagacgaaggaagaagaagaattacaaagtaccacgaaacaggctgcgacgacgtcgttctttgcaacttccagttcttgttcttgatgaatatgacaccagtttgcccctttgtcaaagctgctcgccccgatgataacaatgcctctaagaaatctggcgaaaactctatgaaacatcaggctgagtctgagagtaaggtgaagaaagaggttaatgactcagctagtacctcaccaaagtgcccttttggatatgattcacagtcgtttaagattggtcctcttagctgtacggtgtgccaagcacttttatttgacaccagcaaatgtgtaccttgttctcatgttttctgcaaagcatgcatatcgcgctttaaagacttgccgttatgntgggctgatattgtgaagatcga

SEQ ID NO: 13073 - DNA, 281 bp, Glycine max
ttgcacgcgtgggttgccggtgagaagctctggggggaagtggagagcggcggactgatgagctatgcgaaaattaatgtcgaaaacgggtcggattcgtgtacgaatatggcgtcagtcggcgggactgacttacctgacaaacgggtgtatgtgcttgcctgtgggctgtctctctagtactatatgacacatgtggctacgcctcagagtgccgacaccaaaagtgaccatgacatagctagtgccttagacaagtgccatgctggatatgatgtcac

SEQ ID NO: 13074 - DNA, 394 bp, Glycine max
tccacgcgtccggatagatctaatgaagatcactaggtacaaactacctagcgactattggaaacttcctaaacctaaccatctaccatatcttgctcatgctcaaaattatatcactcaatccgattactcatacttctaacccatgatgatagcagaacctgtagtcaatgcgacgagatctctatgaaccatcaacttgagtaagtcagtaattcaatgaaagacgctaacgactcataatcgttgctcactgtagaacccgattgtatatgatacaccgataaacaagatagttgctacaacctgtaccgagagccgagctcttatatacaacaccagccaatgtgtaccatggacacacgtaatctgcaatacattcacatcgcgctct

SEQ ID NO: 13075 - DNA, 389 bp, Glycine max
  modified_base (305)..(305): a, c, g, t, unknown, or other
cccacgcgtccgctctgaaccatgtcatacaactgaatctgatagcaaagcggttgaatggcgtgcctctcctctttgtttaccctaccagatattgcaaatacagcaagatcatcatgagtgggatttcggaaaagaaactcatcagaatcgatgctagtgctgatactgtgtgcccatggtgctttgttggcaaaaagaatctagacaaggccatagcttcctccaaggataaatacaactctgagataatatggcatccctttcaacttaacccctgatgcccctaaagaaagcattgacangagggagttttacagaagtaaagtttggatcacaatcagaacggatggaagctcggatgtcagaggtgttcaagaatgttggtc

SEQ ID NO: 13076 - DNA, 286 bp, Glycine max
aaaaaaaaaacaaaaaaaaaaaaaaaaaatttaaaaaaatcaaaaaaaaaaaaaaaaaaaagaaaaatttgaaaaaataaacaggcggccactttaaaagactccctcttacttccacctactttcaacttcctacctctcctttatattctcctaaattcatttcactctccttctttttacaaccccttcacttgcaaaacctttcctttccctaccttaacctcctcccaccaaatccccttttctccaactctctttataccaaatagccccataccgatca

SEQ ID NO: 13077 - DNA, 259 bp, Glycine max
acggtgacagttgtgactcgttctttaccgacattatcttctttttctgtctgatgagtgtcggttttctgggtaacctgcgaaggtcgaactgcagctgtaacatgttagttgatgacgcgcctgtccgtgcggcaacggatcaaggagctgctagatggacgctgactagagctacaccgaatcaacacttcaccgagacactggtcatgggaatgtgtccacgataaggctcaattccatagagctgacataagtg

SEQ ID NO: 13078 - DNA, 140 bp, Glycine max
acacgtgcgctcaacttaaataggtctatacagatcctatgatctagctagccactccggggaatggggaactcctagactgccattttcaaatagctgtacttgccatccgaaatgaaccggatattcatgtaccgtac

SEQ ID NO: 13079 - DNA, 438 bp, Glycine max
ctgatgtaaattcaaatagtggaagccaatttacctattatttgactgctcgtttgtcagcattatgccaaatgattggtctcacccccaatgaggctgatacagatgtctacaatgaagcagagaacattatcgctaatgctttcacggagtgggaaataattctttgctcatcaactaccatggatttagtatgggcgcaagttataagtgatccatttctaaggcggattattctaagatttattttctgccgatccgtgatatctattttctgcacacctgaagaaagtgaacagtaccttccactttgtttaccctatctaccctcttctgatgcaccaacgtcttgagccgtgcgttctgctgttgtgcaacttgccatgcactttgacgttgctgactcctttcactttactgaaacataagattttggga

SEQ ID NO: 13080 - DNA, 300 bp, Glycine max
accactcctacgactagtcggtctagactctggaggagccttatacagatccgcatgagcgctcatacgcaaatcggggatttatctggcatttactataaccctattcaaataaccctaacctcaccgataagtcccaattgcaataattgaatgctaaatatcaagcgcatcataactatgactaccacttacgctttctcacagatactctgatactacgtactcttatacctatagggatgcagaactttatgctctaggcgttagagtgtgtaagtcagacactgatgacagttt

SEQ ID NO: 13081 - DNA, 320 bp, Glycine max
cacccacaaaactcataactcaccaacacacaatcaaagtggaaaaaaaaagaagcttcagagatttcagtgcaatttgctgagaaaatgcaacccttgaaaatggggttccgtgagtacatcgaagctttggaggaagaaaggaaaaaaatccaagttttccctaaagagcttcctttgtcattagagcttgtcacacaagcaattgaggcgtgtatacagcaattgtgttgaacggttgcagagtacaatttgaatgcccaatcggagtgttcggagcagtcatcaacggatggacctgtttttgaggagttcattat

SEQ ID NO: 13082 - DNA, 395 bp, Glycine max
aacacgcgtacgcatccaatgtgttgcctggtgagaggacttcgtctatggaacgacagcgcaggactggtaatatcaaccaatgtcaatgcactagcgagttatctagatatatattgaacacacaggccatataagaagcgtgcaaaattttcaccgaagggttgctagccccacgatagtgctgctccaaagataggtttgggtgaagaatctcaagagacggactccacatgatgtctacgtggcgatactcatgttcataacatctgcaccattctagctaacattgtcacgctgatatgcactaatggcagaatatatgagttcacttataagctaacttgtacatatcatctttcatacatgctctaaactggagcaactaactataa

SEQ ID NO: 13083 - DNA, 372 bp, Glycine max
catggctgccctggacgcagcagaccgcgccaagaagaagtgacgctggagccccgggtgctggctggccacctgccctgggagtcttgctgtgccacacagctccccaccccctgctaggaggtcccagtctcacgccttcctcatgtgttgttctacctgctgggatgggggtcagcctctctttggtgacgtcacgttctctgggatcctgaggacccgggcctcaaatcagggaggatacgcgggaggccccctccatccaggcggtgctcctggggtgccgggaccgggcagtgtcacaccctgcctgctcagtcctggggtccgagatgctagggacgcttgaatgaaggatgtggtgttaaggcc

SEQ ID NO: 13084 - DNA, 459 bp, Glycine max
gtcaatttctttgactcagagagtgatgttacacaacatgagaagcccctaacaagcccagagaatcgtagggaagccttacctctgtcaatttttggtgatgagacaccagatactgatgaacatcctgtgtctcaagatttatctccctatacaccctcatccccaataaggaacagcttcactagccctggttccaacttttctatcaatgacatatggaatttatataatcaagctgaaaaccaaagttcttctaatgtgacaccaaaagcaagtgaaaatcagattcatgccccccctgaagtatcgggctccagtttggttaccggtaatgatgatttagatgatgacttctgggactataaggatgccgcaactgaaacaagatttaccaatgaatctgcacagaaaacttcttcaccacaagtcaatgagaatggggtgcagtctttccca

SEQ ID NO: 13085 - DNA, 425 bp, Glycine max
cccacgcgtccgaaggcggtgagcacgggggttatgagggcactggtggagctgatggtggacttggggttgagtatggaggacctggggttgagtatggtgtacttggtgagcgtggtggtggcggtggcggaggcgaaagggattaatgatttccaactacaagcctttgttgccaaagttcgggatctaagggacagagagcattttgccaccgagcaacaccactttctagtccaggttttcgattcccttcaattaggtcaagtttcttcgtcgcggtaccgtagtgctttttgtattttcttgttggtttagtttgccacgtttgagagtagaagctgaagcggaacgatgaagagtgcggcaaaaggatacaagaattgcaggacgagttggcttctgcaaaagaggacaccagaaac

SEQ ID NO: 13086 - DNA, 361 bp, Glycine max
caaggacacacatatcactttcccggcctctatcatgctgtctaccggtcgtgaacatggtcaacgtcccaacgacagttactgatgcacaaatatgagcctaccttgcatccaacttccacatacgctcacgagcaatactttatcgtaactgatccattccctgctcgaaacgctcttgctctctggcatcttgtcgagatccttgcgaattatcccactcatccagagggcactacagctgatcttgagaattcaaccgctcttccatgtgctcaagcgctaggtgctgatacaagtcacatgactcatactgatgggtaatatctatcagcgcctagatcaaagaatgtaattataa

SEQ ID NO: 13087 - DNA, 401 bp, Glycine max
  modified_base (386)..(386): a, c, g, t, unknown, or other
cgagaagtgtagttttagtgggagaaggaagaagattgacagagagagagaggaaggagcgcgaaaagactaaattgaccttggatcttcgtctttcctctctctccgattcgttattcgttggtcttctaaaagcttcttccaccatgaacagcaaggccaacgtttccaaagagctcaacgccaagcacaagaagatactggaaggacttcttaaattaccagagaatagggaatgtgctgactgcaaagctaaaggtccaagatgggctagtgtaaatcttggcatctttatatgcatgcagtgttcatgaatacatcgaagtttgggggtacatatatcaaaggttccttctgcaaccctggacacttggcttgcagagcangttgcattcattcaa

SEQ ID NO: 13088 - DNA, 458 bp, Glycine max
  modified_base (357)..(357): a, c, g, t, unknown, or other
  modified_base (375)..(375): a, c, g, t, unknown, or other
cgaaagcaactactcacgcagtttcttcttcttcttcttctcctgcgcttcgtctcaatctcaagcgtcaattctccatcgccaatcctctctttctgctgatttcggactcgtcacttacttgtgaaatgatgctctcagcggcaataattacttttggacgctggacataaggcgtgatgggcggttgctgttgttgttgttgttctgctaaggagactgtgttgagcgctccacctgcgtactattattatccaagagcatcagaagagcatgttcctctatcatctcaccaaggtgctgcttctgctttctctgggcggctcttggttgatactaatctagatacttcatctnctgatacttatagacctnccctctgctcctatccctttcaatgttaccttgggtaccactcaaacttcaactgcggcttaagaaattcgtagtgacaggat

SEQ ID NO: 13089 - DNA, 453 bp, Glycine max
cccacgcgtccgcccacgcgttcgcccacgcgtccgcccacgcgtccgcccacgcgtccgagatattgcagttttgtattggcaaaaagctgctagttatggccagactagaatatttgaaattttgcagtacgttgctgcacaatcaacaccttcaccacgccctgctcagcaacaaccagctgtgagggtgcgtcaacccgcatctagtaatagccaaccagcagctgcaacagaaccacaagctgagaatccatcttctcctacttctagctcatccagtcagcaccagaaggaagtagcagagaagttgggttcttcacaggtgcctaaagcaccctacactgttgcaggtttaagtagccagaagtctaatcctatacctgcagaggatgagccaatgcagattgaagcagcaccaccttcatcctcttctgcaaatgaaaatgagaa

SEQ ID NO: 13090 - DNA, 92 bp, Glycine max
gagatgtccaaaggagagcattgacggtgcgcactaaaagatcgaataatgcggactgagatgcatatgccaccgaactgtctgaattgcca

SEQ ID NO: 13091 - DNA, 443 bp, Glycine max
gatccctgcacactctgaggaagcaatatccaatgttgtaaccccggttgatcgccgtgctgatggatatgatgcttgtgatgcacaaaatcaaattgagttaccaactgcggaggagtttcaaccattgaactttgatatatattatgacccaagaagcgagctactggatggcaaattattctcccctgtacttgcacatattcaaccagaatttcattatcaagcaaacatcgaatcagatggtcgatatgggcttcaatatggtacaaatgagacaaacatgtcagactttttgaattcagttgttaactgggatcaagtaccctttgaggatcccaattgtcaacagcagagctaccccttgtttaatgttaaggataacatattatacagcgacttagattctgaacttgcaatatgacatgtatgcaagctggtta

SEQ ID NO: 13092 - DNA, 218 bp, Glycine max
tttcgttcattcccaggttgttatgacaccaggaatccgatttatttaccggttattaccacctcatctaatgatctacgcggaacctcgcatcctgacattatttatacatgcactaattcagctataataataactttttttacaaaaagaaaactatgattcccgtcatggcattaaacatattttacccttctgcaactagcccacataacatg

SEQ ID NO: 13093 - DNA, 443 bp, Glycine max
ggtgactctacttctgaggatgaagatttggatatatcccctgttgagattgatgaggcattggtgattgaagatgatgatatttctgatgatgaagatgatgaccatgatgatgtactgagggatgattctcttcctgtttgttcacctgacaaagtacatgatgtgaaattgggcgacatagtggaggagagtaatgttgctcctgcaactagtgatggtggccagactaatgctgcctcatgttctagtagcaaagctggtacagtcaggggatcagactctgctgattttaagagtggctatacctcaagctcaagacgtgcaatgtcatttgctgctgctgctatagctggacttggatctgccaatagcagaagtttcatgggtgagagagatcgactagggcgttcattgtttggtagttctaatgatccttcaaa

SEQ ID NO: 13094 - DNA, 338 bp, Glycine max
cccacgcgtccgccacattctcatactatggaagacggtggaagcttagttggagaagagggatccaaaatagaagatacaacctcagagaaagttgagaaggtgaaagaagaagaagatattggcaaagaagagagtggtggtggccttatcaacaacttggttaccactttgatcacacccttgagtccaggcattgggaaagccactgaaaatgaaagtggtgctgatgctgatgaagatgaaggagagaatgaaggatggatcatcagcaaaatggtttctaatttcttacatcaaagtgaaggtgaaggtgtggtggaagctgaagaggacat

SEQ ID NO: 13095 - DNA, 212 bp, Glycine max
ctcacacatcatgggtttcataaataaactttgaaatccattacagttatgagcacatgcaaaaagtttggaggagcttgaagtttactttactcaatatctcttagtgttatacagtgattatgtagataaaccgtgacaattcaacgaacaagttccaaataaaatatactaaataataattaattattatataaatatttataactaat

SEQ ID NO: 13096 - DNA, 427 bp, Glycine max
cccacgcgtccgtcttgcttgatggttccctggtttatggaggcagtggcgcaaacagggcggttagtatgtggccagttccagctgatgaagttgatggtgttgaagaaccattcttaagagcacttgtttcctttctgtctgctttgttcaaagagaaaatatggaggccggagaaggcattgaatctgatagaacttcttgtgaataaactctttcttggtgaagctgttaatactaattgtcttaagattctacctttgcttataaatgtacttttagaaccattgtatgggtatgcagagcctggtacaggtgttcatcattgttctttagaagaaagatttgtgcaaaatactatgatagactggctggagagggccggaagtcttacacctttggtcacatggaaaacaggagaagacat

SEQ ID NO: 13097 - DNA, 413 bp, Glycine max
cccacgcgtccggacagaggctgagaattcgccgtcctagaaaaatcttgcgaatcaaagaaggcggcaagaaacgctttttcctttctctctttctctcactacttactctctctacaacctccgatgtcccctcccttctccattgcctccttccccgtcctctctctccggttgtggtagttggaaaacgaagggtaattttggcagctatggagggtgaactcaaccagctgaagcgtgccgccattgatgcctctgctagagctatctccagtggcatatccaggacagtgacgtcacctctcgatgttcataagattaggttccaggttcaactagagcccacatcttcatggactttactacgcaaggatttgtctacaccttcatagtatactggcatgcttcaa

SEQ ID NO: 13098 - DNA, 470 bp, Glycine max
aaaaaaatcaaattgaatatgggagaaggaattaagaaccaggtatttaaggagaaaaaaccatcaagggaaacttttgtttgtggagcatgtggtaaggctgggcacatgcgaacgaataagaactgtccaaaatatggtgaagatctagaaactcaacttgaatctgcagacatggaaaaatcatctggaaaatctagctttgtggatccctctagtctctcccagcataaagctccctccaaaaagtcaatgtctaaaagcgcaacaaaagttgctcctgttgacaattcaacaaaaattccattgaaattcaaatgcagctccacagagaaatcttctgataaacctgcagtagaaaccctgcatagttctgacaagccagtcacttctgactcagaaactgcaaagtctgctaaggttaataagataattatttccaagaaagtgataccagatgatacgctggc

SEQ ID NO: 13099 - DNA, 463 bp, Glycine max
  modified_base (420)..(420): a, c, g, t, unknown, or other
gaaatttgtgttaaaaaatagttgttttaaaatttgattgtatgagattaatttgaagtgagattggcacatggtgagaatagagagaggggaaaggaatccatcgaggtgaagatggtgtggaacagcatggtggtgttgagagtggcacgtgcctcagcggaagcgtggcaatgcattgcggagcctctgaacagtgagcagatattggatctggtttgctgtttccctctccatcaactcgctctctttctctattccttcttctgcactcctcaatccaatttttaccatttcccttctcactccgactctgaccatgacgattcttccgattaccaatcctcttcagactgaaaccaaaccaaactcaatagaataagatgacaccgaggactttagtagtgttcaagctatctncattgtttaaaagcatcttttacacttagatttttgtagttga

SEQ ID NO: 13100 - DNA, 384 bp, Glycine max
tttaggtcccttgtctggtctggtgtgcaattctccccatacaataacaatacacccaggttatcagaccaatcaatcgatatacctagtagtgattagatttagtgatcgatcctctcctttcgttctcaaaccgtagatttagattttagggtttctctcttaatataatcttttgacacttccgtaacaaacaaaaaaattacataaattttcccttataattattattatttggcttttatctttggattaactaggcttgagctatcacaaataattgtttcggagaatggaaaagaaaaaggtggcagtttccctcgtgtgccacggtcattctcgccctgtggttgatctcttctacaggcccgttacgcctgatgg

SEQ ID NO: 13101 - DNA, 165 bp, Glycine max
caagatggttctgctagagaatctctggtatgactgattggctgaccctaaaggtgagggagatcttcgcaagctgagaatactcaccattctcaaagctattgatgaaggacacatgtatcaagttgcacaagacgttgtcgataccgtctacacccacaaccc

SEQ ID NO: 13102 - DNA, 464 bp, Glycine max
gtctaatgagaatgattcgggtgacgccacggtgagcgatgaccaggttcatgctactagtgagagttccgaaggagtttctcaggaaatggtttggggagaaatgtctgcatggttcaatgctattcctgctgcttggggtcctggtagtcccatgtgggatgatttggatgccaccaataatcttctttccaatcacacattcctttttccaattccaatcaacaagaactcaatgatgctgagagacaagaacaaaacactggaccaggttacttgtggaaggatcaggattgaaatttgaagttaattttctatataccttgcttctttctcttcctggttgcatattcatgattatcatttattcatcatccactccttcattacattttaggacactttgatggttccttaattacttaacttctcactcactggttgcggatattttcaccacacaa

SEQ ID NO: 13103 - DNA, 268 bp, Glycine max
tcgtgctatggtacctatcttcaaccacagaatcaatctctatctaccacccattgtctcatgtctcactacgtatcccatcatccatttctcacattcttaatcttactatcaccaccattattatcattatcatctccaacctctatgctctcgtaaacccttaaaaccttgctctcaagccacatgaaatgaccctcatgtgagaacatgatttcccccttaatacaatgtcaactgctacttcttattcacaaccaacctcaca

SEQ ID NO: 13104 - DNA, 421 bp, Glycine max
tgtggttctctttttctctattgaggttgtcattgggagcactcaacctaaccattcaggttgtgaaaccacatcggaagaaaattcacaagcgatggatccgaagctgaaagaggtttctcagctcttcgatcgcttcaaggcttcgtttctccggaacgacttcgataactgttccaatctcctttctcagctaaaggtgttacttacaggtttcagaagcctgccaccgttgtttgcagatacacctaatgcagttcatgaattaacaatagcaagggatatatatgagcatgctggtgtccttagtgtgaaaattgaggatcaagatgctttcgaaagggatttctttcagttgaagccttattatacagatgccttgcattcgtttttcaccatctactcaagagtaccctatact

SEQ ID NO: 13105 - DNA, 217 bp, Glycine max
cccacgcgtccgcccacgcgtccgcttgatcagggtgatttcttagtacattttatgggtgttgcaccaaattgaccggcttaaaaggcctgttaaagcttaagttgaaaacctgcagcttcttttaaaccttgctttgcgtcctacagcagttgcagcaaatccttttattgaaggcttaccctgggtgggggaagaacctcttttgttaaaaagg

SEQ ID NO: 13106 - DNA, 360 bp, Glycine max
aagccctctggctttggtccttcgctagggttcggggattcaccatttccagtgatcttgttctctcggttctacacttctgaacttcagagctgtttctgaggagtttcaagtgtattctgttgttctggttcggtttattgaggatctcgagggggcttttgcattaatgctgttactctgtgacaatgccttctacagaaaatcagggcttttcgttgtccttatcctcgtttggccgttccatatttggtgtctgtcaggagcaggttcattctgtggaagcaagtaatgaatctgattcctgtaatttagagctcgggtcattccaaaagcgtgttaccgatctatttcaatacc

SEQ ID NO: 13107 - DNA, 428 bp, Glycine max
cttctctattttaagtaattcaatggcttacactgcaagtcttgtgttcttagcttccactttccttatcataaactttcctcttctggcaaacgctatcggatgcaatggaccatgcagaaccctcaacgactgcgacggccaactcatttgcatcaacggaaggtgcaacgacgaccgcgacgtcggaacccacatctgcggcggcggaatgccgccaaatccgccaccaagcggcggaagctgccagtcctcgggaaccctaaattgcggcggaaaatcgtatcctcagtaccgttgctctccgccggtaacttcctcgacgccggcgatcctgacgctgaacgacttcagcgaaggcggcgactgatgggacccgtcgcagtgcgacgagaagttccataacaacacggagcgtgtggtggcac

SEQ ID NO: 13108 - DNA, 410 bp, Glycine max
gccttctatgagggaagaacatgcataggttctggtgtgattttggagttcggggatgagcagagttttccagtatgtacaaaagctttagaaattgctaggatggaagataaatcgaagattgggaatccggtaaaaataaaagttaaaccagataacccgcaagtgtgtgattctgcagagttagcaagtaaaacatcataaaggaataagaaattcaagagttgctggcactaaacaaaacaggctgatgtgtcaggggaatgcaacttccatcttccctttcaattggccacaacaaagcattcgcaaatgtgggtatacacgtagattttctgatcttttgttctgtagcgtttttatatgcatgtttagggaaataagaagtattttatagagagaaagatagc

SEQ ID NO: 13109 - DNA, 330 bp, Glycine max
gactctctgtgagtcaaacaccgatctgaatacacaattgagcagcaagtacggatccatggtgagggaaatagtggtgatgacagtaacgataatgtgaattagatgaacgaacacgttcaagttgacgctaacggagagattgaggaggatcagagtaaagtgcatgccagcctggagcgggtgcaccggattgttacagcgttagggatcaacctggactaactggtgagctcagaggattattggagcgttttcaccacgataggagtagtggtgaacttgctgaacgctgccatggacgactgttcggagtgctacatgtactag

SEQ ID NO: 13110 - DNA, 433 bp, Glycine max
tcgcccacgcgtccgggaaagggcaatatggtctgccaaagagaaagatgcactggtagccagagaagaacaggcaaagtgaaacaatgtgcaaattacatgattatcaacaaaattattagaagtgaggaatgaattggaatcttgtagagaagaatgcatgaccctacgtgaaagattgactattacatatgaaaatgcacatatcaaggaaaattccagggaaaaggtttcagaattggaccacctggaaaatcaccctgaaacaaccaatgctgagagcaaacaatgccaagaaatgtcaaaagccaattctgagatgcaatctttggagcatgagctgcatgacagtcccaaggaggagaaagaaaatgaacttcggaaggaaatacatgttcttgataaaagagattatctatcaagccctaacgtg

SEQ ID NO: 13111 - DNA, 436 bp, Glycine max
acgaagttggcggcaagtttagaacttgcggcgccggcggcgggtggcaccggccaggagtgtcgtggttgtgtagcggagcttcgcgagatcagcaaaagcttctggagggagagaacaaagaatctctagtttgttaacaatggaagacgggaacaacagtggcggttccaccgcaaagaaattaaagcagcggcgaaagaggaaggattacttggtggacaaggatgggcaggtgggggagcgagagaagctggcaaaaagaatcttgttgtctctgacgagaccttcctatgttttgggattgggtcccaaacctcttacggtggagcaccgtgcgaggttgcgctacttgctccggaggctcgttaaccagcaccattgggttgcagccagtggtgttctcagtggctacttggagggaacacttgatgac

SEQ ID NO: 13112 - DNA, 462 bp, Glycine max
  modified_base (379)..(379): a, c, g, t, unknown, or other
gtaattggaattgatgagatgaacactggaatatacagtgtgtctgagcattatcctaaacttagggctaagcaatggggagaggaacacgaccttcagctaaggatgatattcctaaagttctttgcaacagttttaagtggctatcgcaatttcctagaaaaaagtgctactcaggtcttcaactctcaagcttttttgaagaagcggtctcgatctactaaccaaccaccagagcccatgatagctcagttcctagactctcatggtttcttggattatttggaaagaagagtaggttctgatgaaaacaacaataatctgcttgataagctacaagatgcaattggaaggggtcaaaaccctatgtcaattcttnctttatcctcagtagaacctgagattttaacagtatcagattctgatattggaatatcaggatctggtgccaaatacacttat

SEQ ID NO: 13113 - DNA, 328 bp, Glycine max
tcggaaaaaaggctccaccgaaatcaatttcccacagaatcaaacatatcgatggagttggggaacaaaacaagagaaaatgggtggacgcaagtgtttgttaacgttggtgttgagtttggtgttgatgatgagtatggcagaggcgcaatctggtactatcgcagactgcgcccagtagctaattacatgcctggactaccttaatggcactatcatcccaccaagctactgctgcgaccctctgaaacgaacagttcaaaacgaactcgcctgcctctgtaacatctacttctcccctgggcttcttcaaagcgtcaatgtcact

SEQ ID NO: 13114 - DNA, 357 bp, Glycine max
gccacgcgtacgtccacgcgtccgaccactcgtccggttcgaaacccctgtgatctcagagcaattccaatgcctctggatctcgtctcgatcgatcgatctcgaacatgatcactgaggagcttctcaacatcgaagcctttcgaactcaagttgccctctgagctgaataagcagatctcatgttctctccaattgtccaataagaccgatagctatgtggccttcaaggtgaaaacaaccaatccgtataagtattgtgttcgtccgaacactggtattgtcacgccacgatctacgtgcgatgttatcgttaccatgcaagcgcaaaatgaggcttctggtgatatgcaatgc

SEQ ID NO: 13115 - DNA, 422 bp, Glycine max
tcggccgtgagtggggttccgaggacgggagagagagccaacgcgccggttttgacggcgtggggagtgggattccgtggcacaaactcttcttctcttgcgcgttcagttgcgcgaagcagcgtcaggctctgcaaatgtcaatggtggatttggagggcaaagaaggttacaggccttccacggagtacgtggaagacagcaacgaaacactcattaacttgactgactcaaccgagcttttgtttcttaagttgccttcttccaatgattttttatctgacatacatgggcagaaatcgattctcactcttcataatgatggtaaactagccagcttcaaggattcgtcaggtaaagtatatgattttgtaagctattctgctcatgagccagacgaaacagtttttggttcctttaca

SEQ ID NO: 13116 - DNA, 405 bp, Glycine max
cgttaattcatttcagctttgcacattcataaacagaagaattcctcttcaataatttcaaatttcactacttgcttccttagaaagaggaactacaattgatagctagcctccacccaaacatattttacgtgaaactcaccaagaaaactaagggaaggtaccaaaacacttactaatgatatatatggctttgatgtcatatttcttgaattgctttactccatccacatcatgtcaagtctctgactatgccgaaggatcatctcaactgaaatctccttcttcagagaaacaaaaatcaagaggagctccacttgttgtttcctatttccccatcaaccattatccctcgcgcttatagtgctatacaaggcttcttggtgcagcctttttacccttttc

SEQ ID NO: 13117 - DNA, 417 bp, Glycine max
  modified_base (377)..(377): a, c, g, t, unknown, or other
caaaatatgaatttggatttgatatttcagattgttaggttaaatgatttgtattttgaattatatcgtggtagcatcagagatggaaaaattggtatcaagtatatgattatgaaggaggtaacttattagtggaaaaccttgctcatagaacttgtttactttacagtaatatggatcaggtttgggaaaagtgacattgaaggtgttgtcatataaacttcctgcgctcttccacacatttttaattttcgtatccatgaggtggaaaagccctgtgtggtggaaaccttccctttggaatgtcaatctgattatatgacagttgcataatcacaatattattggattctattgtagattgcaatgctgaattntctctcacttcctgtaagtcacttattttcaaacttcact

SEQ ID NO: 13118 - DNA, 417 bp, Glycine max
caaaatatgaatttggatttgatatttcagattgttacgttaaatgatttgtattttgaattagatcatggtagcatcagagatggaaaaattggtatcaagtatatgattatgaaggaggtcacttattagtggaaaaccttgctcatagaacttgtttactttacactaatatggatcaggtttgggaaaagtgacattgaaggtgacgtcatataaacttactgcgctcttccacacatttttaattttcgtatccatgaggtggaaaagccctgtgtggtggaaaccttccctttggaatgtcaatctgattatatgacagttgcataatcacaatattattggattctattgtagattgcaatgctggataatatgtcactacctgtaagtcacttattttcaaacttcact

SEQ ID NO: 13119 - DNA, 422 bp, Glycine max
aagacactggggatactctctgcatttggtaaaacatggttgcaatgtcacgtgttgtgcacactaatttcagccgaaaaccaacaaagacttctggtgctgactacctccagcattcacaagtaaagttggtgactctcgctgatggtttggaggctgaagatgacagaagtgatgtgacaaaacttctttcgtctataaaaagcaacatgcctgctttacttccaaagctcatataagatatcaatgccttggatgctgacaataagatcacctgtgttattgttacatttaatatggcttggacattgcaagctgtccacaaactatgaatcaaacgagctctattctgtccagcatttgcaacttccatggatactgatgctcgcataccacagatgatttatgattgcattattgat

SEQ ID NO: 13120 - DNA, 407 bp, Glycine max
  modified_base (6)..(6): a, c, g, t, unknown, or other
caccancttcgtttccttcaatcccttccttcctttgccaagctcagttttcttggctgcaagtcgtcaaagaaggggttcacagtcttctcccgctatgcgcaagcgcgtgaccttttctcctcgcgtagattccaagatagcatggagaagctgccgaacctggtggaggacattgtgcagacatccttaaacactggtccaaggggtgtcctgaggttggctcaaggtgttcaggccttccttggggttggtcaggagtggttaactgatgtctctaagtcagcaaattcatttgctgggttaccgactgaactgcagcttggtttactctcccccttttatttgaggaagttgtttgagcgcatgggtgcaacctatatcaaattgggtcagttcatagcatc

SEQ ID NO: 13121 - DNA, 431 bp, Glycine max
aaaaaactgtttttagtttttacactaaaaaaaatccctttcttctattgagtccatgtccaagaatcacgttggaattgcggatcggagctccggtggattttgtggccgttgaagccagcaagggtggtgccgacacggtggttgccgttgtgcttccaattttttccggcaagggcacttgttagttccttcctcagattaaaaggtcaccggttcaggactcgccctcaactcggacaccaactcaaccaccttgtcctaatgtctgtggagagcgaaactgggtcgtttcgggactctgaaactcggaacaatcttcgaagaattcttgagtcatgctctaaattggcggaagctggagattttcatgaatctgaaaacacagcagtttcagagcttgtcgagttccttgattctttgttggatgc

SEQ ID NO: 13122 - DNA, 305 bp, Glycine max
gttagttcacacactaagttctgaaaaatgagttccaaagtttttcttattctacttgtgttcatggccactatacttttgatctcctctgaggttgcacccgatgatgcataccagaattttgacaaaacagatgggaagcgtagtgcaaatggggtagatgaaagcaaatattggcgtggtggctatggcgactatggtggttggcgtggtggtggttggcgtggtggctatggaagctggcgtggtggctatggtggtgggcgtggtggctatggtggctggcgtggtggctatggtggtgg

SEQ ID NO: 13123 - DNA, 299 bp, Glycine max
  modified_base (1)..(1): a, c, g, t, unknown, or other
  modified_base (10)..(10): a, c, g, t, unknown, or other
nccacgcgtncgctttcttacaaaagtttgttttcaaagtgtgttttgtttggcgaagcctactcttgtgaccacaacccttcctcctctttcttttgaaacctctttttttctattccccaaccaaacaagcaaacgctactcactcatcatcactgagatcatggctcctaatatcaccactgtcaaaaccaccatcaccgacgctcaagccaaggtcgccaccgatcatggtcgtgcctacgtcaccttcctcgccggaaacggtgactatgtgaaaggtgtcgttggcttggcaa

SEQ ID NO: 13124 - DNA, 435 bp, Glycine max
gaggacccagagactgataaagcttttggatgggtgctagaaatgtatgcttatgctgttgcatctgctgtgcatggtgtgaggcacattctgcggaaagacttcatgttacagcccccatgggatcttgaaactaacaagaagtacattctccattacacttatggatgtgactacaatatgaagggtgaattgacttatggcaaaattggtgagtggagatttgataaaaggtcacatctacgaggacctccaccaaaaaacttgcccttgcccccaccaggggttcctgaaagtgtggtaacccttgtaaagatggtgaacgaggctagtgctaacattccaaattgggactcatcttccacctcatcatgatgatatcccaagtgcacatttcgaaaaggaaaaaaaaatagacatttgagtctttttttt

SEQ ID NO: 13125 - DNA, 429 bp, Glycine max
cgttattctcctccatcccgatctctttattgtcttctttctctcttcctggttttcgggggagaatcctgaaaaccgcttgattttaatcaaagggtcatcaggattcgggcacccatatctcgtatcactccttctctcctctgttgtcttagaaagaagaccaagaaaagcatcaatttttgcaagcaatcttcttcttttgccctttctcttgtcttaaacacacacacacaacaacccagctgctgaagctgaagcatcacaactcacacatgattcgagtggccacaaattaagcgtgttggtgttatgagtgagagaatggaatcgagtagcattgagagcagcactgtatcatcgatgactatgatggaagaggatgagcatccccatcagttttcttcaatctcgaagcttcatagcaat

SEQ ID NO: 13126 - DNA, 408 bp, Glycine max
actatgatcgtgtatggaaaaaactcttctctgcagcatcaagtgctggcattcgacattggtgtttgcttgacagagaaactctctgccactgccaccttcgctgctggcattcaagtttgcctcttctctttttccttacatgtatcctgatttggacacctgtttacatgatgagatggcggttacaacctttaaagtacctactagtgagtgttgtgggaataagaaaatggaaagaaagccttctgggaggagacgtgtatttgttcagttagattgtgaggatcaggatttggatttcactacaaacatagaagagaaactgactgtaatgccaccatttcaagttggagcaagaaatggaaacattagaaacacactctctagactagaggaaagcatgat

SEQ ID NO: 13127 - DNA, 101 bp, Glycine max
tacttcatgactgtttttttaggtctgcaccattcggggggcataaggctgctcgcaagatgtcaagaaacatacgttcccttccataaactctcggtcca

SEQ ID NO: 13128 - DNA, 389 bp, Glycine max
accgctgattctttccttatcagaattttgctgttgattaaaatcgtgcacggcaagaataggtggtggccttattaaccaaagtagtattcatgaaccaaaagggtcatgagaagaaaattgaaaaaccagatgatgagtcaaagagctatggtcggagttggaggctaacggttgaagcaaacaatgcgcgtccatggaagattgttccagacaactgctacaaccaccttcagaactacatgtctggtggacaataccagcttgaccttaacctcgacggacaacatatctagtcctatgcccatgagattcctcttgctgccgacggcatggatgcctgcattttggatgttgatgacacttgcatcttcaacattgattattac

SEQ ID NO: 13129 - DNA, 400 bp, Glycine max
tggtaattacatctacaaaggaaccaagttcaattccagaaaggaagatgttattggcgagacatatctgggaattcaaatattcaggttctactttaaatgcactaagtgctcagctgaggttaccatgaagactgatccgcagaattcggattacatcgttgaatctggtgcgaccagaaattttgaaccttggcgtgcagaagatgaagaagctgataaaacgaaggagaagagggatgctgaagagatgggagatgctatgaaatcgttggagaatagaaccctggattctaaaagggagatggacatccttgctgcattggatgagatgaagtcaatgaagtctaggcatgcaactgtcactggtgatgaaatgctggaggctctgcagcgcaca

SEQ ID NO: 13130 - DNA, 445 bp, Glycine max
tcacctatacttttcctcttccaacacaaacactttccgtttcgttaattttttcttcagattcaaaccaaaggagagcaaaccaaaaaaggaaaagaaaaatcccaaaatccacaacgttacttcctttccttattagcgagaggaaaaaaaattaatttaaaaggcttcttgttaatttccctggaaacttcattttattttcctcttttctcttcttcgcgctcgttcgttcgttcctctgattattattcatcgatcagaattgatgatggagtcctccttcgatccaacggtcaacggctcaccacacctatcccttttcaacggccacgattgaatcggcgagatccgtcggtcaacggtctcttctaaggcgcggttaggttaggaaagagaaagagaaagaaaatgaaggtggcaaaatcgcgtgtgtggcaaccac

SEQ ID NO: 13131 - DNA, 370 bp, Glycine max
cccacgcgtccggccgcagccacaaaggcaacaggacagaccaagatacaatgatagagcaaggtatgttcgacgcagagaaaacacaaaatgaaggagcaagcggataataagaggagggaggagagggatgttgaagatatggaagagtggattctgcactattattgtagtgtagcctttggatgcctactatttctggtggtacttgaatatgctagtagttaaactagtagtatatgaatatgttagtagttaaaccagtgttgatgttggctttattctttatcatcttttccatgggagagtgttgaacatatagcatataatatatctctatgcagtgttactgttttgtacactgcttctt

SEQ ID NO: 13132 - DNA, 408 bp, Glycine max
cccacgcgtccgcccacgcgtccgccgctttcatcaagaagtgacaaatcttggcatgttcctgaggcaacttcaatgatgcattcttttgagcatccatcagatcagcaagtccatctgaatgacccttttttagaaaggactcaaagtgctaattccaatgccttaatccatgatcatttaaacagcatgcatatcactgaccaatacaacaatctaggaaatactgaaagaatgcctcttcggtctagatctggttcattacttgaagaacaatcactgttatctgctaataaggatactttacatcccaattacagaattccttttcagattggtaaatcatctatggaaaaagacttacttgagttagaaacaaatcagagacatgactatatgggcacgatg

SEQ ID NO: 13133 - DNA, 407 bp, Glycine max
  modified_base (365)..(365): a, c, g, t, unknown, or other
aaaacatttcatccggagaattcaaagagattgtcttcctactagagctcgagtagttcaaaaaggtgtaatttgcccttcaactttcacttattgtatgtctgaatttgaaaacgcatgacacctgtttgtgaattgtccaaaagctcgagaaatatggcaccaaacctacctttgggagctagtatctgagagattcgcaaaggttgatggaataagggagttggtgtttgaattacttgcagcacaaaattcttgaatagccatgatccttttgcagcatctggatttgtcgaaatgagaaggcatgggatgacaccgagaagcctacaactttatcactgaccaacacaagtcaattcttncaagaatggctgcatgcttgttcaacaaatgctccaacaccg

SEQ ID NO: 13134 - DNA, 418 bp, Glycine max
tttccttaagaagtgattttcctggcagctcaggtaatcaagcaagtgaagcaactgaggaatctcaaagattgaaccattcaaatacttctgccttttcttggtatagtaatagtaaattgttgcagcctcatttttcaacaccatcgattacatttcctgaagtaaacaacctcagttgggattctcatgaatcccataaattatctggaattacttctggaaattgtcagtatggtggctcaaatcagaacctggagaatatgatcggtacagtcatttgtcagtatggacaagttacaccaaaattatcaaacagtcaatgtggactcttacctgtttctggggttatctccaaccttaagtctgagggacatggtaatgttttcacttctttgttctatgcacaatctggtat

SEQ ID NO: 13135 - DNA, 373 bp, Glycine max
gccgtgtctgtgtttgattccactttgcaaatcagtgtgtacccaggaatctcttgattgagaaagtgtgttagggtaagagttgtgtcgtgtccacgagacactgggagaaagaaagtgtgtgtgagttgttgtaaactgaattttcatttttctttagccatgagcacacttgttcgcaacaccaccctcaccttcagccgcagaaacagatacgagcttcttggtttgcagggcaaagacaagatggtcaagtccatcagctacagacgcagaagggcaaagcaaaggcaaatctttctcacaacctacaagttatcttctttgaatagtaacacttttggggagccgacacaaaagcctaagctgaagc

SEQ ID NO: 13136 - DNA, 216 bp, Glycine max
gcagaagtggaaacatgatttgtatcaagaggttaacaacgatcctattcctaacaaggaggattaccagattgaatagttagaagcactattggcttcataatatcaaacaaaaacaagtatttgctaagcctttttatttattttaaaaaaatcaactcgtggcttgtcggacaatttccagagatgatttttgcttaatttaccaattgtgtg

SEQ ID NO: 13137 - DNA, 416 bp, Glycine max
ctggaacacaagaatcaaaagaatgcaacgagcaggcttaccaatctaccctgaagagttgtgccaacggatacttaattgcaatcaagaaagtcaaaatattagcatcctgtcaaatgaagcctcccagcatggtgatctgtcacaaacagactttgatataccagacgtggaattcaaaattttcaaatttcgtcatggtctatcacatggacagtcaatatttgatatgcctgaaagtagcttgtttgatcaaagttcagactcatcccatagttataacttgttcccaactatgcgtcctacaaaacgccctcgggagtcagaaatgctatatgatagttttgaaagttgtacaattaatgctgccccactatttgatcagtatgacaattatacttctgaaaaaatttctg

SEQ ID NO: 13138 - DNA, 393 bp, Glycine max
atgatttttatcaaccgctgcgttttttgcatcgagtatccgagttaagcaaggttggccgccgtcaaagcgtttccgattctccaccaccggcgtagctgccgccgtcaaccgtcgccatcgatgtcgtcttcttccgccaacgatgccgaggctctccggcgcaaccgcatcctctccagcaagctctacttcgacgtgtctccgtgcaaggttccgctaatctactccgcgtcttacgacatagagtttctcggcatagagaaactgcatccgcttgattcgacgaagtgaggacgcatttgtggattcctcgcttcgtttggtattcttgacaaaaaatgcgtcgttgagcctttggaaagcttcaaggatgatcttgtagtggtacac

SEQ ID NO: 13139 - DNA, 371 bp, Glycine max
gaagtttccttgaatgaattgattaataaccaaagtgaaactaagactaaaatagactgacagatcaagttttgtccgaaaatcactaaaaaccgttttaaggtccaacgccttaaacggtcctctttgcttttatcggttaacatggaccgttcaaaagcataaaattaacatgtaactttaccgtttttgaaagaactacgtaggtctgagttcctcattaaggatacgtaggagcaaaagccccgcttttgtcgaccaccccaagagatcgctaatggtccaatgccttaacgtttctcttctttcaaaaaaacaaagagatcgttaatggtccaacaccttaacatttctctcctttcaaaatcaaa

SEQ ID NO: 13140 - DNA, 396 bp, Glycine max
gcaacttggtcagctcatcaaaggcactattctatttttaattattttttgggggaacataaaattgagtaattgacgactctgtctcttctgctaactgtggcattgccgtggacattttcttcttagctaaataagataaacacttccaattttgagacttttccttcgcacccttttgcatcttttagtgttttttctttatgagttttgctggttttggtccaacaacatagtgttttcatcatgggaaacgcttgtgcaaaaggaaaaccagttgctcatgtctcttcctccaatttttctggaggtaagaagcatgcaagtaggccaaagcagtattcaaattcttctgaacaactatctgctccaataacttcagaattaaatgttccc

SEQ ID NO: 13141 - DNA, 380 bp, Glycine max
cccacgcgtccgctctgaatccaattcttcttcttcttgttctctgtttaaggcaatgacaacatttactactcatactcaaagtagcttagtgttttgtttagcatatcatggagaataataatcagtcgttttggcaattcagtgaccagctgaggttacaggcatccaatttggcgaacctttctctaaacgattcgatttggagcaacaattacatctccaagaggcgtgatgaaaggattaattttgacatcaaagtggggggtgagatcaactttttcaagtcaaaggatccagcttgtgattacaacgataacgtgaatggatctcttcttgccatgccttacaacaacaaccaccacaacaacattattttg

SEQ ID NO: 13142 - DNA, 236 bp, Glycine max
ccaacgcggacgtcaaattcgacgtcagaaatcatggaccatcttagattcattcatcgaggagagactatcacatatggccatgggcacttttaagactctctgaaagcactcaatttactagacgtgcagactccgactacgataacgaagagaagacagagctctacgcaaactcgaagaccacgcactccaacgagataaaagacgttgacacaaaactaaaagccttagaa

SEQ ID NO: 13143 - DNA, 309 bp, Glycine max
  modified_base (96)..(96): a, c, g, t, unknown, or other
cccacgcgtccgatttgcatacaccccattcattggacgatccgagagggtcttcttcgtggctgatttctgcgcacagaccttgcactgatgtcncatgagaaatagttgagatcggaccacaagtcagagatttcaaagttggcgacgaacgccttgctaaactcaaccatcaatatggaggtggactggctgagtttgatgtggctagtgagagcttaacagctgccagaccatctgacgtctcagacgctgaagctcgagcattacctatcgtctggctcacagctagtgatgccctcacttcaa

SEQ ID NO: 13144 - DNA, 189 bp, Glycine max
cccacgcgtccgatcacgcgtacgcccactcttccgaaaaaaaaaaaaaaaaataaggatttgttttttaaaaaaggtagaaaaaaaaaaatataaaaaatttaaatatttattaaaaaaatttaaaaattttatatattataaaaaaaaggccgccccttttaaaaaatttaaatttatttacccttt

SEQ ID NO: 13145 - DNA, 185 bp, Glycine max
atcgaacttcaatttccctacgggcttaatatctccccgcatttgtccctatcctcagtggtatcatagtagatagtcattccccttatctatctctcttctctctccccgcccaaaccctaactccctaccctattccgctttctctcatccatcatgaaacgaggaaagtccaagacccaatc

SEQ ID NO: 13146 - DNA, 192 bp, Glycine max
  modified_base (191)..(191): a, c, g, t, unknown, or other
gttgaattgggatttgaaagaaatgcagttatacaagctcttcaattattcaatggcaatgaggaacaggcagctgggtttctttttgggggctagaaacaacgtttattttggaaattgattgatttattacttgaaacaatttttacttttagccaattcaattacaaattctaaattatagacccaana

SEQ ID NO: 13147 - DNA, 430 bp, Glycine max
  modified_base (48)..(48): a, c, g, t, unknown, or other
cttgccgtttctcattctgtcagaggtctgatcgatggcgctttgtanaactgggccgagcccgattccggggagtggttcagctcaaaatttgtcgacaaaacttattgtacctgctcccctgcgttttaccagacaattctctaatttagtcaggagaaagcgcaagggagtgtgctgctcttcattaaggaatgctgcatctgcatcttctaaggagtcactggaagatgctccaactaccttgtcagtttgcttggaggaggaaacagatcatgttatacagttcaaaatgtcagactttaagattttagatactgttagtgttggccttggcgggaggccggatgaggtaatttttgaaagcatggtaaaagatagtgctctttgtgtaacacaagagttgtacttcgacagctttccagtgcac

SEQ ID NO: 13148 - DNA, 397 bp, Glycine max
cccacgcgtccgcaaatgcatacaattactacaatgttgtatctgcttctgcgtggtgctgactcaagttcttctctttcttcccttcttcctcgatctcaatcttcccaaccggattttgctctgtggggggaggggataccgtcggacaggtcggtgactccgggagctaaaccacttcttgtttgggatttgtagtagatttggcctaatatttgaattagaccgtgtagaattgcatctggcaataggttgttgagtagtacgcataacgcattgttttgtgttacaaatattcttaagcttttctggggaatttttttagtttgggggatacaatacaatttgtagctttggttagtgattctccaagatgtcaaaatttgagggtgttatt

SEQ ID NO: 13149 - DNA, 363 bp, Glycine max
  modified_base (28)..(28): a, c, g, t, unknown, or other
  modified_base (54)..(54): a, c, g, t, unknown, or other
  modified_base (101)..(103): a, c, g, t, unknown, or other
gctttatctcattttacaaggctgtttnggcgtatcctaactgggcgttggagnctctcattgtggcgagagatgatgcttgccagagttagctgaagaannngacttattttagtggagggaacccggttagtgcattcgattgggctgatattgatttcattaaaagaagggaaggtatttgaggaatctgtttgaggggatgggactgtttcaatttttgagcattagtatctattccgccatggcttcaaaatcctgaattctttaactgtatcagcaatatcaagacatatagcatctcttgccttgtatacgaggaaaatgctcttggccatgaggcatggcaatggatctagtgtc

SEQ ID NO: 13150 - DNA, 437 bp, Glycine max
aattgagccattctatctccgaccaaagatcgaacctgtatattgtaaagtaccataggatgaacaaagacggaggttgaaaataagaactaaaaaaattgaatcacagtcacaattgatcacaataacgtactcaatgcaaaactaacaaggcataagacacaaaaaaatgtcaatgacaatactttactaaaggacggtgagctagtggggaaaaatgaggaagtacacctataggagtaaaataaaaaaaaaaggatgaaaaaaaaatgttcttgagatgtaacatctaaaaattcagatttttgtacacgttccattttgtaattgtactttgctaaatcctaggataattatttcttcttcattgataaaaacatgaaaaagtaatatgtaacattgcaagaaatgtttaaatgaaaataataaaaacttac

SEQ ID NO: 13151 - DNA, 182 bp, Glycine max
  modified_base (179)..(179): a, c, g, t, unknown, or other
  modified_base (181)..(181): a, c, g, t, unknown, or other
atagaataaagggaaaggacgtgttggttgtcatggaaccaaagtctagagttagacaacgactacctagttctggcttcaactaaaatgtagctttagagatgatactcgggttcattgttcccttttcatgtaatactttacgttgatccatgaataaaaatttgacaatttacgtngna

SEQ ID NO: 13152 - DNA, 418 bp, Glycine max
gacaattgatgcaatagcttagttagaattactcatgatcttaattaatggctgagacgtgtgagtctaagagatgcgattgataacaataatgttatttcaatgagagaaaaaaaattatgcaataacagtataaaattttttatataatcgttcaattatataataagtttattaacttttaacataactatcttaaagtaattcaagtgatggagttggatgagtcggataagaaggaaaaatacatggccttaaccgtagaggagttcaatttaagattgaaattgaagaggaattttggaaagtagcttgaaaattggaatctcttttaagataaaagacaggaaccaagctatgagggagggtgatagtaatagaaaagactttcacttgactcttaaaaaaactagggacc

SEQ ID NO: 13153 - DNA, 317 bp, Glycine max
  modified_base (32)..(32): a, c, g, t, unknown, or other
  modified_base (95)..(96): a, c, g, t, unknown, or other
accgcccacgccgtccgattcaacatattatncgataattaaggcaagttcttgtagccctggttgggtgtacattacagcgtgaggtagacatnnggcaaaatcaatagccagaagccagtgaagcgccattgatcctggtgcattcctcgcacaaccctatcttatcattattcaattttgttgtctgaatgaaagggaagaaggggtgaatccgtaggggatgggggcctcgctgtcgaacctgggaagcaacggttcggccgccgctccgggcctcggcgacatcccggagaattgcgtcgctcgcgtctttc

SEQ ID NO: 13154 - DNA, 414 bp, Glycine max
gagggattctcgtgggaggaggagcagggagagggagtatagagagagggacggtggcggacggaggaggcatgggagtccggccagggaagggagcgaggagcgccgtgcgaggatcgagcagtggaatcgggagagggaagagaaacaatgatttcgcaatgattctgtgttcatttgcttgcgaagaatgaataaaccatcaattaagtcctcaaactattattaccctgtgtctctccttagtagtccttaaagtaatgaatgaaattagtgtttaaggaatgtatggagggctgaatgtccgtcactgtactctaatttagaaggttatgttaatatttggaagattacttggcatgctttattggacttttaggactacttaaatagtttagttttttttattagttt

SEQ ID NO: 13155 - DNA, 291 bp, Glycine max
acggtcatgttccaagagggccaacagcaacattatttcccattggttgatgagtgcaaagagtgcacctaaagtgtgcagagtgtggcacctaacaacccagatggacatgctttagaatatcatcagtttgatttacatcaggactatgatcatggcttgtatactgtttttaatggtacacgttattgtgaggaggatgcgattcctcatatatctagctacctaccaagtatctgccctcctccttctgcttacttaggcccaaaatgtgcactttgagactgttca

SEQ ID NO: 13156 - DNA, 311 bp, Glycine max
ctcatccctatgatatcactaactgtcagacttaacatttcaatttttaagtaaaaagtggattaatttgatttggaaagcaaggattaatactatgccatattatcaccaaacaacgcacaaatattttactgaacacacacacacacacacacacattaaccattatacattatttacattacaaagagtaattgattttatacaactatgatatttacatctccaaatcaaaagaattaatgaaccacactacagagaagttgatcacaaaacataactctatcccaaaataatctaaacgctattat

SEQ ID NO: 13157 - DNA, 475 bp, Glycine max
  modified_base (383)..(383): a, c, g, t, unknown, or other
  modified_base (390)..(390): a, c, g, t, unknown, or other
  modified_base (393)..(393): a, c, g, t, unknown, or other
taaaacagaaatggatgaaactatgaatgatgctgagttgaatgaaaacccggagaaatcggaggctgtattggaaggttaaagtcaatgtctattagacagatatttgtcgtaccgtgtaatcatagtagtctcaatcagcatttttagcacattacaagtgaagtgaattaaaaacaaaacaaaaaaggcactaccgcatatgctgtagtagttattcagtcccgtgcaactaactcgattagaaattgttcattttcatgtgttgtattagacgaatttatttttcaaggaattgaagagtatgaccaattgtatactatactacacggcatgtcacccttcattatatgagtgagcagagaactgaggaaattccgtgncccaaanaancaacgtgtagaggatctaaaccatttgttgatggctgcgaaagatcacatctggtgggatgtgccaattgaagcattaaaaa

SEQ ID NO: 13158 - DNA, 442 bp, Glycine max
gtttttgaagagagagaaagtagagagagagagaaacacaactgctttgccaaaccttaatttcagggcacttccaagctgacaggaccagttgttgttccctttttgtgttgtttgattcagcgatttctggttttcgttttttttctttctttgttacaaggagagttcgatgtctttaagttgaataacttgttgggacatatttgactcggtgcttttcttttggtgcttgcctcatgggaaacagtgaggatgagaaatctgttaagactggaagcccttcttcttcacctgcaacaactgatcagaccaaccaacctaatattcatgtctatcctgattgggctgccatgcagtattatgggccaagagtcaacattccaccatacttcaactcagctgtggcttcaggtcatgctccacacccatacatgtgggg

SEQ ID NO: 13159 - DNA, 229 bp, Glycine max
tgaaaacatatacgatgggaacttacgtgccccacataagacggttagcaccaaagctagagacaacttgggacaagagaggagacaaatccagatgagaaaactgccctcttgacaacctgaaaaggccactaaatttcacaaatacctgtcaaaaattcgaaatttagtattcctcaagctgaagcatttactaataaaaacatttaagcatgctcctcttaggagg

SEQ ID NO: 13160 - DNA, 225 bp, Glycine max
aaaaaaaaaaaaaaaaaaaaaaaaaaaataataaaaaaaaaaaaaaaaaataaaaaaatgtgggaatataaaaaaaggaaggggggggcctccccttttaaagaatccaatcttacatacccttgcattcaacatcataacttttttatattgtcacataaattcaattcactgccctcttttttacaacttccttactggaaaaaccatctctttacccaatta

SEQ ID NO: 13161 - DNA, 416 bp, Glycine max
ctctttgtccctttctctctctatttcttttccctagatctatgctttgaaagtgagcagatggttctctgttgcagatctaatatttctccaccgctctttgatggaaagcaatctgatctatgctttcgttctcactctctaaagttggtgggctttggcttcaaattgcacaacctaggtgaagggacacaggacttgtgaatcaatggtagttcttacttttactcgaggaactttgagaatcttttaaaagtggagtggttgtgcaaacactatgatgtctcgtagataatacatagaggcaacaccattatgggatgttatattccatacatgtttgcaatttaattgcatgcacttaagtggcccttctactctatatgcactccactcttgtaaagatttttgggatc

SEQ ID NO: 13162 - DNA, 457 bp, Glycine max
  modified_base (10)..(10): a, c, g, t, unknown, or other
  modified_base (22)..(22): a, c, g, t, unknown, or other
  modified_base (25)..(25): a, c, g, t, unknown, or other
  modified_base (46)..(46): a, c, g, t, unknown, or other
  modified_base (93)..(93): a, c, g, t, unknown, or other
  modified_base (424)..(424): a, c, g, t, unknown, or other
cccacgcgtncgcccacgcgtncgnccacgcgttcgcccacgcgtncgttaacctagagaggagagactccacagaatgataccaaggagacngcagaaataaataccaatgatactgagaaacaggaagaggttccagcatctcaggccaaagagaaaatagggattgaggatgacggcaaattcaatcaagaagaagcaaaagggattgaagaagcaataaaagcacagttaccagaggaagaagtcaagacagcattgcccactgctgcctttgtccaaggcgatactgatcaaataccacagcagcaaacactgcaggatgatgattcagaagtgattggtattgcgaagaacatcgacactccagaaattgaaagtggcggaaggtccactgttgttgaggaacctgaacaacccgaanacatggacaacatcggcgttgtgaaagaagaac

SEQ ID NO: 13163 - DNA, 352 bp, Glycine max
acgctcatctttatataacctaattgcaaagattaataccaagcccgttttcttcttgttcgtcctctgtacactgcgggctgatgtctgttgtggcaactgagccatccaaagatgagacacaagcagaagaaccaaagacacagccagatgcctggggaagaggtttaagtggggggcatgattgaagctggcgacacagaagaaactgggggcatggcctaagacgacacaaagaacgacattgcggatgaggacactgttgatgacatacgcgatgatgcatattctacggacaaaagggctgcaaatggatctgaaataaaaatcacaaatatatgaactgaacaca

SEQ ID NO: 13164 - DNA, 457 bp, Glycine max
atcctctataaagaaagtgcttaatttgtgttgttacttggttcagtttccatggatgtgggggcttgctatatgggctcatcctaaaccttattcagtcacaactggtggaaatctctggcggagtaaacacaccaccaagaatatttactttgcaagttcttggatatcaaaagcttcacgacacaaaagggaaactcaaatagaacataatgttttgaggttccaacaaccaagtttggatcatcattacaaatgcatcagaggagggtctacatatcaagaatgcaatagaaaatttgttgtgaaggcaatctctaaacaacctcttggttttgaagctcatgctttcaatcctaagaacattttggactctgtcaaaaatgtattgtctgctttctactggttttcctatccatacacaatgatttgcataacattatgcgcattttcttca

SEQ ID NO: 13165 - DNA, 285 bp, Glycine max
aaaaaaaaaaaaaaaaaaaaaaaaaaaaaaaaaaaaaaagggcgaaaaatataaaaagattggtgattaatataaaggtggatgggacaatataaaattttatataatgttaaaataaaattaaatttaattcacttcattttacaacgtttttaaataaaaaaacacttaaaataatttaacttaaattaattgaataacattttcatttatccaactttaataatattcgaatattatcgaacagatcaactttacaaacattttcgcaaaattaataatgaa

SEQ ID NO: 13166 - DNA, 372 bp, Glycine max
attcagggttcctacaagaatgacttgcttgggcttgagtttgatcctctcttacctggtgacccaaaattgactggagaatacgtgatcacacacatgttaggcattgaattaaaccattccaagtggtgggacttagcagctctatttgtgattctcatatgttacagacttctcttctttactgttctcaagttcaaggagagagcatccccattatttcagacactctatgccaagagaaccatccaacagcttgaaaaaagaccctctttcaggaagatgccatctttcccttcacagaggcatcaatccctccattcactttcttctcaagatggtcttgattctccactccactaaatcaatatc

SEQ ID NO: 13167 - DNA, 382 bp, Glycine max
gcgtttctctctatagccagctatcatcaattcatcatgtcatcgccaaactccgcccgggaggcccacgcgccgctgcttgtcccgcgccccgatgccgccgcccgcctccccgtcctggcgctcctcctcggccgccgcggccactccgtcatggtccgggagacggcggcgcgtgagctggaggagcggcgcgccgactggacctactcgaagccggtggtggcgctggacatgacgtggaacatggccttcgtcgtggtctcggcggtcatgctcgcctgcaccgtcaaggagaaccccaacacgccgatccgctggtggatctgcggctacgcgctgcagtgcctcctccacgtggccctcgtgtggctcgagtacc

SEQ ID NO: 13168 - DNA, 409 bp, Glycine max
  modified_base (52)..(52): a, c, g, t, unknown, or other
  modified_base (86)..(86): a, c, g, t, unknown, or other
cccacgcgtccggtcctcagcagccacagttcctcttcgaacgaccccttcnatttcgagggtgcaaggatgtgcggctatctcancgctccttcttctcccaagcgttttggccaattttattacctaagcgccccctcaagcccttctaaagattttgatcttgcggctcacgatgatgatgccttcgcctttttcgttactggggaatccaagagccctcgatccgcggcagagcttttcgacggcggcaaaatcaagccgctgagcgaggatgattcctcggagtctgctaaaagcccacttcttcctgccaaacgatcttccatagcccaaagcaagaaagccattcgcgaaaccttctcgacgagaaagaagaaagaaaagggagatttaagtgaagaagaac

SEQ ID NO: 13169 - DNA, 260 bp, Glycine max
cccacacattcgttgacacatgggcggactcttgggttttattcaatctttcactgctgtgttgctcaacaaaggaagagagcataatactccaatcaacataccccacactgtctgattaggaattcgggttgcacacctactccttctactttccaacaccattcactctgaatttctagtcacagttaggttggttggtaccaacggttaggcataagatactcacaaagagatggcttaacacgcaaaatttattg

SEQ ID NO: 13170 - DNA, 268 bp, Glycine max
ggaagaaagagtctcttcaaagagtgggatcttgcagattgctgctctgtctcctccttggccatttctatctagcagtcctggagccaatggtgttgattgtggggatgttatggaggagcctttgacagattcgggaagctacccacacgatttggaggaagacaaagatgtgcaaggatggacaatcacaaagtcaagatgggcttgtgatgttcgtccctcaccaagaggtgctgatgatgaacagaagcacggcaaagtgagc

SEQ ID NO: 13171 - DNA, 273 bp, Glycine max
ctaaagacaaacctcattgaccataatcacatctcctaatgcagaaaccgacatacgaaaggagcgttctcacatgagatgacagacgaccgggtgcatgctatcccaaagctaggtatgtatgcggccaccgatcactggacctttgacgccatccacaggggacccctccgtagagtcgacctcgactccggaacgaactgctgggccttcgatatcggcgacctatgaatcctgagctcccacagatgttgcaccaaacgccagaaatga

SEQ ID NO: 13172 - DNA, 393 bp, Glycine max
cccacgcattcagacacacgtacgctctccaacgctacagggtctgacgcgaaaacccaggtggaatacatatcgaagagcgtcgaacagcacacactctgtactgttgggcgtctctatctcaactgtaattacggatcaatctcttacaattggtctccacccagaatgaaaactaaccgagacatcatttacaccaggctagctacacaggcttgtactctgaaaacaatcatccagagctgcactagtataatattatgatcataaagcacgaaccaacgctataatcgctattttggacactgagttcaacgcatccaaagtaccatgataaattctttatctataccgcgggatcctagtactagctactaatacctgatatgatta

SEQ ID NO: 13173 - DNA, 234 bp, Glycine max
gtaggacagctcctcatagtagctctttctttgcaacaaaactttgtctcacttttaagggaacgttcaccatcgtaccatggttactccaagacccatttatattcatactcacctctatttctggctttatatatatacatatatatattaatatacccattgtcaatcaataaaaccgaaatctactacgaaacaaacagcatatacatcacataactgctaccaataaaa

SEQ ID NO: 13174 - DNA, 439 bp, Glycine max
gccatggtctatcttgtcgtcgttgttgtaggatacgactcagtagttgaaatcaataaatggaggccagaaccaaaatttttaatatcaattataccaaacaccgccattccaaacactttattttgtcgcatctttgtgtcggtgctgcaaataacatgaatccgcttggacagattttcccttagagaacgcatatgagctatctattaaacatatattaggagtgcccgataccagctcctttgacgagattaaagcgtcgtttcgcaaattggccaaagagactcactatgacctagctgagttaatgaatgattccactgtgtcttgacgatttgtactaattctggaagcctacgaggcagagttactccacagagtgtaacttatagttttgcaacccttttgcttgaccttttcagtggcaatcatattc

SEQ ID NO: 13175 - DNA, 427 bp, Glycine max
gaaaaaatggcatttggcatatatgccgtgaattgcacggcaagcatcaattccactcttgtgcaataatcctttccttattcccttggtgactctcaccaacccactgtgtctgttctttctacctcgacccttctctttcaccatatggagacaactaccacttccgcacccaacactcgacgccgctctttccgctgctccttcgtcacacgctgctgtcgctgcttctgctgttgatactccttcccttaaactaaacaaatgcaccttcttttttttcaatcatcgctgctcaacacatgaaagcagaggaacaacagttacaaccttcgaagctttaccttttaggttctcggtcaaatccacgccatcaatggggagtgggaaaagcagagacatctcaaggttctctactgctgcaaag

SEQ ID NO: 13176 - DNA, 63 bp, Glycine max
aaaaaaaaaaaaaaaaaaaaaaaaaaaaatttaaaaaaaaaaaaaaaaaaaaaaaaaaaaggg

SEQ ID NO: 13177 - DNA, 308 bp, Glycine max
aaaaaaaaaaaaaaaaaaaaaaaaaaaaaaaaaaaaaaaaaaaaaaaaaaaaaaaaaaaaaaagagaaaaaaaaaaaaaaaaaagaaaaaaaaaaaataaaaaaaaaaaaatacaaaaaaaaaaaataaaaaaaaaaaaaaaaaaaaaaaattactataatcaaaaattaatcaattaaaaaaacttaaaaaataaaaaaagactcttcaaatcaattcatcaataatcaaataactatttatccaaaacaacctcctatagaaaaaattaaaccacaaatttcacaaattgaacaaataaaactaac

SEQ ID NO: 13178 - DNA, 433 bp, Glycine max
cccacgcgtccgctcacgctttctgtctttgtttattcggctcgcacctactttcatgctgcgcagagctacagtctcaccgatcttgcgattatttttctaatatgttatatgtgctagagagagagacccactcttggggacactcctgttaagacccgcgaacgaaatattgctagtccagtgaccccttctgcattgtaggataccctggatcatatttagtcggatcagggtcgtgatctaggtcttgatagctcgaatgttgaatcttaataccttaacctatgaagatgctgggactcctagattgaggatgcttataatggcggtcgtacacaagcttgtactacgaatgatgatgagggggacggttagccatactatatgattgagtgcgagcttaatcgtgtaggccacttaccatctgtca

SEQ ID NO: 13179 - DNA, 400 bp, Glycine max
cccacgcgtccgcccacgcgtacgctccgtgcgtggctatgatatagcacacatacagggcctattccttactaagggtgtgaaatctggagggagaatgctaggctctgaatacaattatgcgacactacccatttacaatggcgaacagcccctattggggccaccttcttacgccatcgctcatgctgagccgtcagaactcaatcatgcagcggaagaagagacactctatgaggagcttcagagcacgttggatatgaaggatgtggatgaaagtgatgagaaagtttcggactttaacgatggtggaggagtttgtgatgaagaaactggggacggtgattgaaaaagtcacggttgggagacccatacttgcaatgaggaagcgggtgtttat

SEQ ID NO: 13180 - DNA, 337 bp, Glycine max
ccagtttccagtgagacaactccccaagctgaaggaaattagaagtggaagctcaacagggagcatgttttcattgccaccgttgaaaataagtggttcagaagaaacatggaagaaaatcccggttctggaacaaacagccaagtaacctgctgggttacgttgagagcaatgtagtgggatgtggttattttcccatctatttttttcatttaaatcagatacctctgttatgcacgccttagatactaacacagatgtaagattctaaatgtaaagatggaattaattttatagaattataggttccatataataaaacctctggattttgaag

SEQ ID NO: 13181 - DNA, 433 bp, Glycine max
atctcacttcagaaatatggttcatttatggtatatacaaacaaagagttgatgtccaggggatgctgcgtcccacagagagcggtaccggttggtccagtagtattgagaatcacatcatccatcatgaacaagatctatgaggaccaatctcagggcataatctgctatgaagatgaaagtggagaaataattcgtgaagggtacgatgaagggcctcgttatcaccgaatttctagtccaactcaacacccaagggatgttgaaatcatgaatcttcaacaacaacaaagttggcttcagattgttaaaggagaagaaatcaatcatttagctaaaggtgctcttcatctacaagaggatttaaactaccataaatggctataactcattccaaaccaatcaggcttttgtcactctcaaaggctttaac

SEQ ID NO: 13182 - DNA, 441 bp, Glycine max
ttttctctctttcatgtagttttgctaccctaatagacacgaggactatttaaaaacccggagggtcctatcgttccaccggcgccgtcaacctccaaggctcgaaccaccatccttccactcaaccgctcacttgcactcgtcggctcaagctaccaccgcatcacgcctcagacgccgccagttaacaagcatatgctcataaagaatgaaggaagatggtgtttgggcaagtagtggttggtcctcctggctctggataaacaacttactgcaatggcatgtctcagtttctcagtcttattggaaggaaggttgctgttatcaatttggatcccgctaatgattcgataccctatgaatgtgctcgtgaacatcgaggatctcgtgaaactaagtgatgtaatggtggaacattcgcttggaccatatggaagtctt

SEQ ID NO: 13183 - DNA, 330 bp, Glycine max
cacggacacacgttaagtttggagaacattttttgcatgcatcttacaagggttccgatggggatatggtggtagtagaggactctggtagctagaagcagagttcgactacaggacagggacaagctagtgatttgagtaaacaatcgccacaaggtagaagacttaaagcagtttctgcttctgggaatcgctagttaacattacgctgagacattgaatatagattatatgtacaaattgacacatccatattgtcaatttagcagtgtcaaatacaacatgatcaaaatatataatttaatgatttagcataggttgtgtcaaaaa

SEQ ID NO: 13184 - DNA, 434 bp, Glycine max
cccacgcgtccggtgcctcgcctgatgattgctattatagaaggcaccattacaggtctgggtctcgaagtgcctcacccaggccaaggagaaggtcaaggaggagctactctcggagtgccactcctgtttcaaagaggagcaactcgcgaagtgtgtcccccaggtcaaggaagagtcattcaagaagctccaagaggagtggcaaatatgagaaacactactcaagaagcccgagtgtgagtgcaagttcaagatcagtatcgaggtcaaatactccaaggtctacctctccttcaacttgaaatttgttggtcctatatggcttgacatcataagattatagtggataatattttagtgtggtatatgcagttctagattgagttttggtttggatccgttcaaggcttgtctaaaaaccacctgatcct

SEQ ID NO: 13185 - DNA, 429 bp, Glycine max
cttttctccaaacaccgcgccttcagtgtctacggctctgtagccgcctgagccaccgcattcaccgtcatccaccgcttttgttcaaattcctctcacctcttccttccgttcactacccattgcacctgaaagcacgaggcttgctcgcaacacattcgtatacctcctccgtttacttaacgaagggtttgaaccttcggaatcataagcgcactgcgggtgaattcctttttccgtgtgtcccgttgaagttacgtttgttcggtggttttttcgaattctctgaactcatggccgcatggtcttctagaaagttactgagagacgttcttctcaaaagggtagtctcgaatcaacttcccggcgtcagatgtttttcttctgcgccaaaaagtgctcctaagatcggtcactattccaagaaag

SEQ ID NO: 13186 - DNA, 444 bp, Glycine max
gtgagaccgaggcctctcgttctctgaccttggattcaagtcagggagcatttcgtaaaaggggtttccctggggctctgagaagttcagctatcatgacatctgagcacaaccgaacatcctctggcaggaacacatccaacataaagaatttggagacaactcttaggggtattgagagcctgcatttcaatgacgagagggtacattattagcagctaccactctcgatcacctttcttctttgtaaattctaaaaaggcttatactctttttgacgaactaaggagtggaatgttgtctatgcattgtgttgaagaaaagctgcaaacaagttgggaatatccctcataagtatacaataaaaatatatgtctaggcagcttcctaactaaactggccttgtaaaaggcttctgttcatacagtttgtgttatactgaca

SEQ ID NO: 13187 - DNA, 428 bp, Glycine max
gcagttcattctatcatatccttgctcatataatgcacttttcaattacaataccccagggccagaaacttatgttcatgaccatcctcaaggtcccaataacatttacttgaagacaattttgagttgaccttacagcctagttccacctatacaaacacccttgatccttcattcttttttgagttgaccttacctagctccaatactggcaacaataatactcttgggcatctgaactatctccattctttttttacccctttctttgcagtggatttgcgaggttttaaagaaattaaatgcgtttttatgtgctaaagagctaggtaattatagaattcatctcacacatacttctttttactaccttttatcttttagattttattcttgaattatcgttgtttaacggagtaatttaatta

SEQ ID NO: 13188 - DNA, 180 bp, Glycine max
gtttttaattctaagacttttactactatcttcactattgttgtattacagcttcttctgcgaaggttctttagttcaacggatatcccaaaatcccaataacaataacttcaagacaaatataacctaaacttacaacctaataatccctatacaaacacacataatccattattcttt

SEQ ID NO: 13189 - DNA, 432 bp, Glycine max
gcgaggtgcacctgggttgcccagccggtttctccggaccctatatttcccttttctctgtctctacgaatctccaattcgaccaagatggtgaccttcttctccctcgacgacgcaccgctatgttcgaagcaaacgcacaacattcatttagtgtcagaatccagcataacatcacttcgtcaattccaaatgttggtctccaggtttggagagctgaactattattatctgattttatattgcataaagcatcttcttcctctcaacttcatcaagttattgcattagaacttggcgctggaactggcttggtgggtttattacttgcacgtgttgcaaatgcagtgttcctaacagaccatgggactgaaatacttgacaactgtgcaaagaacgttcagcttaattttggattattgaattatcaag

SEQ ID NO: 13190 - DNA, 429 bp, Glycine max
gcggagataccactggcttgtccatccgatttttcaagaccctatatgagcctatgctatgggtctactaatctacaattcgaccaatatggtgaccttcttctgtctcgacgacacaccgctatgttcaaaacatacgcacaacattcatttagtgtcagaatgcagcataacatcacttcggcaattccaaatgttggtctccaggtttggagagctgaactattattatctgcatttatattgcataaagcatcttgttcctctcaacttcatcaagttattgcattagaacttggcgctggaactggcttggtgggtttattacttgcacatggtgcacatgcagcgttcctaacagaccatgggactgaaatacttgacaactgtgcacagaacgttcagcttaattctggattattgaattat

SEQ ID NO: 13191 - DNA, 433 bp, Glycine max
caagtgtagaagggatcaactgtgggctacctaatgataaagttcagcatgtagatctgggtgacacaattatgcagggttctgctgtcagttgtcagaaaataccttggaatgagggaaatgccaagttagaagacagagaaagttctggcaagaagttaaagacaggtttcggtgggatttatggttctggaggtagagactcttttaatgacagttttacatctcttggaaataatcttggctactgttcttcagttgaggacaaacgatgtgaggaagcttgtgatgagaaaatcatccgggaggacttgggaaccctggaaagaaccttgtttccagttggcacacagaatattaccaactcgctatcagtgatggatagcatgtcaaccaaaggggttggtgagtatgatgaacgagttcaagatgg

SEQ ID NO: 13192 - DNA, 364 bp, Glycine max
accacacgtactaatatatatatatctctctctctctcgcatcacaaattcatcaaatcctgggggagtctcaatagttgtgcttctctctttctttgtgaaaaaacataaagtccaaaccatggctcataaaacctataaagaagaaaccgacttcaaggttcccgaaacgattacactttgcgttaacaactgcgacatcaccggaaaccctgctacgaataacatgtgtcagaagtgcttcaccgtcttcaccacctctaccgacaccacgtccagcgccagaggtgccggaatagcttctacggctaccagatccggcatattcgcgcgtgcactgaagagatcttttcccgaagagccc

SEQ ID NO: 13193 - DNA, 432 bp, Glycine max
agaatctgttagagagtgtgttgttggcatttctccttctaagaatacaagtggtggttggctacaatatataccttttgtgaatatcgtctgttgttaacttgttaaactgttttgcattttgcacatgacttgtgctggatgtgtgttgtgaatataataaatctaatcacctagccgagaaaattatgggaaaactctttttctgggggaattcattagaaaatcccatatggcattcagtatgcttaaatttttttaatgatctcattgatctatacttctttagtataaaaccaggaatgattttggtgaactgctttcttggtccttatatgccagtgggtctgtaccatgcaacttgacaaggagagttattatagtttatctcaagtctctcttcctagttttagtgataacttatgtctctct

SEQ ID NO: 13194 - DNA, 439 bp, Glycine max
gcagaatgctctaagcttggaacgttaaaacacatatatgttgacaagaagagtgctgggggtgtctacttacgatttgaagatacccaatctgcaataagtgcacagcaggccttgcacggaagatggtttgctgggaagatgatcactgcaagcttcatggtgcctcaatcatatgaggataaattcccagacagcagataaattcacggtttatgcgagatgaggaatctcgtggcagaaatagtcatccttagaattatataacggcttcttttgagatagatgtagctatgcacatttgtcttgggaagttaaaaggtgcttatttgtaaaagctgcagttactactttcataaaattttcgggggtgttggtttgatttaagcgtcctattatggtattactgttgtggtttggcagtgttattgattggaac

SEQ ID NO: 13195 - DNA, 373 bp, Glycine max
cccacgcgtccggaaacaaataaaaaactatcaaaaaaaaaaaaaaaaaatataaataatgggtgactctattatacaaggatcatagctaccaaatgtcagaatatacctttggatcagcgatattccaagtttcatgacataaaaaagcctggcattaaggtaacgacacgttactgtagtatttatcgttctacacgcaattactttgcaaatgacagacttacatcaattgaaaataatcttagctaatgtgctttacttcagttcacatgatatcatgaagctcgtgatgagaaaatcatccaaatagacttgggaactctgataagaacactacttacactttacactcccattattaccaactttc

SEQ ID NO: 13196 - DNA, 133 bp, Glycine max
aaaaaaaaaaaaaaaaaaaataaaaaaaaaaataaaaagcaaccgctctcgatgttccaatcggacgtactcgtacatgcgacggcgtaactctactatagcgatacctaaacccaattcactggcactggcc

SEQ ID NO: 13197 - DNA, 440 bp, Glycine max
caagaaaggaggtggtagtttgttcagtgcatctgcttttgatgatggtgaggaggaggaggatgagacagtgattaggttttctggcaagaagaagtcctctagaggttcgaagaactctgcctcggcttttgatgctattgatgatgatgcggatggtaaggtggtggatgataagaatgacgatgttgatgatgatgatgagcctgttatttctttcactgggaagaagaagtcttccaaagggggtaagaagggtggttctgtgttttcggctgctgttctcggtgagattgatgacgatgaggagaataaggatgatggtggtggtgatgatgatgatgatattggaccgatcactttctctggtaagaaaaggaaatcttccaaaaaggctgctaattccgttagcaaaggtgcttctgttgaggaaggtgatg

SEQ ID NO: 13198 - DNA, 410 bp, Glycine max
aaaaaagaaagagatttgaaagctaaaggggacgatggtgaagagaaaaaggagaaggatgggaaggagaagaagaactgagacaacacagacaagggtgacaaaactgatgtagagaacgtcaaggggaaagaaaatgatggggaggatgatgaagagaagaaggcaaagaagaaaaaggagaagaaagacaaggatggcaaaactgatgcagagaagatcaagaagaaagaagatgatgggaaggatgatgaagagaagaacgataagaagaacaagtgtgacaaaattgatgcagagaaagtcaacgggaaagaagatgatgggaaagatgaagggaataatgaaaagaatgacacagaaaaaggagacggtgatggtgaagagaatacggaaaagaaagataaaga

SEQ ID NO: 13199 - DNA, 362 bp, Glycine max
gcgtgctggtgtttgtgctcttggtgctgtcatagctaggcataatggtgatgaaagggtacttgactattaccagaggcgttttgttttattcattttgtatccttgtgataattccaatttacacatgaaatccacttgtttaaccgcgtttcatattattgcctttgcttataacacattgtgatacctcatgatttgccctatgagctattgtatggcagagcaagttacttatgggcttgttcattcttaaactagcatattggtaacaacaaattacatactacccacattgttataaggcctatgtgctttatgatgtgtctcatggcatatttactgtgcaattcattttaaca

SEQ ID NO: 13200 - DNA, 435 bp, Glycine max
cccacgcgtccggtacacatgaacctagaaagtcatttgacaattctagcagcaatacaggcattcaagcacagaagagtgcaccttctcccaataacttgcagaagacagcgaaagaaagagataattcagatcaagtttctgaagtgcaccatgatgcttccgatgcttttccaacagagtgggtgccaccaaatttgagtgtacccattttggatctggttgatgttatcttccaggttcatgatggtggatggattaggcggaaggctttttgggttgctaaacaaatcttacaactaggaatgggtgatgcctttgatgactggttgatagagaaaattcagcttctccgtaagggttcagtggttgcttcaggggtcaagcgagttgagcaaatactctggcctgatggaatattcataaccaagcatc

SEQ ID NO: 13201 - DNA, 423 bp, Glycine max
  modified_base (389)..(389): a, c, g, t, unknown, or other
cagatttttcgatttcttaacggtagcatgttctcacgccttcgtcaaccttctgcgttgggccacactcattaatctataatcttgaggcttcgattcaccacagaccctgaattttgaattgctcttaaacttcaaacttcccacttttttgtttttgtttttgtcgtttggatttggtgttttcaagatcatggggtggtacagaaggggaaagctcgctcttgatcattttcgtagattggcttcaagggttacccctcaaaatccaatttttcagcgtggtgcgaggatttgctcatctgggtatttggattcaggttctaaagtagctagctttaatgggttctcttctttttgttcaacttctcagagattaggcacacggngtgtttgtggagttaacaggaactttcacaattc

SEQ ID NO: 13202 - DNA, 433 bp, Glycine max
ctttgattccatttctcattctcacttccaaaactcctccattcatttctcgcatttctacctgtccaaagctctttctctaagatcgagctttggaaaacttgaggaagcatttgagtaacaaccccttttcagatccctgaagggttgtgttcatttgtcgaaataataacaacttgcttggaacaagcataataagcatggcaagcgcgttgcagcttcagggggttcaagggaactacctttgtgtgagtgtgaggaggggcttgcatcattgcaagcctcaaattgggtttgcagcatttggtgctcctgtttgtgcaagaagagtttggggcaatagggtggcattcaatgtcactacttgcaaggcctcaacaacaagtgatgtgattgagaagagtgtgactgagaatagggtggtgagtattga

SEQ ID NO: 13203 - DNA, 247 bp, Glycine max
tcgcttattatggcggtggttggggcggtccctgtcgtggtggtggcggtggtggctgtggagggtggcgtcgacctaatggcaaccctcacaactaaaaaaaaaaacttgctaaagcttctttacaggtttaggttttcgcaataaataaaacttcatgagaagtgtagttgtaataaaagtggaagtctctcttctcttgtgatataaaggaataatagatttatatatgtattttcttatcttt

SEQ ID NO: 13204 - DNA, 298 bp, Glycine max
atcggtcttcgttatctcactaccctagttgtagcgcaagctcttcctgagataccatatggggtcctttatgaacgtggaggataaccttatctaatcttagcacgttgaatataatattcggactcttaacaacaacaactttcatatgtcatagtccctagcgatagtgaagaaacagcgaatcctcgatcaagctacctatctatagctccttgctgatgtacgcaagtacaacgttaacaatgcttgctctctcactcatcatgaactgatcaacagctaactcgtaaggaat

SEQ ID NO: 13205 - DNA, 215 bp, Glycine max
gcgctctgacgttcgcaccagcggacattcgttgttatacatgtggaaacccacacatgtttaggggcattccttaaacaaggggtctatgcagataatcaaactacgctctcattcgcacttgcccgatcccttaatcatccacactgatctcaactgctgcactgtgtttctcaatcctaatactgccccagttaccatagttgactattgtc

SEQ ID NO: 13206 - DNA, 390 bp, Glycine max
gttctgaaaaatgagttccaaagtttttcttattctacttatgttcatggccactatacgggtgatctcctctgaggtggcacccgatgatgcataccacaattttgacaaaacagatgggaagcgtagtgcaaatggggtagatgaaagcaaatattggcgtggtggctatggcgactatggtggttggcgtggtggtggttgacgtgctggctatggaggctggcatggcggctatggtcgtgggcgtggtggcatatggtggctggcgtggaggctctagtggctggcgtggcggctacggaggttaacgtggtgtctttggccctatcgaacataatgaggctcggattgattctagcccctacaactctcaaggaaacttgctaa

SEQ ID NO: 13207 - DNA, 358 bp, Glycine max
attcattcaaaatctatccattctttttttaattcccccccactataaatatgtatccggtcacaccaagctcttgggggacaactctgattctatgcctacgtcttcctccaaatcacaacacacccaattacaccctctgttctctgcaaatgcggtgaatgagaacacttggctttaattcggatctggatatggcgattgaagcacagttgtatcccaacaatgctcctacgtttccttttcacgtgtcaagggtagacaaatctccagcagcatatagtcatagtcacaggcaacaacaaccagctggctggcagatgaatcagaacattcctcttgttcctcccaactcttc

SEQ ID NO: 13208 - DNA, 437 bp, Glycine max
  modified_base (30)..(30): a, c, g, t, unknown, or other
tcgggcaatgacaagaacgagatagagatntgctttctagagtggtggagtaactcttgggccatgcgaaaaatgtttggaatttgggggtcaaggctccttgaaagtcttccatattatcataattaagggccttgtctgctgttaattcagatccttcctttaagctggactttgaaggtcttacttaccacctgaaattatggggtggagctgtcattaatggaattgaattgagctggataaacctcttcatgactttcaatgaaattgaatcaaacaaatggagtttatagctctggtcctctggagtaaatatatatatagggtggcgttccaaagaaccgaaacgacccttttccttttggtatgtggtttggttttgcacgggataatgcacttgaaactgaccaatgccttcacatggtttacatgca

SEQ ID NO: 13209 - DNA, 449 bp, Glycine max
tcgcgcaagaggaagtgcaagtggaaagtattacttcgagagactaatgaaagaagtgagggaggggcaagaggagctacaaaagaagttcctggaagccatagagaaacgcgaggacgacagaatagcaagagaagaagcatggagagtacaagagatgaaaagaatcaatagggaaagagaaatcttagcacacgaaagatccatagccgcagccaaagacgcagccgttatgtcattccttcaaaaaatagccgaacaacaaaacctcggtcaagtatcgaccaacatcaacctcgtacaacaaccacaacctcaattacaaccgcagccaccactacaacaacaagtgacacaacctagtattgcagcagcacaacctcccgtacaacagccaccgtccgtggttgatacacagtccgtggtgctgacagtggtgtcacaagtga

SEQ ID NO: 13210 - DNA, 438 bp, Glycine max
  modified_base (421)..(421): a, c, g, t, unknown, or other
tcgcccacgcgtcttcaacaacagattcaacagaaaattctctgcagcaaccttaggggcttgtgctgcactgccggtgcatcgcagaaggtgtcggtgccggtgcctgcggtgattcgctcctcggcggatagggaagggaagagtagcagaaaaaagaagcacagaaggaacagtaacagtggcaacagcacaagtgatgatgatgatgatgatgtttggtgtggccctggaattgggttctcaactgatgctgctgctgcatctgtggaatgtgttgtggctaggaagaatgtgtctgcaagaggaaaacttgatgtggtggaggacagggtaacacacagggagcgttcatcttattttggaaggcgcactgtaaagccagaaagcttctcctttctggaagatgaacctgacattnttgcagcacgccctgga

SEQ ID NO: 13211 - DNA, 265 bp, Glycine max
  modified_base (222)..(222): a, c, g, t, unknown, or other
  modified_base (230)..(230): a, c, g, t, unknown, or other
  modified_base (241)..(241): a, c, g, t, unknown, or other
tcgggaggacatgtcggaggaggacacggtggaggacatggcggaggatgcagatgctgcggtggaaagggctgcaaatgttgctgaagtaaaaatcacaaatatatgaactgaacacactcatatacttgagtgtactccatgtaataactagtatatatgtaagaaataagaaataaaagcatggactctatccgtgcttgggctggcataggttgaatngtttccgncaaccatgcantgtagtgacacatctttttactat

SEQ ID NO: 13212 - DNA, 442 bp, Glycine max
gttctataagttcacggtcagttctgaaaaatgggttccaaggttttgcttggggtagggatgttcatagcggctatacttctgatctctgctgaagttgcacccaatgaatacgaaaattttaacaaaaaagatgggaagcatgctccaaatgggttatatgatagcaaatggggttacggtggttggggtggtccttggtatggcggctggggtggcccttattatggtggcggctggggtggcccttattatggccgtggttggggcggtccctggcgtggtggtggcggctgtggctgatgaggttggcgtcgacctaatggcaaccctcacaactaagaagaaaacttgctaaagcttctttacgggtttaggttctcgcaatagataaaacttcatgagaagtgtagttgtaataaaagtggaagtctctcttctc

SEQ ID NO: 13213 - DNA, 395 bp, Glycine max
  modified_base (61)..(61): a, c, g, t, unknown, or other
  modified_base (245)..(245): a, c, g, t, unknown, or other
tcgcccacgcgtcctttttttttgtttttggtttctgtttttggtttttcgctgaagcgantgcaatacatcatttggaaacataataaacagcagcacttaaaccagagatgcaaagcacaagttcaagggagacactgaacaaacagataagacatatgagaacacttcataaaagggattccccttagcaaccaccacgaaggcgaaggacaagatgcaaagtggattccttctgaatattngaatctgccaaggtacgaccatcttccaattgcttcccagcaaaaatgagcctctgctgatctggagggataccttccttgtcctgaatcttagctttcacattgtcaatagtatcagagctttccacctccaaggtaatggtcttccct

SEQ ID NO: 13214 - DNA, 361 bp, Glycine max
gtggacatcagacatgttgtgaatgtggacaagatcttcagtcgagtaccatctgtgcaagccccattgacaccagagttaagctttactaagcggactcttccgttgtgaattaattattttgttgtgtaagctaaaattctttgatttttttaaccttctctggttgtatacaaacgttagatcagctgtgtctattgatgaaaaatggtacaacaaaaaaatattcaaaccaattaaattatttggttttatatggtttggacttgtaaaaaaattctttaaaccccaacctaacaaatgtgaacacgaatatgaatgggatgtttcttgggttgtccaaacataaaataaacacatt

SEQ ID NO: 13215 - DNA, 426 bp, Glycine max
tcgaagatatgaatatagaatctgaatctataaaagaaagctgttcaagcctgttagaagaggagaatgagacaccgagtcttccggataaagaggaaagtaaaacagaaatggatgaaactatgaatgatgctgagttgaatgaaaacccggagaaatctgacgctgtattggaaggttaaagtcaatgtctattagacagatatttgtcgtaccgtgtaatcatagtagtctcaatcagcatttttagcacattacaagtgaagtgaattaaaaacaaaacaaaaaaggcactacagcatatgcggtagtagttattcagtcccgtgcaactaactcgattagaaattgttcattttcatgtgttgtattagacgaatttatttttcaaggaattgaagagtatgaccaattgtatactatact

SEQ ID NO: 13216 - DNA, 446 bp, Glycine max
attatgcaaggtttatcacctatgaaggtcttcatgagcatcatcttcatcaagtggtcggggtctttgatcacagaggaaaagaacagaatgtccttctggcatcaccaacagggtagatggcaagcaagaaatagccgagttgcaggaaacaaggatatatactagggaacatttggcaagtttttagcttctaccttgctatcttgctgttcatagccaagcgggataaatataataatgcagaagaatgtgcccttggtgtggactgcaaactgagactacaacacatactgttccgatgtgtgatgaggtatgaagactatggttcgcatcacaatcaatgtacgattacatgttaatgatgacatatctattgctgattggattaaattgtgtctagatacagttgatgatggagctttagaatggattcttgttcttgc

SEQ ID NO: 13217 - DNA, 445 bp, Glycine max
  modified_base (374)..(374): a, c, g, t, unknown, or other
gaagatggtggttgcaatgatgcttatatttcttctaatttctacgcaaatggggagcgttgagcccgatgctgcagattgcttggatggttgcactactgcctgtgttcaaagcgactcgaggcttcaagcacggtgtgatcgcaagtgcagcattagatgcggtccagattccacaatcaaggaggacatgggttgagtatgtaaagtcacagcgcaagcaagcagtgtctgcttgaccaacaccgtgtcttttttagtccttgcttatatatgatataacattttaaagtcttcccgatgctgtagtagcatccaaataaacatggatgatagacagctttttaagatcaaaatttgtagggtagatgctntgtaacttgaaggaatgtgatatgaatgaatgtttcattatgggcataaatacatcactgccaattgtgac

SEQ ID NO: 13218 - DNA, 387 bp, Glycine max
aaaaaaagtacatatactaataactagaaataacaaaaacaaccaacgtgcacataatgagtgaggatatatataaaaacaaaaagatacatgaggccatgcttgttagaggagccaagcttctttacgcagtgcatggaactgtttaatttttaacatgggtcacttaacttgaatttactgcccgatgttctacaacgccttgactggtaaaaccttggtggtgctcaatttattcacgttgcataacatgcaccttttgccagatgtcatattgcctaaaaggccctatcacgatgacctattcccaacatttgtgcaaattaaatgatcaatgggactcaccatgaatagtggacttaacctgcacaggtgattcggttacac

SEQ ID NO: 13219 - DNA, 361 bp, Glycine max
aaaaactgaacataaactaataaaatgaaatgatattaacaaccaacaagcactaaaaaggttgggctatatataaaaacaaaaagataaatgaagccatgctcgttctgatggctcaatacttcattcacttattgacgacgtcaatttttaacattattgccccaaattgtcttttcacttagcatatgctttaaacacctttattcttgaaaaatgccttgtgctcataacttacacgtggtacagactgatccctttatcccagcttacgttgtttgaaaaaggctatcacaagatatactattgtcttaccttccaatgcaaagatcgaaagggttcacgctctgtactggacatt

SEQ ID NO: 13220 - DNA, 337 bp, Glycine max
aaaccctagcagcgcgcaaacaacatgccactcgaaatcttgaaatctgtgatctctaaaaaacttcagtttttggagattaggatgtagcgacttggattctttgctgcaaatgctttgggcaagtggctgtgtgcttctgctttgtgtgctattatttattatgtggtgcctattgtcagagaggaattctacaattctcaaggacagttacttgcattgacatctgatattatcacattaagtggttacttaatctcctcatggttccctgtgtaatgattacttcaaacgagtgactatcgtgtatatgcacagagtatggagattggggacc

SEQ ID NO: 13221 - DNA, 320 bp, Glycine max
  modified_base (173)..(173): a, c, g, t, unknown, or other
cccacgcgtccgcccacgcgtccggcgcccgtggcccgagacacccgacgccaccaccgcggggggttggttgcttctctcctcgaggcaccctgtcaaccatgtacggcggcgacagcgacaacagcgacggcggcagcgatgacctgcgccgcggcgacacgctggacttncggaacctgaaggtggtttccgccgtggggcgcggcgcgaagggagtggtgtttctggcgcggcagtccggcgcagcggcgggtggcggggagtgggtggcgttgaaggtggtgtcaaaggcgcttcttagaaaaaggaacaaaaac

SEQ ID NO: 13222 - DNA, 277 bp, Glycine max
caaggttagccactttgaaatcagtggtgtttaagtgcctagatggatattaaataaagtcagaaatctgtccaaattatagtggccagagctgaaatggcgtatgttatatatattggactgagattgctccttctaatggtccaattttcttatgtacatgcttatattgaaactagttttagactcaatacgcgatcttaaatatttcaaatgaattgatttttgtgctatttagattctattattaatgcttaataactgcacaattactgaa

SEQ ID NO: 13223 - DNA, 381 bp, Glycine max
cttagtcatcctcttccttctttctccaccaaaccttaaacctttaactctaaactcgcatataacccaatcaaatttgcctttagattctcatttcccatcaaactatatatatttctctctctctctctctctgtatccttggaatccaaaatattccaactaaacgtttcttcctttcatggcatatcctacccgtctttcattcagttcaatctcatacttgtcggtgtttctctaatgcaattagttgttgatgaatgagaagaggaacccaaagcgtcaaaaatcactgcctttcaacatgcctgtgacagactcaaataatccacagaattttgatgacaacattcttttccccggtggagagattgtacaata

SEQ ID NO: 13224 - DNA, 455 bp, Glycine max
ctaaactgtacatttactcatcactgaaatcacaattacaaccaacgtgcactcatggcttcctctatatttaaaaacaaaggatacatgaagccatgcttgtcggttttgttcagtacttcatttagttattgaagtagtaaatttttaacataattttgtcaacttgtcttttcctcagtatatgctttttcacctttatttttgaaatatgccttgtgctcattttttacaggtggaattgtctgatcctgaagccgagcttaggttgcttgaagttttctatcacaagatatacaaggtcttccctcccaatgaaaagatcgaaagcattaatgatcaatactggacattacgtgcagaggagataccagaagaagagaaaaatctgggtcctcatgatcgtctaatccatgtgtatcattttactaaagacacagctcagaatcaaatgc

SEQ ID NO: 13225 - DNA, 202 bp, Glycine max
acaaagtaaggcaaaagatttcagaacatatggacttgtggttatctgaatgcgtcgacgcaggcagaagttttatatgattatttacataagatgtgaatgatgtacttttttttctaagttgttaatgatgtactataactccgcaaaaaaaaaattatattaataaaaaaaaaataattaataaattttgtattttatt

SEQ ID NO: 13226 - DNA, 326 bp, Glycine max
gtggctactatggctatggctatgagaactcagatggttagaacgaactgagcggagggccataggccaaaggtgagtaagaccaaaaaggtagtgcaccgactatactggcagtcaaatggcagactttcgactgcaactttaggcacagatgaagatagagacaagactagtaccattctggaatgtaatcaatataacaaagatgattatccagaagaatatactggtgcctaaatacttgtcatcaagtcttacaacgaaggatgatatccataccagtattaagcatgatgtgtgggctagtacacaaaatggcaacaaga

SEQ ID NO: 13227 - DNA, 349 bp, Glycine max
agcgtccgtccagcgtccgatcttgttccctgcaagagaaagaaagaagggagagaagaagttgttgggttgagttggattggatttctaatctaatctatacctttcttttatcctatgcttttaaggcacaaacccttctttcttccctcttctttcttcttcttattgttattccttgcctttaccctttatggaaggaagaaggaacaactatactactattatccttattattgttattattgtaattaatctttttattatagttattgttgatgttattattcctcaaatatggattccttgtgcctctccaacgactcagttgtttctggattcaaagaca

SEQ ID NO: 13228 - DNA, 435 bp, Glycine max
attatagtgattgtactttatgctttttaaaacaatattcccctttgtttcctttttctgacctgatttatttttgagatgggaggggtgaaaccgtgaaagaaaagatagtactctactatttagcaagaatggtaaaatgtgtgctgagctaaatataaatatattaagtgttccaatcaaaggctgttttagcatgatctgatatatttcttctgatggaattgttcctgactacaggaattagtgtggaattggtcatgcggattccttattctctttcaatagtttttttctattcttaataaattctttgtttatgagtagaagtagatcaattgaaatggaagaagatcaagatcagcagtcaaattgtacaaccgcgccaagcaagtagcggacattggagtctcattgttaatatcgtagactaca

SEQ ID NO: 13229 - DNA, 462 bp, Glycine max
cttatcttagcaatagctaccgctatcacaacaatactctattaggcaaaaacaccaaatgggagatgaaaaagagcagcctaagaatgaaaccgagaagaagcccgaggaggccgccgcagcccccaagaaagactacggacccatccctgtcgattacaaactcgacttgcattgcgagggatgcgtcaagaagatcaaacgcacatgtcgccacttgcaaggtgtggaaaccgctaaggcagatctatcgtcgaacaaagtgactgttaccggcaaattggatgccgagaagctgcgagataagatcgccgtgagaaccaagaagaaggttgacatcatgtcagctacgaccaaaaaagaagccgtcgccacggaaaattcaccgcataaaaaggttgaagagtagaaacctgaagagaaaaaaccagaagaaacacctaaagagagtaatggtgtttt

SEQ ID NO: 13230 - DNA, 430 bp, Glycine max
tgaaaagggaccatggaggcaaattcaggtgccagcgaccgaatttcgagaatcgccgggcacctgcgcccccagagagaggatgatgtttgtttgaagcgtagcgattgccgtgcaaaaggtggggtctccggattcaaggtggccatattgggtgccgcaggaggcatagggcaacctctggcgatgttgatgaagatgaatccactcgtttcacttctccacctctactatgttgttaacacccctggcgtcacttctgatataagtcacatggacaccggcgctgttgttcgaagatttttggggcagcagcagcttgaggatgcacttataggcatggacttggtgatcattcctgctggtgttcctcgtaaacctggaatgactagagaagatctcttcatttaaatgctggaattgttaaaca

SEQ ID NO: 13231 - DNA, 428 bp, Glycine max
  modified_base (334)..(335): a, c, g, t, unknown, or other
  modified_base (348)..(348): a, c, g, t, unknown, or other
cttcagatctggaagatggctctgcaacaagtttctaacttttctggccatcatttccggcctgatgggtacgtacccttcctcacttactttattttaaattctttaattttgacttgtctaatcacactttaatgttcaattttaaagagatcaaattataatcatgtacaaccggtacactatttaaatttataatatgttctaatgtataaattaataagctgccaacaaaattttaattcatataaaatatttgaagtggtaatattactgacaattggacttaatgttatttatttgtgatagtttatttgaactttatgatatattnntttattaatatanattatcagttacactgtaatcgattgatttattatcattttaagtttatttaaaaaataatattgtcttttggacctaga

SEQ ID NO: 13232 - DNA, 506 bp, Glycine max
  modified_base (27)..(27): a, c, g, t, unknown, or other
  modified_base (40)..(41): a, c, g, t, unknown, or other
  modified_base (56)..(57): a, c, g, t, unknown, or other
  modified_base (85)..(85): a, c, g, t, unknown, or other
  modified_base (99)..(99): a, c, g, t, unknown, or other
  modified_base (123)..(124): a, c, g, t, unknown, or other
  modified_base (141)..(142): a, c, g, t, unknown, or other
  modified_base (161)..(161): a, c, g, t, unknown, or other
  modified_base (180)..(180): a, c, g, t, unknown, or other
  modified_base (182)..(183): a, c, g, t, unknown, or other
  modified_base (203)..(204): a, c, g, t, unknown, or other
  modified_base (224)..(224): a, c, g, t, unknown, or other
  modified_base (242)..(242): a, c, g, t, unknown, or other
tcgtgaggggttggctgcttttgggcntttctcttaaaanntagcaaaacaaggcnnaggggttgggttcttaagcggatactgnttacgttctttaanttccaagggcttttgtacgctacnncagtatgatcctgacannaaaatgtgcaggatgcaantgatacccatatatggaangnntcacttgtggatgaattcannaagaaaaccatcgatgaaanatttagaatctcatcatntgatgatttacttagtacccaatgtggatctcaggctttggcggtcatcgtgaggcatcatgtcttggcccttacagacattattcaaggacgaaagtttcatgaggttgggaagcatttaaagagattatggtctggaacatttcgtgtaatggatgacataaaggaaactgttagaatttctggtgaaaaattatgccgtgctgtaacttccttgacaacaaggctctgtgatgtctctctaactgatatgtcagatgcgca

SEQ ID NO: 13233 - DNA, 177 bp, Glycine max
gagaaacgtgtgattatgacacgagatgcaaaggggcttatacatgattatgtgacaaggaaccaattgtatagagtgaagactcttctaagaaatgaacagctactcaagggtattgaagctttatagatggaaatcaatgatgatcagctaaggtcaaggtgcacatattgcagt

SEQ ID NO: 13234 - DNA, 438 bp, Glycine max
ctttctctctctttcattccgcttttctttccgtttttgctttttttaattgaaatatgagtgggcttctttccaaatgaaataaccgacagtaccatttttggtgtttcagtgattgaaaaacagtggctagttgattctcctttcatatatagtccatcacatgcttttgggttaatatttgtttcctttgatgcccctatagttttctcaacttatttaattactgtgtaaagtttatgtgaaattggaatcgtatctactggatcatggcctttacctgtgctttgtatggtttggttagacccataagttgaagggtaacgcactcagatgctatctaattcccattgatggccctgttttcatggatttgggttggttatattatatgttttagtgcccagggtattttgggttgagagtttgaaaaaaata

SEQ ID NO: 13235 - DNA, 314 bp, Glycine max
gctagtccacacactatgttctgaaaaatgtggtccaaagattctcttattctacttaggtgcgtggacactatacgttggaactaatttgacggtggatcctgttacgcataccaaagtcctgactacacatatgggcagcgtaatgcaaatggctcaggtgaacgtaaatattggcgtaaacgctgtggtaaatggcggtccgggtaccatagttaagatcactggctttggccctagcgaacactcatgaggctctgatcgatgctcaccctctcagactaagacggatacttgttcaagctcatatagga

SEQ ID NO: 13236 - DNA, 256 bp, Glycine max
gtctggtctcacgcgctgtgagagggcaaccaggtcgtacagtaattagaaattttttgtttaggtcaaggaaaattttaatgtggttttgccatggactatgatctttacaaaaccgaaggtttctctttcttttgtcagataaatatatttgactttcttgtgtactttacacaaataaaaaaaaaaaaaaaaaaaaaaaaaaaaaacaataaaaaaaaaaaaaaaaaaaagaaataaaaaaaataaaaaataa

SEQ ID NO: 13237 - DNA, 459 bp, Glycine max
ctttctacttcaccattctctgtgtcacttcgttcttcaccggcttcgaacccctcagggttgtatactctacttcgcagtccacgtatctgtgcctgcaggtgctgcagactctcgcttacgtcttctacttgctgctgcttctcatgtacctcgtgctcgtgttctccacggactgtgggctgggctccaagttcttgggcctggcccaggtcttcgtgggctttgccgttgggctgcattactacgtcacggtgttccacagggtggtgctgcagcaaccgcccaagacgaattggaagatccacgcgatttacgccacgtgttttctgctcatctgtgtgcttgctagagctgatagaaggaaaaagaattacgtggaggacggtggaggagaaggcaagatatattgattcagctacctttctatttatttaatttattttcatttggatcaat

SEQ ID NO: 13238 - DNA, 418 bp, Glycine max
gggagctctacacccttctcttcttttctctcataataatttaaatttgttatagacggtaaactttaaatgttttttttttaagtttttccatttttctcttttgccatgatcccgttcttgctgtggagtaaccttgtccgaggtatgtgcatgattagatccatacttaatttgtgtgcatcacgaaggtgaggttgaaatgaactttgcttttttgaccttttaggaaagttcttttgttgcagtaatcaattttaattagttttaattgacactattacttttattgtcatctttgttagttttattgttgaattgagtgcatatttcctaggaaattctcttacctaacattttttatacagatctatgctcttggctcttgcccttattcttggccttgtgttggttattt

SEQ ID NO: 13239 - DNA, 345 bp, Glycine max
cccacgcgtccgcccacgcgtccgcccacgcgtccgcccacgcgtccgcccacgcgtcggcccacgcgtccgcccacgcgtccggcagaacctaaccctcacgaaagcccttttcgattccgataactctcgttgttccgaaaccctaaccctaaccgggttttttcgtttgtttggattgaattggcatcggagggaggcgatcgattggaaattggtagtagtagtttagcgttgaagaacgatgtctgctgctgtgtgcggaagcaagagatctttcttcgaagagcttcctccttctccgccactctccaagaggctccgttgttcctcttcgccgattcg

SEQ ID NO: 13240 - DNA, 463 bp, Glycine max
ggggttgtggaatttgtgtagaagattttcctataagaatttttaattcgctaaagaaagcctcttgttgaattagattattatgagattaactacttcacaaaattccacaactcctcaacaaattaaagatctttgttgaacaaagttaatttaagagtaaaatctagaagatagaggttgtaaagagaagtggtgtgaaatgaaatccataattagctagttgtttagcgcatgaaaaaaagtgtttaatttttttaaaatctcacaaaccctgcaaggaataaaaaagaaaagaaagatcggagatagatcatatgccctaatagtatatgaagaaatctttcccgtaaaacaaatataaatgatatacatgtgtgatatttttttctgctgaaaaagttcacttcagagagattgttcaaagttcaaacgtgtacgagtggaaaaatgactttcaaaa

SEQ ID NO: 13241 - DNA, 310 bp, Glycine max
aaaaaaaataaaaacaataaaaataaaaaaaattaaaaaaaaaaaaaacaaaaaaaaaagggagaaaaaataaaaaaaaataaaaaaaataaatctaaaatacataaaaaaaaaaaaaaaaaaataaaaaaaaatggtgaagccattttaataaaaataacttaacatacattttattccaactgaaatattttattatctgatcccataatttaatttcattgacctcatttaaaaaactcacatattggaaaacccaagcctttcccaaatttaattacttcaaagaaaatacatttttgcccaacta

SEQ ID NO: 13242 - DNA, 387 bp, Glycine max
cggacgcgtgggtaagttcacggtcagttctgaaaaatgggttccaaggttttgcttggtgtagttatgttcatagcggctatacttctgatctctgctgaggttgcacccaatgaatacgaaaattttaacaaaaaagatgggaagcatgctccaaatgggttatatgatagcaaatggggttacggtggttggggtggtccttggtatggcggctggggtggcccttattatggtggcggctggggtggcccttattatggcggtggttggggcggtccctggcgtggtggtggcggtggtggctggggaggttggcgtcgacctaatggcaaccctcacaactaagattaaaacttgctaaaagctttttacgggtttaggttt

SEQ ID NO: 13243 - DNA, 339 bp, Glycine max
ctgacatctatggaagtaggatcacagttacctctcaattgtatgcccagtagcatatgggagttgcaggcttgggctgctgttttgggtttctgtagaaatcaagggatggtgacagaaagcagtttattgaatcatgatctgaatgttatgggtgctgatactaggaacatgggggagatatatgtgatgtcaactgttttagatgaggcagatgaagctaatcatttttcacctgacacagatggaatttctaaactcccagaaatcagtgatgaattctgggaactgtttttaaggccaagcccagttacagaaggcacagaagaaactaaatgt

SEQ ID NO: 13244 - DNA, 428 bp, Glycine max
cccacgcgtccgcccacgcgtccgcagaagttgtgaaggaccaacagagcacttaagagagttgaactgagagctgcagggatggctcatttggatgtttgtcatcaagtcaggttcattggtcagcttgaggaatatggaagtagactttcttccagtattcctacggtagaaggatcaaaagataaagaagaaatcgttgaagttaaacctatcttcatgccaaattttaagaaaagaaaacgccttagccttaatcgtcttagagagatcaaagcagatatgtgtgcaaggcaaagtagtggcacacctaaaacaaagtgtgaaagcatagacagatggtcagctaagaggtatgagttggctcagcaaagcatgtgggaagtcttaaagggcgaaggtgcaacttttgaaaatccaattacccg

SEQ ID NO: 13245 - DNA, 336 bp, Glycine max
gttttcgggttcgagaaggcacttgtttgtttgtcgtacgaaatggagactagaccgagttcggtgatggttacgctcagttacggcgcgttgacgtgcgccgcgtaagttctcgcgactttgctagcttctgctgtcgtcaaagccacgcttttggccccggatctctaccgggtgctatagaccaacacgcctacaaccaaaggagagagaaaaactcagagttgagacaagctacgtgatgcagagggcgaagacggttacgatgatgaaggggacgatgatgacgatggagatggtggatttggggagggtgaaaaggagttgtcatctgaa

SEQ ID NO: 13246 - DNA, 320 bp, Glycine max
acgctgatcttctcatacttcataatggtcaaattgtgtatctgaatttatctatcagtgtccgtcttagattatacgagcttgcaaaaataatcatagatccacaatcttgatgcataactaacaactctatattcttcttctcaattgtcattattactatatttcattctccatataatttaagaacgactaacttttcaactcaaatccatgtttcactcctcaaacacaaaattgatttactaaacactcgcctaacacctgcatttcataaacaaacattatactaagacaacataaataaaattgttgaattt

SEQ ID NO: 13247 - DNA, 332 bp, Glycine max
acggggacacctatggtgacctcatttgacgaccttgaccaactccttgaccgtgctttctaggatggttaggactataaggagaatgctaaccttataagtgcagcagcaagtgcgaacactaggaaggacagtacttctgtgacgtcttagttgcaatgattgggcctgggattacccgtttcgagaaccaacaataaagcgaaacacaatggtgctcacaaagacagtcacatggtctacgcgctctacaagctcatggaccagaccatcgaggctgccaaagggcttgagaatatgttcacacctactgtcgatgacattgggaagga

SEQ ID NO: 13248 - DNA, 437 bp, Glycine max
tgttcttttgttttgccctatctaattaaggttcccgcgatttcaaaccttaatttcttggattgctctctctttacatctgatgcgttcttgctctcaacaacaatcacccaccgccatcgaagtcttcgttcttttcttcttcttcactctccttttttctctcgttcgagggttctttcgtggggaaccctgcagatttcaccactcgtgcacatgtccaaagttctcggcttttccggagttgacgatttttgcccgatgggatcaatatatgccaaccccaaggaagcaagtttcttcttgcctcttggccctcaagttgatgtatactttcctcctcggaagagatcgcgtgtcaacactccattcgttttcgatggagaatggtttgagcaaaagccgaaaacctctgttgaagccttgccagatgagtg

SEQ ID NO: 13249 - DNA, 433 bp, Glycine max
attttaagtaattcaatggcttacactgcaagtcttgtgttcttagcttccacttgcctgatcataaactttgctctgctggcaaacgctatcggatgcaatggaccatgcagaaccctcaacgactgcgacggccaactcatttgcatcaacggaaggtgcaacgacgaccgcgacgtcggaacccacatctgcggcggcggaatgccgccaaatccgccaccaagcggcggaagctgccagtcctcgggaaccctaaattgcggcggaaaatcgtatcctcagtaccgttgctctccgtcggtaacttcctcgacgccggcgatcctgacgctgaacgacttcagcgaaggcggcgacggaggggacccgtcgcagtgcgacgagaagttccataacaacacggagcgtgtggtggcactctccacggggt

SEQ ID NO: 13250 - DNA, 431 bp, Glycine max
ctcgattgtttggaaagatcattcccaacaactgcagagttgaggtgttgtcaaccgaaagtgaaatacgtctggcagaagctgaagctattaattggacatctatggaatatggcaagaatacacttgccccaataataaataggccgatagttcaatctgaaacggctacatacccatcaccaaaaccaaggacaaaagattggtataagttggaagctcaagtgaaaaaagaggataacgaagaaaagcttgatggtgatgctgctttgaataaaatgctccgtgatatttaccaaaatgcatatgaggacatgaggagagcaatgagcaactctaccttggagtcaaatggaacagcgctatcaactgattggaaagaagtgagatcaaagatggtggcacgcagtccgtcataacgtattgagatg

SEQ ID NO: 13251 - DNA, 258 bp, Glycine max
aaaaaaaaaaaaaaaaaaaaaaaaaaaaaataaaaaaaaaaaaaaaaaaaaaaaaaaaaacggacaaattaaaaaatacgggcaaacaaaaaaatactacaataatatctcatatataacaacacactcaacctctttttttacatacatctttaatcaacaacaccctccctttacttccctttacttccccatcacaacatcctccttactccaactaacttcaccttcaacaatcccacccctatctcccttccc

SEQ ID NO: 13252 - DNA, 435 bp, Glycine max
gctgaaagttctgcggccggataaagttctgaatcatggtctctttatccttaacgaccgcaaacaccgatcctctggggggtccgatgaatggaccttgtctgagcaggctgcagatgctgctatggatcgtcaatgtctcgacgctgccatggactgttcaaaggttctttaaatgacatccccagcgagtaaaagagttggatggctacacgcaatgttgcttgaagcaaaccgatcctgggacttggctgactaggcttacacaggccttccagaggtcattcctattgatcaacccattcatgctaggatggaggatctgctaatggctcacagctatatacgagtgtctatagatcggctcaataaatatctggcaacatacatggaacatcatgatgcatgcagagcattgactggatgctacatctt

SEQ ID NO: 13253 - DNA, 440 bp, Glycine max
cccacgcgtccgcccacgcgtccgattactttggtgggggtattcaacactctcctgctggatcaactccatatggaactccactaagagtggtagacttaggtgtgacacatgttcccaaggatgtctttgaaatgtatttgcaggaaatcagtccgcagtacctgcctgaaacatatagtctgcttactcataattgcaacaacttcagcaatgaggttgctcaatttctggttggtgcgtccattcctgaatatattctccagctgcccaatgaagtcatgagcagcccaatgggagctcttatattgcctatgatacagaatcttgagacaacactgaaatctggtggagttcctcaagtaccacaattcaagcctgcaactactctgaatgtttcagctaacacccaaaagaactcaagtacctacaactcatcc

SEQ ID NO: 13254 - DNA, 422 bp, Glycine max
gccacgcatcccgtaaaacacacccactgcaaactgagaaagtggaaaaagggccgaacggctggcgaagtcatagatggctacaaaaagaagagagtgcggagaaggagcctttggatactcattacgctcaacctagaccagcgtatctatgtcaaactccgctcctacagagagcttcttggcagaacgttcacgcttatgatcagcatcttaatatgattcttgctgatgttgaagaaatcgttactacagcggaaatcgacgatgagacatacgaagaaattgtgacgactacaaagcggacagttcctttcctgtttgtcaggggagatggcgtgatattactttccccgccattgaggactgcatgactggactgctgaactatgtgatcattgtaatcacaagtgtcactgtta

SEQ ID NO: 13255 - DNA, 465 bp, Glycine max
  modified_base (420)..(420): a, c, g, t, unknown, or other
cccacgcgtccgcttggtgcgaaagttgaaagcacgaaaatggggtgggtttggaaggatgacaacagcgacgatgttcgacgcgataactcttcggaacgatgcgccaccaccaaggtcgtcaaatctcagtgcagaacagaggaggtcgaaactggaaagttcgtcagaaagtgcgagaaaaccgaagagattctcaggaattgcatcggaaagcccgccgaagtgttgcaatcaaacaaagagtatactgaagaggatatcacagatgaagtacttaaaggaaggtctgttccatttagctcatctgacggtgccagtggtgtggttgactttcctgggctacaaaatgatattgaagtcatggaacgtaacctgttaagtggtctcagtcatttcttcgacgcagcgaatgggttntttgatgttttttccaagtctccaagcatctttgatgcagagtca

SEQ ID NO: 13256 - DNA, 306 bp, Glycine max
tgcattcgtatttctaactaattattgagttaattatggttacggcattgttccgcagagggatgagctaactcttgagttggttggtacgaactagggatatccgtccgtcgaaccttgcatcgatgcttccaacgattccactatcaatgttactttgcttgatcactttgctaagaatccacttgatagcactgagtatctgtgctaatttcgcagtgatcatcgtagatgtgcactatcagctaccataagttcacgcaaactatgtcctaaactttgccctaacgttactgatgatgattg

SEQ ID NO: 13257 - DNA, 339 bp, Glycine max
acgaccacgcatacaatcatatccaaacttataaccatagataccattcatcaccaaatcgatgagtatattacttagtcgcttcgcaataactactattaaccgtccttttatcctatcatcgattctctcaccaaatcatctatctaagagtatttataaatatcaatttatgaagaccccactgtatatctattaatatcgcattaaatttcgcattaatcttattaataatgcattttatactacatcactttctcccaaactatctcctaaatttatacataccctatcatattatcattgcactaaacttataaatactcctactcctactta

SEQ ID NO: 13258 - DNA, 443 bp, Glycine max
cccacgcgtccgtgattccagaaacatcttcaatcaatctcccctcgtctcctctcaatcgagggtgaagctgagaaataatcatggccggtggtgcgaatttcgtgcagagggttctctcttacgtggtgaatgaagtggttgtcaatggtcttgccaacagccctgcatttcagaggtttgcagtgaggacatcaaaaagaattggagatatttctaacaaagctgttcagaagaggcaggagctagctgagcagatcaaggacatctcaaaaaatatggagtcattcaagaaccagtaattttggtattcttgctacattgctgaagttaatggagtcctgattttctttagccaaagatgttgctggtgacaaggctgggtgtttgtaaatttcttttgttgtaatatattttggttcttaactcgtgatctcaaaagt

SEQ ID NO: 13259 - DNA, 361 bp, Glycine max
agcaaatgcagtgagcagaaaatgcagattgaggcactgcccccggctctccaacgcccgggtcggcctccactttctgttggattccctttcaaaccttcttttttaactccagccacacacgccccttcgcacttcaatacatattcacgttttcagcattcagttaagtttcgtcgctcttttgcaacggttacagcgaccaccgagaaggttgttattgacgacagcgacaccaccaacgacgaaccgggcttcgttaacattggctacatatcgagtgttcatggaatttagggcgagattcgcgtcaagccagccaccgatttttcttaactgcgccttttcacttctggaaaaa

SEQ ID NO: 13260 - DNA, 434 bp, Glycine max
gtcaagacgtgagaagggttcaagtcatttgaatgaagagtcagaacctctaataggtgaggtatatgctgactcagaatctttaaattctgctggttaatggaatgataccagtgaacatggatcaaaggaataccgatctaagtccactgtaaggctctcatcagcaaaacttacaactggagctggggttgtctattcatcatcagaagaagacgatgtctgtccaacttgtcttgaagaatacactgaagagaatccgaagatagtgacaaaatgctctcatcattttcatctttgttgcattcatgagtggatggaaagaagtgacaactgtcccgtttgtgggaaggtgatggtatttgatgaaacgactgattgaaaatgtttatgtcgtggatgataccaacaacagatgaaagcagatataagat

SEQ ID NO: 13261 - DNA, 269 bp, Glycine max
  modified_base (230)..(230): a, c, g, t, unknown, or other
  modified_base (235)..(235): a, c, g, t, unknown, or other
gttgggttgagttgggtttggattggatttctaatctaatctatacctttctttgtcctatgcttttaaggcacaaatccttctcccttctctcttctttcttcttcttctcctgacccttattattattccttgcccttaccctttaggcaagggaaggaagaaagaataactatattattatctttattgtaatctatctttttattataattataattataattatntgtgntattattccttaaatatggaattcgccgtgtctc

SEQ ID NO: 13262 - DNA, 435 bp, Glycine max
cccacgcgtccgattttaagtaattcaatggcttacactgcaagtcttgtgttcttagcggccgctttccttatcatagaactgtcctcttctggcaaacgctatcggatgcaatggaccatgcagaaccctcaacgactgcgacggccaactcatttgcatcaacggaaggtgcaacgacgaccgcgacgtcggaacccacatctgcggcggcggaatgccgccaaatccgccaccaagcggcggaagctgccagtcctcgggaaccctaaattgcggcggaaaatcgtatcctcagtaccgttgctctccgccggtaacttcctcgacgccggcgatcctgacgctgaacgacttcagcgaaggcggcgacggaagggacccgtcgcagtgcgacgagaagttccataacaacacggagcgtgtggtggcact

SEQ ID NO: 13263 - DNA, 444 bp, Glycine max
tcggttttttttttaatagttccagttggtgtttttctaattttgggttcataagtttggtcgggtacttttaattccggtgagggtgtgttttttaaattttagttctttaagattctaatttttttatttattaaatttgcacttgtagggcccaaatttaaaaaatgcgaacttaccagatttaaaattagccaaatatcttacaggacccaacttggaaaaccacaaatttgcccggacttaaattagaaaaaagtgcttacttggcccaaaaccttttttagcttttaagaaaattgttattccttgtaccggtttattattggtcaaaccttgtttaatttggcaattaaaaaggtggtatttttttaattttgggttccgaaggtttttttggttaactttaagttccggtaaggtggggtttttttttttaggtcc

SEQ ID NO: 13264 - DNA, 409 bp, Glycine max
cccacgcgtccggctgttcaccattttcaattttctaagtggtttggcttggtttgagaggcataaacctttcaagatctcagaggggcagaagatcaaagccaagacatcctctcgtatataaagagtgtctctgattcgatctgtgtgtcttctctttctctcgttcgagatttctcagtactccaccaaggttttgtcagacaagctcgaatttttcgcctaccctatacaatgatctcttcgttgagacagcctgctgcagggatcagtggttctgatcttcttttgaggcatagacatgcatctccaagttaggcaaggtcgaagctacactctttgtcaagagaaaagggtcaaggatctcttgattcaggtcaaaagccactccacattggagcttctcttg

SEQ ID NO: 13265 - DNA, 434 bp, Glycine max
gcgcatgttagcattgctgacaaataaacaaagcgcgtgggactcacgcgcctgaggccggctcgtcctcttgcgaaccgttgtcgacactctttctttctctctctaccttagttacgttcgtatctcggatccgtcgacgtctctgtcccttctttcggatccaccttcgatgcttcgatcgaatcttgttactatgatgagaagagatcaaatacgtgcacgtgagatgcgaaccccatgcctggttgacctttgcgttcagaaagcaatagatcatgtaaggtaccttggaaatgtcggatctcttgaccagcatctgctcgaacacattttgcacgactgcacagctgaccagttgatgcatgtggagaagtccaccaagggaagaaatctcagccctgtaactgataagttgtggaaaaagttctatg

SEQ ID NO: 13266 - DNA, 434 bp, Glycine max
ttatactcaaaattatcttattttttacgtttttttttcttcagctatttttttaggtgagcaacactctatggctgggtcttcatattaatcaaagttattttttaatgtattttgttattataaatcataaaaattgaatttgattttcaatatgaaattcctttatcatttttgtgtgtcaaaatcccttaatctacactctttgtgctaatttcaatttgaaatcattttttttcacaaaaaatacatatgtctttttctatctttattttgcttattgaagtacctgaaatacgctagaaaatggttgaatagtgtgaaagataaaaacttagtctttcaaaaattattaaaagtttttttgaaacacgtatcaatgaatgaatgattttgtctaaagggtttgaaattactttgtgcttaaaaaatca

SEQ ID NO: 13267 - DNA, 436 bp, Glycine max
gcagtttattctatcatatccttgttcaaataattttcttttcaattacaataccccagggccagaaacttatgttcatgagcatcctcaaggtcccaataacatttacttgaagacaattttgagttgaccttacagcctagttccacctacaaacacccttgatccttcaaagcctctcatagttccaatactggcaacaataatactcttgggcatctaaactatctccattcttttttccccctttctttgcagtggatttgcgaggttttaaagaaattaaatgcgtttttatgtgctaaagagctaggtaattatagaattcatctcacacatacttctttttactaccttttatcttttagattttatttttgaattatccttgtttaatggagtaatttaattcgttgaggggttgtggaatttgtgt

SEQ ID NO: 13268 - DNA, 438 bp, Glycine max
tgtagatacaaattctcaaaatgggcatctagatggtgattcacaagattgcatgggatggatggaaacgctactctacttcatcatctcatcattgaagtctgggagatcctcatatctactcgacgtgcttgtggggcttctatatcctgtgatttgcttgcaggaaacatcaaataaggatttgtcaacattagccaaggtagcatttgaattgctcaagtggatgatcgtttgggaacctcaccttcagaaggctgtatctgtgattctttctgctgccaatgattccaactggcgaactagatctgctacattgacttatctgcgcacattcatgtacaggcacacttttactgtctcaagttcaaagaagcaagagatttggagaactgttgagaagatactagtagacaatcaaattgaggtaagagaaca

SEQ ID NO: 13269 - DNA, 432 bp, Glycine max
  modified_base (341)..(341): a, c, g, t, unknown, or other
  modified_base (380)..(380): a, c, g, t, unknown, or other
  modified_base (383)..(383): a, c, g, t, unknown, or other
taagctttgccatacccattaagcaagacccttcagattactggtccatcctggggtaccgtaattctccccttgacaacactggcatcaggaacactactagtgttactgcaacttcttttccatcctccaacaatggcactactagtagtttgacacccttccacatggaattctcaaatgcccccacaagtaccggcagtgataacgatgccgcgtttttcagtggaggaggcatctttgttcagcaacaaagtggtcatggtaatggtcatggaagtggaagcagtggttcctcctcttcttctttaagctgttcaatcccattcgccacgcccatnctttctctaaatagcaatactagttatgaaaacagtgcntgntatggaaactggattggacctaccctgcacacattccaatcccatgcaa

SEQ ID NO: 13270 - DNA, 223 bp, Glycine max
ctcacgcctccgaccacgcgtcctactagacacatccattctttacttctcattgggtgggcctaatctttacggtggtgctgctataattttccattgcctgcaataaattctcaacctttattcgcaagatcaaacatctaaccttaagttaagtgatcatgtctggtactcctatcatctacgacttcataccgtcttatacccccatctttacgctact

SEQ ID NO: 13271 - DNA, 443 bp, Glycine max
tgtctcagtgagagaaactctctctctagaaaccctattgcacgttttgcaatcgaactcgacaatggccaacagcaacctgcctcgaagaatcatcaaggaaacgcagcgtttgctcagtgagccagcaccaggaattagtgcctccccttctgaagagaatatgcgatatttcaatgtgatgatccttgggccaacccagtcgccttatgaaggaggagttttcaagttagaactatttttgccagaagaatatccaatggctgctccaaaggttaggtttctaacaaaaatatatcatccaaacattgataagcttggcaggatttgtcttgatattctgaaagataagtggagtcctgcccttcagatccgcactgttctactaagcattcaagctctattaagtgcaccaaacccagatgatccactttctgagaaca

SEQ ID NO: 13272 - DNA, 300 bp, Glycine max
gtctagtttacaagaacggagcacagacatcaacggaaatattataaggaaaacgcatcggtgagctcatgaatacaaagtgggacatacaatgcacttgcgctcttcaaggagaagggctatatgagaactgggaccggatgtccacagctgtgaaggatatactatatactagatcccactcaatacagactaagaactctattcttgtaacttacaagagagtactgattgcaatggacgaatagtgatgaacataaggccagttctaagatgatgtgatcgataatgacaatgctg

SEQ ID NO: 13273 - DNA, 368 bp, Glycine max
cacaatctttctaatttgcttatcttagatactaacacatagtataacaaatagacggaaggttaacaactcgctgacctgatgacaaaaacatcactagaaagatgaaacaccaaccatggttctgcattactacaacatctttcatgttgataatagcgccaaagactatgacttgaatatatcttatactaaacttcctattatatggcactctgatttgatccccatcaacaagatctaagctgacactcattttcaacaaatttccgaatcatatcatgtacttactagatcctcataatatagctatctatgatcattatgtgcaacatttgttaaacgttcaatttactgcttctgattct

SEQ ID NO: 13274 - DNA, 342 bp, Glycine max
gcttcattctctatagcatctcagtttaattccatcgacagactcacaccgatacagatgggctctaaaccgagggctggcaaactccgtccacaaatcacaagatcagcccaccacctccgacgtcagcttcaatcccctgctaacgctgcagcaccagaacacgacaggaacaactacaactttcagggaatgacattgaagggccttcgaataccccgaagaccactttacccatacgtgcagacaacatcatcggagtacccctgcatacttaacacgatgctacctttatacatctatcccttcaggaaccctgactatggcacccacttcaacggc

SEQ ID NO: 13275 - DNA, 137 bp, Glycine max
acgcactctctaccatacccattcaccattcaactttaacaaactgatccatcctcctgtgccgtattttttcccataccagctctttcataagtccacatactatcacttctacaacattccaactatcctacaac

SEQ ID NO: 13276 - DNA, 439 bp, Glycine max
atttcgtggagccaagaaggccctcattgatttgcacatcgggatgcttgatgatcaggaggccaacgcatcaattgcacatggaaaccggtcctttggccgtagcactggtagcagagacagtcatagtcatggtaacaatcatagcaataataatacctatcaccatcggtcattggggcattttcgatcactttcgcggagtgtctctcggacttggtctgctgctaggcagctccaagcaattgggaacaacatttatccacctaacgcaaatgagcttatggcttctggtggccttgcaatgcctgtgttcatcatgaattcgatcctgttgattgtgatgctggcacttgtggctgcaattacgtgccaggaccgtggattacatgttcattctaccattcccaggaattactcctgggctgctgcaatcctc

SEQ ID NO: 13277 - DNA, 379 bp, Glycine max
gtttcttcctaggtatgaatctgctacaatttctctgattctgaaataacaataactcatgggagtacccccaaacaacagaatgggagataacaaacgtaagagaggacgcaaagccaaaacccccgcctccgaaaccctagaccaccccgcccccgtcaccaccaccgctccaaattccacctccaccgccatggacgatgtcttctccgtcggcaacgtcgagctcatcgacaccacggactcttcgcaccaccgccgcctacgcgcccgtcccaaccactccgagaagccccacgctctgcccacggggcgccgtcacgctccgcccctcgacaacggaagcggtgacttctcggtccccagcgacgtcgtcggg

SEQ ID NO: 13278 - DNA, 416 bp, Glycine max
cccacgcgtgcgcccacgcgtccgcccacgcgttcggaatctgcaccataacaaaatcaggaacggatatccataaaaaagggaaaaataaagaaggagaaggagaaggagaaggagatttctgttgaatgatgaggaacctaccctcttgtgctgattgagaataagaaccagaacaggttgcagttaaaaaaatataacttgatgcaaagaggagtagcagaaccatataacacaccgaaagtaaaggaaaagaaaagaagtgtttgaatttgatcgctaaactgacggagaagaagatgaatcacactcgcttggagtcttgtcatgaatctccccttacagtatacaaattctcgttttgcccaaaaaaacttggtgatattggtatactcttaataagggctggccttctt

SEQ ID NO: 13279 - DNA, 331 bp, Glycine max
acgcggacgcgtgggcagacacgtgggcggactcgtgggctcgctgttgatatgccgtaattgatgcggtatgacataggaggccgggatcaacatgagtatgaggaaacgcagcagacaaagtactctgtcgagttctgggctgagaagttagaaactgaccacttactccatgtatcttctgagattgaagaggacccgcagagagagacagttgaggctggccatgctgcctaagacatgtctgtggataggcgaactggagcttgacggtgcaactggtgggaaagcgtgcagttctgatatgactgaacaggtttctgcaatggtg

SEQ ID NO: 13280 - DNA, 171 bp, Glycine max
tcatacgataaaaaaaaaataaaaaaaaaaattttattcaaaataaaacaaaaaaatataatggtaagatataataaaaaaggggtgaggaaataccatatatctttctctattttttaaatttatatctattatactttttatttaatttccctctattctaaattattt

SEQ ID NO: 13281 - DNA, 436 bp, Glycine max
gcttctggtccaaatactggtggtccttcaattgggcctcccccagtaattgcaagcaaggctcctgctcctgagcctgccaccaacgaagtctacttggtttgggatgatgaggcaatgtccatggaggaaagaagaatgtctttgccaaaatatcaggtgcatgatgaaagtagccagatgagctccattgatgcagccatagataagaggatacttgagagcaggctggctggtcgtatggcattttagatcaatctcatccacacattcttgtgaaatttcttcagtgatatgggctcaaaatggcattttaataaggctttgacagcgtgtggtcaagattcctttatttaaggtccagaaagtaacattgttattggtgcaattctttgccaaaatgggcaatgggccctacggtcatagtggaatcgaa

SEQ ID NO: 13282 - DNA, 382 bp, Glycine max
gccacgcgtccgctctaatcttgtaattttctgtgtcgcttcgtggttcattctggtggggcttgtgatctggggtgtgttggagtacttacaacactcctttgcaagtataattaattaaagaggctaatcaattttcaattggactgcagcatatggctgatgagggttgcagggttactctaaatgtttatgacttgatccatggactagcactgcagctttcaatgtcctttttggtgaaagctattgacagcatattgcacacatgagttggggtttatggcaatgagtattactctgggtggggcatataacatgctcctgctggattaacaccatatggaacttcacttagagcggtagactcatgtgtgacaca

SEQ ID NO: 13283 - DNA, 459 bp, Glycine max
  modified_base (421)..(421): a, c, g, t, unknown, or other
gatcagctcgcatttctggtgtttcactgacatcaaattttaatgaaaaagtgctcaatgagatgtgaagaaaattccaatggagactttggcatcgatcccatgtgtacaaattgtccaaatttggcacccaaaggatatgatagtgatgaagaaggtctgtggctacattgtattcgttactctggacctggatggacgtatgagtgtccatatcctgattgggcaaaacttggctagacaacttgatatatttttcatacgacatttcaaacaaatatacaacggcatgttatcttgagattaaaatttgagttttgatggttagtgaaagttatttaatcttttgctattattcagggacactggattgtaatgatcaatgataactattattgctattattatttggttcacttangggggaaagacgtagaataaacaacagatgtattctat

SEQ ID NO: 13284 - DNA, 98 bp, Glycine max
tgattctagaaaaaaaaaaaaaaaaaattaaaaaaaaaaaaaaaaaaaaaaaaataatggaaaaaataaatcaaacaaaataaaaaaaaaaaatacaa

SEQ ID NO: 13285 - DNA, 456 bp, Glycine max
gtttcttaccgtctgtttgcaattccacgcttttcatttcccccaaattccgttccgtggggtaatcaatcacaatctcctcattttactccaatttgatgttattgcttttatctcatgaaaattggatgcacatgtttctttctctgcttcaattatttttcctattttgcattttattcgatttatacaagcaagataattgtgaattaatccaggaccatgcaattcatttcaattggaatagaatattatagtatacaatacacaaagaggggttgttgttgatttgttggttaaggccttaaaggggatagagataccactactagttctgtctgtagctttagtttccttgcaaattgcaactgtgacctgtttcttaatggatggcattgaggatgatgcaaggtatccccataacccatatggttattgttatcagaattctccata

SEQ ID NO: 13286 - DNA, 349 bp, Glycine max
gctggctacagtatgtctgaatgacaactttgttcattaaggccaatatccggtagctaaggagttacaacacaatcttatcatcgtactctaactcgaagacattgctatgatctgatgaaaatggtatgcacatcacttatttctatgtttcaatcactccacctattttgcatgttattccctttatacaagcaagatatttgccaattaatccagcaccatgcaattcatttcaattggaatagaatattatactatacaattcacaaagaggggttgttgttgatctgttggttaacgccttaattgtcatagacataccactactagttctgtcagtagcttt

SEQ ID NO: 13287 - DNA, 454 bp, Glycine max
atttgcagaggttcggtacccttctctcggctccctctgccactgccactgccactggcactgcccgtaagtgggtcgctgatgacctcgctgtcatttctgagtccaaggaggtcgctaatgatttgatcaccgatgccgtcattgatcaggtttttggtgagaaagcttttgagaaatttggaaaaggtttaatttcattgcatttctccgaccagcaccctggtatacacaaaaagatattgttgttcaagtttgtgcttccagctgctaaggacatggctgatatgactcgactggtggctcttgttccgtattatattgacttgatcggacgatacaaattaagttctcaggctcggtctaaaacagaggctgcacgacaaaaggctgctctagaagcacagaaagaactccgaaatgcgcagcaagaagccatgcagagaagaaaagc

SEQ ID NO: 13288 - DNA, 414 bp, Glycine max
gagactctgataaattcctgcaacgcctcagacagaggcggagaattcgccgccctagaaaaatcttcccaatcaaataaggcggcaagaaacgctttttcctttttctctttctctcactactttctctctctacaacctccgatgtcccctcccttctccattgcctccttccccgtcctctctctccggttgtggtagttggaaaaggaagggtttttttggcggcaatggagggggaaccgagccagctgaagcgtgccgcgattgatgcctctgctggagctatctccggtggcatatccaggacagtgacgtcacctctcgatgttattaagattaggttccaggtttcagttttactctctccatcgcacttcactttctaattcagcttcactcgtactcgcattt

SEQ ID NO: 13289 - DNA, 139 bp, Glycine max
tcgtcgcgtaagatatcgaactatagctaatctgatatctatacaaatgaaagactgattcatagcctgttgagaagagtaagaatcgaaacacacgactactatccggatgaaagagtgtaaagtaataacgagaaat

SEQ ID NO: 13290 - DNA, 435 bp, Glycine max
gatatctcccctagaaactctagatttaactttgtgcgaggtagaggaagactgaatgagtcgattagactcagttcgtagtgaatgggaatctgaccgtgaattttctggtgagttttacaatggtccaagtcagtttcgtgggcccaggcctaagtatgcacctgcttttgccgataccgatatggagtacaataatgttgcacctgatgggtcatatgttggtaatggtcgattaggcagaaagccattgaatgatggttcttacattgcaccgaggaggcgttcaccaggaggaagagatggcatccaaattggtcatagaaatccaagaaacattagtccaaatagatgtattggagatggttcagacttggttggagtgaggcataatgataaatttatgagaggctagcctgaggataatatggatgc

SEQ ID NO: 13291 - DNA, 429 bp, Glycine max
cagatacacacttggctgaggaaggtcggaaaagaaaatggagttgttcttctgcacggtgttcggtggtttggccgcggttgtggcagttatggagctgagcaagaacaacaaggatcgaatcaacacctcttccgcattcaattccttcaagaacaactaccttctcgtctattccctcatgatggctggagattggctacaaggtccatatgtctactacctttacagtacatatggatacgggaaaggggacataggacaactcttcattgctggttttggatcttccatgctctttggaacaattgtcggatctctagctgacaaacaaggccggaagagggcttgtgtgacttactgcataacctacattttgagttgcatcaccaagcattctcctcaatacaaagtcctgatgttgggccg

SEQ ID NO: 13292 - DNA, 297 bp, Glycine max
gagcgaacccactaccgttcagcaaaatgatcgctcactctagcaacatcgacattcgatgactactctagctctagcctgtagccctagctagtagctaagccactcggtcgtgtagtcatcaaccttctgatcgtcacccatggccactgccgaggtccagaccccgaccgacgtggcgaccgaggaagcgccggtggtggagaccccggctccgcccgccgtcgtgcccgaggaggctgcccccgccaccgaggccaaggtggaagagccagctgccccggcggagaccgatcc

SEQ ID NO: 13293 - DNA, 145 bp, Glycine max
aaaaaaaaaaaaaaaaaaaaaaaaaaaaaaaaaaaaaaaaaaaaaaaaaaaaaaaaagaaagagcaaacgatctaacaggatccaagcttacatacacatgcatccgacgtcatagctgttctatagtgtcatcttattcaaatt

SEQ ID NO: 13294 - DNA, 212 bp, Glycine max
ttttcgttctctacaatgtctcgaaactcaatttgactaatgaccggttttgcaatgggacagtttaccagaagaggagcagcaagaattccaactggatcttaatgcatttgaccggtaaaaccttaaccctcaaatgacccattcctttctttaaggcaggtaccattaaggatggccttttcaaattaattggaatccaggtcaacaac

SEQ ID NO: 13295 - DNA, 433 bp, Glycine max
aaagaagagaagcaacaaatcaatctcacacttagtgttgttacgatggaatcaccgtgcagaccagagattctgaaggggaaggttgctctaatcactggtggagcctccggaatcggattcgaaatttccacccaattcggtaaacatggagcctctgttgcgctcatgggtcgccgcaaacaagtccttcagtccgctgtctccgttctccaatccctcgtcattcccgctgttgggtttgagggggatgtacggaagcaagaggatgccgcaagggtggtggaatccacgttcaagcattttggaaggattgatatactcgtcaatgctgcagctgggaactttctcgtttctgcagaggatttgtcctcaaatggctttcgaacagttctggacatcgattctgttggcacattcacaatgtgccatg

SEQ ID NO: 13296 - DNA, 428 bp, Glycine max
atcgctttcacctctctctctctctctctctctctctctctctctctcttcgggttggattttgggtttattttttcccccttttcaattttgttcatggtgttgagcgtgtcacggtaattggcgggaagtaaccgtcaattccgataaccctttggtgaaaagcttgaaacttgaggagtttgaagaaaagggggtttatcgtttcgtcgtggatgatggcgaacccatctggcaaccatcaagagcacacgcacgtggtgtcgtcttatgctccagagacttcaggtgcggctctcgcgatgaagcacaatcctggcatatccctcgattggaccgcataagaacaagccattctcgaagatggactctccaagtatgcctcagaatccaacatagtacgctatgcaaagatagccctacagctt

SEQ ID NO: 13297 - DNA, 115 bp, Glycine max
aaaaaactttccatctactcattctctgttacaacatataataattaattactattcatgaagatctaaatatagaaacttcacaaaacaaaaaaatatacaaattaaacactaa

SEQ ID NO: 13298 - DNA, 455 bp, Glycine max
gtcagcagcttgttatggaagcaaatggctttgaacctcttatttctaattttagttcggatcctgacgtgactgttagaactaaagcactgggtgcaatatcttcactaattcggcacaacaaaccaggcattactgcatttcgtttggcaaatgggtatgcagctttgaaagatgctctagcctctgaaaatgtgagatttcaaaggaaagctctcaacttgatccattacctgttgcatgagaataattcagactgcaacatcgtgaacgagcttgggtttcctcgaatgttgatgcaccttgcctcaagtgaagattcagatgtgagagaagctgcccttcgtggccttctccagcttgctcacaatgcgaaagatggcaaggatggcaatgagaaagacagtgcgaaaataaagcaacttcttcaagaacgaataaacaacatcagttta

SEQ ID NO: 13299 - DNA, 409 bp, Glycine max
cccacgcgtccggttgcgatcaaattcaacccgtgtcgaaattacaggactaccacacagcctcttaataagcctataccacactgcctcttctataagatctcaacatatatagaaaaaattatgtttcactcaatcaaaacggttttaacctgtccacaagtttcattccctgcacggtctctctcttccaaccttggtcgggaaacttgcgcagttagattctgcactgacagtgctcgtaagatggacaagactcagaagcctagtactgaggaaaataaacaaggagatacgatgtctcattcatttggggaagggtacgctacgaggtctgatgaagaagggtttggtggagtttatggtggaaaccaatcgaagcctgagatggacccagcttatgacaaga

SEQ ID NO: 13300 - DNA, 385 bp, Glycine max
  modified_base (164)..(164): a, c, g, t, unknown, or other
  modified_base (240)..(240): a, c, g, t, unknown, or other
  modified_base (353)..(353): a, c, g, t, unknown, or other
gaaggaagaaaaatcacagcaacgatgagaatcacgttggagccgagctcggagccaagcccaagcccaagcccaagccgttcccaaactccgaaagaagaagtcgaatgggtcccactttccaagcaccctctcttcaccgcacacggcggagccaccaccgncgccgcttcccggaacctcctggcctgggacggagcctcgcgcctctacttctgggactcaaacaaacgctgcctncaccgactctctcttcgtctcggcgaccccgatccctcttccgttctcgccgcttccccctctaaggtgttgcaatcggacgcggtgctcgatttcgatgtccgcaaaatctncatcaacaggaaaggaacagcgatactccttt

SEQ ID NO: 13301 - DNA, 434 bp, Glycine max
aacaagttctggtcactaacatcatcagctgtgaactgaaattcatttccatgtgccgctgagtccacttctatcggaattgctgtcataggatgatctctagagtgtggtggaggaagacgatctgcatctggtacttcatagcaagcctcacacaagtcaaaatcaggacaaacagtacaatgccatctccgcctttgtataggtactgtagagcaaccatcacaacaatattggacagatgaagtaatagtatcgtcctcaatcatgatttggttatttccagtacttgggtcagcagggccaggaactgacaccacactctcaacagcatcatctgtagccaacatggtttgctttggaaaagggacctgaagcaatcttgaagatatggccaaactggggaggaaatgtgtgaaaacgtgaatatcaaa

SEQ ID NO: 13302 - DNA, 474 bp, Glycine max
  modified_base (151)..(151): a, c, g, t, unknown, or other
  modified_base (199)..(199): a, c, g, t, unknown, or other
tcgtcacgcaccacgccgtcacgacagaaaccgtattgaatttatcgtctcgtttcccgcggtcctaagatcgtgagcgagtttgcgaaacccctaactggctctcacacaacgacatcacgcactctctctcgatcaactactctctttncgtcgctcctaagtcatggacacgaattgcaccccgagggatcacagntttgatgcatcgtcaatatgcataccacagatgacatgagctgcttactgtccgatggtcaggatttcgttcacatcactagatgatggtttatgactaggttatgatgcatatgggcttgcaagtataatcgttctgagaggctattgatgcatataggttgtcgacaagccatcagcttattcagcagaggggaatagttccattctgcaagggacttgacgttatacaacaggcccagtctggaactgggaaaacagcaactttctgctctg

SEQ ID NO: 13303 - DNA, 54 bp, Glycine max
gaatttcgacaacatatacgacaattttatttcaaataatgaacattaaatcaa

SEQ ID NO: 13304 - DNA, 167 bp, Glycine max
  modified_base (13)..(13): a, c, g, t, unknown, or other
tccacgcgtccgnccacgcgtccgcttaatgattgttcgaaaaaatgcttatttttgggcccgactttattccctctgctggcctttaaccttaatggttagaaaaacctccaaaaaatggcctttttgggtggcctttaggccatggtggaaccacctgtaatggt

SEQ ID NO: 13305 - DNA, 310 bp, Glycine max
ggagttggagagcatttgtaaccccatcatagcaaagatgtaccaaggagctggtggtggtgcgggtggagccatggatgaggatggtcctgctgctggcagtggaagcggtgctggacccaaaattgaggaagtcgattaagcagaccaattgtcatgggttgttcttgattttgcgaagacccttttgaagtttagataataacctgtcttgtcattatgttttggatttggattttacttttctcgtttttttaatgtacttttccccgtttcaacttaacaatgatataagttgcatatggtctaa

SEQ ID NO: 13306 - DNA, 425 bp, Glycine max
ggagaattaatgaaccagagtttgtatttttctctgtaattctataattttttctcaaggatttgtgttaataccgaagctttctgtgttctctgtaatggtgcagatttgagctcacatcactgcgattttctcggtggccaacctcaaactgatccaatttcatttctggggtttcatcttttcaccatttcagacaaaaaaattgtgttaataaagattcctgtaagattgtaaaattttcctgcgcccaaatctgtctcttaaataaacttagcatttaccccctttaaaaaattcaattttctgtgtgatatctttggttgactgggtgtagaagtatctgaatcttcaatgggtagggtttaagcgaagttctgaggctatggagcatcttactgctctctatgacttgcataataatg

SEQ ID NO: 13307 - DNA, 326 bp, Glycine max
atcaagtgcaatttcaatccccagaatctttttaatcgtcatctttcaagcaactgccgggtctcctttccaactaccaacccatatgctatcattcccattgcctcagacgagcccactgacactgatgaacacattccactacctaccaccgccaagccttctctcaaacacaaggatgagcacactcctgacgccaaggctaatactaccaacgaaccagtacctaacacggtctccataccacctcatccgcttgcactcattcttcctacgaacacactattcacgacactactacctaactgtatgttacatcagcttcg

SEQ ID NO: 13308 - DNA, 292 bp, Glycine max
cccacgcgtccggaaagcctccctcttctccaatcttccctgttagatcgattggaagattgaagcaatggctgatttaagagttaagaaaggaagcaacatgaagcatggatctgtgtctgtcaccaccatcaaatctctttcgaaggagttgcaagtggagattgttgccaaggtggtcactcgctccatatttgaccactgcatgataaaactatgttgcaaagaattttttcacgccttcgaagatgattacgtgtaccgtcacgcctccatggagaattttgcgttg

SEQ ID NO: 13309 - DNA, 354 bp, Glycine max
gtcaaacatccgtacatgaactactcgtagaattatacttgaatgcatgacggggggggaaccattgtcggcttagagtacttccactgaaactgctagatctatgttacacaccgcctagtacaaatgcacgctcaactataacaacctgctctcgctcccttaaacactgatcaaaaccttgacggaaaaggtatcccactacctatcactaatatgaatctacttgaagattgcgagtccatgcaagctcagcctagactacatacccttgataaggccaactcactatacatttacagaagcgcttcaagctcatcaatatggcgaaccgaagcagaatctgacatgaca

SEQ ID NO: 13310 - DNA, 456 bp, Glycine max
cccacgcgtccgtggaattggaagaagcataagatgaagaatggtatactactagtagtgaatactcgttcaaaaataatgctggaaatggttgtaaggtgaggaggtggttgctcaaaaggggactctgtctgggaaggaagatcttagtggctggcttcttagcttctgctgccccggtggttgttccacctcttgtggttgcttctgctgttggcattgttgtttctatgccttgtgctattttcttggctagccatgcttgcactcagagtttaatgagtaagttgctccctaggcctactcctcaggatactttgttgcgtgaagagatgtgttttcagccaggcaatgatgttatacacacatatgaagaggaacaagtccttgtatatgaaataaagagagacattgaaatggttggtgttcaatgtttgaagaatggggaaaatatga

SEQ ID NO: 13311 - DNA, 398 bp, Glycine max
  modified_base (91)..(91): a, c, g, t, unknown, or other
  modified_base (93)..(93): a, c, g, t, unknown, or other
ttcatagaacatttgtccataaaagagaaagttgttcagctaacaagttcgtggagaacccaaaagcgtgtatttatgggttagcgttgcnantttgattttgggtgaagaattggttttgcttaaatatcgatttttattgaagtttttggtttgaaaatttgtttcttaaatgtaagtttgtaatcagacttatatgaaattttcagcccaatgcaaagagtttttttaagttgaacaatttttggtaaagtacatttctctttagcaaacgggaatttttgagctatgcaatcatagatcaaatatgttagatgtttgattttgttcttgctatgttggattgctcttgctgtgctggattgcaggtatttcatcttcagatgccgaacattgaa

SEQ ID NO: 13312 - DNA, 381 bp, Glycine max
cccactcgttcggcacgtggcttctgcagactttcctgatcattttgctaccaactgggagggcgctttcttcattggagtaatttgctcaccaatttgctatctttgcttccatactttcttgttcattttagtgtcctcttcactttcagttttttgttgagttttagggcgagtgataaagctgatgatggctctcatctttactatattgtttacgattttggtttggatcttttattcttcctaatatcttatcaactaatctatcaccgctgttctgcgtactgggggcagtgtgacgttaattggtacatatgtctttacaagtgtccatccgagaaccatctggaaaatttgctgctttagcttcaaaattca

SEQ ID NO: 13313 - DNA, 423 bp, Glycine max
ctttcttcttttttagctatccctctcttgaaaaatctagatctcgttcttccttgggctacgttacgcttttagtgaccggatctgtatggatctgaaccagatctacacgccgatggtggttttggcctggtctttcatagatctgatgcatggaggctcagatctactgtacagaggtgtgcgattcatatactgtagataatcgatgagaagaacgcagatccagccgcttccgcttgttcgatcgctacagacgcttgtatcggattattcatgattgattcataagcagcatgtcttcctccggctatagttgttgcagatctcggatgttgtaaaattagtgtatgatgtgaagctatgggctggaaaatgtggatgtaggagatttcgggacgaaaggcctcaaaacgcttcgtc

SEQ ID NO: 13314 - DNA, 342 bp, Glycine max
cccacgcgtccggttagttcacacactaagttctgaaaaatgagttccaaagtttttcttaggctacttatgttcatggccactatacttttgatctcctctgaggttgcacccgatgatgcataccagaattttgacaaaacagatgggaagcgtagtgcaaatggggtagatgaaagcaaatattggcgtggtggctatggcgactatggtggttggcgtggtggtggttggcgtggtggctatggaagctggcgttgtggctatggtggtgggcgtggtggctatggtggcttgcgtggtggctatggtggagggcgttgtggctactgaagtttgggt

SEQ ID NO: 13315 - DNA, 391 bp, Glycine max
cggaaatatcgaaagagacagacagagcgacgtcggagaaagaaagaaaggaatgaatgagagagggatggtaggagaaaaatgagaatggcgtgaatgtgaggagagaagagcctgaatattagaatcggatacccttaaagaagcggagataggagtgtgcgccttcaaacccaaggggcttctgaggggctctatatcggaggcggtgctatattactctccggatttcctcaccatgaagagcctgttcatgcccaagcccatgactcattccgatgtcgacatacatacgcgagatctacttttgcggcttaccttacgagatgactatgacatgcccgacttgaccaattacctcttgtacttaaagtcaattctttatggtaac

SEQ ID NO: 13316 - DNA, 299 bp, Glycine max
aaaaggcagtaatagcagctgacacatcttaagaatatcacactccattttagggggcgggttgtatttgtaataccatttcctcgcgcggcactgcttcccgccgccgccgccgccgtcagcgtcagcaccaatggcagacgcatcttctctgccgacggatcaactcgccgccatcaccctctactaggttcccaaagctaatgcctccgaccgcgtccctatgctatccatcatctcccgcaccgacagcggctcgggcctcgtcgacacgtaggctcgcgttggcagattcgtga

SEQ ID NO: 13317 - DNA, 419 bp, Glycine max
ctcaacggcgttctccaagtgactctcctcgtcgctcccctagctattctccgtatggaagaagctatagccggtctccctattcttcagaccgaagtaggagtcgttcttactctcctgactataggaggaggaagtcaaactatccatatcactctaggcgaaggtcatactctccatactacagccggtacaggtcttattctcgatatgatcgacacaggtcatattctcgctcttgctctccttatagcaggtcacctgtcagcatccacgacagatcatactctccttatgactcacgatatgactcaccggatgatcactcctacagaaggcaccattacagatctgtttcacgaggtgcctcgcctgatgatcgctattatagaaggcaccattacaggtctgtttctcga

SEQ ID NO: 13318 - DNA, 442 bp, Glycine max
gggatacccatctttgtcatctcttaactcatggtacatgtctccacacattccaagtcgaagcaatgcttcagtaagctatatgggttcatccagtcatcaacaacatcctctccgttatagtgagtcggctgcaagcttctccccatttgcatcgacacactcacttccagaatgttaaattgttcaattgattatatcatatgattgagacgtccacgcagttgaactagtaattgccaagtcttgaactaaaaggtggccatgtgatgaccggtggtctagatgaatagtcctatgtgatgctcggggcattccctacctctgtcatttgacttccgtcttggcacctggtgtacattgtagcttctctctggtgctagattcgcttacatgtgctggctgaggttcttacatgtataggttggagagcttgcataca

SEQ ID NO: 13319 - DNA, 396 bp, Glycine max
cccaactttcctcaaattttaactttctaatgcaaaaccaaagctaacccacttggcgtagtagtaactgccgcttccatactcctttcctcgaatcttcctctcttcatatttgtcattggcttggtcctcttcttcttcttctttctctctttcatcttccaccgcaaccagtttcagtgttttcagtttccaagattagggagtttgtggtgcatgaaggaagcattcagtgagatttaagaggctggttttttctgcattgtgtttgaattgaagggtacaagtatgagtactacaccacaagagaagtttgttaggtttcaggattggaattcagagaaaggttctgagagtaattatcctgcaattaaaataacacactctgagagattt

SEQ ID NO: 13320 - DNA, 397 bp, Glycine max
ctttgtaaacagaaagagaaaggcagagaggaaagactttaccgagtccttacgcgttgggtgtgtttgcgtcggaaggaagagaagatgagtgagaatttgatggagaaagtgagcgcactgggagagcgcctgaaaatcggaggcgtggaagtggggagaaagatgagcgaggggatgagctccatgagtttcaagctcaaggagttcttccagcctgggcccaatcaggccgacaagcttgtggaggacgctacttccgaggccctggacgagcccgaatgggccctcaatctcgatctctgcgacctcgtcaacaccgacaagctcaactgcgtcgaactcgtccgcggaatcaagaagcggatcattctcaagagccctagggttcagtacc

SEQ ID NO: 13321 - DNA, 334 bp, Glycine max
atgcgtcctcagatgttgataggcacagattaaagactttaccgagtccttacacggtgggtgtgttatcctcgtaaggaacacatcactagtgacaatccgatatcaactgtgaccgcactgataaagctcctgactatgccatagcatctagactctatacagatgatccagtggatcagcaccatgagtctcaagctaaaactattcttccagtctccacacaatctgccctacaagctagtgtatgacgcttctctcaaggaccactacgagcacacatgatccctcaatcgcattctctgctacctacacaacaccctcaagctcaact

SEQ ID NO: 13322 - DNA, 334 bp, Glycine max
gcttcctggtatctgaaatgaagtacatggattaggttcaatcataacgctctctagttaattgtgtcactcaaagttcggcacaaagggcagaaatggagaaaaaggaaataagtgtcttccattctgggaggggtagggtttatcgtgatggtgtttcaattcaaaagtttgaaatttctttgtctttgatttcatgtttttgttaccctgattgatcatatttttttcatattaacaattgaaataatacatgtgctgtctttcttttcctcagaaaaaaacaagtatgagtactacaccacaagagaagtttgataggtttcacgattgg

SEQ ID NO: 13323 - DNA, 175 bp, Glycine max
cccacgcgtccgcccacgcgtccgcttacacttgcgtttacgcttggacggactcagagtggatcacttcaactgctgctaatacccatccataattaataaatatacaaaacaattacctcacgattatacttcacatattcacatatctaaacccttatcgattctactatat

SEQ ID NO: 13324 - DNA, 430 bp, Glycine max
  modified_base (414)..(414): a, c, g, t, unknown, or other
tttttaaatttctctgtctcccatgtaagaaatgtttgattggaacgacgaagagcttgctgacatagtatggggtgaggtgggtgagggtgatgatcatattgtgccttatccggaggcaagtgaagatcttaatgacaagaaagaatggagtcaggaagcttctgctactaaactgattgaccagaagagaatagaggctaaaactgatttttatcaaggaaagctcggaagcagttccaaacttgatataattgaaggacaatctgcctcagaatctggcacaaactcatggcctgatttatctttatccactgcggctaaaactgatcagggttccctgggtgctgctgatgtatctaaaactttagagactacacagcttgaaaaggatgtagaaaagcaaggtgattntgtcaactatgcctgg

SEQ ID NO: 13325 - DNA, 444 bp, Glycine max
gtttgattgcttcaggattaccatccaaactgcgattagaagagtctacgcttaggtctagcatttggtaattggtgtcatcacctatggccgaaacagtgtcgtgaaaaagcaggctcatctagaaaaggtgtaaataaggaagaaatgaaaccaagacccattctttcaaaagttacaatggttggtctctctacagaagaagcaggccaaacgagcaaagctaatttaaagaagacaatggacgatttgacaagagagttggagaagacagaactagatattatgacagatggtggcagtaaagagtgcacagtagaagatagggatccactatttgtggcaaatgggggaaattactattctagtatgaggagaaaaccaggatctggtcgctagtttagagtaggatccaactaaaaccttcttgtcacagaatttttc

SEQ ID NO: 13326 - DNA, 53 bp, Glycine max
tcggaccctcctattgcgtctgggggatctggaaaggactttggcaattctgt

SEQ ID NO: 13327 - DNA, 395 bp, Glycine max
gcgttccttaacacacactctgcctctatatgtctttctctttgggtcataatccttgaccatggattgtattcctctgcggggcggccaatcaaccaaccatcacactatacatattatgcaaatgtcgtatagttgtagtgttatgcatatgacatctacatccttatccttcacacccaactacattgactccaaccaacacctacccacatactatcctctattccacttttcccatagagacctctatcatctcatatcaactcataacgccctacatcttatccctcttctcaatcttctctgcgactacatactctggttcttctctgctaccacttctatacccaacaaccactcttcataaataaatcaagattacatggactatt

SEQ ID NO: 13328 - DNA, 425 bp, Glycine max
cttttctccaaacaccgcgccttcactgacgacggctctgtcgccgccggagcagggcatgcaccgtcatccatcggcgtcgttcaaattcctctcatctctgccttccgttcactacccattgcacctgaaagcacgaggctcgcaacacattcgtatacctcctccgtttacttaacgaagggtttgaaccttcggaatcataagccctctgcgagtgaattccttttttccgagtgtcgcgttgaggttacgtttgttcggtggcttttgcgaattctctgaactcatggccgcatggtcttctagaaagttactgagagacgttcttctcaaaagtgtagtctcgaatcagcttcctggcattagatgcttttcttctgcgccaaaaattgctcctaagatcggtcattattccaagaaag

SEQ ID NO: 13329 - DNA, 340 bp, Glycine max
aaaagatggccatgatgctgaaaatatagggtttggagaggcaacacaggaaagggtcgatcaaccgtaaaggactgcatagattcatgacttctgtttaggcattccctttgctggatatgttttaacaggagggattattggattccttatttcacatattactgcaacactaatctactgtgtgctctttggccgtgctatactatttctcatcacctttagcatgaaggtctgtaggcaaggaaactcaagtttaccatttattctaggacaatcagctttggcagcggttcttatctggaagaacttccatagctactcattggcaaataaaatt

SEQ ID NO: 13330 - DNA, 385 bp, Glycine max
gcactcgtgcgaaaaaaaagaaacctaatcgccgatcgcgtcaaaagttcggtgttgctctgtgaaattgccgtttgggttttttgcggtcggggataatcctgtgaataataacaataattgggtatgttttctgttttaggtaacctagctgtagctccttttttttttataattgatttgccgttcgaagatagtcgttccaggtactgctactctttgtgttttctggcgttttaattctgcgcaattatttaattctacatgtcagattgttgattattggtcgtatgattcgttagaactctatgactcctgagctctggagttgaaatgttgacttactaggctaaaagccgtagcttttgtggtacgtatcctaaca

SEQ ID NO: 13331 - DNA, 436 bp, Glycine max
  modified_base (343)..(343): a, c, g, t, unknown, or other
attgtattgtgttcaaactttgtttcttgcataccctcttcttctttggccttaaccgtcgattgggctttgaaatggagttcgaggaccgcttcagacaccaggttcagagaccaaaatatgattgccttctttttgatttagatgacactttgtatcctctcaaatctggtctggcaaaatcatgtctccaaaatattaaacactacatggttgagaagcttggcatagaccctagcaaaattgatgacctgtccaacctcctttacaagaattatggaactactatggctggtctaagggcaattggatatgactttgactatgatgaatatcatagctntggtcatgggagattaccttatgagaacctaaaaccagacccagttctgaggaacctgttgctgagcctaccctataggaaacttatcttcac

SEQ ID NO: 13332 - DNA, 437 bp, Glycine max
gtttttatttttatttttattttttcacctattgttatttcttcggttgatttcttgcattggttgggttcatgtggtttcatttctcttaaaaagctttgattttcaggatcatggggagagaagttacaggaatgcaagttgtggacaagaagccaaatggcgtaataccagcttcaaatggtagttctaatgataaagtgtgcatttctcctaaaaggacagcagctaaggttcatgcgaaggatcacgaggtaaatgaatgtaccaaagctaactcttttgttgaaaaaagccaagagaagatggatggtttgagtgccaaagcaacaaactgtaatactggcttgcctgaggaggagattgagatatctgaagtgcagaaaatgggtgacagtaaaaagttaagcccgcctgctgcaagaaaagagcatact

SEQ ID NO: 13333 - DNA, 235 bp, Glycine max
caaaattcatgtctccctctttccttcacgcgctcctcatcattctcttcctgggttccggacacgcgctcaaggtcccctttcgagtcaacgatgttcttcccgttcttccccacggaatcttctggccggttcttaacaaccttcacagcgccgtcgacttggctcctttctttgtcggcggcggcccttccgataacgatttccgtcagtggaaaaccggatgcttttacga

SEQ ID NO: 13334 - DNA, 127 bp, Glycine max
  modified_base (54)..(54): a, c, g, t, unknown, or other
ctctgatccaaacgaagtaacgaaccaaccaatcaccctgtctttctgaccganaaacatagtcccaaatcgaacaaaatcaatcaactaactccttcaacgttgttgttattatgcagacaacaag

SEQ ID NO: 13335 - DNA, 374 bp, Glycine max
cccacgcgtccgaagttcacggtcagttctgaaaaatgggttccaaggttttgcttgttggagttatgttcatagcggctatacttctgatctctgctgaggttgcacccaatgaatacgaaaattttaacaaaaaagatgggaagcatgctccaaatgggttatatgatagcaaatggggttacggtggttggggtggtccttggtatggcggctggggtggcccttattatggtggcggctggggtggcccttattatggcggtggttggggcggtccctggcgtggtggtggcggtggtggctggggaggttggcgtcgacctaatggcaaccctcacaactaagaagaaaacttgctaaagcttctttac

SEQ ID NO: 13336 - DNA, 190 bp, Glycine max
cccactcgtccgcccttgctaccaacagcatagtttccatcctctatatttcttcaatcggctctgccttctacttctagggtttcgcttctgcaacggacgaccttcttcaactcatcaaagttgactttgtgagccaattcaatcatgcttgataaggtatcctagtgttgtttgttcaccttcatct

SEQ ID NO: 13337 - DNA, 429 bp, Glycine max
atcatgtgggaggatgacatcgtaggggtgaagagaagagatggtgaaaggcacaggcgcgggacataaatgacttgagggcgacctccgacttcttcacagctctaacgccgttggaagatctacaggatagactgctcagatcacccgaacagagactctctaatacaatcatatatgggtgcacgtggacactacttaaacctatggcatatattctcctacattatgcataatcatatcatcgtacttgttaacactgtatctggatctgcgccgatcatatctgctctgtctgtagctctctcagggatatcaaagtcatgggacgacttggaccctgattatcttaggctagatgcgtactgtgaagacactactcctgctgattgtacaggtacaacagatccagctgatctgaagtgactt

SEQ ID NO: 13338 - DNA, 374 bp, Glycine max
gccactcgtgccttaatgtatcttcactgggaggagagagagagaaagaaagacagaagaggtgacagactggcagatctgacgacgaccctataggagctagatcttaaagaaacagagacacatctgattgagctaccataagacgctctcgacgcagaggcaactcccaagaaacatttcgaacacaaggaagagcttgattcggaagatatgatgactatctacatcaacacatcgctgccacatgtctgtcagtgatgtacttgaacgcacttgataaactggcttccggataatagataaacgaatggctatatgtagacaccactgacttgaagaagcacatgagataccctgttggatactcttac

SEQ ID NO: 13339 - DNA, 459 bp, Glycine max
gtcttctaaattctatatataaggtccagcctttgtagaggagccaatctcactcctcgtctgcgtgaccacgcacctagaaactcctatcaaagcccctatcccatcagggagactgacaagaacatatcaccaaacacgcacacttcacaaaccacctagcctcgactctcattccgattccagttcgactagcatttcggaaacaatcatattgactactatagagcaggacgtcactgacaaaacttctgcacatgataacgttgccaatgcttaagttgatcaatactaccatatgttcgcatgaaagccctgagctggtgcatacgtctcaccaagacctctacacactcgagcgtcctgagcacaatggcataatgggtattacataccacaatgctcgatatcaacaagaaaacactatcatcgctatatggggaactcactgcagagatc

SEQ ID NO: 13340 - DNA, 440 bp, Glycine max
tgcagtttattctatcatatccttgttcaaataattttcttttcaattacaataccccaagcccagaaacttatgttcatgaccatcctcaaggtcccaataacatttgcttgaagacaattttgagttgaccttacagcctagttccacctatacaaacacccttgatccttcaaagcctctcatagctccaatactggcaacaataatactcttgggcatctgaactatctccattctttttttccccctttctttgcagtggatttgcgaggttttaaagaaattaaatgcgtttttatgtgctaaagagctaggtaattatagaattcatctcacacatacttctttttactacctttcatcttttagattttattcttgaattattgttgtttaacggagtaatttaattagttgaggggttgtggaatttgtgt

SEQ ID NO: 13341 - DNA, 435 bp, Glycine max
accacgcgtccgtgcttctcagtttctgattttcccaatcgcagctaaaaaatcctttggggcctttaacctattgtgaataagcagaaattagggaacgcaacaatggctcaagcggttgaagaatggtataagcagatgcctgtcatcacgcgctcttatctcaccgctgctgttgtcaccaccatcggatgttcccttgatataagtaatccgtatcattagcacttgaaccctagattggtggtgaagcaatatcaggtcaggcgtctggttactaatgactcgtactttcgtaacatggacttggatttcctgtgacatatgttgcctcttgcacgttactgcatgcttctcgaggagaactcgttcacggggaggactgctgatttgttttacatgctcttattaggtgccactgtattgactggaatt

SEQ ID NO: 13342 - DNA, 436 bp, Glycine max
gaagcttcgttaccgaatcaaggatatcaaggaggctgcggctaaggctctcgctcaacagggttcctccaccaccaacatctccaatttggctctcaagtggacccacatattcaactagtagcttcttcctttcaattatctgcacttaacttatcaaatgtcacttggcatacatgacattaataaaataattgggtaagtgtacgtaaatctcaaatccacatcccgacgatgttcaatggctagacctctaacttgtagtatatgtttcaaaatgcctttcaaccttaaattactaagttctatggctgcctggctaattaattaacgtcaatttcttcagtttggtaaatgccttcaaccagaaaaggagtacggtatatcctttgatcaatcatcaaggattaagcactagtttttagaatctgcttta

SEQ ID NO: 13343 - DNA, 426 bp, Glycine max
cccacgcgtgcggcgagcctcgtgcaggagaaaaatgccagaagatcagttgaacggacggacgatcagatcacatggagctaaagtggcaaggacacatatgcatgactggttgattcttttgcttcttgttatcattgatgggatcttgaatgtgatagaaccatttcaccgttttgttggagaggggatgatgtccgacttgagatacccgttgaaagataatactatacccttttgggctgatccaattgtagcaatattggtgccaatagcaatcattcttgttgactatctcatccgaaaggatgtgtatgacttccaccatgctatcttgggccttttattctctgtactcattactgcggtgataacggatgctatcaaagatggtgttggacggtcacgcccagatttcttctggcg

SEQ ID NO: 13344 - DNA, 424 bp, Glycine max
gcttcctctctctttctctttctttttctcaattgctgcgaaagaaaaaagaagcggaagctcattaccaaagacgaaaacgaaagaaagaaacgatgatgcagctgcagcaacaccatcaagaggtggaagaagcagaagaagaggcttcgaattcttcttctcatcatcacaacaaggcatcgccttctcccagtttcagcagctactcatcggagacactcgccgagatcgccgccagggtaatcgaggagctccgccgcgaccctagttcactctccgtcgacgacgacgacgacgcacttttcccgccatgggaaaaccaaaacgacagcttcgtccctcaaaacgacaagccggcagaacaaaacgacgactacgacgatgatttcgaattcgcgttcgtttcgcgagacttcacttc

SEQ ID NO: 13345 - DNA, 441 bp, Glycine max
gcgatcgacgcagtttgaaatcatctgctcctgctcgtttttctgttctgcacgttggaacatgctcttgagaaaaagggtgaatttgtgtttctgttataccctattaagtgaggaatcattttttggctttttgcccctaaaaaaatggtgcaagttgtgtcattgagcactctggcaacctgtggaaatagcaggttatgtggatcctcaccatcttggatggcaccctttgagccatacaagagatcccaaattacctcttccaatggcagacacttggtttggaacaattctgtgcagagcttgttcttaacaaggcacagtgattttagggctgaagcagcatggatgtttagagggggagaacaagggttggatgcgagttcggagcacagcgagagcgctaatgaggatatcttgatgttcttctttcagctc

SEQ ID NO: 13346 - DNA, 435 bp, Glycine max
  modified_base (413)..(413): a, c, g, t, unknown, or other
  modified_base (426)..(426): a, c, g, t, unknown, or other
aagagagctcgttcgtcatttttcgtgcctcaaatctttacaatcgataaccacacccatggccttgattcagaatgtcggaatcaccattcagaccacgagaaaagcttgctgagaagcaaaaatattttcagagtatccacaggcatacctacttgaagggacccatggataagattacatccgtggccataccactggctttggctgcaacgtcaatttacatgattggacgagggatctataatatgtcgcatggaattggaaagaaagaataacctgggaatttctgattgaggagggtttcccacacaaacctaccttagcttcgttaatatgggccagtggttttctttgcatttatgtctgttctcttaataaattgcttagttgcagattttgactgccattgngggtttataactngaatgaaag

SEQ ID NO: 13347 - DNA, 436 bp, Glycine max
tggcaaagctatttttgaaacaggcaaagcaatacgcagatgcaagaccaagctagcctccgcaactcttccaaggcattgcttccaagactccctctcactacctcgcttgggacgtcggcactgggagcggccaagctgccaaatctttagctgcaatatacaagaatgtgatagccacagatgctagtgacaaacaacttgaatttgcagccaagctcccaaatgtgagataccaacacaccccttcaaccatgtcgacggccgagcttgaacaaatggtggcatctgagggaaccatagaccttgtgaccatagcacaagccctgcattggtttgaccgcccaaccttctacgaacaagtgaagtgggttctcaggaaacctcatggaatcattgctgcttggtgttactatttgccaagagttagtgatgc

SEQ ID NO: 13348 - DNA, 425 bp, Glycine max
  modified_base (369)..(369): a, c, g, t, unknown, or other
cggaggtagaaagaggcgaatgctgttgcaaccgtttttggttttgtgtgcgacggcgacgggtttgggattgtggatgttggcgctgatgccgctggatcctgcgatcactgttgattttccgaaaaaaatctagcttgtagattcgaacagctcgagtttgaacggcggcggatagaatccttgcgcggagttggaggacatggggacggatttcgtaactggtgttgtctggaaggagacgctgagtgtgaggagaattatcgaggaccacttcgatctgaacggtgcttcaagattcagggattagccctcagatcagatctgcagtcatggatgtgttcttggaaagactgattatgcttgctntggcaatgaaatgtacaaggtcttaactgctgcatcactgaatgtaatgctaaacc

SEQ ID NO: 13349 - DNA, 439 bp, Glycine max
gaaaggtacttagaggctaatgcttccgctaacatggtaggaatatagtgctaaggtgagaggtatctgatagtgtacgatgacactgcatccgaacaatactacgatcactgatgttattgcataaataatctaaactagtagattcgaacagctagagtttgaacggcggcggagagaagccttgcgcggagttggaagacatgggaaaggatttcgaagctggtgtagtctggaaggagacgctgagagtgaggagaattatcgaggaccacttcgatctgaacagtgcttcaagaatcagggattagccatcagatcagatctgtagtcatggatttggtcttagaaagactgatgatgcttgcttagggaatgaaatgtacaaggccttaactgctgcagcactgaatataatgctaaaccggtccttgatcat

SEQ ID NO: 13350 - DNA, 217 bp, Glycine max
gcggacaagatgacaacacgctacaagaagaaccggaggacgaggggcctcgacatcactgagggcagcggaatccaattgcacaggaagcaccctatacgacacactaacaccggaagcatgcaccaccacaggatcctcttagacaaataccaccctgagttcttctgtcttgtacgaatgcactatattcacaagcttcttatcatatcactac

SEQ ID NO: 13351 - DNA, 300 bp, Glycine max
accacgcgtacgaacagacgaccgacacatacatatagtggtagctacaatcagagataggggatgtcacctatgagtacacatctacttggctactaacatacagcctgatctttgttgaaaacctaccctcctccatggatcaggagccgtatcctgacacatggtcggcacagccactatctgaatcatccttgttagcctctctgacagctacaccgcctggaattcaatcataacatttatctaacacgacactatcgatatcaactttgccggcactcaacacatcttgtacat

SEQ ID NO: 13352 - DNA, 324 bp, Glycine max
cccacgcgtccggggaaactaacaagtgtgacagaaaagtgaagaacataccaagtaccagctgggtgtttcaacaactgttctgtaatatgtatatataatttcaagactagaaggtaaagtttacctccgtactcgttgggttttgatcgttgaatctgatagcggtttatgtagagataagatatatatagcatgtattgtctaataacctagtaactgcaatatgctatagcattattacgtccatgctagattcagagctgttgaatttatggattgtccataactacttgtacataatccttatagggttagtagctt

SEQ ID NO: 13353 - DNA, 77 bp, Glycine max
cccacgcgtccgaaaaaaaaaaaaaaagttaaaaaaaaaagaaaaaaaaaaaaaaaaaaaggaaaaaaaaaccaaag

SEQ ID NO: 13354 - DNA, 349 bp, Glycine max
cgaaaatcataaagtttaatcttgacaatatttaattttacatttaatttaaccaaatcagaggggttaacaccctataggtgattacacatatttcatacaatttattaaccaaaattcatatacacaatcatatcaacattctgacaaaaatttacaacaactatcacatctatatactcctatcctataattcactcatctaatattaatccacaataacccagatacctatatcgatcatatgttaaacatttcatactcatcaaccactatacaaaatgcacaaatattactagccttttacaattttacatctagaaaattcatatgtatatatataattcac

SEQ ID NO: 13355 - DNA, 446 bp, Glycine max
  modified_base (72)..(72): a, c, g, t, unknown, or other
gttttgccagttggctcccgtactcttgccaagccttacaagttggagcttgccatatatgctaggttgcangacgcacaaccacgtaccgttattggactgtggaatgccaatttacaagatccaaagcttcaccagtctgatccgtcagtgacagttgttgatcgcattactaaaacacgcgttaaacttgggcctgcaagtgagaatgacaagcaacaacttacatggttttctaatgcttgcaaaggaattccacaggtaagtccagcattcttgcaaaataacgtgcctacaggtccacccacagcactaccagttgcagaagacacagagttggctatggccatcagtgcatcccttcagtctgccatgcaagagaggccacccttttctgatacacagccaagctttgaagcaagctcttcaagcagtgcaatgaatac

SEQ ID NO: 13356 - DNA, 310 bp, Glycine max
cccacgcgtccgcccacgcgtcctaaaaaaaaaacattaaaaaaaacaaaaaaaatagagaagaaaaacaaaaaagagaaataaaaaatgtcaaccattctaaatgatccaaattatctatcccatccatgcaacttttctgactctacacttgggccacctataatcaatttatactcctgtcttatactacacttatcctagcaaaacccttacataacccacctaattacatttgcaatatattcaacttttctcatcttgaaccactacaaaaatggcttcacttttagccctttcaaacatcttc

SEQ ID NO: 13357 - DNA, 288 bp, Glycine max
gctatatgaacgacttgactggctctgaaacaacattgcaaacatggcgtatagatttgggagttaaacgcagggaagttgagtttacttcggccattatgatctccagtctctaattttcttgccctacttagattttcattacttgagcatgtatttttcttgaaaaagaacagcggtttgttactgaagaacaatttgaattttttttccatgtataaccaaatagcattgtttactatttgatttgttaagtcaattgaattatataaagcctcgtattatgtc

SEQ ID NO: 13358 - DNA, 227 bp, Glycine max
caatggaagcaaacgagaaatgtgatgtgtatagttttgggatcttggcactggaaatagtgtttggagagcaccctggtggtgatgttacatcttcttgtgctgcgacctcaacacttgatcatatggcattgatggataggttggaccaacgtcttcctcatccaacaagccctactgttgttgagctgatatcaattgtgaagatagcagtttcctgtttgacc

SEQ ID NO: 13359 - DNA, 428 bp, Glycine max
gttagttcacacactaagttctgaaaaatgagttccaaaggttttcttattctacttatgggcatggccactatactggtgatctcctctgaggttgcacccgatgatgcataccagaattttgacaatacagatgggaagcgtagtgcaaatggggtagatgaaagcaaatattggcgtggtggctatggcgactatggtggttggcgtggtggtggttggcgtggtggctatggaggctggcgtggtggctatggtggagggcgtggtggctatggtggctggcgtggtggctatggtggtgggcgtggtggctacagaagttggggtggtggctatggccctaacgaacataatgaagctgggattgatgctagccctcacaactaagaaggaaacttgctaaagcttatataggatttaagtta

SEQ ID NO: 13360 - DNA, 438 bp, Glycine max
cttatatgctaagaactcgacacacacaattgctgttcgcacctaaccagaaagaaaccagtgtgtttgaattcgatggttgctgcttcagtctcagtgtggtaattcatctatgaatactacgccgtttatggacaagcacattatggatctcactcacagtcacggatcttcttcttcttccactactcagactcagagcatggacttcatcgaccttatgaaagaacctatacaacatcatcaccatcatcatctcgaatattattacatctattaattataaaatgcccgttgcaattgtatcagttttgtctacatcgtttttagttactattttctaccctatctaccttttttacagtttcaattttttctaattctccccattctttatgtacatgttactttcgattacaacttcctttactttttttt

SEQ ID NO: 13361 - DNA, 434 bp, Glycine max
  modified_base (404)..(404): a, c, g, t, unknown, or other
tgcagtttattctatcatatccttgttcaaataattttcttttcaattacaatacgccaagcccagaaacttatgttcatgtttatcctcaaggtcccaataacatttacttgaagacaattttgagttgaccttacagcctagttccacctatacaaacacccttgatccttcattcttttttgagttgaccttacctagctccaatactggcaacaataatactcttgggcatctgaactatctccattctttttttccccctttctttgcagtggatttgcgaggttttaaagaaattaaatgcgtttttatgtgctaaagagctaggtaattatagaattcatctcacacatacttctttttactaccttttatcttttagaatttattcttgaattatncgtgtttaacggagtaatttaattagttga

SEQ ID NO: 13362 - DNA, 436 bp, Glycine max
tttctttgcagtggatttgcgaggttttaaagaaattaaatgcgtttttatgtgctaaagagctaggtaattatagaattcatctcacacatacttctttttactacctttcatcttttagattttattcttgaattattgttgtttaacggagtaatttaattagttgaggggttgtggaatttgtgtagaagatttttctataagaatttttaattcgctaaagaaattctcttgttaaattagattattatgagattaattacttcacaaaattccacaactcctcaacaaattaaagtactttgttgaacaaaagttaatttaagagtaaaatctagaggatggaggttgtaaagagaagtggtgtgagatgaaatccataattagctagttgtttagcgcatgaaaaagtgtttaatttttttaaaatctc

SEQ ID NO: 13363 - DNA, 425 bp, Glycine max
aaaaaacctttcataacttcttttctgcctccttcttcttcgggttgtgagtgtatacggagtcacgcatggcaggtttccttcgacgctggattccacgatggaagattttatcttatccaccctgacgggatagcaaatctttcatgaaattgagaattgctgctgctaataaacaagcttccattgagatgggggagttcaccgggagtggtgagtatgtgactatcggcgaatttccttcctccaggacaaatcactcaaggaaagtttcagttcttgctcttgtgtttctcatcttctatgaggttacaggggggccttttgctgtggaggatactgtgcacgcagcgggtccttttttagccctccttggattcttgctattccctcagatatggagtgttcctgaagctatgatcact

SEQ ID NO: 13364 - DNA, 346 bp, Glycine max
gcgtagtgttgcgtcgacgtcgtgcgctgatactctgactctcgactttgtgaccatacggtaccctagctacggattgcaaccatgttgaccaagcacggtggaaaagctaagcctttgaagaaacccaagtctgataagaaggattacgactagattgatagggctaacattcagaagaaaaaggatgaggagaaggcgctaaaggagttgatagccaaagagcaacagaagggaagctttggatgctctgggctcatgataagtggatagaactaacggctctatatcatgattgcctgcattcaatattgagccctgcaatacagttgctaccatgataact

SEQ ID NO: 13365 - DNA, 308 bp, Glycine max
cccacacttccactcactcttccactgacatattctctatcatacttctatatcatataagcattgtcattaacgcatgacaggatacacacactaccctatcttttattctttttgaaatatccttatccaatatatcatctaataactatagtatttatatacaaatttttgcaatctttcaagctataaactcatccttatcatacactctctaaaatcttattcctaaaatcaaaatcactacctcacacttttcttcgattactttatctttaaaatcactttattaaatctacatttacata

SEQ ID NO: 13366 - DNA, 233 bp, Glycine max
cacacaacaaagatgcattatgatactagaaatatctcattgattaatatctaatctaatagtgtgtgtttctcaagtcggtgggtcgtacacattatacacacgcttatagctattggcaattgcaattgtcttatctcgattctcatatctcgatattctagtcttgataacttattagtaattgtccaatcgccgtccttaactggactcatcttctccgtagtcatttc

SEQ ID NO: 13367 - DNA, 446 bp, Glycine max
agactctccatttttatggagtttgtctgatggagaagcatgtatgaagcgttctgaccggctacaaagacaagctgtttacctcttattagcttgttctttcagtctgatctgtaaaagaggagaaaatgcaaaccactgtaataattcaactctgtgctccagttttaccactaacccagattcagagcatgattacttctgcagaaaaaagggatcactagaacttttcaagtggattctaggacatcttccaactgcaatctctatcaaacatgaaaagtacatgcagatgtgtatgaacttcatatcatctttccttcagctatatcttcgtgaggatgatctattgtttgaagtgcttttgctattggttagcatatcatcttctctccaagaacagtctgaaaagtaggatgctgcgtatcatgatgtaatgaaagatt

SEQ ID NO: 13368 - DNA, 429 bp, Glycine max
ctttgatgaagatggtgtcaatttggggttcttgatttctgaagatgactttttaattagttcttcatattagggtatagtatacttccctctcttgatagatatttacctctaagagatgaaatgtgctatacttttgtccattttaatatttttttattagtattgtccagtttaatataaatgaatcttttactagttgcaaacatttatagatgggcatttcctttttctataactttcaatgtcaccaactactaattttaacgccttattattgagttttggattctagatgtaatgaagttttagacatgactgttatcagctttggaacctttttttttttttacctataatcttcatttcatcttctgaacttcccaagttgatagtagggttcagaactgattacagatgatgctggat

SEQ ID NO: 13369 - DNA, 401 bp, Glycine max
tgtgaattgggtgtcccatttggaagctgtggtggccgaagggctcagcaaaaagcccgtggatgtcatttcagatggaataaagtccatgggcttcaactgtgtcaggctcacttggcctatagttttggtcactaatgactctcttgcttctctcaccgttagaagctcctttcagaaccttgccctccttgaatccattgctggggtccaaaccaacaacccctccattatcgatcttcccctcatacaagcttttcaagcagtggtgaaaagtctcggtgacaacgatgtgatggtgatattggacaaccacataacccagccagggtggtgctgcagtaacttcgacggcaatggcttcttcggtgacaaattttttgacccaaaccagtggatat

SEQ ID NO: 13370 - DNA, 374 bp, Glycine max
taaaaatataatgtcccataaggaagctgtgaatgtcatagggctctccatcaaggcagtggatgtcataataggtggggctgaatccacagactatatctgtgtcaaactcacttgatctatcgttccctccactaataactctcatacttacttcactagcaccaacagattttataaccttgacattcttatattcatcattagcgtacagactaacaaccgattcattatagatcttactcatattcaaacttgtaacaccatcttattaactgtcagcaacatcatagtcatcaatataattaacaaccacataccacatacaatgaggtgctcaactaactctgactatattgtcttcttcggtgaca

SEQ ID NO: 13371 - DNA, 346 bp, Glycine max
cccacgcgtccgcccacgcgtccgaccagttcctggcaatgaaatgagtttgacttggggccacttcatgtctgactatagatcaaattataccattgattgtcatatttcataaagcaatatctagaaatgttgatgtttcagcaaatgtgtaattatttcacttgagaaaggattttccttcgaagagtaaaaaaacaaaaaaaaaaaatacaaaaaaaaaagaaaaaaaaaaaaaaaaaaaataaaaaaaaaataaaatgaaaataaaaaaagtatgcctgcaccaaaggacaaagaattatcaaatgcggcaagaacgaaaaaaaaaaaagggggcgccttt

SEQ ID NO: 13372 - DNA, 424 bp, Glycine max
  modified_base (385)..(385): a, c, g, t, unknown, or other
cttagtttaataaataagtttaaagaaattgacccattgacttgtggcacactggctggatggatagtgttatatgatcctcagctggtttaattggtttctagagcaaaactcaatctggtcctttggtcgctgaaaaattgcgcattggttttgaaaaaagtcacccaataatatttcaacattacaacggtagaacgattaagcgacttattctttcaattatttttcttttatttttagtacttaaattagtctttaaaaaagtaaatcatatatgaatttagtgcctgatggaatactattctaaattttcccttgttgaaaatattaactgaagcggatggaaaaagttagtgtcttcactgtcttgcgtttgtaattntgaacaattatttgttgattctttcttttaagattaaat

SEQ ID NO: 13373 - DNA, 437 bp, Glycine max
  modified_base (377)..(377): a, c, g, t, unknown, or other
  modified_base (427)..(427): a, c, g, t, unknown, or other
cccacgcgtccgaatttatctgagagctgaagagagggaacgagtttgtgaagtaaaggggactcagtggaaactcggttgaactcgaaatggcgaaacttgaagcgaagctaggaatgatcgtggactcggtggggcagttcttctccggcaaagaccatcttccttattgtgactctgacgtcgtcgctggatgtgaaagagaggtattggaggctgaaaaacaatcatctgaagagcatatgcaggactgtctcctgcgtttatcatgggctcttgttcactccaaacacccacaagatgtgcaccgtgggatagccatgcttgaagcatctttgcctgctacaaaggacccactgcagcaaagggagaagctntatcttctggctgttggatactatagaaacgctgattattcaaggagtanggatctcgtc

SEQ ID NO: 13374 - DNA, 386 bp, Glycine max
gagagatcccctttttttgttctttctctgctcattcgatcttctcgatcaggttctgcgagattatcgcgcgcaagtctttaactttctttgaccctcttcgcgtgtctctacacgaaattcggtctagcgctctcgcttcttcattcgctctgttgttctcggaatttcaattcaggattagggtatatggggcgtctcgcgcgtttggactcgtcgagtgtaattttgctttctggggttctacgagttaccattttaacatcattcgcggcttcaatgtaatgcgggtatcgtgatttggaccccgcagcgcgaaccatgattatcaaacggaatttgaaatcccaaatgccgagtctgaaacgggtcatactcggcgactc

SEQ ID NO: 13375 - DNA, 328 bp, Glycine max
gtgatgcatcagcagagcatcagagtgctactgaagaagttggtggtgataaaagtgatgctgctcaagaccaaagctgccattagtagcaatggatttgacctataatttgcattttgacggtgactagagttgcttgtgctaaaaaaactagaagttggagttttgaagcagttgtaaccatgaattagataactcttcgcaagtatgggattatatgacgtgctaagattgcactatgagaccttgatctctcattcatttgcgaatgcacgattgtggcatttgtaacatttgacatctcataatataatcgtctacaataaac

SEQ ID NO: 13376 - DNA, 357 bp, Glycine max
aatcgatcagaatgccggcactctcattagattaatagaggatattctgagcagaatgagagatcccttcgtgagactttcaccaggatctttagattacactccaattatttgtcttttttaagttgggggtgaggtagagtatattaaagtttgatgcgttgttaaaccattagttatttcaggggacgccgtttgtcgcggaagttttgaaaatgatgtatcttgtggtgggattatacaattaatgggtagaataatttggtgtctacttagtaaacattgataggctttgctggaaagatatatattattcaggtggatatgtcagactgtccatcctgctggacatttttc

SEQ ID NO: 13377 - DNA, 278 bp, Glycine max
cagaattgtgcccgatggtgtgaatgcaaagcttcttgggtgccatggaccattggccagtcgtgaacctggaagagcctttttggatactgctactagttcttagtctgtcttttaatttggaaatactagacttttggataacattagttttgcaagagtgaatttgagttattttgtcagcacattccatttacttaaattttgtttgcgaacctcttcgatttggttattttaatgttatattctggtatgatgcacaatttctccttattact

SEQ ID NO: 13378 - DNA, 271 bp, Glycine max
gaattttataggaaaaaaaaaaaaaaagatttaaaaaaaaaaaaaaaaaaaaaaaagaagtgaaaaaaaaaaaaggaaaaaaaaataaaaaagtcaaactttttatggttttaaaggttccatccttttatagtgccacattcttaactacattatattgcaacgtaattgcttttctttggccgactgtaaataactttaaatgtgggaaattttaaaaagtttgcactttaaaaactttgtcgtttttcactttaaccccatttggcca

SEQ ID NO: 13379 - DNA, 352 bp, Glycine max
agctatgcactactgaggccatctaggtgacccacattgacagaatcctgattaactggggtcactatataacggcctatgagactgctctgatcagtggctcctgctcatgataagttgtcgctttgaactgtgggatatgaatgctgttgctattcatgattcggtataaaacacttacctactaattactatctgatatgactcccatggtattaatgtaactaatatccatccattggttagattgagcattctacttcattctatggactctgttatagtctctcacgttatccgtatggagattgagagccatcatctagttcacgatatgagcggtcttatcctc

SEQ ID NO: 13380 - DNA, 439 bp, Glycine max
cccacgcgtccgggcagcttctagaactatctcttttccagtaccaaccttagcccaactgggtggcacaacacaacacttgttttcttaaaagttcaaactgtctgagttttgcagaatccacggagctaagaatgaaattgtagaagaagaagcactttcacagaaaacatgaaagggttaggtcctcatgcccctttggtttcaaggggaaagcttcctccttcgttggcagtagtggatgccttgccaacatgctcttcttatttctctagaaccaccgtcctatacccattaagatgcagacaaaaatcaaggttgagcttggcccgtggcacaattcgagcccaagcatccaatattagtggtgttgaacctggagattatggaagcaatactgagaaagatggtcaaaatgtatttgaagggaatgttatcg

SEQ ID NO: 13381 - DNA, 277 bp, Glycine max
acgcccacgcgtccgaataattcgtgctcttttcggatggtcctaagctcaatttgctttgaaagctagcagttgttgatgcatgtttcgttctttctttttattgtactttatcatgctgtgtacctttattattattttgtgttctagaagaaaactaataagcgatagtattgcgcattaaaaaagcaaaatgatcaatgctacttttcttcgtgatcgtgttacatgtcttgtggttgtaaattgtaatgtggctaatgccttttaaaggcta

SEQ ID NO: 13382 - DNA, 55 bp, Glycine max
aaaaaaaaaaaaataataaaaaaaataagtaaaaaaataaaaaaaaataaaaaac

SEQ ID NO: 13383 - DNA, 375 bp, Glycine max
cggacgcgtccgcccacgcgtccgatttgccagaatggtaggcatggattctttccttcaggatttgcacggtctgatgcagatggtgaggacccatttggtgattcaaggcgaattgcctgcaaaaggtgtggtggctttcatgtctggatacacaccaagaaacaaaagtctcgggcaagatggtgccaggttttttcttaatctttgttgttctcaatgaagcctaggtagcatgcttaactgacagttggctaagtatattaataattgcaaaatatttgccagtattctgtctctcccagcatgaagagagtatttttcatacatatcatggcactagtgttttatggtgggtttttttgttttaaagga

SEQ ID NO: 13384 - DNA, 204 bp, Glycine max
cccacgcgtccgctctctaagctaccagtaccaggagctccctatctacagtgtctctctgtctctgcaaaagcaacgaagctgtgttctgatccttcaaattaggttgtttgttatttttggagacttaaatggatgctaagccgtggattaggtcaatttgatctcaactgaaactttttagcttttctgatggactcgaaa

SEQ ID NO: 13385 - DNA, 429 bp, Glycine max
agaaaacgtgccaagaggggaattaaatattaatcttgtttttcttcagttttcttccatgtatcatgcttggagatgttcatgcacgtacgttaagattttacaagaattttttttgccttgctcttttccgaaccatcatccatgtcacgagtgcttgacaagaagcaggaaggtggaagggaagaatatgcaggattgtgtaagagttgtcaaatctgtttcaatactgttatagtcgttttctttgaataagagacacatcaaaggatgcttcactatcattatggcaattgaaacattatttttaaagttttacatataatcacaaggttgaagcctaacaaggagcagcagaagtcagcagcaagcttctttggctatagaacatagctactatccccagtatatagtgaagagattcattaa

SEQ ID NO: 13386 - DNA, 422 bp, Glycine max
gtttttgggtgcttttggattgggttgttgaaaggaaggtcaaaatacgggtagtttaagggtattgcaagggagtgtggccataggaagtgaattggtggtggaaaattctggatcatcaatagtgggaacttgtgactttggtctaaggattttgggctttttactaacccttgtggatgtgagttattggacagataacaaactgcttgttccatcagcttgtggattctatgccaactttgtacgttcctgttgcagctaagtggcattacttgtctgcctttgtctattatgtgggggcaaatgcaatagcatgtgcatatgcaatactgtctctcttgctcactcttgcaaataggcgtaaaggcaaaggaacgatggagacattgatcactgtgctggacacagtaatggtagct

SEQ ID NO: 13387 - DNA, 209 bp, Glycine max
caagcgtgtacttactgagagagcaattgaagaaccagatcccaggaggtctgctgagatgaaaagaatgataaatgctctttgatgacttaaaattgacctgttcttgtgatgacattactgggtatgttgttagaataggacatctacatttgcggatgtaaggttcgctaacttgaagcattgtccaaaaatattgtttatgaagg

SEQ ID NO: 13388 - DNA, 230 bp, Glycine max
aaaaaaaaaaaaaaaaaaataaaaaaaaaaaaaaaaaaaaaaaataaaaaaaaaaaataaaagttaattaccaaccggtcttaattttccaaattaacttaaccttacttgctacataatcacaaatactataaagtttctataaattaatttcaatgaactgcgttttacaatctctttactgtgaaaaccttgtttttaaataccttaataaactttcattgcatccc

SEQ ID NO: 13389 - DNA, 432 bp, Glycine max
acgtaacagaaagacacatccaaaggaagtctctggttatttcaattaattaagagaaaggactcgaatagttggttattcatggaagacaccgcacaacaaatcaagcgtccttttggtgttcctgaaggaccagaattcactgttgggttggatgtacctttgagcgagttgaaggtggagcttcttaaagaaggtgtgtccatcattatgctgactggtttaggtggatcaggaaaaaccactttggctacaaagctttgttgggatgaacaagtcataggtaaattcaaggaaaatattttatttgtcaccttctcaaaaaagcctaagttgaagattattgtagaaagactatttgaacattgtggatatcaagtgcctgaagttcaaagcgatgaagatgcagtcaatcaattgggacttttgctg

SEQ ID NO: 13390 - DNA, 440 bp, Glycine max
  modified_base (404)..(404): a, c, g, t, unknown, or other
ggatacttatctatgggaagatgatgatgacaggtaattttaaattttcctgttttgtgatgcattcatctctaaacaacagctttcattttctctgttaggaatctggccaccaatgtaataagcaacatcaaagattttatgctaattatatataaacatataaatatacacaacatttgtagctttgaatgtaattagcatctatagctgtatttttagcttttacttaggtagctctgatcagatttctctactttctttaatacatgtgtgtgaaacctagaaaattaaaaaatgacaaattatatgcattgcacttgtattctgttaagggcaaaccagcaaaggaaagatttgtacctgtttttttctccttggataaaatttttcttctttcattntaaaattgccatcatcattcaatgatatagttagat

SEQ ID NO: 13391 - DNA, 424 bp, Glycine max
  modified_base (411)..(411): a, c, g, t, unknown, or other
cccacgcgtccgattatctgtcaatttacattcgaaagggttaggctattgaattttaaagaattacagataaaataatcgatagctttgattttaaaaattaatcataatcatcggttaggttgcaacataatacttaattcgcttaattttttaactgcgcctcagagtattcataacatattctattaaattaataagctggtgatgtaattaatattaatatgtagttttggcaatcttattggcagaagatgctaggtggagttcatcaatattctggtaggtataatatcttcatgaatctaatataacgttattcatagtgaaaataaatcgagccaaggaatttattaataattgtcttcatttcatattagctgcctgctgcgacttccttatgcataattntactggttataga

SEQ ID NO: 13392 - DNA, 413 bp, Glycine max
attattcttcatcttatgtttgtttttatttttcaaattctaaataaaattttcaatctggtaagatctgtacccaagcctaaaaaaacttcgtaccccattgcccggaggctcttcgctatgcgaaggtatgggggagggatgttgtaagcagccttacccttacatatgctaagaggctgattccagattcgaacccatgaccaacaagtcaccaaggcacaactttaccgcaagatgaagaaaaaaattatgaaaaagctcactagtctccactatgtattcttgttgatacagaggcggcacatttttgcttgcctttcaagtgtctcccatctatccacatgaagcaccattggttaaatgctagacataggtaggatggtcttgagtatctgatttactctaattcg

SEQ ID NO: 13393 - DNA, 349 bp, Glycine max
gcacaacaagtactgcgctttgccttgggcagcttagacttacaactatcgcacaaaaaggaccgtttgctgccaaaggacgctcactttcaccaattcattattcccattttctccataaccacaagaagaataagcttgtaacaataatgggaatgaatggtgctcccgtcactctctccgacgacgacgtcgttctcaagtccccaaacgaccgtcgtttgtaccgactcatccacctccccaacggtcttcgcgccctgctcgttcacgatcccgagatttaccctgatgggccttcgaatcatgtttcatacgaggactaagttgaagaacatgatgatgatga

SEQ ID NO: 13394 - DNA, 307 bp, Glycine max
acggaaaattataaaccgtaatcttgccaacattgaataatacattgaattttaccacctcagggggtggagcaccctttggtgtcttaatgatcttaattatctgattaaccaaaatcatttacacaagctagactattattctgataaaacacttgaaagctactagtgagatgctcgatactcatgtgcccaccatgtgacttatctaaaccttatagcctaatataccttgcaaaatttacattcgtcatatcttcaacaattctaatcactgaaccactagaggtattgtaccacttttagg

SEQ ID NO: 13395 - DNA, 72 bp, Glycine max
cccacgcgtccgaaaaaaaaaaaaaaaggttagaaaaaaaagaaaaaaaaaaaaaaaaagagaaaggagaaa

SEQ ID NO: 13396 - DNA, 164 bp, Glycine max
atctgattttgttaagttatgtagaaaattttcatatagatactattctttatatggcatgaattgtatcagctaccactctcctctatctattttttgttgttgttgttgttgtgtaatatctaagtgaattcatgtgaagaaatgaaagttttaattccgac

SEQ ID NO: 13397 - DNA, 426 bp, Glycine max
gctacactatagtttatcgataactatatgatcctatcatgtgtttatcaaatctatgctgatagctatgaagaactacggatgagttccaatcgtacgaaactgtctctctaactgattcgtattctgcaatcgtaattatgcgcctgatgattgcgactgcagcactgacttctgcatcagaaggaacaacatttcgtctgatgattcctgcaagatataagacatcgacggattgaagtacaaaaggtcttaaatggtattggggatacctgcaacgatgtagtggaagatttacccgtccgataaggaatctctagggtctatagacgtatatcctagttctacacatagcgtatcatatgctgcatctgcagctatcactaagagatagtgaaatcagatgatccttatgctaagaaacgc

SEQ ID NO: 13398 - DNA, 422 bp, Glycine max
gcgggagaaggttattgattcatgtggaattagacaaaatcattccggtcaaagtgcatggggtagtttcctgccggggatgaggtttatgcagcatcgtctgactactacagcaccctactttacaattaagaggatggctgctgatggaacctggatgcctgctgttgtcaatgatgccacagtattgagctttgccatatgtctagtcctgaatgtttaccttactggtggctcaatcctctctatatctcacctggctcctattctactgctgcttaatcaagaatcggattttgtgactggttttggagacaaacatatatattatcctgttactgacgtcatctatgactacttcgatataactgccctctacataacatggctagatgtttggcaaggaaatagtggatggggtc

SEQ ID NO: 13399 - DNA, 373 bp, Glycine max
atttacaccaaggaggcctaccctgttagtgtaaatgattcagttctgaaggatgagaaaaaggggtaggcctccttggtgtccctccatggcggatcaactctgaacccattggccacttcatacaaacttaggtccaacagtttcggtggtggtggcgagagagtggactccgtataacttgaatcatcatgactgcctctatacatcccttctgccttggctccattgttgagctttcatgcatagacataacaaagtcaaatgctaaaggctcacccagcaagcgagacatatattgaaaaggctttgatggaggaagaagttgatccatcaataaaggagaaacacatggaaaattgagtgacgaatg

SEQ ID NO: 13400 - DNA, 442 bp, Glycine max
  modified_base (422)..(422): a, c, g, t, unknown, or other
aacaaactgaaattatagctcctctctcgcgttctcgttctctcacaccacaccacatcggagtcttcacccgcacaaacaacaaaaccctattttttctatttccacactctctctgtctgtctctctccatcaacgccattccgtttttctccaaaatcacactcccctatttgcccctaaactcttcgtcttccgttttctctctgctccgcattcgcacaattgcctataccgctgctacgttgaggcggttattgaaacggttgcgtctcggtatcctcgtcaatcacttgccaataccgcttctagggttagtttcttcccctctctttctttcgctttctaattccccgaaaatttcccctctatctgtaaccctagcttcgggaggattttttcccctcacgtgcgtgtctttntagggcttcttttctctcga

SEQ ID NO: 13401 - DNA, 463 bp, Glycine max
cccacgcgtccgaagaaagaagcatcataaagcaatacacttttttcccctcattctaccttccttcaccttcttcttcgttgcggtggtgccctagattttctctatccctttgatcgttcctgaattaccagcccccggccctcgctctagggtttcccatggattccgaggacgatatgcacgacgccaacgatgtggagtccctcgacgacgatttctacagtggcgagaccgaggaccctcccatggattactacagtgactacgacgacaacgccgacgattacttcgacgacgccgacgattctgaccggattgagtctcgccgccccgagcaaaactttaccatattgagggaactggatatccggcaaaggcaggaagacgacatagctagagtagcggcagttctttccattacctcggtttctgcgagcatcctacttcgtcactacaactg

SEQ ID NO: 13402 - DNA, 462 bp, Glycine max
ctcgcaccttgcaaacattgaatcatcatcttacagtacacaatatctccataagtgctaccgtactataccttattctgtcgttacaatgaataccctaaataatctctatccctattgatcattcctgaattaccagccccctgtcctctctctatccattcccatgtattccgaagacaatctgcactactccaacgatgtagagtccctccatcacgatttctacagtagcgacaccgacgaccctcccattgattactacattgactacgacgacaactccgacgattacttctacgacgccgacgattctgaccggattgagtctagccgacccgagcaaaactttaccatattgacggaactcgatatccggcaaatgcaggaagactacatagctagagtagcggcagttctttccatacctcaagtttctgcgagcatcctacttcgtcacta

SEQ ID NO: 13403 - DNA, 434 bp, Glycine max
cccacgcgtccgatgaaaatgaagatgtctcgtactcttggatacgcgagtatcattgggatgttcggggtgatgatgcagatgatcccgcaacattcttagttgcatttgatgagtcagaagcacgctacttgcctcttccaactaaacttgttttaagaaaaaagagggcaaaagagggaagatcaggtgatgaggttgagcaatgtccagtacctgcaagagtgactgtaaggcgaaggtctagtgttgctgcaattgagcggaaggattctggggtatatacaagttcaaagggaaattcctcgaaaagaggtggcttagaaatggatgatggtctcgaagaccaacatagaggtgcaccacaccaggacaactatcagtctagtggagcagaagattacatgtctgattgattatttcatgcaaatgct

SEQ ID NO: 13404 - DNA, 434 bp, Glycine max
gccaagtttaccttcagcgaatgctgatgcacagacatttgctactccctttagaacagatgtatctgccctgggttcatatacaccatctgcgactgttggaagtggtcgaagaaggttttcggaaatgcctcaatctgcttcaactcacaaggaacaacctcaaacaacttacagggaccgtgcagctgagaggaggagtttgtatggctcatcatcttcagttggaaatgatttagctgaccttgaaattggggattcaagtaagactacttaatttatattgggtttcattgcttgagttaaagtacttttggaaaaccgctgaggtgaaagaaagtgtttgcttgacagtaattaattactaatttcaaaacacttgtctgtatctgatgaaaaagctctttgagtagaggaaagcttagtttttggta

SEQ ID NO: 13405 - DNA, 452 bp, Glycine max
gggttcgggtcgtaacaatatgacaagctttcgggtcggattcaaacccgggaaatctgggtgcgacgcgtgatgctaaacaaagagcgattcagatttgagacataactcttcagatccggcataacaggaagcttagcttagctcaataattgaagttgataacttcaaaaaaataaaaataaaaacagaaattgaagtgagagagagatagagataaagttaaagagaatgagatatggcggaggtagaaagaggcgaatgctgttgcaaccgtttttggttttgtgtgcgacggtgacaggtttgggattggttattgtggcgctgagggccgtggatcctccgatcacggttgattttccgaaaaaaatcgagcttcgagattcgaacaggctcgagtttgaacggcggcggagagaagccgtgcgcggcggtggaggagatgggga

SEQ ID NO: 13406 - DNA, 438 bp, Glycine max
gcgaattcagacgcacaataatcgaattccctctttctccgcaattcatcctctcttccgacgaatcaaaaacaaatccctaactaaccgattcgatccacttcaatggcgggacccaacatggatcagttcgaagcgtttttcaggagagcagatttggacggagatggcagaatcagtggagccgaagccgtctcattctttcagggatccaatttgcccaaacaagtcctcgctcaggtgtgggcgtatgctgatcaggccaaaacgggtttccttgggcgcgcggagttttttaatgctctaaggttagtcactgtggctcagagtaagcgagatttaacgcctgatattgtgaaggcagctttgtatggtcctgctgctgctaaaatccctgccccacagattaatcttgctgctgtgcctcaaccacgcccg

SEQ ID NO: 13407 - DNA, 276 bp, Glycine max
aaaaaataaattaatataaaaaaaaaaattaaaaaaaaacatatataaaaaaaaactaacgacctgcaaaaacaaaactgtatacctataattaactatatctttcaatcaaatctataaacaaaaaaaaaaattcaaaccactataataataaaaactctgtgctccacttataccactaacccttattcacatcatgattacttctacagaataattatatcactccaaatttttaattctattcccagatttttcccaactgcaatctctaaa

SEQ ID NO: 13408 - DNA, 431 bp, Glycine max
gttgaattctgaagttcttaataatttgtacgcatacttcagaacctgaatttgcttctgggttctcttaccaggtttgtgagctggatttaatttttaattttcataaggtaattcattttttctcatactgtattctctccaattattagtaaatttgaatatgaaatccccacactaatagtgcacacagttcatctatagtctatgtggtaaatgagactaggatcccgtgcagtctactttgtgataaatcatattgtctgttttttaatataaatttcaaagtcctatataagtaagaatgctaatgatttaagggaagaaaaataatctaccatttactcttcagagttaatcttaatctgtggctaaaaatgagcttgatcttggcaggcatattttatattggatgaaaatttgttggctgg

SEQ ID NO: 13409 - DNA, 435 bp, Glycine max
  modified_base (411)..(411): a, c, g, t, unknown, or other
cccacgcgtccgctttttttgcagctgcgatactggctatgcgacacccaagacgcctagggttatcaggttgcttatcggctttgattgtgatgaccattctctctgttcttgttggctgggctgctccaaatctgatctctcgtacatggactcatcacattacaacatttttattcttgggatttggactttggtccttaaaagacgctatatttgaagaaggggatgcggaagaattggctgaagttgaagctaaattggataaagattggaaggctagcaatggagctacaaaaaatagcaataaggatgatgatgccacaaaaaagcataaacggtcatttttatctcagtttttttctcctatctttttacaggcattttctatcaccttttttggtgaatggngtgacaagagccagttggctacca

SEQ ID NO: 13410 - DNA, 331 bp, Glycine max
  modified_base (271)..(271): a, c, g, t, unknown, or other
  modified_base (323)..(323): a, c, g, t, unknown, or other
gaggaggaggaggaggaggaggaggagaaggaggaacccaccaacccacctcgtaattcgttccgttttccttgatccttccttcctcctcgtaatttctcttcacttccctctctctaaaacctctgcaatttgtcaatgatcttgagtcctcgctttcccattcgtttttgaattattcctcttttccgtactctcctctttggtcttttaccttaacacgcgcacacacacacacacacgaaaaaaaaaaatacataacataattgtntgtagtagtttgtaccttgtgaattactattagatcacgcacttcgcaccanaaaccaca

SEQ ID NO: 13411 - DNA, 303 bp, Glycine max
  modified_base (189)..(189): a, c, g, t, unknown, or other
atttaggcttagttcatggacaggatctagctgaccacatacgtgctgattctgaaatgcttcatcaagacaatgtagattctccagattcagattatcaaatggcttctgaaaagtcacatctatcagataatgaatctgtggaggaatctgcactgcccaatgcagaatcaagatttgataatgcanatatgtctacgccagtccaagatgcagatgaaatgtttgattctgcagcttctgatgcccaccatatttcttctaatggttcatctatgcctgcaccacgggattttcagcttt

SEQ ID NO: 13412 - DNA, 440 bp, Glycine max
gtttccgtctatctacctccctctctgccctcacttcttcccctttcccccacgccacggtggcgagtaagaggacttgctacttcaattcaagggttccacaaacaacaacaagccttttttttttttttcatgtttaaacaatgaaaagcaagcttagacgatattattcactctgactccgagctatacaccaccgagaccgagcagtgtttcactctcatttcacttttctcctccctattcccaaactcgcgcttaatcacgtcgagggcaaacaaacctcgaatttgaataaaaaaaatgaggtttgacgagaacgctatgaattggattggcgctaccgttggtgacctcgtgggcacagtgggtgcaatattatcactaaaagataccaaagtggcgattccgtttaccttcgctgcaaacaatagtagctt

SEQ ID NO: 13413 - DNA, 63 bp, Glycine max; identical to SEQ ID NO: 11233

SEQ ID NO: 13414 - DNA, 431 bp, Glycine max
aaagagagagaaagtgtgagagaaagagagaaagagagaaagagagaaagtgtgagagagagagagaaagtggagtcttttgactgagcctagcctgcaaaagccgtctaaggttgttgtctggttgatgataatgtttctttttaatgtctgaatacgcgttgaactttcaaacgtaccaccaccacactatttttttagttagccttctgatccattttcacccttaaccttaatcccaattcaaaggtccaattagtctttttccttttatttttttaaatgatggtttataaattgcattagtctccgagtgtttttattgcttgaatttcctctcctttatggagcaatgattcctttatgacagtttgcgatttttgtcggagggttatgaaatgtgggtttgattcaagtttgcttctttggaa

SEQ ID NO: 13415 - DNA, 445 bp, Glycine max
ctggtctcagcaccaagccaagcaacatggcaagcatcaagctggaccaggaaccttgaggattacagaagcctcagctgaaagaccttgtgtgtgttgaaggtgagaaggtgtccacttgtgatatgatgatggtgtagaaaggagtggtggtgttgacaggaaaagaggaagacaaaaacttgtacattttgatttgattcaatttcatgtaatattctcacaccaaattctttgccggccattaattgcatgcagggttggcatttgtaaatgatttgatgcaataagattgttctaacaggaacttatgatgttctttgattcttttttcttgatttcttttgcttttatgaatgttggagaaaatgaaaaagaaccttagacctgacgacccaaaagaaaaggtgaaaatgttcttggtattatctttcatttcatttat

SEQ ID NO: 13416 - DNA, 276 bp, Glycine max
attgaattcatccttctgtgttctgtttctttccttttcttcttgggcgaaaccctaagctccgcccttcacccttcgtacaccgcgtcgcatctacttccatcttctctcagatccaatctccgattcttgcttcactatcacaagcaaacatgtctgcggctttggatatgaccctcgaagatataattaagaacaacaagaaatcttccctcgccaacaccaggggccgaggccgagcctcgggacccggacccgctcgccgtctgcccaacc

SEQ ID NO: 13417 - DNA, 238 bp, Glycine max
taccaaacaaacaaacataaataacttactttaaacttaaataaatataataatgggctggttcattactaagcgatattatctcactatctttatcctataaatacctatattttacttatactatcttattatttctactcttaaattatcccttcatcctcttatattatcatccaatcatttaactaattctttatatatctcacctttcatttcatccaattatttcataaaa

SEQ ID NO: 13418 - DNA, 357 bp, Glycine max
tccactcgtactttcacctttacttgctttttactttcatcgattcccacatgggtcggatacaaagtccggggaacataacaacattgtgcatcatttcatagaacactattttggattcaaacatgacttcattgcaatttgtgctgctgtggatgctatcatagccgctgcctttgcattaatctttggtgctgcaatcaagacctttaacttccaaaagagatatatggatacatagaactctttctccaacgtcaaagattctttatattttctccctctttctcttattattctagattctgtgttccctctaagcttataatatattgatctatgctttaaacatttgtg

SEQ ID NO: 13419 - DNA, 416 bp, Glycine max
tgggcatgtcctgtggcttggaccttgtatggattgattgcatctcagtttggagatataactgaaagaaatgccggtgaagaataacaagatggtgaaaggaattcatagaaagactattttgggttcaaacatgacttcgttggaatttgtgctgttgtggttgctggcatcgccgttgcctttgcattaatctttggtgctgcaatccaaaacctttaacttccaaaagagatagatggatagattgaactctttctccaacgtcaaagattctttatattttctccctttttctttttttcttcttgtttttgttttccctttaagcttataatatttgtatctatcatttaatcatttgtgcaaaaccagcccgtttgaaggctgtcctttataaatgtatgatgaatttc

SEQ ID NO: 13420 - DNA, 460 bp, Glycine max
  modified_base (423)..(423): a, c, g, t, unknown, or other
  modified_base (442)..(442): a, c, g, t, unknown, or other
gatggacaaagccaatatgcattggaagacatgcttttggagaccaatatcgggcaactgatacagttataaaaggcccaggaaagctaaaattggtttttgcacccagtggaaatgaaggcattaaagagctagaggtctataactttactggtgctggaggcatagctttgtccatgtataatactgatgagtccattcgagcttttgctgaggcttcaatgaactatgcttaccagaagaaatggcctctctatcttagcactaaaaataccattttaaagaaatatgatggaagattcaaggacattttccaggaagtttttgacacccaatggaatcacaagttcaaagctgcagggatatggtatgaacaccgtcttatagatgatatggttgcttatgctctcaaaagtgatggangttatgtatgggcctgcangaatttatgatgtgatgt

SEQ ID NO: 13421 - DNA, 302 bp, Glycine max
acgcatgcacatactcaatctccatcggaagatacgctcgttgagaccaatatagcgcaaatgattgcgttctaaaaggcccatgcaagctcaaattggctcttgcacgacactgaaaatcaacgcattgaagagctagacgtctatgactttactggcgctggatgcatagctttgtccatgcataatactgatgagttcatactagcttttgctgaatcatcgatgaactctgcttaccagagaaaacgacctatatatcttagcactaaaaataccattttaaagaactattattgaag

SEQ ID NO: 13422 - DNA, 169 bp, Glycine max
cccacgcgtccgaaaaaaataaaatcaaataaaaaaaaaaaaaacataaaaaaaggtaaaggtaaaaaaaaaaagaaaactaaaaaaaaaagctaattcctatctttattccatcctttctttctcttccttacttcgctattgattttttttttattgctcttcattc

SEQ ID NO: 13423 - DNA, 359 bp, Glycine max
  modified_base (325)..(325): a, c, g, t, unknown, or other
  modified_base (334)..(334): a, c, g, t, unknown, or other
cccacgcgtccgctttttccttgaagcaaagtgaacttgtggtgtatctttccaattgaagtgaaagagtaaggatgtcaagtgggacaacatactggtgttacacatgcaggcagccaatctggcttgaagggagggaagccatttgcccctactgtgacggaggctttgtgcaagaacttaatgagctgcgaggagttgcgcgccaacacggcttctcatcgcggatggaagatgctcatcaaatgcctgacattatggatgctgtaagagctgttatggagcaaagaggttctgaaccgagaattcgggttagagatgctgntgataactntatgaggcagagaatggctggaaga

SEQ ID NO: 13424 - DNA, 269 bp, Glycine max
atgagatttctaccgagcgttctcctttattgcttgcttatacggacatctttatcctgcgggcgttatgtttgggaatcgcttgcggctgaaacaacgatcaaatatactgatcccaaatcaccggacatattcggctcttaagacgcctagctctctcgttatattgcgcttgacagatacgatcacgctgaccacagactcgatatccacctctacttccactgatgaccacttgtcacgtcgaatgagccttatactaccactcc

SEQ ID NO: 13425 - DNA, 459 bp, Glycine max
  modified_base (426)..(426): a, c, g, t, unknown, or other
cttcacatgaaccccctcactctttcagctgacaataccaagaaaacttacaggtttggactgaactcagaagcagatgagcacaacgtcttacagaaagatctgggaagtgtgaggtatcaaggttatgactttacctcagatgccatgtggtctcaaatgtctcacattccatcaaatactgtttcggaatcaagaatcggttctactatgctgggcaactgcttccagcatcaaacaatgcgagatgctgagctgttgaatctggaaacggcgaggaccaaagaccttgtctttagtggccagctaagttctgcagggggtatgaaacaggaattatcagtctccccagtctctcttcagtgactgggactggaagaaggatttaagttcctctgcccttgagtataggcccaacaaggattntaactgcaacccagatgtcaatgttgattaaaa

SEQ ID NO: 13426 - DNA, 298 bp, Glycine max
aaaaaaaaaaaccaaaatactataaacaaaatgacaataccaagaaaactaacaaaataagggctgggctcaaaaacaaatgaagcacaaaagaattacaaaaagatctagagaagagacaagaatcaaggctatgactttacctaatatgccatgtggtctcaaatgtctcacattccatcaaatactgtttcggaatcaagaataggttctactatactgcgcaactgcttccagcatgaaacaatgcgagatgctcaactgctaaatctctaaacggagaggaccatttaccttg

SEQ ID NO: 13427 - DNA, 466 bp, Glycine max
  modified_base (101)..(101): a, c, g, t, unknown, or other
  modified_base (403)..(403): a, c, g, t, unknown, or other
gaggacctaggttaaggttgcggtgctggtggtcgagttcacaggaagaggaagagatggaatttgaaagaaggaaagttgaattgaaagggtattaatgngcgaaggccgagaaggctttcaaagcaccgttgaaagaacttaaagttcatgcaaagggcagctctgagggaggagagaaccaagaaagaagaagaagttaagcctgatgtcagtgttggcacatccactgcggttactagaaagtgtgtggttataatggaaggtgatccccatcctggagcagctaaaggtcgaatgtcatttcaaagtttcaatcctttagttgataaattaaatgaggaagaagcaagactacatcagccagcagctgaaactaccatgtctagaaatcaaaatgcanatgccaatatcagagaaaataggtctccagtagaaggtccagaatgtggcaacatggacaaaa

SEQ ID NO: 13428 - DNA, 367 bp, Glycine max
gaaagactgagagagtaaagaaaaccctaaaaccctagaaattcagaattcaggtgaagaagaaggaggaaccaatggacttcgacgagtacgaatacctggagaagacagtggaggaagacatagattcctccaagaagaagaaggacgtcaccgacaagagcgagaggagttaccgaaagccccgcgacgtcgacgacgatctcgacgccgatgacagaaagagcaagaggtctagggtcgacgacgagaacggcggttccaagagagatcgcgacagagacagagagagagaccgtgaccgcgaacgttcctctggtcgtcacaggagcgagagggagagagacggagagaggaaggacaggga

SEQ ID NO: 13429 - DNA, 146 bp, Glycine max
aaaaaacaaaaaaaaaaaaaaaataaaaataaaaaaaaaaaataaaaaaaaaagggaaagggaaaaaaaaaaacgagttcactacaataaaaaccaatcattaaaaatatactctattataatacatatatttatctcaaattcaa

SEQ ID NO: 13430 - DNA, 405 bp, Glycine max
ctcagattgatgcttttctgagaagtgaccagaatcgttgtgctagcaacctacttgctgcctacacagatggagatgttgaagaaatcaaacgtattgctcagtcaagtgttatttcacatcttgaccatgtgatcattaagcttgcgaggaaacttccaacaggcgatgtgagttcattgaaggctaacaaggctgaagatgaagaggagccactcgatgaaaatgacctcacttaacctggctctttttctatctgtgtctatttagtaggaatgttgatgaacccatttcaatttaatgagtgaattgaattgatcagttatagattggtttttgtataaaaaaaacagttcttttgtgatacatgtgcaatgcaggtaataagaggagcgctgttgttta

SEQ ID NO: 13431 - DNA, 439 bp, Glycine max
ggttaagttgaagtctccctccataagatgtatttaaagaatatacttattgcatatacttaggaagtgtggttctgttggtagataacaaaattaaaattgcattaatttgaagttttaataaagaaaagttggaaaatcttactggttaggtaattggatttttagttatctagacaagctaactattgataacacgatcaacaattgtacttactagtgaaatggacctaacctgccctcattttattttgaaatgaatattggcaaaagtatctccgaacttaatgatttggatagaagtatggtacttgatagaacattatggcggaagttgatccatgtagccgaccccacctagtgggataaggcgttgttgttgttgttgttgtatttgcaaaagtatctctggaatggtaacctattgtgttatgaaaat

SEQ ID NO: 13432 - DNA, 439 bp, Glycine max
aacaacttttctttctttctaatattattatgccacaggtggatttggaaacgttggtttccgcgtgcgccggcggttgctccgaccagaaaatcgcctacgagcctcacgtcgacgacggagaccaccatccggactctccgccggcgtcgatctggctctctggcgacgccgagtacgactggtgggaccgcaacgccgtctaccagcggaacgaatcgacgaaaggaaactcgattgtgtcctcaacgaacctgaacgctaactcgaacaacaattctcagcgattctcgaagaatttgaagtccaaagcagcgataatcggcttgccgaagccgcagaaggcatccttcgctgacgccagcagccgccgaaaccaccggcctccgggaaacgccaggctgttcccgaagcggagcgcgtcagtcggcggaaaatt

SEQ ID NO: 13433 - DNA, 453 bp, Glycine max
cccacgcgtccgctcaaccctttcttcatccttttatctcgtctctgccaaaacgatgccgtttgctctggagaataacggaggagttacgatcggacggtcctccttcgcttactgcgtcgcgatctgcgatcgtgattttccggaggatgattccgactccagctacgactcctccatcggaaggaacagcatctcgtcggaagattcctccgaccgggaagacgccgtcgaagttgaagttcagagttccttcaaaggccctttggataccatcaatgatctagaggaagatttacccgtcaagaaaggcatatctaagttctatagcggcaaatccaagtccttcacaagcttagcagatgctgcagctgcaagttctatggaagagatagtgaagccagaggatccttatgctaagaaacgcatgaacttaatagctcgtaactcctc

SEQ ID NO: 13434 - DNA, 458 bp, Glycine max
  modified_base (418)..(418): a, c, g, t, unknown, or other
gttaaaaatttagtcttgaagacagaggtaatgccagattgaaatttgaaacaggagacactggtttgtgtcatatacttagattagattagatatctttggattaaatggaagatgatacaacaatgcctcaagatgatcaaagaaattctgatggtactagaggcattgggggtcttaatagatcttctaagaagtcaaagcagacaaaagtgccacaaaggggacttggtgtggcacagcttgaaaagataagactagaagaacaacaaaagagagatgtaggtgcaattttaccatctcctagtactttatcatcaaccaaaccaccctatctgcctctcccagttaagaattttcatgactccaacctatccccttccacaccacttttaccttgtgagccatcatctgaatntaggtcccctttgtcactgcaacagcaacaacaacaacaa

SEQ ID NO: 13435 - DNA, 437 bp, Glycine max
gtcgactgcatcacggttgagtctcttctcactcaccttgtttgttttcaattttcttacatgtatcattcttggagatgttcatacacttaccttaatattttacaaaaatttttttttcctttctcttttccgaaccatcatccatgtcacaaattcttcacaagaatcatcaatgtttaaaggaataatatgcacgattgtttataagattccaaatctgtttcaatactcttataatcatgctcttttaatatcagacacatttaaagatgcttcactatcattataacaatttaaacattatttttaaaattttacatataatcacaaagtttatgcctaacaatgaacatcatatgtcatcaacaaactttttttgctatagaacatatcttctatccccaatatatatttaaaagattcattaacttttc

SEQ ID NO: 13436 - DNA, 131 bp, Glycine max
cgccgatcttcaatctctgagccaatcgctttccgatccatcttaccatgatttgctccgggggattcaatctgcgtgtgggagggaccttgccgaaaccttggaaaaggctgcactctgttcgtgcgctc

SEQ ID NO: 13437 - DNA, 443 bp, Glycine max
cccacgcgtccggtgacattggtgtcaatcttccaacattattgaatgccttagtagcagaactaccagctgatgcaagcacaatgttgcgtattggaatgactaatccaccatatatacttgaacacttgaaggagattgctgagattttgcgccatccatgtgtttactcttttctgcatgtaccggttcaatctggaagtgataccattttgagtgcaatgaatcgagaatatactgtgagcgagttcaggactgttgtagatactctaactgagcttgtgccagagatgcagattgccactgatataatatgtggatttcctggtgaaactgatgaagattttttgcaaactatcaaccttattaaagagtacaagttacctcaagttcatatttcacaattttatcctcgaccagggacacctgctgcaaggatgaaa

SEQ ID NO: 13438 - DNA, 465 bp, Glycine max
  modified_base (11)..(11): a, c, g, t, unknown, or other
  modified_base (24)..(24): a, c, g, t, unknown, or other
  modified_base (37)..(38): a, c, g, t, unknown, or other
  modified_base (113)..(114): a, c, g, t, unknown, or other
  modified_base (127)..(127): a, c, g, t, unknown, or other
  modified_base (162)..(162): a, c, g, t, unknown, or other
  modified_base (191)..(191): a, c, g, t, unknown, or other
  modified_base (234)..(234): a, c, g, t, unknown, or other
  modified_base (249)..(249): a, c, g, t, unknown, or other
cgtctcggcanagagatgatattnaccatagcccgtnntttcttcttggtgcccttcctctgggtgcatctgcttctcatcgtgctgtgtgtggcaacctgagcgcatgccannaagatgagacacnaagcagatagaaccataagacacatgccagatgtncctggggaagaggggtggaagtggggggncatgaatggaagctggggacactggtggagaactgggggcatnggcggaagaggacancggtggaggacattggcggaggaggacactggtggaggacatgtgcggaggatgcagatgctgcggtcgaaagggctgcaaatgttgctgaagtaaaaatcacaaatatatgaactgaacacactcatatacttgagtgtactccatgtaataactagtatatatgtaagaaataagaaataaaagcatggactctatccgtgcttgggctggcat

SEQ ID NO: 13439 - DNA, 341 bp, Glycine max
gtgaaagagaagaagaataaagaagacaaagacatgaaggagaagaagaaaaaagttactgggagggacaagaccaaggatcttagcactctgaagcagaagcttgaaaaaattaacggaaaaatacaaccactccttgaaaagaaggctgatatagaaaggcagattaaagaagttgaagctgaaggtcatgtggtcaatgaggagaacaagaatgaggtacagtagctgttcaagatgttcaggacacacttatactatattgcataatatacaaactatgtatgatctttttatgttgttttgacttttgtgtaataaagatgtctttctatttgagt

SEQ ID NO: 13440 - DNA, 436 bp, Glycine max
tcgagcataccgtgtttcattttctctcacacacaaacctccttcgttttcatttacttctcaggaggtataactactatttttcgctttttttttaaaaaaaaaattgattaaatcttttgccatgggaacccagattttgcgacctcaggactgcttggtagaacgaatcagggctcctccggctgacttttcccggcggaggagttccggtaattactgtaattattattactacaacaacaacaacaaccatgtcgccacttccaggtcgtgccggaagcctgttagccgacccgaccaaaggaaacgggctgctcccggttctgcccagccggtggtggcggaagccgcggcggcggtgttgaagagaccgagccgtgatgattcaagggtggccaagagccaaaagtttgagatgactacgattctacgt

SEQ ID NO: 13441 - DNA, 424 bp, Glycine max
ataaaagatagtcttcccatacttccgctaattctcctctgacaccgcctccttccgtcgtcgtgttttgtcgcaccatgggcggaggcctcagccgcgaagtctgccagtggtgtcacaccatggaggcgcggagtgcgcgatatgtccagaggaattgcaagatggcgaaagatgaagatgattccatactgcaagcacgtgttccacccgcttctcttacccaaaccaaactttcaaccttgtggttcgaatcgcgatttgtgctatcgtggagttattcactgaaggaacaaatttgtgttgttcttctttgactcaattcgattgcgctattttgctctaattgttgctatggcttttctttggattttttatttgagagggctttgcttcgcctgattcggatttatttgatttgcat

SEQ ID NO: 13442 - DNA, 348 bp, Glycine max
gacagtcattatctggatcgcaactagctctttactgcaggtggtgctcatcccacattggtcaacacctttggcttcatgctgaaacattcattcttctctgatctgatcatcatttgtttgctcgacatatcacttgtcagttaacaactaactccgatcactatcacattttctatctggtatgctacacaatttaccttcttaggtctagttatactctacaaaactgatagtggcttgtctacgtgtaaatgtttcaatacagtgatcagtgaatcatgaatcgtacttaatgattagtatatataagcatacgatctttggataaattggtaaactcgtgtt

SEQ ID NO: 13443 - DNA, 339 bp, Glycine max
ggttttcggttatttcattcacaacttcaacccttcctttcaatttttttcctacctgacggaccaatcaacacctcggtggttcttgcagtggcgttacacatggatcggattccgatctacacgccgatggtgctaatcggaggattcgaagcctggtgccacggatctacctactgtacagaggtgtggcgatcgtgttcgtgttgctcttaaggtcgctttcggaagatcgtttgctcaacgatcggagattgcagcacagatcgagtgaagaaagcgtggctgtgttcttcgcattccgatgtcggttcatgttgtggtattgaaattatgatg

SEQ ID NO: 13444 - DNA, 386 bp, Glycine max
tctctgtcctcctcgatcccaattccactagggattcaattccgatgcgattccgagcttggtagatccacgacaacgtttcgtttcccagattcttttgtaaaaaaaataatcttcctttgcccaacaggtaagttggaaaaaaatggaccatgacaagactgggtgccaagctcctcctgaaggtcctatattgtgcatcaacaactgtggattttttggaagtgcatctaccatgaatatgtgttctaaatgccacaaagacatgttgctgaaacaggagcatgccaagcttgcagcatcatccattgtgaatattatgaatgggtcttcaagcagcactgaaaaggaacctgttgttgccgctgctgctgctaatgttgata

SEQ ID NO: 13445 - DNA, 416 bp, Glycine max
cccacgcgtccgcccacgcgtccggtatgctgcttatgtacagtggccaagtgctggaggagtgtatgcacattcatatgaccaatttagacatgctgatttccaggctccatttggtcaacgcccattgagtttcgattattcgcagaattactagatgacgtttgggaagcagatatacatttggctgcataagttattttagctattaaggatttcacagttagatataattttactgtactgttatagatccttgcttgctattctgggattgaaggcctgatggtgagagcaagtattatgcgcttatggtatatcctggcgacatttttatacaggactgtactgaaagtacttggatttcaactatatgaagagttatatgtgattaccttgtctaatgtctaataaaa

SEQ ID NO: 13446 - DNA, 314 bp, Glycine max
ttcatatgcatcgtatatattccacaagggtttattccattataagagatacatcaaaattggaagatcaatctttaaaatctgagagacaaatatatgacggaacttctattaaaccagaagcaaagtctgaatatgcctctcctgtaaaaaaggcttaatcataaacattaatttcaatgggaaagacaaattgtgaaaaatcatttactgcacccaaaacccttgaagtttctcctgataatgaatttgagaagcgaataatgcccgaagtaatactatcaaatgatattgatgtcacattctctgatatt

SEQ ID NO: 13447 - DNA, 426 bp, Glycine max
  modified_base (413)..(413): a, c, g, t, unknown, or other
cccacgcgtccgccctaatttaaccctgctggatttatcgtacacttttttggtcaattggcggcctatttttgagtcttgttcacagctaaaggtattaaagttacaggcatgcaaatatctcactgactcatcacttgagcctctttacaaaggtgctttaccagtacttcaggagttggacttgtcttatggaacactgtgtcagtcggccatagaggagcttctttcttgctgcacacaccttacacgtgtgagcttgaatggctgtgccaatatgcatgatttaaactgcggatgcagtcgtgcgcatactgctgaattgcctggtgtaaatgtcctacccattgcaagttcccctgaaaatgtcctcgagttaagtgagcaacccatccggttactgcagaacctanactgtgtgggatg

SEQ ID NO: 13448 - DNA, 407 bp, Glycine max
cgacggcgaaacttgttttccttgcgcgaagctttggcattcccccaatcgcttcatccgggtctacttaaccctaaccccacactctcacatactacatatataaaaccgccgtcacgatgatgctcagaattcgtagccgcgatggcctggagcgagtgagcgtcgaaaaccccctcgccacaacagtctcggacctaaaacggattatccaaacccaattgggaatcccggttcacaaccaaaccctctccaccaaccagaacctcctcttggccaaatccctcgaagatctcctccgattcaccgacatgtccaacctcgatgcgtctctctcgtctcttaacctcggccacggctccatcgtcttcttggcctacgagggcgagcggcgcgtggcgggcccc

SEQ ID NO: 13449 - DNA, 420 bp, Glycine max
ataagttccaaatcacgaattcgaagttgcagagttgtcctgaaattgatcagtggatggtgtttcctttcgaggaatgatatcaaggagttggttatggaattgggagaaggggagttttttagaataccttcaagccttttcaattgtgggaagttgacccggttggacctatcgcggtgcgagttcgatccgccacatagttttaaggggtttgtgtgcttaaggagcctcaacctccatcaagttttgatatcccctgatgcaattgagagcctcatttctagatgtcctctcttggagagtttgtcactttcttactttgataatttggctcttactatctgtgccccgaatcttaagtacttgtatcttgaaggtgaattcaaggatatatgtcttgaagataccccacttttg

SEQ ID NO: 13450 - DNA, 422 bp, Glycine max
atatcttctcatcctaaaccttattcagtcacaactggtggaaatctctggcggagtgaagacaccaccaagaatatttactttgcaagttcttggatatcaaaagcttcacgacacaaaagggaaactcaaatagaacataatgttttgaggttccaacaaccaagtttggatcatcattacaaatgcatcagaggagggtctacatatcaagaatgcaatagaaaatttgctgtgaaggcaatctctaaacaacctcttggttttgaagctcatgcttccaatcctaagaacattttggactctgtcaaaaatgtattgtctgctttctactggttttcctatccatacacaatgattggcataacattatgcgcattatcttcatctcttctcgccgtggtaaaaattatcagatatat

SEQ ID NO: 13451 - DNA, 424 bp, Glycine max
  modified_base (413)..(413): a, c, g, t, unknown, or other
gtagtattgcagtttattctatcatatccttgttcaaataattttcttttcaattacaatgccgcaatcccagaaacttatgttcatgaccatcctcaaggtcccaataacatttacttgaagacaattttgagttgaccttacagcctagttccacctatacaaacacccttgatccttcattcttttttgagttgaccttacctagctccaatactggcaacaataatactcttgggcatctgaactatctccattctttttttcctcctttctttgcagtggatttgcgaggttttaaagaaattaaatgcgtttttatgtgctaaagagctaggtaattatagaattcatctcacacatacttctttttactaccttttatcttttagattttattcttgaattatcgntgtttaacgga

SEQ ID NO: 13452 - DNA, 412 bp, Glycine max
cccacgcgtccgtgcagctcgagacatcagagagtcagataagggaagcagagttgaagggagcagagtttcaaactcagttagctcttgcaaaaaaatcaaatcaagaagcatgtgaagaactgaaagcaacaaaagcaaagaaggagatagttgagtctacactcaaacatactgaaactgaggttgaagaactgatttcaaaaattcgttctttggaggaagagattcataaggagcgagctttgtccactgagaattcaatcaaatgcggaaatttggaggttgagctttcaaaaatgaagcacaaagttcaagttcagcaagacactgagataaaacatacggaaagtgttaatctcgatttgaagttaaaacaggatctagcactggctgctagtagaattgctga

SEQ ID NO: 13453 - DNA, 312 bp, Glycine max
gttgtaactaaggaacaagagattgcttcttcttcccttttgttttcaaatttcaattgggcatcgggttctctgaaatggagagagatttcatgggtctcaactcaaaagaacctcttgctgtggtgaaggaagagatgcacgtttatggcttcgaagactctggcttcacaaagggtcggattgcacagtggccattctcgaacaaagtatctgcccttccacatttgatgtctttcaaggcttctcaagatgattagacttagaagatagtgtctgatcccttaacatctgcagggtttatggctatct

SEQ ID NO: 13454 - DNA, 411 bp, Glycine max
aacaacttcactgaggctgttgctgatgctttcaaagcaattgaattgaattcttctgtagcaaaatcatatttgcggaaaggtactgcatgcatgaagcttgacgaatatgagactgctaaggctgctctagaggtgggtgcatcattgtctccagacaactcaaggtttgctactttgatcaaagaatgtgataagctcattgcagaacaatcttataccatacctattatagaggaaaagaccacaacacaagatgctactacaaaagatgtttactatcaaaatgatcttctataaaaaccaacagttgcaatgactaaacctaaatacaagcatgaattctaccataaaccttgatcaattggttgtgaccatatttgcaaagaaaatcccaaaggaaaacattac

SEQ ID NO: 13455 - DNA, 349 bp, Glycine max
tcttcctaaaaaaaaaaaaaaaaaaaaaaaaaaaaaattataaaaaaaaaaaaaaaaaaaaaaaaaaagaaaaaaaaaaaaaaaaaaaaaaaaaaaaaaaacaaacaaaaaaaaaaaaaaaaaaaacaccaccctaactaaaaaactcctacattacaaaccactccatccaatcttaaaaccctattatctttcccccaaaataaaatccactaatccccttttatacaaccctcaaaatcaaaaaaaccctgcctttccccaacttaaaccctttgaaacaactccccttttcccaactttttcatatcacaaaaaacccccttccaaacacccttcccaacatttt

SEQ ID NO: 13456 - DNA, 413 bp, Glycine max
tcgtcaccgtcgtatccaaggatatcatctgcatgatatgaccatgaacacgggagtatgaatgtggatccatctagtataaatgaagacctgattaaaatattgggggcttatggacaggtcaaagagatcaggcaaacttctgacaagatgcatcacatggctacagaattctatgatgttagagcggccgaagcagcacttatatcattatacaggagtgacatagatggcatacgcataaagcttgaaccatgtaagcctataggagctcgtagaaagttgatgctgcaattaaatcatgagcttgaccaacatgaatctcagagtttgcgataccaagtgggttctgctgtagctaactatgctgcaggtgactggttacagttgatcaggcctgttgagcataattc

SEQ ID NO: 13457 - DNA, 446 bp, Glycine max
  modified_base (398)..(398): a, c, g, t, unknown, or other
tcgtcaaattgaagacaccagtgaaagttggggaagtgcttaaggatcaccctggtcttgttgggcgagattctgaggcggttaaacactatggcgtgagagcaaagccattggaagcacacaaggatttgcagcctaagaggctgtattttcttgtggagcttccgaaggagacgacgccgcgaagggttcgttccggcatcaacatgagtgccaaggatcgcctagagagccttgtgctcactagaaggtctgcctctgatctttcaatcatgaaacaaagcagcaacaccgataataaggagaatagtaataatggtggtggtgtgaggttgaaaatgaggcttccaaaagcagaagtggagaaattgattcaaggttgcaaggatgaggctgangctgctgagaggatcatgaacctttataaggccaatggaagcagagaa

SEQ ID NO: 13458 - DNA, 114 bp, Glycine max
ctttaagaaaatagctgttaaatcaaatgtatactgttttaaagaaaattagccaaagggtctaagttgtgatgctgaaaggttaaaagggcacatttattgtgtcttcttacc

SEQ ID NO: 13459 - DNA, 426 bp, Glycine max
gtggagggaatgcaccttcagttgctaatcgaacatcttactcacagaagaacgtgcatgggcaaaactttacaattccagtgcaaccagtgaacttttcttttaagccatctgcaacatcggatattgttggcaatggtggatgttttggtgacaaacaacagcagcaacaggctttaaagggaggagtagagaatataccatctcaagcatttgcaatatcatttgctgcatttaatgggaccagtgttccttcaaaccttaacttctcatccatggcacagaatcctgtgatacttcaaagcctgcctgatatggcatggcaaggatatcaagctgcaagcattcctcagactactcagcaaaagacttgttcaataactgaagcaaagagtggaagaaattcttcacaccaagatgatgaaa

SEQ ID NO: 13460 - DNA, 420 bp, Glycine max
cccacgcgtccgctcttcattctctctctctctctctctctaacactttccaccgcctgcgggactaaattagcttcttcttaagcttattattaaaataacacttccacaaactcacgctgcctccacggtccctccaggggtcaaaatcgatcgtcatcgagtttggaccaacgttcattcaatctgcaactctcggtagtactacagtgctatatagaagaaacgaaacgaaactctatggtgcttaatagtgttgtttgagtttttaggttgagaaagaaagaaagacacggcgacaaagacacggccagatgcctggagaagtggtggaagtggaggacatggtggaagtgggggacatggtggaagcggtggacacggtggaggctggggacatggtggaggctggggacatgg

SEQ ID NO: 13461 - DNA, 419 bp, Glycine max
gcttcgcctcaatgttatgggggaaaaagtgattaaaggaaggttctgttttctttgggtaaagggtagttgcggaatcgaaatgacggcggcggaggcagcgatgttaaagaggaagggggtttaactttttctagagaagtcagctacagcaatggaaaatttgattgcttaaagaacatttttttcctgttgagatggtttttggcacaaaagataatactgaaatagaaacgtttgtgtggatcgatgcttacctgttatctatctgcacgttgttgaaactttaaagttctgtttgtctcttcttagtattgctattctgaagagctgaacttgccttgttgtcttggtttagttattagtaactaggaaattggaacttactatctcagtagctcgtgatgctgacatgtttt

SEQ ID NO: 13462 - DNA, 283 bp, Glycine max
  modified_base (272)..(272): a, c, g, t, unknown, or other
acccgtccgcccacgcgtccgctcactgaaacttcctcaaccgaaccccacgccacgctacgattcgtcgttgcgctttcttcctttatattttatttaatttcgtagtcttcttttgcatgcgccaccaacaccatcatcaattgattcaattcaattacgataagaatgggtaatatctgcgctcgtttgaagttgaagccggcgccgcaaccctctacgaagaagcgttcctcttcccgccgagagaggaggctcgacgacgacgccgncattcgtgagc

SEQ ID NO: 13463 - DNA, 393 bp, Glycine max
gacgacgcgtccgcttcttctaactttctgcataacacaccatcaacaccccttaagccggctagcgccattacccaaaacttttctttttctttcttcaacactcttattggatcatacattcaatttattctcttcaaaaattccccttaaaaaaatttaaaattaaaaaaaagtgctcttttttgaattttgagccttttcaccgacagatttgatctttccgtgccaagttgtatcttttcgattttgggacgtgggtcgatctgatttgctcgaataattgcgggttcgattttgatctgaaaaaggaaaagagaaaaaaagattgggttatttctgattcaagattttgtccttttttgaaatggtctatttccatagctcaatctc

SEQ ID NO: 13464 - DNA, 445 bp, Glycine max
acgcgttcgcgattctgccgaggatgctgcacgtgcctacgacaccgccgctcggaatctccgaggttcgaaggccaaaaccaatttccctctctcacctttttgctatcaacaccccaccacggatcctttcttctacgctggtttccacgaccaccaaaacaacagcaacaacaacaacgacaaccttaacaaccctcaaagaccaacttcaagtggcatgaatagcaccggtgaatccttcagtgggccccggccttccaccacaaccaccaccaccacgacgccgtttttgaccactacgcggagatacccgcgcacttcccctcttgtccccgaagactgccacagtgactgcgactcttccttctccgtcgttgacgacagcgacgacaacatcgtttcctcgtcgtttcgacctcccttgccgttcgatctcaacgcg

SEQ ID NO: 13465 - DNA, 433 bp, Glycine max
agtgaatgtgcttatctggaataacatcaccatcaacaaccccttcaagccggcctagaggccattacccaaaactgtgtcttttttctttccttcaacactctctattggatcatcacatattcaatttcattctcttcaaaaattccccttcaaaaaaatttaaaattaaaaaaaagtgctctttttgtgaattttgagccatttgccaccgacagatttcgatcttctccgtgccaaagttgtaatcttttcgaattttggcgacgtgggtcgaactgattttgctcgaataattgccggttcgattttgatctgaaaaaggaaaagagaaaaaaagattgggttatttctgattcaagattttgtccttttttgaaatggtctatttccatagctcaatctctctctgcaagttcgttgatcaatcatc

SEQ ID NO: 13466 - DNA, 313 bp, Glycine max
  modified_base (251)..(251): a, c, g, t, unknown, or other
gagattgttgatgatttggcggcggacgaagtggctatggtggcggcggtgtggctatggcggcgtcgtggtggcggcggtgtggctatggcctaatgaacataacgaggctggggttgatgctaaccctcacaactaagaaggcaactttctaaagcttatatatgggtttaagttatcgcaatacataaaacttcatgagaaggttagttgtaatagaagtggaaaactttgtaaaggaataatacctntcatgaatttccttaaaaaaaaacaagtggtgtcatccaagatcgtggcagtggacttgggc

SEQ ID NO: 13467 - DNA, 457 bp, Glycine max
  modified_base (435)..(435): a, c, g, t, unknown, or other
gctacacaaacccgccatcaatcctaaattcctctagtgcggttggccatgttatcaatgtcggtggtgttaattcttacgtcactggttcccctctctccatcctcgccataattctagtctctgatatttttggatttaaaccaccacttttaaggaacattgcagacaaggttgcagctactgggtattatgtcgtggttcctgacttcttcaatggggaaccctatgatcctgagaatgtgaaaaggccgaaagatgtttggttaaaagatcataatccggaaaaaggtattgaagttgcaaaacctgttattgaagccttaaaaagtaaaggtgtctctgctattggagctgctggtttttggtggggtgctaagaccgttaccaacctcgggaaatccaaacatatccaagtttctgtgctattacatncatcatatatcatagtggatga

SEQ ID NO: 13468 - DNA, 91 bp, Glycine max
aaagaaaaaaaaaaaaaaaaaaaaaaaaaataaaaaaaaaaaaaaaaaaaaaaaaaaggaagaaaaaaaaaaaaaaaaaaaaaaaaaaaaa

SEQ ID NO: 13469 - DNA, 437 bp, Glycine max
agattaactacttcacaaaattccacaactcctcaacaaattaaagtactttgttggacagagtttatttaagagtaaaatctagaagatagaggttgtaaagagaagtggtgtgagatgatatccataattagctagttgtttagcgcatgaaaaaagtgtctaatttttttaaaatctcacaaaccctgcaaggaataaaatagaagagaaagatcggagatagatcatatgccctaatagtatatgaagaaatctttcccgtagaacaaatataaattatatacatgtatacatacaacattgtcaaaactcctgatgtgtgatattcttttcttgtgaaaaagttcacttcatagagattgttcaaagttgaaacgtgtacgagtggaagaatgacttccaaaacaccatggtcgaactactctttataaaag

SEQ ID NO: 13470 - DNA, 379 bp, Glycine max
aatttctcttcttatcttatcaataacgacaatactctttcgttttttcttctccgtgggctactgttaccactcaagtttctgctttatgatttttcttcttctttaacgatagcgctgttgcgttgtgaatttgtcatatcctgattccatcttaggccactaaactatccaataattttgttgctcctttcactttagtttggtttcttaaccaagttattgattaaggactcgactataatgcagaccctcgtgcgtaattggccggtggatattaataatatcatgttgttgttgcgataaaagatattcctcactctcagcgaaacccttgaagcgtgttgcaaatatttcaattaaattatcttctcaaaga

SEQ ID NO: 13471 - DNA, 325 bp, Glycine max
ggcggcgctacttcccacattgctcggaagtgctggacaagttcatggaggatgacctgcctgacttgttttaccttgaaaagggtactcatgaagagcagagaatcaaaaggacgcgtttcatggagcttaaagatgacgtccacaaggctttcaacaaggacaaggccgagtttagccgctctgggatttcatcttcatcatcctcatcatccctcagagattctgttgtacattacaaggctaggaaagtgtaattttaaaaccatacatagtgtttttgattttgacatacatattatatatagtgcaaattttaaaggtg

SEQ ID NO: 13472 - DNA, 257 bp, Glycine max
cggactcgcgacgcagcacatgacgtgagcgaaagactggcacgaccatgaacatgcggattcggacccgataacacgtctgtagggctcggcgtgtgacagctacaccctctcttaattacttacaccggatctactaactatgaattggctaaaaaaggaattgatgctccaactgtaacaggcgcgtctgaatacatgaactcttagacgcttgtaatctggcagctgaactactatatcgcacagagaagcac

SEQ ID NO: 13473 - DNA, 453 bp, Glycine max
tgagaatttgccaaagaagaagaagaagatacatggtggaaggttagagagtgagagagggtgaagcatggaagtgggtatgcttccaatctcagcttcaaagagaggaaaactcttggctgctggttacaccactctcgatgccattgctcgtgcctcccccacccaccttgttcgaggttttcctttccagtttcaattctcaacccttctttcattttccaattgggtatgcatatatgttaaaaagttcctctttttttcacctacccattatctcactttgacagatattgatgtttctgagagtgaagccacggaaattctgaatcttgcaagcaaacctagtgctttggagagaccgaatgggtctcacactgctgttgttggtggtggtcagactgcctgggatatgctcaatgatgaaaagttttcttcttacattaccacatc

SEQ ID NO: 13474 - DNA, 450 bp, Glycine max
caaacatccatcatcattattattttactccgaacgagttgacaccgattccactcactgaaccatgagccgattcaggcgttttgagctcatagaacaaccacctttcttccactcctgctactctttcccttccttcgtcctccaagactcactctctctcgacctcgacctcttgccacttcccagccacttcgacgctttcgcagatctggtgcacgcgccgtcgttcgcttaccggcgcgtggagaggcatctcgagaatgagttgcgtttgcagagcctctctgaccgtgtggcggagctggagtcgcggttcgaccgtgtgctcggcggagatcggaagtacacgtggacagcggagatcaagggagcggagaagaacgggttcgataggaagtacaagtgggttgcggaggtcgctgaggaggaaggatagaagaagaagaa

SEQ ID NO: 13475 - DNA, 455 bp, Glycine max
gctcgacatcctcgaagacctcgcccctgtctctgacgcgcaacgccgcgcgtactgcgcgggcgccgtggagtgcaccgtcaagtacctcgctgcgtgccccgacgttatcgatggtgagtacgccggcgctgtacggcggatctggcgcggacgcgtggcggcgctgcaggcgcgccggagcgggctggtctctggggagttggtgcggtggcgcgatgagatagagaacgcgcttggggaggattccagggcggctcgcgagaggctggcggggttgaatagtcggagggacgcgatgaatgaggtgagggtgtatttgaaggaagcgtgggaaatgatggggccttcgtttttggaaacggttgcggcaacggagaagaagaacgatgaaggtgcctgtgataatggtagtggtaatggtaatgatgatgatcatgatgatggtgcatgca

SEQ ID NO: 13476 - DNA, 455 bp, Glycine max
  modified_base (362)..(362): a, c, g, t, unknown, or other
gtgttactccaaacaagcctgctgcggcggcgtctcaggatgatccgtttttgatattggaaactgcttcaagctcggcatcttcagaatcattcctgaacgcgctggagcagattagtaggtcgaataattctaaggggacaaaaggagggtccccatcattgaagtctccacccaagccaatgagtaaagttaataggccgagtgtatcaacaatagatgagcttgaggactttgccatgggtggggcacagactaatgctagtagtagaaaggccaatgttaacgccgctgagactaaacaaaacttggcggctaggatgaacaatggtaaaagagttccagctgcgagagtgaatcangcaaatggcgtggatgatcttgaatcctttttcagcatgggctctcgatcaagcagcgtgccaaagtcaaggactccaactatggatcatatg

SEQ ID NO: 13477 - DNA, 345 bp, Glycine max
tatgttattaatggtctggagtgtcagatagctggcagttcatctaaggtctcatatgtgctggataccgaagactttctgattccgataagaaggagaagaagatccttgcgtgtgaagagttcaagtgctcacgaacaggcacagtcttgaaacatttgttcaagcagagtacaacgattccgcagtttgttctccattacatgaaagtgtccattttgagctgggcatgtaacatgagtcaaatgtggacattggtagatgcgcctgacgaagacaccatcctatacagtaagatgaggatcaatgcatggcgatctgagatcattcatgcacattttcttt

SEQ ID NO: 13478 - DNA, 342 bp, Glycine max
gagctctgacaaggttttgggttaaatatgctgatgatgacatgttttctgcacttattgcattctttcttaccactgatgacgaatactcgacataatacatagataagaactgcaccatctcatgctagtcaagaatcatatccttgatgatccaaagactttccctgatacaaaccttactcacatcaaagacattatgcttcaattgccctattctacattctactcattcccctatatctctctgacacaaagactcaccaagattacctatacattcgaatgcattcttagaaacttgaaatgctggctattgcatttactaaagataacctccca

SEQ ID NO: 13479 - DNA, 404 bp, Glycine max
accgctcgtacgctcaaccacacagtttgcgcatcagtgggtacggctatcaatctgtggggatggctctgaatccaattatccgctcacgatcttattcaccatcctagtaaccgacctgacatagtctatcctcaacagttgcttgagacattgcgtgcatattgtagcaataagtgtgttaaatgctatggatcgcctacactgagtagctactgcagatgcactcatctaagtgcgtagaccgcactatggaacccactgacgtaaccagcatcatgatatgaagttcacaccgctatcgcccatgatatggacatcagcgctggctaatcactgggaatcctaatttatagccatctaacattccgtgctgtggctcttcatgctggctcattcaatat

SEQ ID NO: 13480 - DNA, 454 bp, Glycine max
acttattccagcatggagaactatatagaagctacagtcaaggttcagatattgctgctgtagaggtagcaacacctattctaattcctagaagtgacggtcataggcatcggaagggaagccatggtgatgttatcttcttgacaaatcgtggagagattacatcatactcccctggcttgcatggtcatgatgctatttggcagtggcaacaatcaactggtgttacatggtcaaatctaccttccccatcaggagtgatggaaggtggtggtctggtgattcccacactaaagcctctttccttgcggttgcatgataatcaggaaatgatccttgcagccggggaacaagaagcggtgataatatcacctggaggtagtttattggccacaattgaactacctggtccaccaacacacgtcttaattgctgaggacttttcaaatgatgg

SEQ ID NO: 13481 - DNA, 463 bp, Glycine max
  modified_base (392)..(392): a, c, g, t, unknown, or other
ggagatccaccagctgtcacagaaaaagggctggtcgcaatatcaatgggctgccctaagcttcactcgttgctgtacttctgccaccagatgacaaatgctgcactcataacagtggctaacaactgcccaaattctattcgattcacgttgtgtatccttgatgcaacaaaacctgaccctgatacaatgcagccactggacgaaggatttggctcaattgtgcagtcttgcaagcgactcatgcgcctatctctctcggggaaattgactgaccaagttttcctttacataggaatgtatgctgagaaacttgaaatgctgtctattgcatttgctggggatggtgacaagggaatgctgtatgtgttgaatggatgcaacaagcttangaagcttgagataatagactgcccttttggcgacatggcacttctgacggacgtaaggaagtatgaaacaa

SEQ ID NO: 13482 - DNA, 391 bp, Glycine max
ctaggatcatggatcgtgagtactgcttttttttctctgtttcagatcatgcctactaaggcaaattgtacatagcggtctggaaactactccaaaaaagacaggcatacactggacatactcattagttatgattctcccaaatcctagactcctgaacgctaaaagcttatcaatgagatactcgagtacattcttttctcagcactaactgttactcaaactagtgccacagacgcttctgatcagaaccccataaatgaataagcccagacacatgtcaattcaccaaatcccgagtccttacctgcattacagagtattacaaatcaagaaattaatggaattataaaaaaacaccaaatcatccttgaaaaccatgcttgaattg

SEQ ID NO: 13483 - DNA, 440 bp, Glycine max
cccacgcgtccggtggtcgaagaagcgaatgaggttcaagacgccgtttccgctcacatgtctaaggcttccagcgacgaggaacctctccggcaacgtgtccgtcgcgtcgattcccgaatccattcgctccgttcctctctcgattctcttgtctccaccaaacaaatccctccctccttagccgataagttggatgaagatttgcagagagcgagatgcatcatcgttgacggtgactcctcttcgcttctccctggccatgcacaaggaagctttctgaggatgtttctgggtcctatcaatgttcgtgcctccaggaaggacgttcagctcaaggtcaaagaggaatacaacagttacagggatagaactgccctgctattcctgctttttccggcaacactgcttattctaagatcttgggtttggtctggatg

SEQ ID NO: 13484 - DNA, 337 bp, Glycine max
cacagtataaaaataatgtggaagcactgctgccagagattggggatatgtgttatgtcgagcaaaagtctgctgaaaagctgatggcatataggtatagctctgaggcaagaatggatagctaatcatgttagcaaaatgccccagaggaagagtacgttgcgagtagggatgcacagcaaggtgctgacgaagtgcaggtccactggcaacacctctgacacggttatggtggaactaccaatgctactatattttgtacgcatcgattgttttccccggaatggtaagtatacaatatctcgtctagctgttataactgacaataacaacctat

SEQ ID NO: 13485 - DNA, 452 bp, Glycine max
ggatcctaacatagttgacactgcaatgacttcaagaaaacgtaaaagagaagagtgtaggaagataatcttattagctgctgcttgtgttgttcatatgatcattggtgtagtgacatgatatcataataattattttgttaaggaaccaacccgtaattgggaactagaacgtcacaacttccttaatcgtctttatagaggaacaaataaagattgcattgaacaattgaggcttagtaaaaatgcattttttaacctttgtagaattttacaagaaaagggtggattagtaagaacaagaaatgttccaacaactgaagcagtagcaatgtttttacatatccttgctcacaacctaaagtatagggtagtgcaatttagttattgtagatctaaagaaaccataagtaggaaattcaatgatgtcttgagagcggtaatgaaagtga

SEQ ID NO: 13486 - DNA, 456 bp, Glycine max
aacaacttcactgaggctgttgctgatgctaacaaagcaattgaattgaattcttgtcgaccaaaagcatatttgcggaaaggtactgcgtgcatgaagcttgaggaatatgagactgctaaggctgctctagaggtgggtgcatcattgtctccagacaactcaaggtttgctactttgatcaaagaatgtgataagctcattgcagaagaatcttataccatacctattatagaggaaaagaccacaacacaggatgctactccaaaagatgttcagcaacaagatgatcttctagagaagccaacagttgcagtgactaaacctaaatacaggcatgaattctaccagaaacctgatcagttggttgtgaccatatttgcaaagaaaatcccaaaggaaagcattactgttgacttcggtgaacaaatactaagtgttagtattaatgtccct

SEQ ID NO: 13487 - DNA, 196 bp, Glycine max
ggacagttgtagaactttaatttggagaattctatgcagaacctggggaacatgtccctgtgtgtctgcaccatgggaaaacagtgttgtacattattatgtatggctgaactagatgctgatccatattttgggtaactgtatcactttctgtacaatagtgtggatggttgcctaatagattatttacatagct

SEQ ID NO: 13488 - DNA, 431 bp, Glycine max
ttcttttgtccccgaagagaaagagagatcttatctcctcttcctacaatgcccattccggtaactctctctttcaatctcacccctgccccttttcatcgattcctattcttattatttattattcttgcttaggtaccccaaaaagtttttattcgctcgattggaattagggttttctttctctctctggctattcccgtttcccgctatctactcagcttctttcttttacttgattttctagggtttccttggatcgtaccctctcgggggattgcatgaaatgagcatgagctctgatctcttcataccttccaattttgtgcttcagcatttctacttggagatttctcattcttaagtttcacatgagcatggaagaggattgtctatattaattcattctttactcagtcgcaggctggctc

SEQ ID NO: 13489 - DNA, 71 bp, Glycine max
cccacgcgtccgaaaaaaaaaaaaaaaaaaaataaaaaaaaaaaaaaaaaaaaaaaaaaagaagagaaaaa

SEQ ID NO: 13490 - DNA, 432 bp, Glycine max
acgaaatcgaagccaaaaaagaacaatcataatgagcatcggaacaacactttcaacggcaccaaaccactctttccactccaacacccgaaccagtttactcaacaccgtttccccaatccaattcctctccttccgcaatcacactcacaatctcagagtcctctgtttctcttcgaatccgtcgcatcagctgccgccggttgtggtggttggctccgcgaacgccgacatctacgtggagatcgaccgtctcccacgcgaaggcgagactctcgcggcgaagtccggccagaccctcgccggcggcaagggcgccaaccaagccacgtgctccgtcatgctctcctacccgacctacttcgtcgggcaggtcggcgacgacgcctacggcacccttctctccgacgcgctccgtggcgggggtgttcg

SEQ ID NO: 13491 - DNA, 457 bp, Glycine max
gaaaccagcaattgcaggattgataaacttgcatgatctcaatacgagctctctacatgcttactatgatcctatgaagttatgattttaggtgcaatccagattgggacaatgtagcaagattgaaagtttggcaaaagcttgaagaagaaaatgaagaattcttcaaggcttattatgcaaggttggttttgaagcagcaaataatgcaattcaacaaattgctggatcagcaagtgcaattaatgcagttacactcaagtgctgttgcatcactacctatgtctaacgggtcacatatccctgcagtgacatcactacctaactctaatgggtcacatatccctgcaagattaatggccctgctagcgtgctttctgctcaaagcgcaaacatgggtctgatacatggaatgaatggtggcggaatgatcaaatctgagcctggatattctggt

SEQ ID NO: 13492 - DNA, 445 bp, Glycine max
aacattctcatcttctccgtgggcgctctctgtatcacctccgtcggcactgttcttcgagctaaagttgttcaaccacagtggcagattgacagtgcaaccctcctattgtttcttcttttgagtaagttaagttcactggttcaagtattttggcacccccaaggtgggacctaaaggattaggatttccatggagactgacagacctgacggccggactcctaatcaactgagacccctggcctactcgtgttccatcctgcatcgcgcccatggttcggccagttgggctcaaggagaaaccaaagtgcttgctgctgtttatggacccaaagccggaaccaagaagaatgaaaaccccgaaaaagcatccattgaagttatttggaaaccgaagactggacaaattggttggagcaatactatactgtactcaactcaac

SEQ ID NO: 13493 - DNA, 438 bp, Glycine max
gctacactacttacattccccagcacagttgtatttatcaatcaaacaatagcgctcacggagaaatgaacaagataaaaagagaaggcactattgtaaaataaaatacattgagatgggaaaaaaattactgatcatgaatatcacacaaccttgacagtaaaatttctgtaaacatacatctaatagtgcaagttatgaataaaatttataaactaaactcaatttcagaaactaatgtgagaaaaataagcagattgccatctgagtcaacaagtctgtaagtactttcttcaagcgtcacctttaaatttggtttcatacatctgaggtagcatatagatagcagatatcattctgcctgcaaaccaccttgtgtgcattgcacgttgagcagcacttgctgcttccactgtttcaaactgcaaatacacaaaa

SEQ ID NO: 13494 - DNA, 149 bp, Glycine max
cacacactgaataaaagatgttattcacttttttcccagttgaaagcaatcaccatccaagaataatttctatgactgcggatatttctcatatcaccttgcatacccatgcatccgacgcaacatctaatccatatactcatctaaat

SEQ ID NO: 13495 - DNA, 446 bp, Glycine max
ctcggtctgttttttttctcttctttttctctctctctctcacaaatttctttcccttgggttcactcaaaagagcagaaagggacaagatcccggaaaggcgtgccagcgtcagagagactcatcagttctcactcgtacggcgcttttgctttgctttgcttcatttctttcatcgtcatcataaagttcgttcctttctcagttttcacccatacccagatgagtaacagcaccatctcggatctgtgtccctcctttgagtgaaaaaggttcaatctttggtctctggggctgttggggttccgtcattgaagaagaagaagaagaagggtattattgttattataatcatgtacccgaggctcatacacccccacgatgggattgtgacgcatgatgagttgcatggtggtgctgcttccaacctctctcacgctcacaag

SEQ ID NO: 13496 - DNA, 300 bp, Glycine max
ggatgatagacatattccaatcacaaaggacatatacatggcattgctccgttctttttgtcaacttggtgatgctgtaggagctgaacgaatttcaaacactatgcaatttgcaggaatccagcaaggtatggatatggagacattcaccctgcttattgaggcaagtgcacttgctgttccttgtaaccctgatcaggcaagaagccattttgactacatgataaaattggggcataagcctgatgataggtgcaccgctagcatgatttcagcttatgagaagaaaactacttggac

SEQ ID NO: 13497 - DNA, 344 bp, Glycine max
  modified_base (217)..(217): a, c, g, t, unknown, or other
  modified_base (242)..(242): a, c, g, t, unknown, or other
  modified_base (285)..(285): a, c, g, t, unknown, or other
  modified_base (297)..(297): a, c, g, t, unknown, or other
  modified_base (301)..(301): a, c, g, t, unknown, or other
cccacgcgtccggatttttggacgaacttggattgattcatcaggagagatgatcctggcgaatctgactacaggggacaaagtggtgctgtattttcaaccatgcggctggtttggagctggtagatatgaagtggatggatttgtgtataattctgctgacgagcctaagatactgatgactggaaaatggaacgaggcaatgaattatcaactntgtgactcagagggagaaccacttncaggcacagagctgaaagagaattggagagttgctgatgcccncaagaaggacanattncagtacacgcattttgcacacatgattaacagctttgacaact

SEQ ID NO: 13498 - DNA, 434 bp, Glycine max
gcgcagcggaagccatggctgattcttcttcgaacttgaaatccgacgcgataatggagcagatgaagcagcacctcgccaccgactcaggcaaacaagtcaccaaaaaaattggactcgtttatcagattcaaattgctcctaagaaacttggaatcgacgaggtcgtctacaccgttgatctcaggaaaggagaggtcaccaaagggccatatgaaggaggaaagcctgatgcatctttttcatttaaggacgaggactttgttaaggttgccttggggaagatgaatccacagattgctttcatgaggggtgcgatgaagattaagggaagcttgagtgctgctcagaaatttactccagatatcttcccaaagccttccaagctgtgagctgagatgtctgaaactacttgcacaaggttgctagaatta

SEQ ID NO: 13499 - DNA, 375 bp, Glycine max
tcgcccctttctctctctctacactttctctctctctccaacaccaccttttatttttttttgccgttgagacaaaaacagaagtaaagaaagaggtttatttttatttgggtctttttttattagcgaaaaaagggataaaagaaaaagaatacgggaatttccgaagccaaaaaacccgggaacaaactcttcgggaagacgatcccggtgccggagattctgccgggatccaacggagctccggcttcgtcttccggtgatgttgatgttgatgacagtgttgacgcttctttcaccaactcttcaagggagtcttataccaacacagatgcacaagagaaagattttgataaggacacatttggagaaaaa

SEQ ID NO: 13500 - DNA, 380 bp, Glycine max
gaaagatgcaactcactgtcaacagtcaaatgaggatgctttactaaagataatagcagggcatatggaagtttcccaaaagacttgctatgctttgcccacataaaatttcttgctagatagcccatacataagtgcaggataaagtcactagcacaatcagagccaaattcccaaatttggatcaagtcctccatttgtatttgagtagattgaaaccttttgggtgagagtaactcagaaagccacgtctcacacttcaagagaagtgtctccactccaaaataaagcgcaccctcataaagaggaaggaaattatccagcgtaatatccaatacgcagccatacatatgcttaagaatttgcataaattccctcac

SEQ ID NO: 13501 - DNA, 450 bp, Glycine max
cccacgcgtccggaaagagtagtgaacatgaggaaactggcccccccaaaacatgaagagcatcattcttctcgtgacaattcttatggaaaatcttcttctggtagctctggatttggaactacactttcaaagaagtctttggatatggcaatgagacatatggacataaggcgaagcatccaaggtaatctgcggcctcttgtgacaagcattccagcttcctctatgtacagtgtgagatcaggtagttcctcaaagagcaggacagtgagtgcttctgattctccacttgccacaagcagcactaccagctctgaaccaagtgttaataccaactccatgtcttatgatggaagtggggttgaagaaaatgattttgcatgtgagaggggaaactcttgatgggagtcatcaatccatgatgggcaaagcatgatcatcatcact

SEQ ID NO: 13502 - DNA, 401 bp, Glycine max
tggaaactggattggacctaccctgcacacattccaatcccatgcaaaaccgagtctgtttcaaacgccggtatggggaatggaatgagctcatgcacgagctgggatgagaatctgtgcatataatgatgaaaggggaagaaggacaatagtggtgatggtgttttagcatgcaaagaagcaaaggacggactagtacctttagctgatgcagtatttgaatgagttggactgacagtcataatttcatgagaatcgtagctatacctagcagctgacactggactaactcaaacttactttgatatgttttgaatgaattttcctttttctttttcgcccctttattagctttttggtcctgttaatatactgacattatatcaaatgaggataatggg

SEQ ID NO: 13503 - DNA, 216 bp, Glycine max
  modified_base (65)..(65): a, c, g, t, unknown, or other
cctcaaacttcaacaaccaaacctctgcacctatacaatttgaccctctcaacagtaacagttanataagcagtgtctccaaatatcctaaccatattattctttactaacaacctatctaaacaacgcgttttccttccttcacaactatacctatcatatccattacacctacacctacttatcagcgctactaatgtgccgatctatacttaa

SEQ ID NO: 13504 - DNA, 283 bp, Glycine max
  modified_base (9)..(9): a, c, g, t, unknown, or other
  modified_base (37)..(37): a, c, g, t, unknown, or other
gtgaaccgngccactcctttttttctcttcttctcgngcttcagtggaaatcggcgtagctccgggaccgacataagagctcaatggcaccaacaaggaaatctaaaagtgtaaataagcggatgtcaagttcaaatgacaattcccctgagaaagatggagtttattcaaataaaagcaagccacggaagagaaagatgactgataaattgggatctcagtggagcaaggaggaacttgagcgattttatgaagcatatatgaagtatgggaaagattggaa

SEQ ID NO: 13505 - DNA, 319 bp, Glycine max
tcggccacgcgttcggttgaaatggctcttgtcttaatcaccaccgcaaatttctcgaaggggattgtcttacgcactgtttgttggtctcacgctttcttctttttttttcaacggcaatttcaaccactcttctttttcttcggcggggttcggcggctttcccgggggcacgccggcttccccgggtccccacttccacctttcgaaaacgaattcagcaggcaccttaaaggtttggggcttttagaactctggtgcacaacaacaacaacaacgccttattccactaggtgggcttttaagacctttgtgcacc

SEQ ID NO: 13506 - DNA, 341 bp, Glycine max
tcggccacgcgttcggccacgcgttcgggacaacttggctattcttggtgaccgaagagaagcaaaaatttgcccccaaaagggttccaactttttggacattggcgcttttatttggaccggccgggcccatggggtggccctggtttacaattattaacacccttttaaatacaccgagcctacctattaacgctttattggtcggaacggttttattggccccggttatgccgtggaggcaatcctggcacttggtctaacccaagggtcaatctattttaaatcaatccggggaatctatgaagcctggggtaattataaattcctatcgctatgtc

SEQ ID NO: 13507 - DNA, 173 bp, Glycine max
acccgaaaaactaactaacataatatggggtgaaagaggtgagaatgtttatcatattggggcatattcaaagggaagtgaagatgttaacaacataaaataatgggatcaaaaagctgctgggacttaactcacccaacttcaaaagccaaaagcttaaacttatttttatt

SEQ ID NO: 13508 - DNA, 343 bp, Glycine max
acgcgatattatacttctaatccatttcattatatataatggggattctcacaattgaggatgaagccaccttccctgtggctcctgctaccctttacaaagctctagttacagatgccgacaacgtcatcccaaaggctgtcgaagccttcaggagtgttgaaaaccttgaggggaacagtggtcctggaaccatcaagaagatcactttcgttgaggatggagaaagcaagtttgtgttgcacaaaatagaatcagttgatgaggcaaacttgggatacagctataacgtatttggtggagttgggttgccagacacaaaggagaagatcacattcgaatg

SEQ ID NO: 13509 - DNA, 381 bp, Glycine max
ccctaggaaatttccccttcagacgaaaccctagatttcctctcacaaatctggctcagcttccccattctcgggattcggcgtccaaatcacagatcccgttcaattttttttccgcatcccccgatcgggtttggattctgaagaaagttcaattccgcacaaattcgagacaattgctgctgtcgaggctcgcgttgcgcatgggtaagattctgagagaaaccgcgaggccgttctcgaattgttcgtcgtcgtcggcgtctccgttgtcggcgccgccggcaacgacgtcgtcgacgtcgttgacggacacggtgagggggtcgcaccggttcaagatcacggggtattcgctgtcgaaggggattgggattggga

SEQ ID NO: 13510 - DNA, 186 bp, Glycine max
cactaagttctgaaaaatgagttccaaagtttttcttattctacttatgttcatggcggctatacttttgatctggtgtgaggttgcacccgatgatgcataccataatattgacaaaacaaattggaagcgtattgcaaatggggtaaatgaaagcatatattggcgtgcgtgctatcgcgacta

SEQ ID NO: 13511 - DNA, 285 bp, Glycine max
gccacccgtacatactgaacctgacattgtcagtcgcattttataagcttgttctatggcaatggctccatttgcatgacagtctgttcattcaaactcaacttgggaagactttacaggacctcaatgcccttgactgtctgaaacatcatatagaatctatttatggtagctatacagatacacaccgctaacttgtatttccatggtgcaccaatcgtagatctacgcttagatactactctccctggttatactaaatacaccttgcacccactacaaccc

SEQ ID NO: 13512 - DNA, 236 bp, Glycine max
  modified_base (6)..(6): a, c, g, t, unknown, or other
ccgacncatccaatttactagctagtgttctataagttcacggtcaactctgaaaaaggagttcgaacgctttgcgttgttgtagttatgttcatagcgactatacttctgatctctgctgaagctgcacccaatgaatactaaaattttaacaaaaaagatgggaagcatgctccaaatgggttatatgatagcaaatggggttactgtggttgggcatgataccaccaatgcct

SEQ ID NO: 13513 - DNA, 201 bp, Glycine max
  modified_base (7)..(7): a, c, g, t, unknown, or other
  modified_base (11)..(11): a, c, g, t, unknown, or other
cccgacncttncaatttactaactagctttctatatcaacacgcgcagctctaaaaaaggggcaagaatgattagcgcgtggtaattataaccatagcttctctacttctgatctcttcttaaagtgcacccaatgaatactaaaattttaacaaaaaagatgcgaaccatgctccaaatgggctatatgatagcaaatgg

SEQ ID NO: 13514 - DNA, 400 bp, Glycine max
aaaaagtacccactttcccttcatcttcttcttcttcaattcggcgttttctgaaaagggaaaatcgaaatccgtctctgccaccatcaccacttagatcagtgatatacacacccatctcaaaaaccccacaataacaaaaactcagaactattgagtgatctacttccaatgaaatcctgtattttcattattgagattcaattgaagtgaagtgattattcactggaaaacttatttttcatacaactgaagctgctacatgcgttttaactacacatgtttgttggatctatgagcatggctgggaatcaagatcagctcaagaacaagcttcagttgactgatggctacgatattggccccaaacgtttacctgcagctactaatattgcaacat

SEQ ID NO: 13515 - DNA, 413 bp, Glycine max
tcgcccacgcgttcgccagcgttcgttttcttgtttcactctttaaaaaggaacggccctctttgagtgtcttaccttaccaccacccacctgaacaatttcccttcacccaacacgggttcaaatatcactcccctataaaacattcttaaaaaccggtaaacacccaaaaggggttttcaatttcacgcaatttctttcattcccacacccaccaaaaaaaaaaaaaaaaccatcacacatattactacattataattgctttagattatgaagaaattggagaattactaaattgccctgccggaccaacacaccggggaacccaaagtggtggttccaactggcaatgggttccttcctttcctttttcttccttttcctcgctaccctaacctccccggagggcaccc

SEQ ID NO: 13516 - DNA, 348 bp, Glycine max
gttatatctcaccactaagtttattattatcaaaaccaaaagctagcaagctaccttgggaaggaacacatggcttctacagacaagcatggcgacactgaatacagaacatcatcttcaactccagctcctgcgggtgttgattactttaaatttgatgttatcctaaagtttgtgttatttgcagcatcactggtagcttgtgtggtgatcgtcactggtaatcaaacagaagttattcttgtgccacagcctgtgccatggccagccaagttcaaatacacaccagcctttgtgtattttgtagctgcaattgcccgtactggcctctacagtatcattacaaca

SEQ ID NO: 13517 - DNA, 389 bp, Glycine max
aaaaagtacccactttcccttcttcttcttcttcttcaatttgggttttctgaaaagggaaaagcgaagtccgtcactgccacaatcaccacttacatcagtgatatacacacccatctcaaaaaccccacaagaacaaaaactcagaactcttgagtgatagacttcgaatgaaatcctgtttttcattagtgagattcaattgaagtgaagtgattattcactggaaaacttatttttcatacaactgaagctgctagatttgttttaactacacaagtttgttggatctttgagcatggctgggaatcaagatcagttcgagatcaagtttcagttgactgatggctctgatattggccccaaacagtttcctgcagctactaata

SEQ ID NO: 13518 - DNA, 357 bp, Glycine max
caaagatcagatgatgttactgtggacagttcagtttctgctaagcgccgtggcagagtcgccatatctatggacacagactcaaaattggacgatgactgctcaacctctcaaagtcgatacaaccacaggattccagatagattgcaattttctggcaagaaggtttctcatagaactgctgcgtcacgtaatatttcaaatgaaggtggatggatatccaaatctagaaatcattccgatagattcagaaaagagcttggtatgacatcagatgaaacatctatgaagaattcaatgctacctaaaggatatgcatatgtttctgctgattgcttgtcaaatgagaagcacttt

SEQ ID NO: 13519 - DNA, 255 bp, Glycine max
aaaaaaatcagatcatgttactttggtcatttcacactctgctaagcaccagggcagaggaccatatatatggacacatactaaaaattggaccatcactcttgaatctcctcaaagacgatccaaccccatgattcctaaaagattgcaatcttctcactacaagattcctaacaaaactgtttcctaacacaatattacaaattaaggtcgatacatatccaaatatacaaatcattccgctctattcataaa

SEQ ID NO: 13520 - DNA, 112 bp, Glycine max
ccccaccccttcccccaccccttccggggacttaaggcccaggttattaattgggcttggtccaccttttccaaggttatttcttcccccgcttccaagaaaatcccccaaa

SEQ ID NO: 13521 - DNA, 317 bp, Glycine max
gcacaaaccggcacgacacatacggcaactaacctgcacgcgccgttctttctcgctaggagcccggccccaaaatccctgctattaccctaccattgacccattcaacttcgatctcatcatcgtcagcaccgccctatctgaatccgtcatcgccgctggcgactcctgcgaatgcaaaaccatcctccacctcgaccccaactccttatacggcagccactgctcttctctctccctccacgaactcacttgctacctgtgtatcccgcactccctccccttcgccgccaacacaaccactgactgcgacgacg

SEQ ID NO: 13522 - DNA, 404 bp, Glycine max
  modified_base (21)..(21): a, c, g, t, unknown, or other
tgctgaacgtacctcatctgnagttgtttttcacggtgacaaaataagaaaaaaaggattggacgaaatggatcatgctctgtgctcacgttcctaatgttagaggttctcaaaccgttggacagctggctgaacgagttcaaaacattactctggagagaactaacaataacgatgctggagtattagatgtttcacagaatagacctttttggggatttgaatagtcaatatctccattccactagcgagggtactgctcaagtcggtattcaagtttcagatcattctatttctgcaagaaattacagctgcagatgttctttaaaacattcttttgaagaatattcttcagacggaagcacgaaacacgagggatcatggtctcaatttttacatattgc

SEQ ID NO: 13523 - DNA, 243 bp, Glycine max
gatcggttcaagcgacagtttgcacatcttgaggagcattatggcaaaggtgaacgaagcactgcaccattgcaaagacagcatgccttcttacctagaaagcgagtttgtgctcccaaggatgaaagtaaacaaaacaacgattcttaaaagccaaagggatcaaatcttcagcagagtcctccaagttctgatgagacaagtgctcaaaatggaacctccaaaccaaactacagtgcacgt

SEQ ID NO: 13524 - DNA, 345 bp, Glycine max
gcacaaacctgcacgacacatacggttactaacctgcacgcaccgtccacttcactaggacccagccccaatatcccttctcttaccctcccattgacccagtcaacttcgatctcatcatcgtccacaccgccctatcagaatccatcatcaccgttgacagctccaacgataacaaaaccatactacaacttgacccacactacttatactgcagccacttcaattctctatatctccacgacatcacttactacctttcttacccgcactacctacccttcgacgacgccacaaccactgactactacgaccgtcttatcatcgacttacatcaacaacccc

SEQ ID NO: 13525 - DNA, 404 bp, Glycine max
  modified_base (347)..(347): a, c, g, t, unknown, or other
cttttcaaagaaaaatcatttttttcaaatacaaacaatagtattttcatatgtgagagtggacaaaatggatgaactgacccaaccgtgtccactagattagacctaatggcctaccaatactctacctggatcatattttttaaagtcgagttagatttaatgaccgtcatgttaattcattttagcccattttatttttttgtctaaatgactagcaaaatgaacggaccaatccaacccaatccatcagatcaagtgtgaaaaatgggttaggtcgagcctacccatactttatgttgatcttatattttaaagttcaattaggtctagaggaccatcagctngattcatattaactcattttatttttttgtatgaatttatataaattccaaaagaaa

SEQ ID NO: 13526 - DNA, 124 bp, Glycine max
cggacgcgtgggcttttatgctttctttcttcttctgtttatcccaatcccgtttcggtggtcgctcaacacacagtgtgcgttgtctcagctggcttgccttttcacttttcttcatcttttt

SEQ ID NO: 13527 - DNA, 341 bp, Glycine max
  modified_base (10)..(10): a, c, g, t, unknown, or other
cccacgcgtncgctctcttctttctctttcaaacatttaaacggtttcttttgcaaatgtcaaggcttaacgtggggttgggtctttctcggcatcgcgttacccacatagttttctgggcaaaaacagagtcttttggtggggaaaatggcgaacgggttaaagagagaaagtgggttgacgacgttgttcagcgaagaagagcttaaaaaagtgagtggggttaagcgtgttggggactgtgtcgaagtcacgtgcgggtgcacgagccatagatacggtgacgctgtgggaagactttaggttttcgttaatgggtaccttgaaatcacttgcgaatg

SEQ ID NO: 13528 - DNA, 224 bp, Glycine max
cgtgaagtgtctcatctctaggctcaacctcttcatcaccaccaactgcatcgacaaggcgtaacaacgagggaggcattcatacgacgttgggactttggtgggctcaagtattgtaggttcgatgatgttgaaactggcaaatggtgaatagggagatgatcactcccaagatgatcatgacccacaggatcatttgaactatgactaagatcatatgctat

SEQ ID NO: 13529 - DNA, 377 bp, Glycine max
cccacgcgtccgcccacgcgtccgcaactcttttaatctaatttcccccaaagtcttgtattattttgctcataaccccaattttcaatttcctctttcttcccttacgttatggacccaccaattcaccatccacttgggaaacgccctgccgccgaggacgattccgtaatttccgattgcgagagcggggtttccgggggcgacacggcggctggctttgtgccggccgacgaaaacgccgacctcgtccggaccagattcgttcgtggcctggccgcgcacgggttgaaacccgaggttttggcggttggcagaaacgcgtgttcctccgttatggcgcaagcgcgtcaacattcctttcacgtttttgcacg

SEQ ID NO: 13530 - DNA, 404 bp, Glycine max
attgcactttattctatcatatccttgttcaaataattttcttttcaattacgatacgccaatcccagaaacttatgttcatgaccatcctcaaggtcccaataacatttacttgaagacaattttgagttgaccttacagcctagttccacctatacaaacacccttgatccttcattcttttttgagttgaccttacctagctccaatactggcaacaataatactcttgggcatctgaactatctccattctttttttccccctttctttgcagtggatttgcgaggttttaaagaaattaaatgcgtttttatgtgctaaagagctaggtaattatagaattcatctcacacatacttctttttactaccttttatcttttagattttattcttgaatta

SEQ ID NO: 13531 - DNA, 431 bp, Glycine max
  modified_base (10)..(10): a, c, g, t, unknown, or other
cccacgcgtncgaaagacccaagtgagataggacttaacttcactgtcaatgggactgagatcttaaccaaaatgttccccaatgaaaacagcgacgggagatgcttgaagctcctacctttccctccaagactcgaggatcatgttcgagcctcgttcgcgctcacaggagcagatttggagaagctaaggaaaagggtgttgtccaaatgggacatcgttgatagaggagcagaatcagagccacctaggttgtcatctttcgttctcacatgtgcttatgcgctagcttgcattgctaaggccattcatggagttgaaaaggagaaagagaaatttgcttttgcgttcacagtggattgcaaggcgaggttggagcctccaatccatgataattattttggcaaattgggtgtggggcatgttgtgga

SEQ ID NO: 13532 - DNA, 400 bp, Glycine max
cgcagcgtacgccacgcgtactattcgattgaatcaaaaattaaaaggaaaaaatgaaaagtgaagacctctcaacacatggcttcttcaatcccatttacaagtatcaactcctcaagggtgcttcccattcctagagaaccacaccacccattttcccatttgctctcaaacatgtcaaagtttgcatctttgagaaccccttcttcttcttctgcttcttcttcttcttcttctgggtcttgctctctcaccaaagacccttactctgttgtgccattggaggaacatatcaaaatggataatgggtcggttctgcttcagagacccgattcgtttgggaggtttggcaagtttggagggaagtatgtccctgagactctgatgcatgctctcactg

SEQ ID NO: 13533 - DNA, 305 bp, Glycine max
gccacccctcccggaaaaggacccacttggtttcttggacctaaatggttaaaggcagggggcccaaaatgattgtgaaggttcatcaaaagatgccagacattcagatagtagtgctgaacaatatttaaagggccttaaaactcttgcagggccaagtctgcaaagaaaaatcaacttcattgaaaccattaaacttgagattgaacgccttaagttaaatctttctgctgctgaaagggatagaaccctgctatctgttggaatggatccagcaaccttaaatcctaatacactgctcgatg

SEQ ID NO: 13534 - DNA, 115 bp, Glycine max
  modified_base (9)..(9): a, c, g, t, unknown, or other
  modified_base (102)..(102): a, c, g, t, unknown, or other
ccacgcgtncggaatttattcacaaaaaccttctctgttctcaattgggtgggcatggtgtgatttgatttcattgccatggcttccaaaagatcccaagcnagtagctgatgct

SEQ ID NO: 13535 - DNA, 242 bp, Glycine max
  modified_base (1)..(1): a, c, g, t, unknown, or other
ntccgccaaacttacggccttagacatcacctcaacctacgaattcaccactcccggcagcggttttaaagatggattgaagctagccctcacaccttataaggaaacttgctaaggcttatataagagggccggcctcgctataaataaaactttattgaaagggtacatataacaaaaattgggatcaaactgggctcaaggcatataacgcgagtggtactttcctattaatcaccttt

SEQ ID NO: 13536 - DNA, 51 bp, Glycine max
tcgcccacgcgtccggcaattcgtaattgctatctgtcttctatcatcact

SEQ ID NO: 13537 - DNA, 397 bp, Glycine max
cccacgcgtacgcccacgcgttctcacactcgtgcgtccacgcgttctcatctccaaaagggcccagcgccaacctcgatctgctcacgccgcatctggagcactttacgatggtaattcgaacgtattaattgcttctgatgtggactatgaagactatcacaaaggctatggagtgtcgatgcattgagtacttatcttcattgccgagaagtttttccttttgctctgactgtatctccgattgtcgtcactctcaatttcgcattgataatcggaatcattctgaccccaaagaccttgtcagcgaggattacatatttgaacaagccgctgatggtttatgtcagcaaaagcgcgtcaaggaatcgggtgaaatgctccatcgtactgatca

SEQ ID NO: 13538 - DNA, 377 bp, Glycine max
gtgggctgtattcggtctctcctaatgggatgcacactgtaattgtcttgattgctatctgtgtagcttcaatacacataggactgaacttcatatataacacattgatatttgctgtgcaacataaaaaatgatagcactgcgaacgatctatactttaacatgggctggctataatgaatactgtgacatttcaactcaactgtggagctcaaattacactaacgagctcaattggtacaaatgagccaatgtgaaccaatttagctactggacagttcattttgatcagattgacctaatcaacgatggtcacatacattcatacactaatgacactgcacagcaatatcactatcactgggatccaccattat

SEQ ID NO: 13539 - DNA, 464 bp, Glycine max
gttgtctatttgaaatctccttcatcctttcctttcttgttgaaaagtttttgttgttggggtaattaaccagcagttcttcagttttagaaagacgcaggttgaattatcatggcagctatgatggatttttacagcagcagcacagagtttcaatttcactcagatccattcaggggtgaactaatggaagttcttgaaccttttatgaaaagtcctttctcaaccccttctgcttcaaattcttggcatgtttctacctcttactctccttcccccaacaactactctaccttcctatactcaaacgggttatcatccatacccaacaccatccaaaacttaattggtttcgggcaagggcagcccacatctcttgtgggcctgaaacacctaaccccatctcagatctctgagatccaggcccaaatccagatccagaatcacagcaacacgctgagctt

SEQ ID NO: 13540 - DNA, 424 bp, Glycine max
  modified_base (381)..(381): a, c, g, t, unknown, or other
aatttgtacaactagtcaattgttgtatagtttggtaaaaagttgtgcagcttgtgactatcaattttttaaatgtatgaacaataaaaaaatgtaactgggcaattccatgtactctgtctagttgatgccaatgctggatgttatgagtttgattacagaattcaatgatcctaaacgcagagcagcagaggtatttgataacttagagagattaacatagctatagggaattggggatgagtataaaagaaagctatatgttgctaggtgcatggttgcaactttcaagtaaatcatggatcagtcaaaaatctatttttcttgcaattagtgtgctactgggcctcaattgtcaaattcctaggatggaaaatgttntttttttttttcagaataagacaaccactgatgcccgatggat

SEQ ID NO: 13541 - DNA, 92 bp, Glycine max
tccatcgccgtccgtggatcacttcccaagtggctcactcttttttagtttcttggctgaagctgggtccgtctgttgaaggacgtgggttt

SEQ ID NO: 13542 - DNA, 341 bp, Glycine max
ggatgccatgtttggtttgtagcgcatcctaggcagctgcataattgggttgggggtcctgccaatctctatgatataagtggaagtgcacacttcataaataagtgtgacaatggaattgttattcaccgtaatcgggatccggaagctgggcctattgatcaagtacaggtttgtgttcgaaaggtacggaataaggttgcagggacaataggtgaagccatattgttgtataatagggttactggtgagtacacgccatctgataacaacagaccagctgatagaaagagatagcagtgagacaaataattttttggtaggcttggatagtggtcact

SEQ ID NO: 13543 - DNA, 368 bp, Glycine max
gcccggtgtaggtatttgttttatgacttatgagacgttgaagatgcttttagcagatatgggtacgtgcataactacacccatcaaccttggagtctgatatacaagaagtaaatgtatgaggttatttacccatacaaaaaatgttaagttacatttacgatttaacaattgtaagttcaatttatttctcgagcctcacctgggcaattttttaatgttcccgtggggattgcatttttgcatgtacagagacttgcataacatttaatattaagctgttatcgcaaaaaaaaaattataactaaaccaacataagtaatttaggaaaaacgtcataggtaaaatacaccatttacaacatacta

SEQ ID NO: 13544 - DNA, 112 bp, Glycine max
tgagaatagaaggttttcttttgttaaatacatgttatttgtaaggtgtttattcattatgagatgtgatcatattattcataaggtatttatggatgtgattttgcttaaa

SEQ ID NO: 13545 - DNA, 339 bp, Glycine max
tacaaatccacttgttaagcaggcctatggttggttagccagcatccctgctgcgcctgcgcatgctatggagtttcctgctaaggagattgctcttgggcttcatcctgtagctcagtcttcccatccagctcatataactacaggtatgatcagcataacagacattactttaagaggcaatgcgatggattggacgatgggcaaaaatggagggtttagcactataatatccactgggttttgtcaaccggatgttaattcggatgctttgatacgtgtttctggcaagactgcatttgtgttgtcgcatggcttgattttcctgactggtttctc

SEQ ID NO: 13546 - DNA, 70 bp, Glycine max
aacaaatccacttgtcaagcaggcctatcgttgtttagccagcatccctgctgctcctgcgcaggctatg

SEQ ID NO: 13547 - DNA, 453 bp, Glycine max
  modified_base (389)..(389): a, c, g, t, unknown, or other
cccacgcgtccgctgcaattcatctctctcatttcctttttctttatctgtttcttgttgctcaggctaagttgctggaagctgggccacgtttttctctctctctctctctctctcaagtatggtttatttagacactgtttggaataagcttctctataagtattagtaggagaagtaaataagaaaagaatacatgaagtaagtttatttttataagctaaaattagcttatgtaaaaattaagatcagttcttgaaagagtttattaatatcattaagcttctagaaaaagctgatgcataaactaattttatgtttatggaagaactttatttcatctaaagagaccctagtgaagccagctatttatgactaaagtactattntgttcttgaatttgtaacgctctaatcggttagtccttcaaattagggtaaattgaaaagaaaa

SEQ ID NO: 13548 - DNA, 239 bp, Glycine max
gaagtttgaaaggtccttgccaggatccaggagttttttggccaaattcccaatggtttggggggaaggctttgaaggccgtggttccaatgggatttgggggaagctttttaggtccactgttgtgcacacactgcatcttaaacagaccccgaacctgttgaatctgcaaggggtcgagagctgcgcttttttgcatatgtagatcctatagacgtgtctagaaatctcacgagatt

SEQ ID NO: 13549 - DNA, 365 bp, Glycine max
atttgcttaattattaaataaaaagattttgaagtttttattctgatctttcctagtgaaaataggtcatcctcagactcaaacttcttgatttcacatgaaattcggttttaacttttcctttgtctttaatagtagtatacttattttatatacgctgtggattttcattaaattacaaaatttcagtttatgaactagtaggagaccggacctgagaagatgtaccatagttaagcaaaagaccactaatcgactaagaaaaaatctaacggactaaactctataggttcactttagtgtttgattgttatttttctttcaatttattcgttcaatttggggtatataggttaaaaaggtga

SEQ ID NO: 13550 - DNA, 320 bp, Glycine max
cagacgcgtgggatctctgtctctatgtctctaatccaattcagttagcttctcgttcacgtgcaaagggacttgagaagatgttggagaaagttgaagaatttaacatagagagggtgatggaggaatctgagagggtgacaaacgatgctgagaggattcaaatggaaaccctgaagaggattttggtagataatgcttgtgctgagtacttgctgaatttggggttgaatgggatgactgattctgacagctttaaggcctttggtccacttgatactcacaaagatttagagccttatatcaattgaatacttgat

SEQ ID NO: 13551 - DNA, 99 bp, Glycine max
aaaaaaaaaaaaaaaaaaaaaaaaatataattaaaaaaaaacaaaaatataataaaaagaaaggaaaaaaaaaaactacaattaaacataatataaaaa

SEQ ID NO: 13552 - DNA, 405 bp, Glycine max
gaaaaaaaaacttgtatgactttggcatactatactagtctcatttgccattcacattcaggggaacatagcagaagcatagagatataccataccatattatatataacaccgaattgaattcttgctttgtttctctacctttgatcatgatcatggattctcttctctccatcctcttctttcttctcactctatcttctctcaacccttcctttgcttcacaaccctcttaccaagaccactgtggctccatagttccagagtcaactcccaatgaaaacactcacaattcttccccttttgatgatcatcagagaagttacttcacaggtggtgatagcatcatcgatggtggaacttgcttaaaccaatactttgacctccaaccaatgtacatacgtg

SEQ ID NO: 13553 - DNA, 389 bp, Glycine max
cccacgcgtccggaaaagaacagaataggtgttgtggtggagtaagaatcgaattcgaaggaagagaggtggtagggtttgtgatatagcgatgagtgagagtaacgggaacagcaggaggcgaaatgttgaagatcaagatctgggactgtacttcttggaggcgtgcaggggtagggagatgaaagaggaagaggaagaggaagaggcacccagggagctcaacaccattaacagctctggtggtttcgtcgtggtttccacggacaagttgtcggtaaagtacaccagcgtcaaccttcacggccacgacgtcggtgtcattcaggccaacaagcctgctcctaccaagcgcctcatgtactatttcgagattcatgtcaaggatg

SEQ ID NO: 13554 - DNA, 454 bp, Glycine max
cccacgcgtccgatccgtgatctcccaatttctcacttgaaagtatgaagaaagaatagagaagtaatggcaggagcagaagcaagggctctgtggcagagaactgctaatcgttgctttgtccaagaagatgcaaaaagagctcccaagttggcttgttgccaatcttcatgtgcaacatcaaaatcagttgatactggacctgccagtacagcagatgaatctgatcataatacagttaatgttacccattttaacaggaaatcgtcaatttctaatctatcatcagactgtaggtggtggttgcattcacaacctaattatgggtatcaaaagggtttaacatatgaacagttaaatgcattagaggatgaggtagaaactttgttagctagtgatttaagtaagaattctgaagaattcatgaattaatggatgtgatggaaaaacatga

SEQ ID NO: 13555 - DNA, 431 bp, Glycine max
  modified_base (357)..(357): a, c, g, t, unknown, or other
gcgcaacgctcggggaaaggcgcgtggggtggtttaatagtatcgaacggccatgcatgcggaatcctgctacactcactcacacacacaccaccctctctctctctctctctctcaaataaaatcgtatcacacactttctttctttcttccttctctcacactgacatcaccaaagttttcctttcgttatcgatttcattctctcgccagcgagaagaagaagaatcccctgcagccgagctctctctctctctctctctctctctactcctactccgatgatcatcatcatcatccatggcggatcctccgtcggtcgccgccgctccggcgtcgctctacgtcagcgacctncagcccaacgtctacgacaaccacctcgtcgacgcattctccgacttcgagagcctcgcgtctgttcgcgtctg

SEQ ID NO: 13556 - DNA, 441 bp, Glycine max
cccacgcgtccggcggtgagttggagctttgaccagtttgagcacacgagaattcagtgggcatgtcaatggcaaaaaaacctgtgaaatactctctggttgacgcgtttactgagtcagtgttcaaaggaaaccctgcagcagtgtgtttcttagaagagaagagggacaaaaagtggttgcaaggagtagctgcagagttcaatctatctgtgacatgttacttaactcgcatcaccgagtcccatggaacaacctcttatcctcgttttgatctcagatggttcactcctgttagtgagattaacctttgtggacatgcgaccttagctgctgcgcacacaatattttcatctggtttggtggacaccgatgttgtcgaatatgtggctatatctggaaattaactgccaaaaagatcccaacgatcaatatcactag

SEQ ID NO: 13557 - DNA, 378 bp, Glycine max
  modified_base (2)..(2): a, c, g, t, unknown, or other
  modified_base (11)..(11): a, c, g, t, unknown, or other
gngaataatanaaaattgaggaaaacaaatagacatgctaagaagggaaagaaaagaaactgagcagaagaggctagtgggttggcctaaaaggctgccggagtactgacggtaggtcagaaacacataagagagctgtgggttatacagtttgtgtcgaataaaagagctgtggggaaattgcggaattatctcaaaaagattggatgaacaacagacaatcaggtggcacagaaggttctttaacccccttgttaccaatcaaggtcactaatactatagctgctaattggtatgatttggggtatgaggtgctccacaaaatcacaacgtgatgtctttcgtatagtggacccaagccatgatgcacaatgatgc

SEQ ID NO: 13558 - DNA, 398 bp, Glycine max
cggcccagagcgacccgtccgctcatctattctggtcgctccctatctctctctcttcacgagataattgactcgtgatgtggcggtgatgatgacactatcagggtgaagaagttccatattctgacgtctattacaaagcttagagctcaaaaagcgcgttctggatacctcgctggtcactgatttttgggttatcataggaactcaatctcatactccattagataacaagtatcttatgaccgctactgaagacgaattacggacgcataacgcaatacatgattgatttccatgtacttgttcaaggactgcaaaatggcggtcctctgccttgcacaatgtcactgacatggtagctgctggtgccattagattcccatatgccatgtctg

SEQ ID NO: 13559 - DNA, 453 bp, Glycine max
  modified_base (328)..(329): a, c, g, t, unknown, or other
  modified_base (381)..(381): a, c, g, t, unknown, or other
cccacgcgtccggatccaagtcctcattttttttctccgcattcatctggcatttttattgattgtataaagtataaactttcccgtgcagagactggatatgttattggatcatttaattggctggaacctcctaagagtatatagttgaaatgtttgataaccttggctgtgcacttgtgttgttcttcagttgatggaattatatatggtattttttttaatcttgtattgtccatagaattttgtgttgatgaccgcatatgtgctcagtttaagtttaggtttcttaatgtacgacagttattgtcagatcgattgttctatnntgcattatttagtgtcaaatagaaggtgaaaatattgatgttgtagcttgtntattttatttccgattagaattattctataacgttctcgtaacagtgtgccagcaatggttcaaagtctaca

SEQ ID NO: 13560 - DNA, 422 bp, Glycine max
attctctcacgtaatggcgtcttcagctcaagtgccaaacctcttcggcagtgccacctcagctgcgccgccaaccccggcggcgcaccacgacaacatcatgtcctcctccgacgccgccgacgcgctctcctgcctcctccaccgcctcccgcccacgctctcccttcccacgcgcctcccctcgccttcctccgcagccgccacgtctcccccctccctctccctaaacgacgtattctcctgcgtttcaaaactcggttacgcgcaactcaccgatcactcagtcccctccgaactcgccaactcggccgagtcggaagcgcttgccctctttgacctttccaaagaacagaagaactctctctttcccaaaaactggcctctcggatacggcggcgacgacgaagacgaagacgagc

SEQ ID NO: 13561 - DNA, 459 bp, Glycine max
  modified_base (362)..(362): a, c, g, t, unknown, or other
ttatcattcaagctgcagactcggctgaaccaacctccaaaacaatgataaaatcacagaaaacagtgtctagtgttctctatggaatatggaaaagggagggcttactgggatatttcaaaggattgcatgctcagatcttaaaaactgttttgagctcagcactgctcttaatgatcaaggaaaagatctctgctactacctgggtgcttatccttgcacttaaaaggtacctattacttccaaggggtaggattaagaacttgtaatttataatagcagttactggaggaagaagcttcaattcgttgcggataatgaatgcggttggagtgcaaagtgtgcactttaacagatacatncatctattcaaaagtgagacgagattgttttggtggcttcccttctgtcctcttccctggcttaatgatatagaacaattagtccatgaatttatgc

SEQ ID NO: 13562 - DNA, 416 bp, Glycine max
attctctcacgtaatggcgtcttcagctcaagtgccaaacctcttcggcagtgccacctcgtctgcgccgtcaaccccggcggcgcaccacgacaacatcatgtcctcctccgacgccgccgacgcgctctcctgcctcctccaccgcctcccgcccacgctctcccttcccacgcgcctcccctcgccttcctccgcagccgccacgtctcccccctccctctccctaaacgacgtattctcctgcgtttcaaaactcggttacgcgcaactcaccgatcactcagtcccctccgaactcgccaactcggccgagtcggaagcgcttgccctctttgacctttccaaagaacagaagaactctctctttcccaaaaactggcctctcggatacggcggcgacgacgaagacgaag

SEQ ID NO: 13563 - DNA, 409 bp, Glycine max
gcttgcagctttgttcatgggagattaccttatgagaacctataaccagacccagttctgaggagcctgttgctgagcctaccctataggaaacttatcttcacaaacgcagacaaagtccacgcggctaaggcgcttagcaggcttggattagaagactgctttgaaggaatcatatgctttgagacccttaatgctatccacaagagcactgtttctgatgatgaagatgatattgagtttgtgggttcaaggaccaccaatcctaccacttgtaatggatcatgcacctctcaaatctttgacattatatggcattttgctcagcccaatcccggtgcagtcctgtcaaagacaccaattgtttgcaagccatcagaaaatgccattgaatcggccatcaagatag

SEQ ID NO: 13564 - DNA, 238 bp, Glycine max
atgccttcaattttcttctggagatatttataaggatttgattcttctgcctgttttgttgtgttggcttctctagatatatgatttattggcagataagaagcatggaacacatgatcgagcatgaaactttacctctaaataaagaaaagcaattgatacgcgagatcaaacaattgaagcagaatcgtgaggagttgtcttctaatatgaaaaggccagatccatcacaacaatc

SEQ ID NO: 13565 - DNA, 352 bp, Glycine max
tctcccactcgtcctatccaaaaacaaggggattaattatccatccaatatgactcattctgggtatgtgatcttctaaattgttaacctattatcttgatatgtatcattcatacccatgattattcataattcactaactctattcataaaatagcacctaatacactatactaatcaactgactcataatctagaatagttaactcataaattgaatttcctatatccaacacaatctacttctatattcatttatgatcctctttaatgaccactctaaacattactctatctaatggaccattatgcagaacttactaataccgtaaatgaattacctactgattct

SEQ ID NO: 13566 - DNA, 397 bp, Glycine max
aagaaggtcaccatagtgcataaaggaacgaggttgcttgaatacattgggacaaaagctgcaagcaagactttaaagtggctcaaatcaaagaaaattgatgtgaaactagaacaatcggtcgatttgagctcctcttctgaagaaaataagacatatcaaacttcaaatggagagactataaaagcagatcttcattttctatgcacagggaaaccacttggttcaacatggattagagaaactcttctaaagaatgacttggatgctgatggaaggatcaaggtcgatgagcacttgagagtgaagggcaagagcaacatttttgcaattggagatattacagatgttcaagtaagtgttactaaccaaaaccaagtcaattttggcttttaac

SEQ ID NO: 13567 - DNA, 91 bp, Glycine max
ctcactctcgagctcgcaactcacgttaactccgttcgaaccgtggcttcctcaagggcggattacctctctcgaggagaaccttcttcta

SEQ ID NO: 13568 - DNA, 150 bp, Glycine max
atcgttcttaaagaagggtgtgaggcttcaaactgcactgcatgctccgctgtaccgtatcataccaggaacaggaactaccttatgcatcatgtatttctctcttcatgcaactttaatgtcagacttattattattatcaacaaacac

SEQ ID NO: 13569 - DNA, 330 bp, Glycine max
  modified_base (58)..(58): a, c, g, t, unknown, or other
ctactgctctctctctccctctccctctccctccaaattttccttcattctcacgcgnccgggtggtttccgccggcggctactccctatccaccgcgcatccatcccgtttccttttcttgcttttcttaacaaaccaaaaaaaattaaaaattcttccgaaaacggggaataatcgtaatggtcaactgagtaaggtttggctgtccttcctagggtttaatggtgtccaataccaggaggagggggaagagaaccaaaccaaaaaaaaaaaggattaaagggcaaaaattagggaattttttttgggaaaaaaaagagaaatttaag

SEQ ID NO: 13570 - DNA, 283 bp, Glycine max
aacactccttctagcacggaacatttaactctacctactgcacactatcctaacacattagaagggttatatagccattacagctggtgattgatcaaataatcatagacagagccttctaggacgaatgtatggagaccattgcaatagtaccttaactattaccatctcttgataaactccatgaccatgtatgatgtaactctatgtatccacataaacatgctatgaatgtaacatactattacctaattcaatatctcacatcttgaacgttataaca

SEQ ID NO: 13571 - DNA, 443 bp, Glycine max
cttcactaaatctgagtgatgtattagagatagccttctaaaggctgctcgtgcacatttgaagaattttgcacatctactgttatattgtttcaattgttataacctttttgttagcttatcttacaatgttgtgtactgaccaatttacctttttttttcctggggctttattctgaagccgaatgcaacgctagggatggttcttgattctgcagaaaaggttatttcagaagttgtgcaagagccggtgataaggagattgagactatcatcgacagtgtgagatatcagtagcaatatctggaagtggcaatctttcagtggagaaagaagagagccagcaatttgggtaagtacttaattaaatggctggccttcatttctctatgtttttcaggcttgcttgatcattcaagcttgcaaattgggactgatccgaa

SEQ ID NO: 13572 - DNA, 443 bp, Glycine max
cttcactaaatctgagtgatgtattagagatagccttctaaaggctgctcgtgcacattggaagaattttgcacatctactgttatattgtttcaattgttataacctttttgttagcttatcttacaatgttgtgtactgaccaatttacctttttttttcctggggctttattctgaagccgaatgcaacgctagggatggttcttgattctgcagaaaaggttatttcagaagttgtgcaagagccggtgataaggagattgagactatcatcgacagtgtgagatatcagtagcaatatctggaagtggcaatctttcagtggagaaagaagagagccagcatattgggtaagtactaatataaatggctggtcttcatttctctatttttttcaagcttgcttgatcattcaagcttgcaaattgtgactgatccgaa

SEQ ID NO: 13573 - DNA, 418 bp, Glycine max
cccacgcgtccgcccacgcgtccgacagaggtctcctcaagatgaacagagttctcaatgtccaatacggtgtgtatctccatctccaattaggaaaaattctccaagacaccaaaaaagtcccttgcattcttctatggggagagtcagaacagaatccgtgactcgtcaaccctctagtcctctggggtcggcaataagagataaatgtggcaaagcttcacactataaatcacaagattcaatgtccacacctgagaagtctccaattcaatctgtatctcaagaagcaaggagtgagaccagcagtgaaggtcgaagtcctcatgagagccctatgaaacatagaagagataagttgtccaatgaaataaacacgaatcctctgaagaaacaagaacccaaagacctaaccgtg

SEQ ID NO: 13574 - DNA, 236 bp, Glycine max
atgtgtcttgatagaagggtacataggaatgtacgtactggttacactcataactcactagggcggatatgtagtgattgcagtctggtgattgatcaaatgctcatgacgatgtctgtaggacacatgattggagatcattgcgctagtaccatagataggacgagctcttgagcactacgatgatcttgtaggatgttctgctacgtctcctcattaaacatgatcttatgttt

SEQ ID NO: 13575 - DNA, 287 bp, Glycine max
  modified_base (15)..(15): a, c, g, t, unknown, or other
caagaacacaacatnagttactttttctcttcagctctttcttcgcttttctacacttctgctttgggctgaatttgtagataatgctgtgcaaatgtgtggataaacattcttttggtgaatgcaactgtctcggcacaggtgtaaaaaaaaaaaacaaacaaaaaaaaaaataataaaaaaagatacacaaaaaaaaaaaaattactgaaaggacgcataaccatataacaaggtaccaaatcaaagaaacgataccataaacaaaaaagatggcggcaatttta

SEQ ID NO: 13576 - DNA, 409 bp, Glycine max
ccactggcaacctcaagcgcaggagcgactctgccggttcccaacgtgaggactttcgctgcttaagatcgagaaagaatttagaacagggtaatgataaggcaaatgaagatgactcagtgaagataaatgatgacgtggctgcggcggttgttgattgcgatgtgataacaccggaatccaaagcggaaaactcaggattcaatttaaaccttatagcagttaactctgactccgactccgcttttagggtttccaccggcaaccggaagcgcaagattcactcaaccggttccggatgcgagggttttctcaacaaaagaccggggaagaaggctgtcaagagagcaatgacaaacgattcagaagaacaaagtaataataacgcaaatgatgatgatgataatga

SEQ ID NO: 13577 - DNA, 378 bp, Glycine max
ggggaattcatgcgatcaatgatgggatactactaccctttaggtatctgcgctttgaacgggggaggatgcgctgagtatcaagtttgctaggatggaattgaccgcgcggcacgatgctttagttggctgtcacaattgttaatggattgtattatgaatctttgatatgctatacatgattgacctgatcgaacatttacgtgcttatgattggatcgacaagctaggaacgcacctgataggtgtaagaatcaaggatcctgcattgggatctacatctacagatgatgagttcaggcataagagcatcatgtggagataccatcgtggacaatgttctgggatcacaaagtgatcatatgatgggtatgaata

SEQ ID NO: 13578 - DNA, 448 bp, Glycine max
gtctgtgtttgtttccactttgcaaatgagtgtgtacccaggaatctcttgattgagaaagtgtgttagggtaagagttgtgtcgtgtccacgagacactgggagaaagaaagtgtgtgtgagttgttgtaaactgaattttcatttttctttagccatgagcacacttgttcgcaacaccaccctcaccttcagccgcagaaacagatacgagcttcttggtttgcagggcaaagacaagatggtcaagtccatcagctacagacgcagaagggcaaagcaaaggcaaatctttctcacaacctacaagttatcttctttgaatagtaacacttttggggagccgacacaaaagcctaagctgaagctgaagaaggttgctgttaaggttaagaagattgtggcctcggttttgatgttcatgcgagttggttcttttaggtcatgc

SEQ ID NO: 13579 - DNA, 331 bp, Glycine max
gtattgtctgtgaactattaatgagttatgttttgttgatcggactcgtcttccctctcttgatcaagaaactactcattatcttggtcataggcttattcatgcttgcaataccatgctcaactattatcctatacctacgaatccttagttggggcatacaacgctcactgcagtactcatgacttatgtcatcatcaccaaccacctgatcatcatgcttcgcaacgacggtggatgcgatgaggaagatgttaacaaggcatgcaaacgttcacaggattagcgttctccttgcgtgaaggatatcatggattaggcacacacacat

SEQ ID NO: 13580 - DNA, 383 bp, Glycine max
cccacgcgtccgcccacgcgtccggtggggcttgctcaaagctattgaccgatagatgaacatggagcaaccagaagtttattgccaacagtgacctctcagttgttgctgtactagtctgtggtcattcatatcatgcagaatgtttagaggctatgacatcagaggcagataggtatgatccagcatgtccaatttgtatggttggagataagaacttgtcaaagttgttgtccagaaaaggtcttcgggctgaatcagagatgaaggccaagaaccacaagatatccagaaaccgtgtagttgatagctaccttgatggtggttttgatgtttttgatcgtcaaaaagatatagatttgagaggaaaagtgtcaaaaatg

SEQ ID NO: 13581 - DNA, 441 bp, Glycine max
gccacgcgttcgcattgatctatctaggtgctctctctaaatctaacgatttcgtcatccgacagcgatctctgcgtctacatgatcgacatgaacgctcccattttctaaacctcagagagggatccagctaacagttgcttacggctgaaaagttgcttgcccacagatctgatgcgcatacgtgcgaaagccattataacgcatttaatggcagttcacggtgacgatgaccctgcggagatggatgcatccaacctatggacgatcaacacctacgaagctgtcggcaacggtggcaccttggaccgaatgcacaatggccaccgcctattgctcactggttcagcggagctagctaagtgccggattgtgataggagactgcgacggacctatgctggctatggaaacagtaacgagcatggagattaaactctat

SEQ ID NO: 13582 - DNA, 439 bp, Glycine max
ggaaaagttacggtctaagaaagggctgcgttaataactatttaagagtctcttaactagagaaaggcaaactcatatatgagtaaattcatttcatttgacagaacaatcaaactcaccctgatcctatcataccttattacaatcctcactgaagacacatggacacatatatcgcctttcacggtttccagacaatcaatcatagccattagcaaccatcccatcataaaagataaaacattattttctgaagatgaaaaagacatatgtacgtattaataattatatgtaataattaattattgtgtatcacaagtttataaactgatatttcattatcttaaaagaaatatcaatcatcatatacgtgactttgtgcggataagtatgagaaactgatcgaaacgtgtcacatgatgatagatggattaacaca

SEQ ID NO: 13583 - DNA, 434 bp, Glycine max
cccacgcgtccggaagtccaaaagaatattgaggggcttgaagactctcttcttcttgatgactatggttatatcgcttcttcttttctccgccccggttctccttgttattgccgatgcacttgttccttctgctctgctctcctcgctttctcaatcttctttctccatggaaactctcgcttcccatttccacaactacgattttcgatactctctcattgatattccccttgtgtcaataatacgatccttcatcatcttctgtaagtacatatactcaaattcacagtagtaaattgaaatcagtagcggaacatgtaattatatgaaaagttcgtcaccaaaatttggtgattctagaattagtgaaggaaattaagtttccgtcgctaaatttggtcgcctaattcattatttttctagtattaagt

SEQ ID NO: 13584 - DNA, 433 bp, Glycine max
ccccaccaaaactcaacacaacaacatcactcttacagcttccgaaccctccatcatggccgtgtcaagtccacacatacaaagattcctcttatgcaagcttcatagccgctccaccggcaagaacagacacagaaacagcttcaccggcacaaccaccaccaggagcagttgctgctctgccatagccattgatgctccgtcgtctttgaccgaagtgcccggcataagatgggggtccatagccttgcaaggtcttcgtgaagagatggaagatgatattattggtcgacctgagggccttcaaggcttcacttttgcagctgtgtttgatggccatggagggttttcttctgtcgagttcctcagtgccaactacagggatgagctgtacaaggagtgtgttgaagctttacaaggtgggttactatta

SEQ ID NO: 13585 - DNA, 444 bp, Glycine max
aaggttaaaacgttacgtttaaacctctctgcattgcattcgcatatgatccgttaacgtgagcaacaacgatggatgattcgaagcagcagcagcaacgaaaaaaaaactaccgaaagagaagcgctccaacagacgaagatgaacttcctcaatctcaaagtaacaatgaatccgacgacgaacgagaaagaagaatggcattggaggaaattaagctccttcagaagcagcgggaaaggaaatcgggaattccagcaaaccctagtttgcaggtgcagagtggaaccggcggcggtttagctgctaaagccgccgaaaagaacgatggcgatggcggcgacaaggacgagctcgttcttcaagacaccttcgctcaagagaccgctgttatggatgaagaccccaatatggtgaattatatcgagcacgagttagcgaaga

SEQ ID NO: 13586 - DNA, 331 bp, Glycine max
cccacgcgtgcgcccacgcgtccgatataatactagaaattaagttagtagtaacttgaggttagttgctataatgccccctgataaattttacctcaaaacgcaactttctccgtgcagtttcacccgtcacaacacactcgagctttttgctgtaaaaggccggtgctggaattgtgttcccttctctgttccttgttaatagcgtttgtctatataggaaaaatccaatagaagtgaaaaaaaggttgagaaagtagaaaaaaaataagacatgtgatctgtgaaatagtttgagagaaaaagaatggtgcagcaaaataagcaaatg

SEQ ID NO: 13587 - DNA, 440 bp, Glycine max
aaaactgttcatgtgctttttttacccaatggcttaagctttcgtgatggttggttgatagtagactttattattgacccaagggaatttgtttttcaattaatagcttccatatcatgtatagaagttctctttcttgtatagtatctgatgtttttgtaaaaaatggtttccttggagcacaggtgtgacgatcgaattcataagattcaaacaattaaaatgatggaaggaatcctcatttgtgtggctcctcattgtctcaagtctttcttgaagaaagctgattttgaatctcatatccaagacagccacggcagccttcttcgacccaatgcagataaagaagatggaaatgagtcggaggcacagagtgttaggcaatcaacggcttcagattccactgctcgcggtccccaaagaccagttttttctcctgg

SEQ ID NO: 13588 - DNA, 78 bp, Glycine max
aaaaaaaaggaaaaacaaaaaaaaggtattaaaatttaaaaaaaaaaaaaaaaacccaggcgtcctgccacgcttccg

SEQ ID NO: 13589 - DNA, 385 bp, Glycine max
gcaggttttgatcaatgggttacaccattttgtgtcgctgaatgtgaagcccaagctgcaaatggttgagactttcatcaaggcttactaccttcccgagacagaatatgtgcactgggcacgagcacacccggaatacagtaaaagccaggttgttggactggtcaaccttgttgccactatgaaaggttggaagaggaaaaccaggttggacatactagaaaagattgaatgagcatgtcttttgttgtgtatcaagtcaggcaaatagaatcttctgctctttttcccctttgtctttcttttttggcagagcttcgtgtaaaggtagtgtatattgcttggcatttgatcccctattaattatggagtattttccaaatct

SEQ ID NO: 13590 - DNA, 371 bp, Glycine max
  modified_base (136)..(136): a, c, g, t, unknown, or other
  modified_base (345)..(345): a, c, g, t, unknown, or other
cttctttgtttggcttttgaagtttgaacagtatttgcctatttggtttgccgctccgaatccggatacactcactgttggtgactcataaaggcaccgtctttggattctcttccacttcgtctctgcgacgcanaaatgggtcgaaaacgagcttccaaaaacagcgacagggttcaagcgttgcctactgttgtggaaccacagccttccaatggaaacatacaactgccaagggcactagaatctcagcttgaaatcccactccctgggcttacctcaccgaagcatccaaatttgttggtgggtagagcggaaatgcgtcatgcaaaaaagcccgcgcangagcaagtgaaccaagaccatgggca

SEQ ID NO: 13591 - DNA, 434 bp, Glycine max
ctccctcctcatcccttctctactccattattcacacaacttgcaactcttcccggatccgcaacgccatacctcagatctgtacgtcgtcgtttctatctacctcttaccgtttccgttcaggattaataatttagatcccctgatgttgcaacagaacaaggaatcttcttagattctttttctgcgtttattagcgtttcacaaatagagagagagaaacagaaacagaaacagaagaagaaacttttcttatttatatacagtctctgattgatcggtttttcggaaactctttttccgtgaaatccacgcgcgcgcttcggttatggatttggacgatttccgatccgtattggacaccgcgggcgtcgacgtgtggatgttcatcgacgccgcaatcgccgtcgcctccgcggattccgccggtgagc

SEQ ID NO: 13592 - DNA, 449 bp, Glycine max
gcccgattccagattgcgaaattccgatggataaaacggtgaaagacaactcagcgtggagcgacatcgttttgcagggggtcatggttctggtgatggtcctctcctacttcttgatgcacgacgtgcccaagaagctgtgggccaagctccgtctaagcaaccgggccgacatccaagccaagcgccacttcgtccaaggggcccagctcctggcccgggcccgcgcctgcaagtccaaggccctcgccaaggaggcccaggcccaggctcagcgcgccatcgccctctacccgagcgactccgagccgcacctgctcaaggccctcgacttagacttcctgggcctacgctccgctgcgctggactcgctcgacgaggcgctctaccccgccggcgcgaagtccctctcggactcggagcgcggcgacgcgctcctcaagcgcgcc

SEQ ID NO: 13593 - DNA, 197 bp, Glycine max
accctttcttaggttataggagggaactcatgaatccagaaaaatttgtcccaaatttgggggaatgtttttgggtgattttctattgtaggaaaatgaatacataacacaagttcaattgagtcacaaaatgtggttttactctagcccattatgaatgttaattacaaaaaaagaagaaaaaaatcttttatttt

SEQ ID NO: 13594 - DNA, 432 bp, Glycine max
cttgaagggtaagtggcatattgctgatagaaggaattaaaacataaaaactgcagtaaccaaaaaccaaacttataaaacatagggaccaaaaggtccaaaaccaaatttgagtagactatagggataaaaaatgtatttaaagtttaaacctataatttatattcacctctctatattttagaagtatgtgggtgtatgttagaaaactattggcctgtttgttttaaagttgggtagaattataggcgttaacatactcagcataattgggatatgtattcaaattactgtcacaaatttttgcgcttggaacatgtgcagtgtgggaaattgattcttgggtgtaaaacaagtgggtgtatttagcaatccccacccctcttcctcttcccccaaaatgctaaaacacaaactactaaatctttcagt

SEQ ID NO: 13595 - DNA, 441 bp, Glycine max
gcattccaatgtcctggttttcaaaataagaattggagtttttctttttgacactagtatgggggtgttctgtttgtcctctagagtctagacgtaggttggttttcttgagattgacaatacttggttatctaataggatgcatcgtaagaatggacagtttgcatcattgaaggaagactacaaatctcctgctgaaaattgggattcaagcaatggtactccttgcccagactctactgagcgtagatgccagcattgtggaattagtgagaagtctactccagctatgcgtcgaggaccagcaggtccaagatctctgtgcaatgcctgtgggctcatgtgggcaaataagggaactctgagagatctcagcaaagcaggaaggattgcttttgaacaaaatgaactggatacttcagctgatataaagccttcaac

SEQ ID NO: 13596 - DNA, 439 bp, Glycine max
ccacgacccgcgacggcggtggtgtacgaagagagcgagagcaggaggtgagcggcgactgtgtccgactacagatatcttcaccacaacagataaaatgaggtacatgaagcccttgccattgtttcatgatttgaagaatacaactcctcagcgcggaaggttgcttggtttggatgtcggggataaatatgttggccttgctctttctgactttgataacaatattgcttcacctttcaacgttctcgtcaggaagaagacaaatattagtttaatggcttctgatttagagagtctgattgctaaatattccttgaagggctttgttattggcatcccttttgacaaacatcaagtgtcttctgatgctatgcaagtgaaggtcttcattgataacctctgtagaacaaaaatgcttgaaggtgtaaagtataca

SEQ ID NO: 13597 - DNA, 338 bp, Glycine max
cccacgcgtccgcccacgcgttcgaaacaaaaccctaacttgtgattttgaagatggggcgaagaagcatgcccacgctgaagaggagggagttgctccgcttacttcaccaacactatccgattccgactctgattactaggactcttcagccgatgatcaccacgaatcttctgtctggctggattctcaatcccgatccgaattagaagacgcttcacctgaaaatggtaactcctgactcgtaaaatctggagcaaatgaatcatctcaatacgacgacactgttaatggacaagacggttgtagtgagagctctgatctgcatctggaatgag

SEQ ID NO: 13598 - DNA, 327 bp, Glycine max
ggagaaccaccggtgaagccctaacgctctggtctactgctccgatcctgttaccgtgcgtctggaacccggagacgcgggtacctacttctactacctcatggagaaagaagcgcttcttctcagaacctccaacgggcttctcttgctccacaacgtcgacgacgccttccacgctacgcaagtcgatggcaagctcgactgcagcgtcaatgcagatcacctcagccctgaccgaaaactactccacgtaaccaccggtttcgggcaccttatggtcatgactcacgattgcgacatgttgtacgaaacatgactgcacgatga

SEQ ID NO: 13599 - DNA, 430 bp, Glycine max
tacccactttcccttcttcttcttcttggtcaatttgggttttctcaaaagtgaaaagcgaggtgcgtcactgccacaatcaccacttagatcagtgatatacacacccatctcagaaaccccacaagaacaaaaactcagaactcttgagtgatagacttcgaatgaaatcctgtttttcattagtgagattcaattgaagtgaagtgattattcactggaaaacttatttttcatacaactgaagctgttagatttgttttaactacacaagtttgttggatctttgagcatggctgggaatcaagatcagttcgagatcaagtttcggttgactgatggttctgatattggccccaaaagttttcctgcagctactagtattgcaacattaaaagagagtgttcttgctcagtggccaaaagacaag

SEQ ID NO: 13600 - DNA, 431 bp, Glycine max
gccttttctgccccataagattgaacaggatgatgatcatatcaaaacattccagtcgtgggattcagataaaacatccagaaatggtgatgtgaaactgtttgggaagatactaaccaatccttcaaccacacagaaacctaatgtgggtgctaaagggagtgaagaaaatggcacccatcatcctaagttaagcagcaagtcttctaatctgaaatttactggccatcatagtgctgatggaaatttgaaaattttgaagtttgaccataatgattatgttggccttgaaaatgttcttgaaaatgttcccatgaggagttatggttattgggatgggaaccgaatacagactggtctctcgacattgcctgattctgccatcttgctagcaaagtatcctgctgccttcagtaattatcccacatctt

SEQ ID NO: 13601 - DNA, 336 bp, Glycine max
gttcgcagtggcattgtgtacaacgtcgtcgttcttcccttcccgttttgaaatgggcagggcaaagcagcttcagcttccacctctcctttcaatgtcactgtcgtcgaagctaccgttgcatttctccggcaatgccatattcaaccgcaaccacccaaccatgttcaaaattcgagcctcaaactcttcatccaaactcgtcttattgagctccactatcgtcgtcacaacagcggtagcgaatcgcgtgctctacaaattggcccttgttcccatgaaagagtacccctttgttctcgctcaggtcataactcttgggtatgttggtatata

SEQ ID NO: 13602 - DNA, 442 bp, Glycine max
ctttgagcttcaatgaggtccttcaatggtgattttccaccatggagatgcagcagaagacgaaaggagaagaggtgagaggaggcgtcatctactagggaataagccatggaagaagaagcttcaccacaaagaatgtgccttggataagaagcttgaagaggatgctttaatggaggaaaagaaagagagaaggggggagcacgaaattgaaggaataaaagagggagagaagtggaacttcgaagtgtgtctcataagactttcattcatcaaagttacaacaagtgttacacatgcttctatttatagactaggtagcttccttgagaaactttcttgagaaaacttccttgagaagcttctttgagaagctaaaccttagctacacacacccctctaataactaagctcacctcagtctcgtgctgtccacataaca

SEQ ID NO: 13603 - DNA, 301 bp, Glycine max
tccacgcgtccgaccacgcgtccgaaaaaaaaacaactacaaaaaaaaaaaaaaacggggtaccggacaatctagacgatcgaatcttaggctcacatgctttcgacgtcataactactcaatctgattcctaaattcatttacctggccgtcattctacaagattaactctgcattaaacccttgcgtgacccaacagcatcgaattactgaaattgccatttacttcagctagcgttaaaacgaatacgccttaaccgatattccttgccaacagttacgcagtctcaattgcgaatga

SEQ ID NO: 13604 - DNA, 433 bp, Glycine max
cccacgcgtccgcaaatttcctttgttgtgttcctcacacacatgagtgtaggaacaacagcgtttgggcattgttatgatggagaaccagaatctttctttgccaccccacgtggacgcatctcgaccgtcccttgggttccctttgggcactgtccttctcttgatcatcatcttcaccttcagtggcgtcctctcttgctgctaccattgggatagggtccgttccttccgtcgttctttctctcattccgacccccaaatgccttcctcacccaccaattctaagcattccaaggaatcgaaggaaaacagggggcaaagcttgccagtgttgatgccaggggatgaggtgccaaagttcatagccatgccgtgtccgtgccagccttcaagaccagaaaacatcgttgtcaccgtcgaaatggagaag

SEQ ID NO: 13605 - DNA, 429 bp, Glycine max
gattcctactagagattactgttttgctgcttcattgaaggacattttccgtgctgtggaggtcatacatgaaaatgcattgtctggacgaactacatatgtccattgcaaagctggacgtggtcgtagcacgactattgttatttgttatctggtgcaccacaaaatgatgacacctgatgctgcatattcttatgtgaaatcaattcgaccaagggtgcttctagcttcctctcagtggcaagctgtccaagaatactactaccatcttatggtgaggaggaccgttggatgtgctcctacagccaatctatttgtaaaaacttctcaggtggcagcaggttcacgagatcttgtgatgtttgatgacaattctgtagtcatggtaacagagtcagatctagaaggttacaacccaagtagtcaatc

SEQ ID NO: 13606 - DNA, 383 bp, Glycine max
agataaattgaagaatgtatcgtcttcatctgaaaatacgaatggctgcacagaggattctgccttgtcaagtgacaagtctgcaccttcactctctggcagcaccaaagtggtttctgactcaagtaacacgtattcaactgcagtagaacgggtcgttgtttactcacgcaagaccaatgtggaaattgaagatggtggcactatattgccgattagcgatgacaggtgggttgcttactcatattctcattgagatagttggaacagttgcaggctctcctgtgtcatattttgcgtctctctccgaattgatttgtatagaaggatttgactcccggtaaatttagaaaacaaaacgtggaacttgtaacctattgatt

SEQ ID NO: 13607 - DNA, 439 bp, Glycine max
  modified_base (415)..(415): a, c, g, t, unknown, or other
ctttggtaagccagaaaacgaggttgtgacatagttcttgaggaagcattattgcagtatgagacgctgatgagagattgttctcactgagattactattttatagtggagagttctcagaatcgtgctaatgtttatggtttgagcatgtccatgggtgaccctaatcaggtatagttgtattgtatgatatataataaactttctggtaggttagtttttatgagatcttattatttgtttcactgtttcttgaaagcaaaggcaatctctaatgatgtccaaaatgtttggaatatgcttaggatttgaatcctcaaactatatatatgtcctcaagtcaaaaaaattgggcatctacttgtgctctgtaaagacatctcctcatgatgttttattcatttagatctaattngtggaaaaaataataaattaaaaa

SEQ ID NO: 13608 - DNA, 167 bp, Glycine max
ggaatttgtgttttctttcgcttgtttgtttgtttaattcaataaaggaaattaggcgtgactcttgttgagtatgctctgcctatttgaaaatttccacacctcttttaattgtcgtaatgatgtgtgaagtgtgtgttattttaaaaaaaaaaaaaacaaataaa

SEQ ID NO: 13609 - DNA, 371 bp, Glycine max
cgcacgcgtccgcccactcttccctcttttctttctttcatccccaaatcggaaccgaaattcccaccttcaactttctcccccaaatcgaccaccaccactgtcaagcccattcatttatattttattcgtatatatacatacagagagtgagtgagagagagagtgggaagaatggattcggatcaaggcaagcttttcatcggtgggatttcatgggatacgacggaggacaagctcaaggagcatttcggtaactacggcgacgttttgagcacttccgtcatgcgggagaagaacactgggaagccaaggggctttggtttcgtcgtttttgcggatcctaacattctagatagggttttggaaga

SEQ ID NO: 13610 - DNA, 445 bp, Glycine max
gtgaaatgaaaggatgatatggtgatgtgtatggtctctgaattcgaagacagaggaagaagggaaataagataggaagggtatagaccaaattctcattaaaatttgtcaatcaatacatggccaaatatatctcagtcacatgctcactattctaactaactgcccaaaggaatctaagaattgatcccctctaacagaatacatgataagagccttctagaataagctgagtcactctccctattattacaatatcagatatctaaaagctaatgataaagcacgtaatccttcatctttttcggtgtaagaataatccttttgggcctcaactctgcttcagtggcaatccgtccactctcctcaatggcctgtacttgacaaatgggctcagtcatagcatgtggaaaaaatataatctatagattctaatcaatttaaa

SEQ ID NO: 13611 - DNA, 67 bp, Glycine max
cccacgcgtccgcccacgcgtccgaaaaaaataaaaaaaaaaaaaaaaaaaaaaaaaaaagggggag

SEQ ID NO: 13612 - DNA, 263 bp, Glycine max
cccacgcgtccgggattgtggaaatccatggtgcaagtcactaccatacaaaggtaaatggttatatcatacttggagaaatttcagctgctcggacccattggaaaattcaagcagcaagtagtactgagaatattcactttatagtttatatatatgtataatcttgtatatttattgaattattaattgttacaaatattatatgtcaaatgtatataacgtgtccacattttattaaaatgtaacattcacagtttaaa

SEQ ID NO: 13613 - DNA, 430 bp, Glycine max
cccacgcgtccgcccacgcgtccgcttattttgtttttagtatttggtttttgtattttataaccctagttttgccatcagagacatttgaatatgttaggattgatgatttttcttgaatcctgattgggaacatcaacactgttgcgccttgagtcgattcgcgtctctttttttttttttttcattttttgtgttaatttgtggctgatttattttgcgttaatatctaattggatgctttgaattgataatttgtcgtacgaatttccttaaattgatctcggatctttgttttccacattatataacctttggtaattagattttagaaatttgcaaattaaatagaggaagtggagaaattctattagtaattgtcttttaaatcagttatggcggtaagagaaatgaaacaacacactctttg

SEQ ID NO: 13614 - DNA, 439 bp, Glycine max
  modified_base (378)..(378): a, c, g, t, unknown, or other
cccacgcgtccgctctagtaagtaaggttattgcttaatgaggaatacttttgctttcctttttgatggaaagaaatcttacttctagggaataagtctacttttatttttcgacaaatattaatatttctagcatgatgagagattatttggttattatgaagacattataatttttatttatagtctattcctagtttaaatggaaaacagagtttgcgtttacatggtaggtaatttacagtttacaattgcatatagttgtatgtgaatgctaaatcataaaacgcttatttcttgattcatgggggttttcacacttggtgtttgatggagttgtatgtagcagtgatactttctgaattattgacagattangaggaagatagacttattcgtattacagagtaaaaggaaaactcatactgaaaggctgatt

SEQ ID NO: 13615 - DNA, 285 bp, Glycine max
acgtacgcgtacgcattcgcaattgtggacgcccatggtgcaagtcactaccatacaagggggaatggttatcgcatacttggcgaaatctcagctgctctgactcatcgtggaatacaatcatcaccttgcactgaaagtatacactgcatctaacatatatctgtatactcttgcatatttatcgaacgatcactggcatcaaatatcatatgccaaacgtgtataacatgatcacagctgattcaaacgccacactgacacattgtcttcaaagaaagatga

SEQ ID NO: 13616 - DNA, 379 bp, Glycine max
ggttttctctattttgggtagctgggccaacttcttgaccctgttctacataggtaatgaagtggttctttatcatttgacatttactgccatggaggttctaatattaacttgaattttatatactgcgatgtaatgtatttctatgttttcgtgaaacagcttttgttttgctgcacactgtgcctgtgctttatgagaaatatgaagatcatgtagactcttttggtgggaaggcaattgccgagattaagaagcaatatgcagtgtttgatgcgaatgtgttgagcaagatacccagaggacctttgaaagataaaaagaaagattgaagtggcactagattctgacaaatatgttttagtggggtttcatgaat

SEQ ID NO: 13617 - DNA, 410 bp, Glycine max
  modified_base (355)..(355): a, c, g, t, unknown, or other
cggagttgaagccagagtggttggtggagatagccccccactattaccagcttaaggatggtgaagactcatattcgaagaaaatgcctcgtggagcaggacttccatcgtaggacagattgttggcatctttacatatgctttgggaggagaaagtacttttatcaagtcattttggggggataaaaaagtgtcattcttaaacatgggagacgtattgtaaatattttttcgccgtaatttatactatagcatgcatattatatcttgttgaaattagcttagcctgtagtaaccctcacttgctatagtagctctcccttggtgagtggtgatatcatttacatacaaattntgtcatctaagtttcagtttcaatttttttgtaacaagtgccatctataattcaa

SEQ ID NO: 13618 - DNA, 387 bp, Glycine max
ggtggtgcaaaattatcttaaaaggactggtcgtgaagagtgggcaagacagtttcgtggagctgctaagcagaaggatgatactgccatgatgaagattatgtcaaattacggtgaggaagtagttacagctttaggaagtgaagtagataggttagagaaggagatccagaatcttgtgcctggtattcggcatgttgatattgaggcccacaatccttcaacagaaacaaccttgtcaagtgaaagttttcaataaaatcgacactctcttcacattcatttatattatcaaagcatttatgaaaaattgatttgggtttatccagtatcacgagttctgaagaaatccggagttgagttacatgcctcgggttgagtcgacac

SEQ ID NO: 13619 - DNA, 253 bp, Glycine max
atctgcatcaatcaaccatcatcataatcatgtcttgctgtttatcttgctgcgcgtcttggacctgtggtctctggaacttcacttgatcttgcatctcccaaaaatccgctagaatcgggtactggggtctcttcggtgtctctctcggtcgttcgtggatcctcacagaagttggagcacccctcttggagaaattcccatggataggtggcacattcgataccaacacaacggaatggtatcaagcaca

SEQ ID NO: 13620 - DNA, 280 bp, Glycine max
gctcagtgctcctgtcaacatcctcaatcacgagcagaacgcccaatccatgaaattagggaagtgtgagaataagggtttgaaacaattggagttgaattctttaacctcaagtaatcagaataataatggtctggttgcaaagtttacaagtaatgcttctacagctaatgctcctgcagtagagtccaagcccagagagatggtgccaaagaacatgttcaaacatgccgatactaatggagttattagtggaaaagttgctaatggaaaagtcacg

SEQ ID NO: 13621 - DNA, 155 bp, Glycine max
cccactcgtcctcccactcgtcctaaaaaaaaaaaaaaaaaaaaaaaaaaaaaaaaaaacggacaatatcaaaaactaataactcacatacacatacatacaaaatattaaaataattatataaagtaacctatattaaattaactctaccaaca

SEQ ID NO: 13622 - DNA, 302 bp, Glycine max
  modified_base (60)..(60): a, c, g, t, unknown, or other
tctgcctgcgaatgcctacttcaactatcaggttatctggagaatcaagcaaatgtagcntatgccttgttgcggtgaagcattcagtctacggctttgagaactggagttatgttttataaccttggtgcctttttgcttgagcttggtctcacaaccatgacactgcttttggttcaaacatcttcttaagctgtatttaatggtggtcctacagtttttatattcccaaatggtcctatccatatcatggttcagtccctttctttttaacctgtggcattctttgttgatttccctgt

SEQ ID NO: 13623 - DNA, 453 bp, Glycine max
ctgaaggcaaaggagagggtgttaagtctgaaactgacagtacatctttaaaggttttgcgtccatggatgattacatcaggtatgaatcttacaaaggaacaacgtggagaggtgaagcaagaaacaaagatggatgggacttcaacttccacagcagcacagtacacagatgacaagaagtcaacaattggacatgacaacaatcaaaatatacaggatgagtatattaaggcttattatgctgctttacttaaacaacaacacgaattggaagaagctgcaaaaaaacaattgtcaaatacacttgctgctgctaatccttctagcagtacttccattcgccaggttggcatgaaatcaaaacgtgaggaagacgatgatgatactgaatgggaggaagctccaattgcaggcaatggaaatggaggttacacggttgatttgaatgttg

SEQ ID NO: 13624 - DNA, 434 bp, Glycine max
gtcttagacacatatatggctcgacttgtattgttcttctcagcattttctcttgtcctgctaaattctactatcacggcacaagtcccagcaccaccatctccttctacaattccatccccaatgtctcctttggcaccttctacaccaccaccgtcccgttctcttcctgctcctccaacgtctcttacgccaccacttccatctacagattccgctcccactcctccaccacctattggatttggaggaggtggtggaagtggaattggaaaaggtggtggtggctcaggcgttggaataggctcaggaagtggtagtgtggcgttcaaggtggtggtggacaaggacgtggtgttgggataggaagtggcgttggcagtggtaccggctatggtggcggtggaactggcattggcagtggtgacagtagt

SEQ ID NO: 13625 - DNA, 447 bp, Glycine max
gcaagaagcatataaaggtcaaattgttggaattatctactgtcacgtggccactactcagagagtcgggcaagaagtttgatgtgatatttactcctcaccatccgtatgctcgatggttggcagaaacaaatgcagtgaatgcaacattgccagaagtggtgctggttaggagaacccttgcttggataacaggaattatattgctcgtttcaacccttatggggatatgctacctcctgaatatgccgctcacaagggacacccttctatattctaatgtcaagcttgattaagcatggatgcgcaccaagacaaatcttttcaaccaacgaaggagaaccggtctgccgctgaagcttgtaattgggggagtctttttcttgatgcctctaatccgtgtgcatgattatattattggtatagcttttggtacttgtgtttaat

SEQ ID NO: 13626 - DNA, 366 bp, Glycine max
  modified_base (278)..(278): a, c, g, t, unknown, or other
  modified_base (330)..(330): a, c, g, t, unknown, or other
tcggccggcgaatgcctacttcaactatcagggcagctggagaatcaagcaaatgtaacggagcccttgttgcggtcaagcattcagtctaaggctttgagaactggagttttgttttataaccttggtgcctttttgcttgagcttggtcgcacaaccatgacactgcgtttgggtcaaacatcgtctgaagctgtagttaatggtgggcctgcagtttttatatccccaaatggtcctaaccatatcatggttcagccccttccttttcaacctgnggcaagctttggtgctgtccctgtgggagctgcacagtctaactcaagttangtagtggacttgttcaagctttttcccaagcgtata

SEQ ID NO: 13627 - DNA, 445 bp, Glycine max
cccacgcgttcgctcacgcgttcgcccactcgtccggcttggcttgcgataccataagagggactgtctattatacagtgagtgagtgagtgaccctttgatttgaagaagatgggagatatgggtcagaaggcccaagaagctaaggagaacacgaaaggggcggcccattctgcaaaccagaaagcccaagaaaagagtggtcaaactaaagaaaaggcctctgagataggccagtccaccaaggaagcggcccatggtgctactgaggctgtgaagacaaagactactactacccaacccagcatcgcatagaatacaatactagttaatttcttcaatatatagtttaaacactctatgttgttcaataagttgtggcttcgctcttatgtgcccaaaagagagcgtggaatgtactctactgtagagtttctattatcta

SEQ ID NO: 13628 - DNA, 325 bp, Glycine max
tcttcctcatacacatctatcgagaacaagactgcattttatctcaccatcccatatactgggactagatatatcatcagaggagaacatcttcaattcaccaagaattatcccaaaatcaatcttcttttcctcatcccatatatatccaagcatcagactaattttaaaagaactaaaattataaaacattcaaatcatcaaaacccgtcattattccataaacttatcaactcttaacattcaacttcacaatttaaaacaactttcattctcaacgtacatacaatcttttaacctgtaaactcaaattcgttgactccta

SEQ ID NO: 13629 - DNA, 372 bp, Glycine max
cccactcgttcgattccttctctctttctcctgcaacaacaaccatttaagggatttcgggatgcgtttctgcggtctgttgattgtgttggtttgttgagtgtggcgttaacgtaatttggttttgagtgaagatgattttgtgatgtggttgagtgagtggtttttgtagtggaaggtttgttacttttgttgttgttgttgttgttgtgttggtttattttgttgaagagttcggaacatagtcggcggacgagaaaaattggaatttttggatgggtaataaacttgggaggaggagacaagtggtagatgagaaatatacgaggccgcaagggttgtataatcataaagatgtggatcacaagaagc

SEQ ID NO: 13630 - DNA, 304 bp, Glycine max
cccacgcgtccgctagtgctttgttagttcacacactaagttctgaaaaatgagttccagagtctttcttattctacttatgttcatggccactatacttttgatctcctctgaggttgcacccgatgatgcataccagaattttgacaaaacagatgggaagcgtactgcaaatggggtagatgaaagcaaatattggcgtggtggctatggcgactatggtggttgtcgtggtggtggttggcgtggcggctatggatgctgtcgtggtggctatagtggtactcgtactagctatggtagc

SEQ ID NO: 13631 - DNA, 232 bp, Glycine max
ggggcggtccctgtcgtggtggtgccggttgtctctgaggaggttgccatcaaacctaagggcagccctaacaactaagaagaaaacttgctaaagcttctttacggttttaggtgttcgcaataaataaaacttcatgagatgtgtacttgcaataaaagtggaagtctctcttctcttgagatataaacgaataatagcgttatatatgtaaaaactatcattgttatcc

SEQ ID NO: 13632 - DNA, 469 bp, Glycine max
cccacgcgtccgcccacgcgtccgcccacgcgtccggcaaagcaaaaactactacgaggagctttcctccatacgaatcaaaggaggagagagagagagagagagagaggagacacagacacaaaggaaacggaaaaagcaacacacaaaaaaaaagaggtctgtgcctcctcttatatgtaatagctagtttccgagacaagaaaaaaaataaaagtaaaaagagaacatggattatgaaaacaacagttggatttgggagggggtaaactactacccgtgtgtgtttggcggtctaatggttacagcagccttgctgggcttgtcaaccagctactttggtgggattggggttccttatttatcgctgccatgttcctggtctaatttggggattttccaccagaaaaaatctgggaagaggcgcattcgggtgtacatggatggctgttttgatctgatgcattat

SEQ ID NO: 13633 - DNA, 427 bp, Glycine max
caattctcaatcttatgaagaacaacaaaatatagggtaattttccaccttcttcgctacggaccataccataagggccccctttcaacgcatgctttccctcccaaattcttcacctttctcccctctttcccttcatttttctattttcttacatgttgttgcatccgtgccaaaaggggtttgttcctgcacaattaaattcaaccccttaggctataaaaaaaaaagatttttcattttcatttctttggaaggtttcaataataagaagcccttgattctagaagaaaaacattgcctccatgtccacgattccaattcacagacctgaattttgtaccttattcttcaatgggtcttcaagcccttataaatgccccagaattactggctcatggatcattgccatggaattcaaattttc

SEQ ID NO: 13634 - DNA, 370 bp, Glycine max
gaaacacatgtatggtgaacaggaatccagctgatctcaccataccagaaacagggaatggctatatgatcagaggagaagatctgaaattcgagaagagttttcccaaaaacaagcctcgtttccccattccatatggatccaagcagcagaagaatttgaagggaactaaaatgaaagaacattcaaaacattgaaacccggcattattccataaactggtgaagtcttcacatggaacttgagaatggaaggtgactttcattctcagcgtagaaacaaacttttgacttggaaactgaaatttgttgactcggggaagggttgatcggatgtcatttcgaaaaccgagtgatacataaatcagtca

SEQ ID NO: 13635 - DNA, 435 bp, Glycine max
  modified_base (44)..(44): a, c, g, t, unknown, or other
  modified_base (169)..(169): a, c, g, t, unknown, or other
  modified_base (270)..(270): a, c, g, t, unknown, or other
  modified_base (358)..(358): a, c, g, t, unknown, or other
gtagtattgcagtttattctatcatatccttggtcaaataattntcttttcaattacaatgcaccgaatcccagaaacttatgttcatgaccatcctcaaggtcccaataacatttacttgaagacaaatttgagttgaccttacagcctagttccacctacatacacncttgatccttcaaagcctctcatagttccaatactggcaacaataatactcttgggcatctaaactatctccattctgtttttccccctttctttgcagtnggattgcgaggttttaaagaaattaaatgcgtttttatgtgctaaagagctaggtaaatatagaattcatctcacacatacttctttntactaccttttatcttttagattttattttgaaataatccttgttaatggagtaacttaattcgttgaggggttgtg

SEQ ID NO: 13636 - DNA, 181 bp, Glycine max
actctcaaatcaaacgtattcagcaatcagctcttatactcctgatttccttatccagggtaagtttctcagcaccctttgccaaaacatctaaccaaatcacacaaatcaaacttacaactcatactcaatcgaatcaactactctcatcaatatgcaaatatacaaattcatacagtct

SEQ ID NO: 13637 - DNA, 198 bp, Glycine max
tgtataatcatcaccactttatctatacataagacctgcctctaataacctggtacccaacggcctgactcttcaattctttttaagccaaatttttaattcctaaactggtgtttaaaaccgtataaaaaaaaatctaaaagacccttacgcatatatacaaaacaaaagataactgcatctgcatgggaagtgtat

SEQ ID NO: 13638 - DNA, 149 bp, Glycine max
taaaaaaaaaaaaaaaaaaaaaaaaaaaaattttacaaaaaaaaaaaaaacaaactaaggaacgcatacatacaaaaataaataactataatataaaatcacctaaatataaattcactatccatcattttacaacattaataactgat

SEQ ID NO: 13639 - DNA, 337 bp, Glycine max
aaaaaaagatgcgtattaatatgcattggtggcaacagcactaccgtggcagctaccgcggctaggccatgcatgcgcagcttccgccgcatcagaggccccgattgcggcattctgacaggctacgtcgcgttgagcaccgacatattgaccgagctatgcttcgctctcttcgacgacaaccctgcttactttatcctcatgctcgccctcatgcctttagccgttagcctctgcagaatgtgtttactccgcgagattcctgccgtcgacaccaacgaccacgaacagtctacttatgtctcggttgttaacgcggttgccgtagtcgtcagcg

SEQ ID NO: 13640 - DNA, 433 bp, Glycine max
cccacgcgtccgctctgtctctgtttttgttttcgcatacataaaggagtcctgcttcggcacacgaacaacaacaacgtaggttttgttagttccgtggataacaacaatggagccagtgttggacaaactcaacgcgtttgcgaaatccggccaggattttttcgacggacttttccgtcgccgcaatccggtatttgctatctctctctttctagcgtcttggggtttatgtgagttcttcagcctttttcttttactcgtaaatttcaggttgaaatccttaaacggttgcagagagaagcgttctctgatctcatgaaactgagagagcgtcaagataaggttgagcgggtgctttctttctaccagtcctcgaaagtgggtccctttcaagagaccaccactcacgtgagaggacaagtggatttct

SEQ ID NO: 13641 - DNA, 121 bp, Glycine max
gctagacgtaatctttgactgaatttggcaaagcccattcactaatcatcaccaatacctaggtgctcccaaaccacatcatcgatcatcagcgcgccagtatcacgaacctcaactaatc

SEQ ID NO: 13642 - DNA, 269 bp, Glycine max
tcgatggatattaagtgcttctgggctgctaccttaaagatgatcgacgatatactgggcagagatgcccttataacggttctatgagatatcctgaaactggctgacagatcttacgtccattgactcaggatccactgaaaggattttcccaacgtgacgatgacgctctgtcccagaatcttatctgagctaaaaaatttgttatatgacaaagcagttcttcagcatacattctagcgatcagatctggtgaacactttcattat

SEQ ID NO: 13643 - DNA, 282 bp, Glycine max
atttcattctggtatgcgtttggatggcgtacgaggtaatgccggatttcgacctgctcggggaggcaattttggtgttttaaggaatccacgcacacagacacctctgcagtatgctggagggattctttctggtccaatgcaatccatggttaatcagggaggaatgcaaagaaatagccctgatggagaaaggtggcatcgtgctactagcttccagcataggggtttaatttcatctacttctacttctcaaactcctttacagatgatgcacaaagc

SEQ ID NO: 13644 - DNA, 329 bp, Glycine max
gtttcgctagctcacacactaagttctgtataatgatttccaaaggttttcttatgctacgtatatccatggccactatacttatgatctcctctaatgctgcacccgatcacgcataccacaattttgacaaaacatattgcaagcgtattgcacttggtgccgatgaaagcatatattgtccttgcgcctatgtcaactatagcggttagcccattgagggatatcaatggccactaaccatcaagaagcttactcttgctgaatgttcacgttatctgaagcacctcgtatattcaatagacacagaatactatgtgtacaactat

SEQ ID NO: 13645 - DNA, 211 bp, Glycine max
ctccacagaccattccatccatttacatgccctcttttcagattcaacctgcagctcacataagctctcctcatcacaaaagacatctacccctcggcgcctcactcttctctaatcaatccctatatcatactttgcatggacagactatgcaagctctacctgatcttcaatgcacactgaaaccacttatgacaacactgataatcta

SEQ ID NO: 13646 - DNA, 332 bp, Glycine max
  modified_base (68)..(68): a, c, g, t, unknown, or other
  modified_base (71)..(71): a, c, g, t, unknown, or other
  modified_base (154)..(154): a, c, g, t, unknown, or other
cccacgcgtacgcaacaagttccctcaaaacaatgcatcagttcttctctgctgtcttccgcttgctnctncttacactgtgcagcaacgctcaaacagcacgacaagcgaacaacacgggcttcacgtgcaacttcacacgcacgtgcacgtnctacgccttctaccgggccaccgcccccaacttaccgacctggcctccatcggcgacctcttctcggtgagccgcctcatgatatcaaccccatccaacatctcctcttcttccctcaacacccctttactcccaaatacacccctcttggtccccttaacctgctcctgcaaccccg

SEQ ID NO: 13647 - DNA, 183 bp, Glycine max
tcggttatgctagttcacacactaagttctgaaaaatgagttccaaagtttttcttattctacgtatgttcatggtcactatacttttgatcttctatgaggttgcaccccatgatgcataccataattgtgacaaatcagacgggaatcctagtgctaatggttttaacgaaaccaaatatt

SEQ ID NO: 13648 - DNA, 455 bp, Glycine max
  modified_base (385)..(385): a, c, g, t, unknown, or other
gtcatcctgtccattgctgtgagaggttcggagaactattccaaaagtatgtctggctgtgactggacaatgcggatcatgagaagatcaacagtccaggctctggaaaggctcttcttaaagttacagaggataacattcggatgctgttagatgttgcttctgagcaggtaaatagggagttactgctgcagaagcatttttttgcattgctttcatctgtctggaaggtggcatcacatgttgaccgcaggcgaaatccattacccacctgcaatggtctctatttcgatcagagtttctatacttccattggccagccttcacaaaattccttgaagaaatcctctaaaaggatgacatttacaaatttagcccatagcangaagttagtagcagctgcacttgatgatatcacaactaggcaagtgaatgacaaagtcattctctctaac

SEQ ID NO: 13649 - DNA, 309 bp, Glycine max
tccatgtcgtttttgtcgtttccttttaatcaacatttcttcatttaggtttttgtggcgataatgtgatgatcacttggccatcatcaccttaacgaactcctcgtagtttatttggccatcgccatcaacatcggcctcgcgaatcatctcatcaacctcttcatcggtgagcttctccccgaggttggtcatcacatggcggagctcagcagcagagatgaacccattctggtccttgtcgaaaacccggaatgcctctttcagctcctcctcagaatcagtgtccttcatcttcctggccatgag

SEQ ID NO: 13650 - DNA, 421 bp, Glycine max
  modified_base (406)..(406): a, c, g, t, unknown, or other
cccacgcgttcggtgaatgtatacaaccttatatcatcagtataacttccatggaagcgagtcatgtgcttgaagcagtggtagatgcatgagggtcacatgttattgaggcttttctatgttcgggagcttctgggaaacagaagcgcagattggttacaaaactacaagggcattttggagaggttgctctcacctcatctggtgcttttaccattgaaaagtgcttcactgtcagtaatctgtcactaagagaggctatagtgtctgagatgttggctgtgcgaagtgatctttccaaggcatagcagggctcttacctattgaggaaactagatattgacggatatgctgcgaatcctgatcattggaggtcaaaacaagcattcaaagaatctacttatanagattttataccatg

SEQ ID NO: 13651 - DNA, 291 bp, Glycine max
gcactcgtacgcccacgcgtacgtccacgcttcctacagatttctcctcaagatgaacatagttctgaatcgccaatactgtaagtatctccatcttcaattaacaaaaattctacaacacaccaaaaaactacctcacattcttctatgctgaccatcataacataatccctaactcgtcaaccctctaaacctctgatcacctcatataagagatatatcgatcaaaccttcacactataaatcacaatattcaatgaccacacctgaaaagtctccaattcaatctgt

SEQ ID NO: 13652 - DNA, 428 bp, Glycine max
tcttcctcacaatcgaacgacaactcttactttaaatttctcctccagattaacatcattcggatggttaaaattccatactatctccatcttcacttatcaaatcttctacaatacaccaataaattatcttacattcttctatactgacactcataacataatccttaactcttcaacactctaatcctctattctcctctataatagatacatatatcaaaacttcacactatatatcacaatactcaaatttcacaccttacaaatatccaattcaatatgtatctcatgaaacatcgagttataccatctagaaatgtctaattcctcatgagaaccctataaaacaaacaatagataacttgtccaatgaaaataacacgaatcctattaagaaacatataacccatagacctatcatttac

SEQ ID NO: 13653 - DNA, 326 bp, Glycine max
cccacgcgtccgattacagagcattttccaacacgattacacgaccgaatcaaaccctctgtttctctccgaagctgcgtttaatatcttactcgccttagattgttcttctctttcattatactgttctcttttcgatttgagggaacagtacaagagtgtgaggatcggttaacccaactgcacaggtagtcactaaaataatggagtctcacgatgagactggatgccaagctcctgaacgccccattctttgcattaataattgtggcttctttggaagagcagctaccatgaacatgtgttccaagtgttacaaggacatg

SEQ ID NO: 13654 - DNA, 255 bp, Glycine max
ggcaaaacgaccgcgtcgagatcatccccaacggccaaaggcaccggaccacttccttttgtgtagccttcaccgacaccgagaggctcatcggagacgcgggaaaaaaccagtcggcatgaaccccgcagacaccgtctttgacgccaaagcgttaatcggtcgcagattctcagactcttcagttcaaaacgacatgaagctgtgggccgttaaagtcgtggctgggccctggcgacaaagcccatgatcgtg

SEQ ID NO: 13655 - DNA, 438 bp, Glycine max
ataacccaaactctcttttaaaaaaaaacccgatcacatagaaacagagaaagtgtgagtgtcggcgccgtagccctaccctctcttcatattattctattgcctttctttaactccctcactttttcagttttgaagcgcttccagtggcgtatttacggttatacccttcttgttatgatagcttccaatcggcgtcagccacagagccgaagctcttggcttccacacatattttcggtgctgtcgattgagatacaaagccgccaagccagccgagccaatcttcaaattccaactttacccctaccggttaatattctcctcttttaacggctatttcgatcatgccaaattcgaagaacaaccgtaacggacagggcgagcctcaccgccgggggaagttaacgaaaaaatcatcgtccttctacggtcact

SEQ ID NO: 13656 - DNA, 435 bp, Glycine max
attatcctatctctctcactcgaaacagttcatttcatcacaaccggaaaaccaaaccaggtcgggctgctcccgccgctgtttttcgccgctgtcgacgtctgtcccacctcaccgtggcggcgcgcgcgtcttcgatgggaaagtacatgaagaatgcgaatccgaatggagaactcgcgctcgtcgaatacacgcaccagcaacaccaccacctgctacatgggggtccgaacccgctccaaaaccctagcgcttaagaaatcgcacgcgcagcagcacgagctcgccgtcacctccgactcctacctccagctgctgagccgtcgacttcagaagccttcgattttggttcactctccgaagcgccctaagcacccgaaccctaaatccccaatccccgaacctgccaggctcggactcgcttcggagcgc

SEQ ID NO: 13657 - DNA, 273 bp, Glycine max
cccacgcgtccgctcaattttccgggaaaacccttcagaatggtttcccgggaaaataccgattggctcttcgattacggcttgatcgacgatattcccgttccggatgccacctttggcgtcaattcctccgtcttcacatggccccctaacgccctcgacgctccttccaatgtcggtgttgacattgatggctcattgggggattctgacggtctcaaagagtctggctcaaagaaaagagttaggtctgaatcatgtgctgcttctagc

SEQ ID NO: 13658 - DNA, 339 bp, Glycine max
  modified_base (310)..(310): a, c, g, t, unknown, or other
cccacgcgtccgcccacgcgtccgcttcattataaagctgcagatagaagttttaatttggaaaagttgccactacttcttagatgtaaattggattcaccttagcacatgctgtttagttttaacattcctttaggaacttccttccagctttagtacagaataattgccagttgcataggctaaatcagcattgcttgctcgaacgtcagtcagattcaacagataatataatgcagactcaggaatattttctcccggataagatggtacttcctttggcagatgaggccattgatcctcatatgcngtgctcacttgcttctgcctttgatgcat

SEQ ID NO: 13659 - DNA, 318 bp, Glycine max
gcggccacacctaccttcatatgaaactccatatcgacttttgcgacatgaccactaatcttggggtcagcagcacataacagagaggactacactaaaacgccatgaactatcatcatgtcatttatcttcatacccctactataaccctcgacacctatcctgctctaagactgaagccttacaatgacacccgtcatcttacatccctctttatagaccatatctgtcactatcatcaatctcatgataatatttattgacaacatgccatcaataacttctatcatcctagctacacttctcatggatttattc

SEQ ID NO: 13660 - DNA, 318 bp, Glycine max
caagtttgttgtcggagacaacaagaagaatgttagggtgacatcatttacggtcacgtgcgcttaggtgttgtgatgcgcggtgaaagctgagcaacccaactgcgaaagagtgccttatgtattcaacgtggactgtatggcgcgtttggaccctaccaattccggaaacgtacttcgggaactgcgtcatggctttgttggcttcggccaagcgagaagagcttttgctggaagaagcgtttctcaaaagcgttatacggataagccaggagttgaactggttagacggtgacgtgtcgaacggctcggacaaat

SEQ ID NO: 13661 - DNA, 447 bp, Glycine max
ggctttgtttatcacacaagataaggcctaatgtgttaggataactaatcttggggttgggagtgcataacagagagcagaacactatctggtcatgtactctcatcaggtgatttctgtatgatacccctactataacccttgtacacctattctgctttaggactgttgccttattttgttacccgtaagcttacatccctctttagagaccatagttgtcactatcatcaatcttggaatactatttattgagaacataccatctctaacttctgtgatgctttctacgcttctgatggatttattcttaatcttatacaaatttcaatggatctgcatatttttccaaaaaaaaataaataggtgctagttataggctaactaagaccatcatctttaaattatccagtgaacacccgcaagacccaactgtttgatagtgtc

SEQ ID NO: 13662 - DNA, 416 bp, Glycine max
ctaaactcttcatcaccataaccatgttttaactaacaacatcctctcacaccgtcctagtacgaaacctcaccaaccctttcactctctactccttcaaacccacattcatcaaatacgccacccaactccatactcaatccctgcccctcacccactcccaaaatctcctcttcaacttccacaaccttccctccaacctcacttaaaacttactcctacatgcccaatactagctctacaacttcaccttatcacccatcagcgtcatctaaattatccaccccttcaaggacaatctctccataatccataaagccaaatccgatctccacgctctgctccagatccgccctaaatactccgtcctctatctccacagcagaaccaccttccaaaacgccttcatcaccctc

SEQ ID NO: 13663 - DNA, 434 bp, Glycine max
attgtgttttcttacaattcatggagagtgaagagttgttgtgagaaggatgaagaatggaatggaaaagtgaagtttagagatggaagaagaaaaagcagcggcgtactacgacgagctggcccgtaagggcgagggagctgcgaggttcaagcaaggtctaggcttttcctcttcagcaccaaacgacgacgttccaaaaccctgctcctacttcctctccaaattcgtcaaagcctcctccgagtcggagaagcaagcgcagctccaatccatccacgacaagctcaagaaaaatccctcttccgagtctagggtttcgagcagcgacagaagcaagagcagagaaaaacgtaggaaaaggagcagaagcggagatagatacagggaaacgcggaggcgaagcatgagtagagagagacatagggatagtg

SEQ ID NO: 13664 - DNA, 250 bp, Glycine max
  modified_base (1)..(2): a, c, g, t, unknown, or other
nncgccacgcgttccgtagcagaggataaggttttgcagttgcttcgattttccttgttaagcggctttacaaggaatgagttatgaattatgatgcgaatggcaaaagcaattcatttctgatttcccgtatttagtaagaaagtgactggataagagaatgagtgctgagattggattcaacttatgctcctgaacctcacaaaatgtctggagcaactaccagtggccaaaagctctctatattttc

SEQ ID NO: 13665 - DNA, 300 bp, Glycine max
cccacgcgttcgactagctagtgttctataagttcacgggcagttctgaaaagggggttgcacggttttgcttgttgtagttatcttcatagcggctatacttctgatctctactgaggctgcacccaatgaatacgaaaattctaacaatatacatgggaagcatgcttcaaatgggttatatgatagccaatggggttacagttgttggggtggaccttgcaatcgccgctatgctgggccttattatggtggcggcttgagtgggccatattacggcagtcgttggggcctgccctt

SEQ ID NO: 13666 - DNA, 347 bp, Glycine max
  modified_base (319)..(319): a, c, g, t, unknown, or other
cgctttgtctcgcctcttaacgttacccaaggaggtttcggaggctgctgcggaggcgctggtgaacctgtcgcagaattcgagcctcgcggaagcgatggttggaattggtctggtcaaaacgacgatggatgttctgtacaagcccgagtgtagcattgctcgcttgcttgtcatgctgttggtcaacctcactcaactcgaagctggtgctgcttccttgcttcagactgaagatgagaaggtgcatggtttatatgttatgaagcttgtgagatcattttgtagaacctgccatgagagtaatgatgatgctttngaacatgttggatcaatacttgttaaca

SEQ ID NO: 13667 - DNA, 374 bp, Glycine max
actaactaactcttacaaccagactcacttactgaaatgttacaaaaggggtacgagcttaaatgagtgcataaaccacacaatatcttatctttgctacacatttatagtaactattcatactctaaaggggtatgctgtaaatgtgcatatcgtgctatcatatcacacattgtctatagagcatcctatcaagaattacttctctactgcaggacatcagtccttacgctctgccctgacatgcacacgacataaaaatgacctctcgcactatacgataagacgcgctattacagaacgactgctcctattcctgctccatagacatatagatgaccaatagatgctattggcttgcacatctacggtga

SEQ ID NO: 13668 - DNA, 424 bp, Glycine max
aataaaagagaaagagagagaaaaattgtcttcttgaaacaaaagttcaaaattttcctgtctggcattttctctttaattcaactttcaaatttttatcttttctcttattttctttccaccttaacaaatggatcctttattacttccctcaattttcttttaccataccaaaacatacgattaggttctttcaatactattctaaatagacgtaagaaactgcatattgtaaaagaagaaaaaagggaaattgagaattgagaattgagaagctaacacgtggaagagatgagggagagagcttcggatcggcgccaacaagactggacccagaaatcggagacggagaaggatttgagagcgtcagaaacagagggaagccactctctgatgaagtttatgtcggtgaggtagaaatcgt

SEQ ID NO: 13669 - DNA, 434 bp, Glycine max
gagcaaccaaacgcctcgcctactccttttaaagcaatccatcgatcgatgccgttgcagcacgcgtcactccaaagccgcgtgtcgttgtagagcgaaacggcgccgttttgagcaagtgggttttattgctgtgcctcctcagctcgattagatcaactcacctgggtgctgcgtgtgaagaaaagaaaagagagaaaaaccgaaacagaaacataaaaagtagctgccaatttcacgttctcattcttccaaattgaaacctcattcctcaatccacgagtttctcgtgacccttctctcatcatcgtcatcttcgtgccctaatcgattatctcgttgcgggtgctgatgattgattgattgggctataaaacgctgccaccgaccatgatcaaccattcataaacaaagagagaaaaaaagcttttttt

SEQ ID NO: 13670 - DNA, 393 bp, Glycine max
gcaggaactatggtgacttatggtggaatgtctaaaaaacctgactctgtgtcaacatggtccttgagtatttaaggatatttccttgaggggattttggctgcataagtggttgagcacagataaagctgaagagagcagaggaatgatagacagacttttgagtcttgtacaagaaggaaagctaaaatacaagatggatttggctccatttgaggatttcaacacagcattggataaagctctgggaaaacttgggagccaacctaagcaagtgatcaaattctagacgtgttggtgctgattatacaattttctggtagataaacaattgttctggaatttccaagaaatagcaatctgggaaagaaaatgacttttcagagggatcta

SEQ ID NO: 13671 - DNA, 433 bp, Glycine max
cagccaaaaaaattgatgctctgcatgtctctgagaaatctgcaccagacattggtggtggtagtggcagtgatgttattaaccccaagtcaatcttgaagagtaaggataatctttcggagcccagggatgttcgcaaacgtgttcggtttgattctgaatgtgatgatagtggtaacgatgatgatgggcttgaaggaagaaccagggatgttcgcatgaagacctcttcaatggaagaggctacagcttctgaccagttgtcaaagtcaaaagaatttgattcagctgttccagattacattcgtaatccttcaagatacacccgttacacttttgatgattctccaagtgacatggatgacaaatcaaataaggaagcatgcatgagcttccttttgcagttgaaggggtcaaatgctgccaagagaac

SEQ ID NO: 13672 - DNA, 433 bp, Glycine max
tgttctagtaagagttgaagtagccgacaatagattcagagattccattttgaaagaggggggtgatatccaaaatcgtctgaaatcagttaaaaataaatgtgaagaggctggttgttctcttttaaactcatcaaaacatgacgaggaagatttttgggaggagggtaatgttgtatctatggaaatctcatctagtgcaaccaacaataaaaataaacatcttgacgtggcatcaacttcccataaaatgagtaatgataatcttggtttgcacaataaagagtctaatgattctggtacggacaccctgcttcatcgaggacgtgaagttgagccaaactctccaaggagtaaacttcaagccgaagctcctgtggtacgatggagttcttacctggataactggggttcaaacagggtttttatggct

SEQ ID NO: 13673 - DNA, 213 bp, Glycine max
ataacatgcagaattcatcaattttaaaatttaaaataaaaaaaaaaaaaaaaggccaaagaaaatatataaaaaatagaacaaaaaaacaaaataaaatataaaaaaaaaaccttaacattttaagggaatcattcttgattacattgctattccggacttcttctaattctttacattccctcaaactcaatatactttaattgggtttaa

SEQ ID NO: 13674 - DNA, 333 bp, Glycine max
ataacatgtagaaagcatgaaggataagatagttcatatctacatggcatgaggagtcctgggatggtaacattgtggaccatgttggcctcaaagccatggagtcaggaattgaagtgtttgggagtatactgctcaacccattgcttggcgggcaacaaagaacagattacgataagcgtttatatgggaagtattatggtggagaaaaggatcgagactggtattggatggcttttcttaaaggaggtgaagatagataccaccatgcatgcagccttgctggactcaaagacaaaaaccttgaagggataatctttaccaaaagccttg

SEQ ID NO: 13675 - DNA, 166 bp, Glycine max
aaataaaataacatacaaaaaaaatatatattaacatttaaaaaaaaaaaaaaaaaaaaaggaaaaaggtaaaaataaaaaggttggcccctctaaaagaatccatcttacataaacttacatacaactatataagctcacatataatgacacctaaattcacatt

SEQ ID NO: 13676 - DNA, 188 bp, Glycine max
accacacgttcgaaaaaaataatacgcattttgtattcacaaacccaaataattatacaaggtgcggataatcactactgctggatatgtacttaaacaactacattcatctaaagataagacacatactcaataactaaatacatatccaaatccctctgaacgatgtccaacccgttcgcattatg

SEQ ID NO: 13677 - DNA, 411 bp, Glycine max
  modified_base (53)..(53): a, c, g, t, unknown, or other
  modified_base (56)..(56): a, c, g, t, unknown, or other
  modified_base (59)..(59): a, c, g, t, unknown, or other
  modified_base (67)..(67): a, c, g, t, unknown, or other
gtgcctccaacattcttaaaaaccaaaaccaaatccataaatttgcaggtctncgncgncgtacagncaccaccttcgttcggattctccgcggacctactatccctactactctatttacacggaagaacaaaaaaactatcccacaaaaaaaattccaaagcggttcggttagggtttaagttttttttttttttataataatttcgggtatcaaattttcatcagtaatatttttttggaggcggcgaaatggcgcaaattcaggtgcagaatcaaagtccggggtcggttccttctccgaacggcgtggctaacgcgccgaacaacccgaaccagttcgttacgacgtcgttgtacgtcggcgatcttgagcagaatgtcaacgacgcacagctatacgatctgttc

SEQ ID NO: 13678 - DNA, 429 bp, Glycine max
cccacgcgtccgcccacgcgtccgcaaaactcgctcgtggattgccccgttacgaaccaggctgtgacgtggttagcgtctcaggtttcgattctttacggtgcggctaacggaaaggcttttgctcttaatttcgcgaaaaaatgcattctggttggtgcttcggttctgttgctgattcctttaagggacaatgctgcttcaaagcaagagtcccaaaatttaggtaccgagagtggagaccccaaagaaaccaaacctggtgctcaatgtggagaaaagaaaaattggataccgaatataaagagatctgtgtgcccaagatgcaaggcggttgcggcactgtacgcacgatatctgctttagcacaaaatttatgggtattgggtttctcagaagccgcgtgactctcatcatctgtgcgctgag

SEQ ID NO: 13679 - DNA, 342 bp, Glycine max
acggggacatccatgcacttgtggatggcgagtatccaagaaccattcaacatatcgtggtgagtatactccacaaattcactagtgctgaagctaaaatcgggaagggtctaattgattacggtggaatcaaccagtatactacgatcattcatatatgatcctgatcaatcaaaacctaagatgccatgctatcaaatggactggaatgcaagattagcttgacagacaatgctgactttaaccattgctacagatatgatctatgcatgcccatgactatgctctctaatgcccatatggatgatgtgaacattgaatatgcagataatggactgccta

SEQ ID NO: 13680 - DNA, 231 bp, Glycine max
cctatgaacaacacaaaatataacatagatttaacaaactaattgtccatattgttgaaggtgattctgtgaaacagtaactggggttgcatctaggttgagacttgttatggagggtgatggtagtagatttaggattggaagttaatccatttagaggaacagcgcacgagctgagatcttgtcaaactgtgtacaccgagaccatgatgaacatgatgctatatggga

SEQ ID NO: 13681 - DNA, 256 bp, Glycine max
cccacgcgtccgtgaattttctgtgatgggtactgcttttttttttttttttcgtttaggtttcttttgttcttaccaccagcatgatgtggtttggcctaaattattagtagtacttgctactgttagtgttagttcctgccctcttcttgcactgcaagtgtttttgttgcgtcaagtgctggctggatctcgtgagatgtgtattgtttcctgtatggttttaattagccaagtaaaatttcatattactgtc

SEQ ID NO: 13682 - DNA, 315 bp, Glycine max
gagaagctgcgcaccttttcatactagtgctgattgctgaaactgccatcgctcgccatgggcacatagatcccaacaacacttgaaagttgaaacagaaaaacaccaatccctcatcgtactgttccgttatcaattctcgtgtttaaggacacaatttgcttgatacattttcaagttttcatctccatgttttgattttgaagaataaggagtatgcaattgactactacagatatggttttactataagtggcctgtatatggttttgggtcttgcaagtgtaagcagtatggaggatattcaattggata

SEQ ID NO: 13683 - DNA, 436 bp, Glycine max
ggctctggctgcagtatgaaactcgtacagatgacattacagtcatcattgtgcatgtagatggactaactgaatctgctgttggtcagtcagcaagttatggtgatgttttgcgaaaccctgtgcctcaagttgtagaggtgacaggttcagaatccccttccacctttggttggagcgctagaaaccatcgtgtaaggcatgacttgtcaagggcacgccttcgagcacttgaaaattccctagaaaatggtcaatcctgggttcctccatcttcagcccataggaagacatgggaagaagaagcacacatagagcaggcgttgcatgatcattttctcttccgaaaacttactgattctcagtgccatgttttattggattgcatgcaaagagtggaggtccaacctggggatattatagtcaaacagggtgg

SEQ ID NO: 13684 - DNA, 374 bp, Glycine max
gggcagtgagtttggttagccttggtggtacaaagttgatgtctcttggaatagctttggtcgcggtatcaaccatgtggagttgatccatttggcagctgcattttcaattttatttgtcaaacacgccgttagtttctttcatttttcctttttaaaaattttgctatctgtttctggtttcttgtgtgttggtgttatgagaaggacgtgaatacttcaatgattaatgattcagttgttaaaccaataatctttaaaaagacaaaattttaaatatataaaaaaaatgttataataaatttgattaaaatttttaacgttctatgctctactacagatatatgatatttattgcatttatctctaattat

SEQ ID NO: 13685 - DNA, 304 bp, Glycine max
gtgaaacgcacgcgacgtagtttatataaagcgccgtccctttccgtttgtgcagtcagggggacgatgacctgtgccaaattattttccgtcttttctctcagtttctaatttccgagaagaagtaagttattggttcttgcttgaaattgaagtggcttttgagttttctattgggattttcggctatcatgggatcagcttgttgtgttgctgcaaaggatcctaatcttactaacaaaactggaagtgaaaggttgcatacagatgatgtgtgttcaccattcgggagctttcaatggga

SEQ ID NO: 13686 - DNA, 394 bp, Glycine max
  modified_base (71)..(71): a, c, g, t, unknown, or other
  modified_base (338)..(339): a, c, g, t, unknown, or other
  modified_base (369)..(369): a, c, g, t, unknown, or other
acgctccggatatgaaagcttacgtttttggtgaatgtctggcaaggatgtaaacctgagatttgtacatntaattctttaaataatggactttgcaagaatcataagaatggagaagccttgagtttatatcatgacatgttcttggaaggggttattgctaacactgtaacatacaacacgttggttcatgcatttcttatgagagattctatccaacaagcatttaagcttgttgatgaaatgctatttaaagggtgcccttttgacaatattacatataacggccttatcaaagctctgtgtaaaactggggcagttgaaaaaggattgggatnngttgaagaaaatgcttggaagggatttttnctactattatctcttgaatatactg

SEQ ID NO: 13687 - DNA, 352 bp, Glycine max
tgatactattaggtttactcttctagcccccctacgtttttggtggatttactggcgacgaagtatgtcaagtatattgatgttcgctattttacgtttataagtctaaaaaagctcgctagtactttggagggaaaagatgtctcagatgataaaattgcaagtgcagatggcaccagtgaaagtcaattgagctcaaatatggaatgtgtcatccacaacatgtattacactatatcacatgttcccccacataaaggctcggataatacatctgatttggaaatgtggagcagctcagaaagtgaccataagcaactctctggagataagggtgctgatgataagccgc

SEQ ID NO: 13688 - DNA, 242 bp, Glycine max
cttgtactgttctattagttcatactaagttctgaaaatgagttccaaggttttgcttgggctactgatgttcttggccactatacttctgatctcctctgaggttgcacccgatgatgcatacgagaattttgacaaaatagatgggaagcctagtgcagatggggtagatgaaagcaagtattggcgtggcggctatggtggcggctatggtggtggtcatggaggtcggcgtggaggct

SEQ ID NO: 13689 - DNA, 254 bp, Glycine max
gggtctcccattttcaattccttctcagtttccttttctctgaaaaaagatgttgaggggggcagctaggaggctctcttctctctcctcttcttctccgttgcggcccaatcacgccgcttccgcttttctctctcgaaacgacgtcgtcgtcgatgaccacagatctgttccttccttccatccccttcttcccttccgaggttttgctactgaatccctgatccacccaatagaaaacagcattattcccc

SEQ ID NO: 13690 - DNA, 356 bp, Glycine max
cccacgcgtccggttcggcataattgagcgatcgatggcggcgttgataaggtcaccggcggtgatactggcgatcctgacgatctcggcgtgcatcgcgtgtacggcgtcgtacgggggattggtcgggggaaggtcgaagatccctgacgtgaaggcgaacaagaaggtgcaggatctatggcggttctcggtggaggagcataaccggatgctgaggcaagcgcagaaggaggaggagcaagtcacgttcgtggaagtggtggaggcgcaacaacaagtggtgtctgggatcaagtactacatgaagatatcggccacgccaggtggcgacggtggagattccagaatattcg

SEQ ID NO: 13691 - DNA, 436 bp, Glycine max
gcagctggtgtctactggtttgattctatctgcgaaaaactgaattgtgctccagatttggctgttaaaggttgtgaagtctggttaatatctgcttatctgctcacatacactgatacacacatattgaaggcatgcaatcttcaacataattttctgtaaccatgcagacttactaaaggaatacaatgtggaactaaagggtcccttcaattattcagctcgagataaatctggtattcccggtgattggtatgatgatgcatcatccgcaagcactaaggacaagaaagacaaagatggcaatcaaaaacagctctctgcagtaagtgacaatcatcctgctcattcctgcaacttttatgagcttaatttttatgtactggccatgtaaaactcaagtactcaactaataagaaattataatggatatgat

SEQ ID NO: 13692 - DNA, 460 bp, Glycine max
aaacatctcaataaacatgtacatgaattgttggaaagacatcttaattgtggtcactcctaacccaccttagttgtggcgggcaaccttgggcaaagaaaggtgtgttgaagtcccccatcaactaaaatgaactaagtcctgtttgtatatacttctctgtatgataaggttactcgtcatccaaaatcatcacaaattggcccttcctttgacaacaacagaatagagaagatgaagcctctttcaagtaacttgcatggtatgcatgaaactaccaaggaaaatgatatcaacagtcctggaacaagaacaccgaaatttctagaagccaaccgttgataaaaatggtttcttttcttggtggtggtagttaattttcatcattaatggcaattgaaaatgggatgaaagctcacactaacgcagacttttattctggtattggcgatgatatttt

SEQ ID NO: 13693 - DNA, 424 bp, Glycine max
gcatggggcacttcaatgatattgacttatgagtatctgaaacgtgtatgctcaaaaggtgaatagatgcaattagtctgaaagcttgtatttaactgatcgatttaccacgattaggatgatgatgttgggtttgcacctttagcattggagttgctgttcaacatttatcactctgactcaagggttaaacttttagcagtacagctatgctgacagattatatgaaaacactcggctggatatgaatatggcagacttccttctagaaaataaattgcatcattatttttttataattctattggatttggcgcattcttttgtagcattgctatggatactgtattatcatgtaagggaaaggaaatagattgctattaaatgcattgtaaagagatgttgaagaataaatttgaattct

SEQ ID NO: 13694 - DNA, 374 bp, Glycine max
  modified_base (287)..(287): a, c, g, t, unknown, or other
  modified_base (342)..(342): a, c, g, t, unknown, or other
cccacgcgtccgcccacgcgtccgcgactcggtatttctcttcctctaaagaccgagtccgactcggagggcgaagaaggcaaactcagtaacctttccttccttcactacacgcgagagagacctcagtgtctgagacgcaggcaacgtgcattttcccatacgaaggacaccatcacgccgttttcgcgtccccgtcgtttcggatccatcgtcatcgtttttgtcttcttcttccattagtttagttgagaatcaatcccaagacaccgagctggagccttcgnccgtcaccgtcgctgccttcaacggtcagatccggtaccgatcgccgtccttcgncgagctcttcgacggcagcagcaactcttcgg

SEQ ID NO: 13695 - DNA, 437 bp, Glycine max
cccacgcgtgcgccggcaccggcgtgtgtgagatagaagaagtggacgagaattcgaacgataggcggctacatgatgatgatgatgatgatgaagagtactgagtttatgtcgcatagggtaagagcgacacaagcatggacgctctctcatgggctctcaacaactttgttgctcaatcaccatctaccatcatttatctcattcatgttttccctcagatcaaccacattccaaatccattgggaatctgaatgattccaaggaatcaagtgagtgctgagcacgtggagagttatattgaccaagaaagaggcaagaggagagagctccttcagaaattcctacaatcatgctctacttccaaggttaacgtagacaccatcctgattgagagtgactcagttgcaaaggctatcctcgacctgattcccatt

SEQ ID NO: 13696 - DNA, 246 bp, Glycine max
tcgaccacacgttctatcacacgtccacgactttttatttttcgtgctctaaagaccgattcggactcggacggctaataaagcgaactcagtaacctttccttcccttactacacgccagagagacctcactgtcttaaacgcaagcaacgtgcattttcccatacgaaggacaccattacgccgttttcgcgtccccgtcgtttccgatccatcgtcatagtttttggcttcttctatcattag

SEQ ID NO: 13697 - DNA, 216 bp, Glycine max
acgtccacgcgtacgcttatttagggttatagtgactgtgctccacaaccgagtcgcgatggggtgacatgagagtataggaaggatgcaagcacggcagaattaccggaggtgatcgcacacgcatctgatgagatggattcaagcagctactccgtatcggagcctcacgttgaggagagcaccatgaatgtcgaaccttactggcaaacgggc

SEQ ID NO: 13698 - DNA, 244 bp, Glycine max
gtttctttttcatacattcacaattcagatttacttcttaattcagagcaaggcacccgggcgtggttaaatagttgttatggctggtcgatcatgaagagagaaagataggttgatagcttaaccatggcaaattgtttgatgttgatttctcgatgatgtgattcaatttgaggccacctactcatcaatcacttcaatgaacaaccgtgtctttgagtgcaaaacatgttatatgtatttc

SEQ ID NO: 13699 - DNA, 214 bp, Glycine max
cccacgcgtccgtaacattggaaaatactttacattctatttttcgtttattttggcttggtttggtatttgtttttcagatattgcttttcataagttaatcagtcaatgaaataaaagttgttaatgaaaaaacaaaaaaaaaatataaatattatataaactattaaataaaaaacatagtaatttattaaaataatcaaactatacaatt

SEQ ID NO: 13700 - DNA, 448 bp, Glycine max
  modified_base (385)..(385): a, c, g, t, unknown, or other
gcttcacaatatggagatataaagcaaagcatggaatccagcgacgggagaacgacagtggaaggctttgtaagaagctactttggtttcaagcatgattttctgggagtggttgcagctgtgattgttgcattcccagtagtctttgcattggtctttgccatatcagtgaagatgttcaatttccaacggcgttaagatcgaacgtgttcaagtagtttgtacagggtgtttcatgtaatgtaacatgttgagagaagatatccacatagcttttttttattcttttatttaccaattaaattaaacttatcatagtcgaaatccactaggatctgtcaacagtagtggagaaatttagttagttttcatgagatcatagatntaaatctcattggcatatcactgtaaaaaaaagtgtatcatatttgatgatattaatatatgt

SEQ ID NO: 13701 - DNA, 448 bp, Glycine max
gctgtacagccgtctgataaagatgcttcttcaggagagatttccagaccggcggagacggaatcttcctcactcagacacaccacagagtcaaaattcaaaaccacttcctcgacatcagaagaatttgagccattgaacggtgagtcaaattccatttcagtgaaacattcccaaaatgtggtgtcggagccaagtccagtaccaagtgtttcattagaaggaccagcacatctgcagctgcagccaccaccatcggcacctactgacacatcatcagtaactgagtccagcaatacaagtggttctgctagtagcgatagttctgctagtttacaaagttcatcagagactgatgtatcacataacacgaaagccacagtaactgttgttaggaaatccgcaagccatgtcatggatggcttaatgcgtccatgggatttaattt

SEQ ID NO: 13702 - DNA, 368 bp, Glycine max
acaaacacttaatttctcatctcatcatttctaattctacctcttttctcttgcactaacaatccaagatgaataccaacaacgacaccgaaaaaaaccaatcatttccagaagcacaaggagcatcatcatcatcatcttctccacccaatgttgggactgagaattggggaactcacataatgggcacccctgctgttccaagcagccacccagataacaaaaaagcagctttacaaagtggacaacctcaaccagttcaatactaccatgaccaacatcaacatccctacgtgcaacatagcccagttgacaaaccaagcaacagtcccatggagtcaatccttaacatgttcgaatcatggagc

SEQ ID NO: 13703 - DNA, 395 bp, Glycine max
gtgttcacaagttttaggctttatgggttgttagaatttggctatgtagtatgaaaaagtaagatacaggtggttaaatacttttgatattattctctgatttaaattagagtttcatcttggtagtctcattaaaagtttgtatttaaaatcagcataattatgttatagaggaaaatgtctaattttcatcggacaacattgctaaaaaacatcaaagcaagataaatctaaattttgccttatattatagaattgtaatagaattgtaatgtaaaaatcttgccttattcagctgaaaattctaatgttagtttatactatggaattgtaatataagagaaccttataattgacagggaagctaagatttggaacaatgtgtttgagaaagc

SEQ ID NO: 13704 - DNA, 143 bp, Glycine max
atttcggccagcatcgaattggatttatcaaactttcatagttactgatacagcaaatgcgaaggtttgtactttttacatgaaatggcttgaatgagactttgatgatcgaattacttagtaaaacagttctttgtaggtgt

SEQ ID NO: 13705 - DNA, 69 bp, Glycine max
cccacgcgtccgaaaaaaaaaaaaaaaaatttaatttaaaaaaaaaaaaaaaaaaaaaaaagagaggat

SEQ ID NO: 13706 - DNA, 412 bp, Glycine max
attatttattaagatcaatgttgctttcattatctgcccctagcttttgtttaatgtatggctggaaccttcattatcctccttcttcagttcaaaaaacatgtttttctgttcgttgttcggtttcacagacaaaaaatggagctaaagtggaatatactccttggctcattattggcttgggcaatcctggtaacaaataccatggcacaaggcacaatgtatttcttccgttcttgaatacacttcctatttgtattttgtactgaaccttaatcttattaatttcctctctattattacgttggatttgaaataattgatagcctttctcgagcataaaggattcatatgaacactatacattcaaaggttcttattggaatatgttctatagttgaattaccttttt

SEQ ID NO: 13707 - DNA, 330 bp, Glycine max
agtcaataatttagtaaaaatgttgtcttctctgctgaacccttccttcaggaccacgcttccaatccattcaattttaatccctaataaccgccgcgcctccaccgtagtatcatgcaccttctcacacctcaccaccaacaaccactcccatgtttcttcgccgccgaacatcaaggacgaggcccgccgccgccccgcggcggagaacgacttcacggcgaagtacgtccccttcaacgccggcttcgactcgccggaaacctactcgctcgacgaaatcgtgtaccgcagccgttcctgcagactcctcgacgtgcagcatgacat

SEQ ID NO: 13708 - DNA, 368 bp, Glycine max
cccacgcgtccgcttttctgccactaacactgttttggccaagcaaggatagtagcctgcgcctgtaggaaacaaagtatttcggagaaaaatattgttgtaaccttaaaaatgttgtaagcagatgcttttattttcgttgatcacaacttatgctgacattctcgggttcagcacatagataggccattaccataattatttttgtggtgtagggcttttaccttgttatttgaaaggttgtttgaatgttagcttcctacactgtaacattggaccactatgtaatgtaactcatgatttgtttaaaaaaaaaataaaatataaaattatttttatttttaataaatattaatagttaatttttt

SEQ ID NO: 13709 - DNA, 363 bp, Glycine max
atcatgcatagttttgaggctatgtatcattttgcagtggctgtggttgtagatcgaaggcttagtgttaaatgcaaagtggtgattgatgcttttcgattgatcaatccgcagacaatgatgctctttcaagaaccaaggtagacaacatccaatctcatacatctgaataaaccattcattcaagcattgatccatcggttgaaccttcattactattccatacccattcattacaggaagaatgaacttcaagagatgatgttgcttaatcttcacatgaagaaatggactgatggtttgacacttttgcattatgatacacattccaaaacttatgaacagactgtacaggaaattgct

SEQ ID NO: 13710 - DNA, 451 bp, Glycine max
accacgcgtccgcccacgcgtccggtgaaatatgcacacactttgctaattgtgagctggtttcaatcgtcatcattgatagacgtatgattggatcaagtgaatcaactaccaactatcctggcaagattcctcgtggccccgatgttcccagtgaagctgctgactaaaaccattcagggattatccttaccaaataatagctcctctttgtgatcattggtcgtatattggaattttcattggtataatagggttatttcttaattgcatttacaggcaagtgttcaatatttagttctacccgaacaaactaatccgtatgagcagtttcaaaattcctttttagtggcttaaagtacattggtaacatatgtatgtgccaatttttaagatgatgaaaaggatgtcaacaatgattataccaagtttagctacttgcacattcatg

SEQ ID NO: 13711 - DNA, 440 bp, Glycine max
ccaaaagcctaatcccagatgcagcactgcaggtgattgaaggcacaaagttcacagaagagagcgcgctgaatagtgtgcatcggttcagacttcagagcatatgaaatactgcaaattttccctcgtctgtgacgctaaggaaaaatcgacctagatttattttattggggaatagagggtacatatcccttccactctgtcgaaaacacatctccccaaatttgaaaagcatgatgcccatcacatgtgaaagctcaattgtttcccctcttctcctgtcacgagtatgtcaggctaagacggacccaacaagagcccttctgttagggaataaattctcaacaatggcagtaactgccttgccgaagacaagttgtatccaatgcacgattgtccgatccaaatttagccacaaaagttgtggtcccatggagagt

SEQ ID NO: 13712 - DNA, 438 bp, Glycine max
gctcctgaaagtgttgctatcagagctgattagaatagttatagttacaagcaactcatcgcatcggcacagaagatatctaatctcttgtgtggcagtgatgcacagacaggaaatctcggtggagctcgaataggaattgtagccaaaccttctgctgaatttgttgctggaatacttgggatttggcttagtggaggtgttgctgttccgcttgcaaccagctatccagaagtagagctcttgtatgtgattaataattcggatgtatctgcaatactgagtactgaggatcatactgaaataatgcaaagcgtagccaataaaagctcttctcagttttttcatcttccacctgttctcaacaagtcttctgagaaaagcagagataaacattcacagaatgggggaattcatacagataaaattttgttggat

SEQ ID NO: 13713 - DNA, 359 bp, Glycine max
tgctaataagattgcacaatcattggtttatgcaagcaccccttgatcctggtccctggtcgcacatctcaatgtgttacagccattcactttcaaatggcaattcctctacttctaagccttatcaggctgagaagttggagctcccttcactccaatatccataactcgatttaggtaactggcgctcatcccccccaccttctttgctcgactcagttgatgatttacttcagtcttctacaccaatcagtacactggagtcagatagttcttctccacacaatagtggcctgctggatgctttactttatcaggcaaagactatgagcagttcaaagaaccattgttctgacaag

SEQ ID NO: 13714 - DNA, 289 bp, Glycine max
aggccacgcgtagctattcatctgattggtctgcatacatggtaagctagtcaccacacagggcatggtcaaccttcaacatacacttgaagtgcagtgaactcaagctgaaaccaagggaggaagaatactgtgctatatgaacactagtcttcgacttgcctattacgatactagacacatgatctatacagctgcagagattactatcatcgattctctgcacttcatactcaacaaagaaatctcagcttatcctcaacaattactcaatggatactagggaatc

SEQ ID NO: 13715 - DNA, 314 bp, Glycine max
ctcacacgtgcgcaacaagctgttcatccttctattggatctgccagtgaataatgctgaggaagattgctgccacttcacaggacactctacagaacaagctacataaccacgtcgataacgcctgcgaatacgcgtggcattacctctagctagtgcgacagccgtaagataatccgtcgcagcaagttctcaatcatggtcactatatccttcaccacccctaacaccgatcctatctatgctcctatgaatagaccttgtctgatcatgatgcagatgctgatatgcattgccaatgtcacgactgtgcc

SEQ ID NO: 13716 - DNA, 450 bp, Glycine max
gtcaaattgtgtcttttaatcagttctctgaagcatttggaaagttttatggccagtcgaggcatggagtgagcaatgatacagttgaaacttcaagaactcgtggaactgttcacgaaaactgtataaagtatatatctcctttcatgacctccgtactttttccaaatgttattggttatgttacatatttctaaaatgctgagattttcaattatatggtagcggtttccattgttcggctcaatttattatgctcctacccacaacacaatggatggatattccattaacagtgggattcaggcaacttaaagttcatataaactgttaatggctggttgattttttggcttgtagttgtattatgcctcttggggatcatggcacattgctaaggcgtttcagcacatcaggattggatggaagaattgttgtatgggatttgga

SEQ ID NO: 13717 - DNA, 426 bp, Glycine max
cgcacgcgtccggttcatcagttacctttggttagtgcatacacatgttgggcaagagcagttggccttggatatgagcagcataaaaggagactggatggtggaacgaatgaacctttattcacaaatgtcactagagattttattggcactctagattacatattttacacagcggattcattggttgtggagtcattattggagttgctggatgaggagagtttgaggaaggacacagcacttacttcacctgaatggacctcacatcacattgctctcttagctgagtttcgctgctgcaagaataaatctaagcgttgacagttaaggtcactttcagtgatacataaagaaaaagtctgaaagaagcatttggctggtaagttttttcgtaaaatggtagatcatgccatgctttttcaa

SEQ ID NO: 13718 - DNA, 350 bp, Glycine max
ggcatctctgaaatcaggcaagtgaaaacctaaattaaaatggtctcacagacagttgaagtctgaaagaatgagattcctctggagcaggaatcagtggttttagctgaagatgctgtaaatggtctcgttcttgtggacatcataaatggcttttgcacaattggtgctggaaatctggctccaagagaatccaatacgcagatttcgcgaatgatcagtgaatcagcaaggctggctagagtgttctgtgagaagaatttgccgggtatggctttcctggattctcaccatactaacaagccagaggacccttatccccctcactgtattgttggctctgatgaatc

SEQ ID NO: 13719 - DNA, 437 bp, Glycine max
  modified_base (420)..(420): a, c, g, t, unknown, or other
ggtttaataattcacatggttcatatggtattcaccatcatgaagttagtcaccacgaccgaaacttccaaccttctagagctcatcagaattggactccaccaaacaacccgagtgggcacagggattatggtcatcattcatccaatcaatattctttattagatagaagaggaaacaggaatccaatgcccccacctggttacagtcgcaaataaattcatttcgttcagggaatattcttccctacgaattaaaaattgttgtaccatatctttttctctctcaattagttgaggtttgagagttgtacttgtatttcacctattaagtctagttgagacaatacttgaccaattttccattgaatagatcagtgtcaaattataaccccccttagaactcaggtttgataacatntatatacttgataggct

SEQ ID NO: 13720 - DNA, 361 bp, Glycine max
cccacgcgtccggtcccccatgtatacgcttcactgccttcaactgtattttcagagaaactgaatgagaatccttctgataaattaacagaagttcataagattgaagtaaagtctgaagataatggaaattttgacttgaacaaaatttctgagggtcgaagtaacagtgggcaaagttgtcagaaacaatcagacagtgaggagaattcagggctatcttctggtcagaattggagatgccctgatgtaaccaatccagtgtgtaacatatctacatggctatcaatctttggtgaaccaaatgatttggatgagtcagtttcagatctgctggctgaaagtgaggcaatggagtcac

SEQ ID NO: 13721 - DNA, 419 bp, Glycine max
  modified_base (401)..(401): a, c, g, t, unknown, or other
cccacgcgttcgagaaagaacaagaacgaacaaaagtcaaaagttcaattgggggtagcaaaatggaaaatcaagcctcatcatctatgcagatcctcatcctcgaacaagttcagttcttgaaggtgaacgacgattccctcttgcagtgtgaactcgtagacgtcgttgacgccgaagaggagatagatggctttggttcttcagattcttccgttccttggttcgaatccgattcttctccctgcgattccccaattgaagaaattcgacaccttcttcttcatcccgatgttggtttacaagatcgacatgatggtgctgatgaatcggagcaagattcgggtttggaaaatcatcatcactaccattatcaccatgatgatgatgatatgggcggngatgataatgatgaggat

SEQ ID NO: 13722 - DNA, 334 bp, Glycine max
ctccacttttcttcaacaccatctttctctttctttttatttttatatttttgtcaattggtcgattcttttggtgttccagggagatcgattgataccgtcccgttgattttccaattcgacgaataagggtatcacatctcttaatcaaccatgtttacccgaatttttggtaaacctaaaccggaagtcaatactctaaccgctttagacgagttaaatgacaaacttgaaatgttagagaaaaaggagaaagtactcctaataaaggctgcagcagaagttgaaaaagcccaaggaattcactagggcaaaagaataaaagggcggcaat

SEQ ID NO: 13723 - DNA, 431 bp, Glycine max
ttcctgcgaaatctgaatgctaaacggagttttgcgcctcttcttccattgcgtggtgcgctgacgtcgccgctgcccctgtccaccacttccctttcactgttccacgactacagagaggatgaagaaatttgatcctgtactttctagagacaaagctacttcattagtagatctagaagcatcagatgctcatcatccaagtgcgagtattcaaggtgctgattatgaattggtggctacatatccaggaattatgcctacaatttcaagctaccatcctgacatccaaaatgagatgtgccagaagtgatggtgcgacatcagcttcaaaattatgttagaaatgttcgatgtgattccaaatttgcacaattaaaagtgcaaagcttgtggaaacaaaaaagtgcagcacatctgatatagtatat

SEQ ID NO: 13724 - DNA, 221 bp, Glycine max
cagaacaacaacttggactcgaatatttataaaggttcaactctctgtttagttaaagcaaacgccattctatatttctatctttgaccaatcccaaacccagaccataacatgtgtatggggggagatccgatgcaaatgctggtgagaagaagaaaggaccaggacgacgacgatgaagaatagttatcatatagtcaacatggtgtgaaacgagagca

SEQ ID NO: 13725 - DNA, 340 bp, Glycine max
ctcacgcgttcggtcacgcgttcggcagacttaatttgcaagtacgaccgaggctacacgcgggaggcggcacatactgcacagaatggagcccatcgacaactacgacatctcagaaaggtgtgtcccccgacgtcagagactccgcgaagcaaaccatttccaccatgcttggattggtcccatgggaccacttttctgacatagacactgtatataaacaccctctataccgactaatctgctcctgccacaagacaaggtgaatacagaaacaatgtgaattatgacgatcattctagtggagtgcctggaacatatcgagaatcgacgacgacgt

SEQ ID NO: 13726 - DNA, 349 bp, Glycine max
ctctacaatcactccttcctctcattctctttaaagaaagtgcttaatttgtgtgggtacgtggttcagtttccatggattggcggcttgctatatcttctcatcctaaaccttattcagtcacaactggtggaaatctctggcggagtaaacacaccaccaagaatatttactttgcatgttcttggatatcaaaagcttcacgacacataagggaaactcatatagaacataatgttttgaggtttccaccaaccaagtttggatccatcattacaaatgcatcacatgagggtctccatatcatgaatgcattatataatttgttgtgaacgcaatctttaaacaa

SEQ ID NO: 13727 - DNA, 366 bp, Glycine max
cacacacgatcggcatatatagcactaagtacgcgcgttgagtgctgaggactgaatcggactgcacaggtatctacctaggaagaggaataaatgggatccaacggacacatctcggtctgaccaatgggataacagacctgacccagtgactcgcatacaatgaatcaaaggaaacagaacaacacggtgctttgcaagaccaaggcagtcgcttccaccggagtgaacaagttgaaggagggtacccttgatgaactgcattggatcaagacccactatcacaacaccacccagaagcattaaactacttcttacttatcttaatatgattgcttctgtacatatttataataatctttgtct

SEQ ID NO: 13728 - DNA, 311 bp, Glycine max
cccacgcgtccgggctttgcctggtaaaggtggaaatttacaacggtgtgttgtggcgttagaatccaatgtaagtggctcaaaatgtgggaagacggaatttgaagcctttgcctctgcttatatgatgatcattgctaaatccatgttgagtctcaaggctctcgaaatgttctagaaatttgtacacttaacacttgtgatatgcctctagtttaatgtggttctagtggtgaagtcaggccacagaccacacgagaatcttaatctctttttctcaaaaaaaaaaaaccaaggaacaaacataaaaa

SEQ ID NO: 13729 - DNA, 368 bp, Glycine max
ttaaactcacagagctcgatgcagaaactatgagacgaactcgaatctccaagctctgtcctatacactatcgtgaccatgtggcacacgcagagaagctaactcaataataataagtcaggggatcttcaaactagggcttaagctctcagtgacacactgtggacagtgtagagtcaccatcttcctgactgactaaaggacttttaacgatagtgatctgctatgcaactgggctcgagactgaaatggatgtaagaatgatgtctgatgtacaccttcagttaagcccacagactaccaatgcacttggctatacagatatggaaacaaaggtgactgagacgctagttgcggaatctatgaat

SEQ ID NO: 13730 - DNA, 295 bp, Glycine max
taaaattcttacttaccaagcttctgatgacccaattcacagtggctacagatgggctgttgaatctacaagtaaagaagattcattgatgggatttgctgactgggaaccaccacatggtcattacaaaatgcttaagtatccatggaagaattatgtgaaattaagtggggctctaatgcactgtgcgtttatggtcatggctatgcatgggtgcatactttctgaaatacaggccccagctgagaagagacaagttttgcgcaatgagcttcagagggtaggttctgaacga

SEQ ID NO: 13731 - DNA, 431 bp, Glycine max
cccacgcgtccggttgctgaccacaagtccttgtaggttgtatctgcaaaggttagactttgtcttactggtttgtgcatttcctctttgatattgtgtgatttaagactttaagcattatttatcaacaacatcgtagccgatcaagatgttaaaaattgcaatcttcctttaggaccccatatttaataattgagctcaattttttccttgaacacataatggctgatataagatatttgaaatatataaggcagaataaaaaaaatatatttttcttaaacaagcatgatacagtcacatgttgactttattttttgatgaacacacgttatttgactatgtaatgatgtaaacttcgatacgtttgacaggaaaatactaggatataccatgaggtctttgcttgcattcccaacaatcagatacac

SEQ ID NO: 13732 - DNA, 346 bp, Glycine max
ctctccatcacaatgttctcacttaccaaaaccgctacgctcaaaaaattcaaaattggtctgcgccaattctccttcgagcgctactccttacaaatcatacctatccgataacctgtgattcatacactggctccctgctaaaaccttcactcggaacaaatgctcctaaacagatagcaatgtaagtcctgcactgatgacagtaactcatgatcttcatgagatacaacgctcgatccactgtctgacaatcactacatacctgattcacaccttattaatctatagcacgaggtgactgaggacttactatctaccctgtgatttaacacaatgctatctc

SEQ ID NO: 13733 - DNA, 420 bp, Glycine max
gggcctttcatgacatacctgccatcttggacataaagaatggcaagcgccctttggaccccgatggggaggaagaaccccagtcaaggaaggctaataggatagtggattctcaccatcaaggcaagacaactcagtttttgtttcaacaactatcatgtcatgctgatgattctgctgttccgcaaatggattgtgattggaggaaaggttgtgagtacgagagtaattcgcacagagttgagaacactgacgccttttctgcccagctattggatgaacgagagccgcattgcactggagattcattggtggtgtcacagtgaccttcaatccaattaacacgaggaggatcaatccgatgattcatcagattctggtgttcagcaatccagtgaacagctgatggagcacgacgtg

SEQ ID NO: 13734 - DNA, 77 bp, Glycine max
tcgtgctcttgtaggatgcttaaagtggaaagaagagtgactttatcaaagggagctagaaatgggttaaaattttt

SEQ ID NO: 13735 - DNA, 440 bp, Glycine max
attcggtcccacaaatgcgagtattcataaaattctcacaggtcaagtaccgcgaccgtggccttaggcatggatggtgacaaaaaaagtttggagaatcttatcaagaaaaattgctggtggaccaagagcagctgggcatttctgaatgaaccgccagttatagaagctgcttccaacaagtatgcttcacagtttcaagtggccaacttgggatcaacgaaatttaaccccggagatggaattagtgcttgataattgatattagtctttctcacgtcaccctgcatagttcatagaatcgtagattcatagttggtgtctatatgtataaattaaggcttctattttgtcgcacacaattctgcataagaactgtatttctggtttctttgaaaagggttcaaattttctgaacagatttgtatgagaaaatgttc

SEQ ID NO: 13736 - DNA, 335 bp, Glycine max
cacacgcgtccgcccactcgcccggatttacggctccttcactcacatcacagccgcgtggctcatctgtgcgtgctcttgttctttgtcaggtctgtcgcttcttgatccacaacttggatccatttcattccgatcctgccccttcaccggcactgcatatcgatctgatcaatcatacaagttgattgctctcgcctgtatgttgctggttggctttgaggacaagaacttttacattgttcacacatgtgccatcattgaatgcataaagggactggtgtttgacagtgcagcgatgacatttggcttgacgtactgtaatttatgcaatg

SEQ ID NO: 13737 - DNA, 260 bp, Glycine max
aaaaaacaaacaaacactcacttaaaaattaaaaataaaaaaataaaataactaggaaagaaaatctacttcctctcttacagatccatgctgactctgtcactcacgcgatgcacatattagttccacttcatacctatcttcaacactctctcactgttcatacctctctgaaattcaatacacgctgattgctctcgcctgcatggtctcgcataacattgaggtctagagctttaacgtctttgccacgtgaacca

SEQ ID NO: 13738 - DNA, 324 bp, Glycine max
ctttactaacttacaacaatatgataaaagcaatgcacacacacactagtactgccagataaccacatcacccgatggcaacggacttaatttcattcccattattgatattaatccccttttggcttaaggcgatgattcaaaaatgggtgaggatcctggtgtgcttgaggttgttaaacaattggataaagcttgtacagaagcaaggttcttctacgtgaaagggcatggttttcctgagactctccttaaagaagttagagatgtaacgcgcagattctttgaactttcatatgaagaaaaggcgaagatcaaaatgac

SEQ ID NO: 13739 - DNA, 432 bp, Glycine max
aaaaaaaagatttcttagggtgaaggttggatctagttatgatttaggtatctcaattggccgctcttccgctgcgccgcccccttatcgtcaccacaaaacctaagacactcaatagatcttaacttggtaaccactttctcacggcaagggctgtttgaactttgaaccgccgccgtcaaccgtctgccactgccaggttagtagaagaatacaatcaccactttatattattcgatcgttggtatgtatgactctcttattgtaaaaattcttatcatttatgaatttatgatgatttgttattagataatagtgtaaaaatcttttacatttactttgccgaccacaaagccatgcctctccatagctgcaagctgcgtcatttgtaaagattttgctagagttgtaagagcaacagaattaaattct

SEQ ID NO: 13740 - DNA, 289 bp, Glycine max
gttctattagttcatactaagttctgaaaatgagttccaaggctatgcttgttctacgtatgttcttggccactatacttctgatctcctctgaggttgcacccgatgatgcatacgagaattttgacaaaatagatgggaagcctagtgcagatggggtagatgaaagcaagtattggcgtggcggctatggtggcggctatggtggtggatatggaagtgggcgtggaggctatggaagttggcgtggaagctatggacgactacgtgttgaatatggccgctgacg

SEQ ID NO: 13741 - DNA, 411 bp, Glycine max
atggagagcgaggtggtgtccattgcatttgtctaatgaaaacatcatactatacaccggttgggaacgaggacaactatggtgctgccgctatttactgctttcattctcttcgcttttattccgtatggattgttagcagttccttccaccgtaccgtcattcctttggtcatcacattatgaactggcctctgaaaatatattgaaggaatctgtatattaccaagtcatttcttcgaacgatctatcaaaatctattttatctgaagcatgctggtcaaattttctgtgcacaagatagaaatttcatgagcctctggatctaacactcttactcgttcttttagattgcaaactctatatttaagcatgaacatacatgcaaactcagctcttttggacctgctca

SEQ ID NO: 13742 - DNA, 434 bp, Glycine max
gtggttttgaagatcaaactgcactgtgacggttgcattgcgaaaattcgaagaatcagtatgaggttcaaaggtgtacaatccgtgagccttgacggaagcaaggacttggtgacagtgaagggaacaatggacgtgaaggagatggtgtcgtacctgaacgagaagctgaagcgaaacgtggaagtggtgcctacttcgaagaaagacgacgatcagatagagaaagaaggtgacggtggcgaaaagaaagagaaagagaaagacggtggcggtgagaagaaagagaaagacgttgctgcagcggcagaggttattaacagaatggaatatatgcaccagatggcacctccgtcgttctggtacgacggacgacactctccaggtcaaacatattacgctatggaagttcacccaggatatggtgctagtgc

SEQ ID NO: 13743 - DNA, 435 bp, Glycine max
  modified_base (391)..(391): a, c, g, t, unknown, or other
ggatgttgcatttgagaagaggaattatgatgaaatgcttgctcaatcaagagctatgaggagacaaggtggtggcaatcctcaagcggctccttcaggatttaggtaatcacacagcataaggccacttattcagctccaaatccaatgccttcaaaggatgctcgcgggttaaatttaagttgacgcctggcataaaggtcaaaaagctatctcacatcaaggccatgtggaaaatttctctggatattgtatgatatctgtatcttggcagttgggcgacttgttcaatacttatatttgaattacttatgcttagtttcaacaactaaagaaagtgaccatatttcttaagttgtaaatatcgaaccattagcaatgtgatggactntatctgatggctgcattctcttcaaccgtttcatttcacatttt

SEQ ID NO: 13744 - DNA, 436 bp, Glycine max
tcgtccacgcgttcggcaccgtctcgcactgcgcatgcagagaaaaacctaaagtggcggaagatgacggaggtggcgagatcagtggtgcacgacgttttggggcaaagagtggtcgacgtggaccagccaatcgtcgattatatcgtcaacgtcctcgccgacgatgacttcgatttcggcctcgacggcgaaagcgccttcgatgccctcggcgagctcctcgtcgccgtcgactgcgtcgacgatttctcccactgccgctccgtatgcagcacgctgtgcgacaagttcgggaagcacggtttggtgaaggagaagcccgctgtgcgaagccttgcggcgccgtttcgaatgaacgagggaatggacgacgtccaagctcccaagaagaagcccgagcccgtcgacggccctcttctatccgaacgcgatc

SEQ ID NO: 13745 - DNA, 439 bp, Glycine max
  modified_base (423)..(423): a, c, g, t, unknown, or other
  modified_base (430)..(430): a, c, g, t, unknown, or other
aataaaactgtaagtaaggttttttcaaccgcactcaaagtatgtgtcttctaactttgaagtatgtcgaatgcatttgatgtagcaacttttaaccatttcctatttgctgcaggatagtcattactaataatgctttttgctctagcaactttaaccattttctattttgaaagagtctcaattgttgcttatgaactaatgttgctgttcggaaatgtgattgcaggtatatagtttattaaataatgttgaagttgtatcaccatagatcgtcttatcaagtgtaaatctgcaccgacgattatgctgcttttgttcttttccctccttttttgggaatctccaactagctagttgtagtgctatagccaaaaatacaataaaattgatggagtgcacgagtaatgtgcatttctcctncatcttncactctctc

SEQ ID NO: 13746 - DNA, 426 bp, Glycine max
tgatctgcagaaaaataataatggctctatttatcctgcaatagatcaaactcgtggaggtgcagaaccacctctaattccttttggcttgaaagggaatcacaaggaatgtgcaatccttggtttattaaattttcctccagtatatgaaggtgtttctgaggatcttcacccagccactgaagcatcgttacatgaataccccaggctcagtaaagattcagttgtagtactagaagcttccaacaaagagatagagatcattgtaaaaggaagttctggggtaaaaagtcactataagcaatctacggtgagcttatccagcgaatcaaaacaggaacaagaacatgtaaaaaataaagttgaaaatcagggtgctggtaatattccaagatacttgaatctagaaccatcacttgcaatgga

SEQ ID NO: 13747 - DNA, 424 bp, Glycine max
tccactcctacgtccactcgttcgaccaccttcctatgcttcttcttcatccgtggtgggccaaatgcccaatcttgtcgaccctgaaatgttggcctgcatgacccgcgccatctgcgacgtattccagacccgatccgcactcaagctaatcgtagcaccgcccacccacgagcaggtggactacgcctatgccagactcgacgacctctatgaccatctctgccgtcagctccaacagatcgtggacctgctcatgccccacgagatcgacgagctccgctggcggtcccatgatcacgagaaagataatgccattaaagaatccacggagcaagagaagcgcgttctcaaatcactgattcaactcgtccagatgcacgattactacgagaagctgctgaaggacgcccttaagcgactc

SEQ ID NO: 13748 - DNA, 330 bp, Glycine max
cccacgcgtccggtcgaagggagatgtttttggaattaaaataagctggaactgcaatgcccccatttgcattccttgcaatcaaagatcattaaataaaaatgacaaccttgtctgcttcaaggttgttggtatggaaccttcagatgagccggttttccgtgtcaataacaccttaactgctcttgtgctggtagggagttctccatccgcactccctccagatttgttgattggtggacaagcagaaggacctgtgcctttgcaaggggacactgtgaacatcttggcttcaatacttacaccaactttttgtccgtcagtgctttc

SEQ ID NO: 13749 - DNA, 437 bp, Glycine max
cttctttgccgtagaccaccattactaccattgtttccactcaccaacacacaggaccggagcaattagggtttgtagattctgttgttcccaccacagatatcacattcgtagtttcaatcagcgtttgaatctcgcatttgcaccccctactgccgcaccgcaccttcctcactccatctctgcctccgccaccagtcactttcctccccaataaacaaaactcacaaagttaacccctttccctttttctcgaaccagaagacacaatttttcacgaaaagaaagacaacccaaaagcagaagaaaccttttcctaacccttgcaagcgttgcggcatcaccctcgatagttgaaaccgatcaatcgttcccagaaaccgaaaaaaatgaaactaagagtttaacgatgagaactcagacactgtttttgtgtt

SEQ ID NO: 13750 - DNA, 372 bp, Glycine max
accacgccttccggtggttgtgccttatttctaaagtactgcagacatccctgcacagagggggttccagctgactggtgactggcaaagcccgttgcgcacgcctctcccggaccctgcctgacttatattgcaggactgctacactagacgcctccagatgatacattgcattagatactgaccaagcttatacgctggataagagtgtccactctgcatcttaatccatatgctctaagccaactaacgcctcataggatccatatgtccactgacgtaaacatgcacggtacacggggcctggactagtgcaaactcatgaatgacccatcggtatccaaggaccatgctatctgcgaacatccttca

SEQ ID NO: 13751 - DNA, 436 bp, Glycine max
cccacgcgtccgcccactcgtccgcgaaagcaaagtgtctctctaacctctgcaaaaggccaaggttgcacggttttaactgcttaggtttttgtcttcaaaattaaaactgtgcaactttggttgcaaagtcataggggttaagttgtgtttgcatgaaagtgggcttgagataattgtgcctcttgtatgatggaatccctttggaagcttttgtatttgctggagcctgcgcctgtcacacttatcactacagctgtggctgtgacatttggtgctgcttttcgagctctaaactatgggaaagaaatggagcgtaatcgggacttctctgaagcatcgattacattggataggtctcaggcattgatgatcccagtgatgagctcttttagctcgcttttgatgttctacttgttctcatctgtctcacagc

SEQ ID NO: 13752 - DNA, 287 bp, Glycine max
aaaaaacatacgaaaactcataaaaaaaaagcaaaaaaacaatataacctatacggaagggcaaagaagggccggccgatctacagaagccatgctcacgtacaacttgcatgtctacgtcatatcgtctgatatagcgtaacctaaatgcaatgcactgaccaaagtttgacaacgataatactgggaataccctgacgtaacccaacttaatgctcttgcagctcatgcacctttcgcctgctacagtaataactacaaggcccgctccgacatcccttgctaac

SEQ ID NO: 13753 - DNA, 438 bp, Glycine max
  modified_base (395)..(395): a, c, g, t, unknown, or other
gaaaagatgaataagatttttgcaatgtctgaagaagaaattatgtcagaccaagcagaggtcattatgaagaaatctactaacttttgttggccaagtattcaggacctgaatgcagctgcccacaaagaaaaatgtgggtggtgctttacttgcaaaggtgaaaatgaagacagggattgcttgtttaattctgtggtgaagcctatttgggaagtgcctaataatactttagttgggcttcaacccaggaagatccagaatggacgtcttagagatatcatatgtcttatcttctctcttgaggttcgattacgtgggcttttgttgggtccatggttgaatctgcatcaaactgatctttggcataaggatcttttgaaggcatctgattntcttcctgttaaacgattatggcttcttttagaatccaatttg

SEQ ID NO: 13754 - DNA, 411 bp, Glycine max
cccacgcgtccgacagaaaccaccttgtttcggaattctgttgcaaaattaagacagaggaagcatactccattaatgggtggtgttagatggggtcgtacagagtcatcttcatccatgaaactcttcttgctcatggtgcctatggtactggttgcaaggcttgtttctgtattgggtcctaacccctctagttggctctttagtgcatacgcacctgtgttatatttggagggctctgttacttcctcttcctcaactagtagtggtgctgtgactgtgaccaatccttccgaggtgaagcagatagaacggttagtggtgatggtcgtgtagaatcgtggtggatagaaagttatctccgatgacactgacttcaatcactcttctacacctacatgttctgttcag

SEQ ID NO: 13755 - DNA, 181 bp, Glycine max
cggacgcgtgggcggacgcgtgggctttttcttttgaacatgttccttttttcttgccattgctcttttctttcggacagtcaatttagtatgctttaaagtttgaactatctttgtcaaactttgatgatgtagacttccatactttgtataaagatgtaatgaaaatttagtagcattc

SEQ ID NO: 13756 - DNA, 410 bp, Glycine max
ctccctctcggaactttgaaaacgtggaagcacacccgagagcccacaccagtccccgtttgttccgctgcaaaacaaaaacaccgcgtcttccccgtgcggggaaaaagaaaagaaaagaaaagaaccctcaattttccgggaaaaccctacccacaatggtttcccgggaaaacaccaattggctcttcgattacggcttgatcgacgatattcccgttccggacgccaccttcggcgtcaattcctccgccttcacatggccccctaacgccttgaacgcttcctccaatgtcggcgttgaaattgatggctcgttgggggattctgacagtctcaaagagtctggctcaaagaaaagggttaggtctgagtcatgtgctgcttctggctccaaggcatgtcgggag

SEQ ID NO: 13757 - DNA, 451 bp, Glycine max
ctttttcttttccctttctgcctctcggaactttgaaaacgtggaaacacacgggagagcccacaccagtgcccggttgttccgctgcatatcataaacaccgtgtattacccgtgcggggaaaaagataataaaagaaaagaaccctcaattttccgggaaaaccctacccacaatggtttcccaggaaaacaccaattggctcttcgattactgcttgatcgacgatattcccgttcctgacgccaccttcggcgtcaattcctgcgccttcacatggccccctaacgccttgaacgcttcctccaatgtcagcgttgaaattgatggctcgctgtgggattctgacagtctcaaagagtctggctcaaacaaaagggttaggtctgagtcatgtgctgcttctcgctccaaggcatgtcggtagaagttgataagggataggcttaat

SEQ ID NO: 13758 - DNA, 420 bp, Glycine max
actcggtgtccttcaaacatggtaaaggtgtttatttttccttcaaatgtgcattattctaataattcagtaagctacaatgacctggtattcttattttgttaaagaagctataatgttattatccagctgatggccaatttgtaacgagcttatggtgcctactgcatttgcttcatgaaaaacccaagttggaatgaaggcccctcagtgaactgatggagttacaactctaagaattgacctgatgagcaagtctatatgctctcgtttatgtgatgatctgatggcttcaaaaccattagcaagcatacggattatcctagataatcttgtatcaatgatgagtccttcctcactttttaaccactaaatgctgagctgccttagaatctgattcaataataactttgggaaatt

SEQ ID NO: 13759 - DNA, 409 bp, Glycine max
cttctctattttaagtaattcaatggcttacactgcaagtcttgtgttcttagcttcgactttccttatcataaactttcctcttctggcaaacgctatcggatgcaatggaccatgcagaaccctcaacgactgcgacggccaactcatttgcatcaacggaaggtgcaacgacgaccgcgacgtcggaacccacatctgcggcggcggaatgccgccaaatccgccaccaagcggcggaagctgccagtcctcgggaaccctaaattgcggcggaaaatcgtatcctcagtaccgttgctctccgccggtaacttcctcgacgccggcgatcctgacgctgaacgacttcagcgaaggcggcgacggatgggacccgtcgcagtgcgacgagaagttccataacaac

SEQ ID NO: 13760 - DNA, 444 bp, Glycine max
  modified_base (240)..(240): a, c, g, t, unknown, or other
cccacgcgttcgcccacgcgtacgattgacattggcatggctacctcgctgtgtacacgcagctacagagtcacactgaaactgtacggaacagattcccataagttaaacgcaaagccctcagttcgttataggcgtcgttttggcaccaccaccagaatatgctgcacctctaataattacaacgacaacaacattcaacgacgaccccaatgcgaagctattcaagtttactcgcanatcgagagattacttacagattctgttagacaatcacaggatggttggtggggttccccagactggagtgaagttgagggagcttggattctcaaaccgaaaagctctgaacccaattatgtagtgcattttatcggacgtatatttgttggagctgctcctcagcttacctaccggaggtttcttgagcgtctctcagaaaag

SEQ ID NO: 13761 - DNA, 443 bp, Glycine max
tcgtccgtccactcgtccgcggatccatacactcccagaaaacatttttcattctatttcggagcgccagtcagcaacaacaacatccctttcctttccacaagacaccaaacaaagttcacagctttttttgttctttcacctcgattcacgaactgggtcatcctctgattgtggattattggatttcattttgagctacaccacacccccaagactttgactttcaacccaaaaccaggtaataaaatcaaataaaatctcatcatcttcctttgtctataccctttctagatacatatttctttctttctttttgtatttgaatctttttttttttcttctctctgaattctcttttgttttctagtgctggtgtgtgatttgaaggaggaattttaaagtggcttgtggttttagaattctgtgactaacgcgttctg

SEQ ID NO: 13762 - DNA, 434 bp, Glycine max
cagagaatacctgctgtgcctttgagatcatatggcggggtaacctctataaggatcgcaaaggcagagaatacctgctgtgcaatatgttcagcaggatattgacgtaggggaaattgcaagaagctcacctagctgtcaccatacattgcactagatatgtgtggacaaatggcttgtcaagaatgattcttgtcctgtctgcagacagaatgtataacttgttccttgggcaatatgagattatctttatgggcagatgtatatgttgtataatccgtttctatacacacatactgagattaccattaagatttgaatagttgacattggcatcttgctctattctgcgatgtaatcgataaatgatactatatgggatggaagccaatgcccaataacagatgttttgggagaatgagactaacgcgttc

SEQ ID NO: 13763 - DNA, 366 bp, Glycine max
  modified_base (309)..(309): a, c, g, t, unknown, or other
gtttattctatcatatccttgttcaaataattctcttttcaattacaataccgggatggcagaaacttatgttcatgaccattctcaaggtcccaataacatttacttgaagacaattttgagttgaccttacagcctagttccacctatacaaacacccttgatccttcattcttttttgagttgaccttacctagctccaatactggcaacaataatactcttgggcatctgaactatctccattcttttttttgctgctttctttgcagtggatttgctaggttttaaagaaattaaatgcgtttntatgttgctaagagctaggtaattatagaattcatcttacacatacttcattttact

SEQ ID NO: 13764 - DNA, 457 bp, Glycine max
  modified_base (211)..(211): a, c, g, t, unknown, or other
  modified_base (258)..(258): a, c, g, t, unknown, or other
  modified_base (284)..(284): a, c, g, t, unknown, or other
  modified_base (290)..(290): a, c, g, t, unknown, or other
tcgggaacctcatcccttgttaggtgctcttgaaaacataccagtagtgcaaattgctgctggatattgctatctactttgtctggcttgtcaacccagtggaatgtcggtatattctgttgggtgtggtttggggggcaagcttggacatggctcgagaactgatgaaaaataccctcgtttgatcgaacagtttgggctgctgaacctncaacccatggttgttgcagctggtgcttggcatgctgctgtggtggngcgggatggccgtgtttgtacgtggngatggngccgatatggttgcttggggcatgggaatgaagaatgtgaatcagtacctaaggtggtggaagcattgagcaatgtcaaagctgttcatgttgcaacaggagattacacaacctttgtcgtgtctgatgatggtgatgtggattcatttggctgtggagaatctgct

SEQ ID NO: 13765 - DNA, 441 bp, Glycine max
  modified_base (369)..(369): a, c, g, t, unknown, or other
ctgattggaactagaaagtagaagctgaaaagagaagaggttgcgaccaactttgcaatcgcacctcgaatcaatcgacactcagcggaaaccctagaaagtagaaactgaaataataataataataataataaaaataatagaatgcgaatttagagattttgcaaatggcgaagcattcggtggcaatggcgaagaagcggtggccgataatgttggcggcattcttgtccgtctcaacagtgacggtgctcttaatgagatccaacaactccgattcctgcaacaccaaccattttactgttgcacaagataatcagattcgttcccctgtccaactcacaaatgcggcttccagtcccctaattntcatgaagtccaagctagttctcatggtttcgcacgagctttctctttcaagcgggcctttgctgctgatgg

SEQ ID NO: 13766 - DNA, 223 bp, Glycine max
aacagcgtacgaatatggttttctgattcttcttaacactgttcattgaagggttcagagtattctcaacaagactcgcgctctgcgaggaatcgcctctgggataagagtcatactgcgatttgttaagccaggaatcccgctgcaggacatcatcccgctgactcttgatacataggctttcagagacttcatagacttgcatgtttggaggtaccgatgt

SEQ ID NO: 13767 - DNA, 157 bp, Glycine max
cccacgcgtacctacatgaccttctgattctccttaacacttctcattacaggggtaggactatcctcaacagtactcgcgctacccgagaatcgcctattgtaccaacatcattcgacgaataccataaggcagtaatttttcagcagacacataa

SEQ ID NO: 13768 - DNA, 433 bp, Glycine max
ctcagtttatgccctttcgccgccttattctgattccagaaacatcttcaatcaatcggccctcgtctcctctcaatcaagtttgaagctgagaaataatcatggccggtggtgcgaatttcgtgcagagggttctctcttacgtggtgaatgaagtggttgtcaatgggcttgccaacagccctgcatttcagaggtttgcagtgaggacatcaaaaagaattgaagatatttctaacaaagctgttcagaagaggcaggagctagctgagcagatcaaggacatctcaaaaaatatggagtcattcaagaaccagtaattttggtattcttgctaatggagtcctgattttctttagccaaagatgttcctggtgacaaggctgggtttttgtaaatttcttttggtggaatatattctggttcttaactc

SEQ ID NO: 13769 - DNA, 436 bp, Glycine max
  modified_base (332)..(332): a, c, g, t, unknown, or other
gatttttctgatgaaaaccatgctggcgagggccctggaggagcagttgcaatggactgtgaaatggttggtggtggaagtgatggttctctggaactttgtgctagagtgtgtttggttgatgaagatgagagattaatcttccatacttatgtacagcctgaaatacctgttactaattacagatatgatataactggattgacagaagagcatcttagaaatgccatgccacttaaggaagttcgagaaaagctactgcaaattctacacaatggagaatccattggcaaagttagactggatggtggaaaagcaaggcttcttgtggngcatgacttagcacacgatttggattgtttaaaaatgaattatcctgatcatatgctgagagacactgcaaagtaccgtccgttgatgaaaaccaacttggtca

SEQ ID NO: 13770 - DNA, 419 bp, Glycine max
cccacgcgtccgctcctctctctctctttctctccttcctctctggccatgattggaagtaaagatcgttctgctgactttgaaggtgagaactccaggagcaagctttcaaggcacaattttgaggccaacaaggagtacccagatgaaaaaggtgttgaatttctgagggattcatcagaagtgggtggttgtggtggcagctcagggttgcaagagttgaccctcagctacctttgtgacaacccaaaattcaatcttgctgagaaagagattcctggtaaaagcttgttggagaaaatgagccacaaaggtaaagaggttgtggtatgtgagaattcatatcaagatgggaaatgggtggaaagagatttcctcagcctgagtgagccaagagaagattcttcaaagagatccct

SEQ ID NO: 13771 - DNA, 426 bp, Glycine max
  modified_base (363)..(363): a, c, g, t, unknown, or other
ggagaaataatggtttggttcctttaagtccaattgtgctgcttgtggaatgtgctgatggcataactagtgcagggttaggtgaaggtgacaaaaaggcaaaagttagggctagattgtcacggcctctttcaaaacctcttcagagaggccgtggaaaacatgttaatcatggggacttccgctctggccgcaattctggaagattggtaaggtcttcacggagtcaacctgcaccacgtagtcttcctgcccatgtggtgagaggagttggaagtcgtgttccgccagttagacctattagtgtgagaaatagacgtcctgtcacacccatgctagtaagagccaggccagtggctcctncagctagaagctatgacaggagattggctgctcctgcttattccaaaagtggcatgaaaagag

SEQ ID NO: 13772 - DNA, 131 bp, Glycine max
cccacgcgtgcgtccacgcgttcgcacacgcgttcgaaatagagataaaaaaaataaaggataagaaaaaaaaaaggtgaaaaaataatagaagattataatatataaatgaaatgaatgaaatgaaagta

SEQ ID NO: 13773 - DNA, 375 bp, Glycine max
caagttgcaggataatatcgacctcttctgccacacaaggcacaatattaataccatggttaataatatgagtgagatgcctggcattatgagccaaatgccgccactgcaagttaccattaacgaggatcttgcaagtagtattctgcctaatagaacatagcgggcaaagtgctgactccatcaatatttccaacacaaatctaagtgcatcagtgtagagaggttcgcgttcttagctgcaactgttttggtgctagctacatgacattgaggagctagggagtatctcaggactttccagagtttctaatccatctttgatcttattgctccctgctgaaagaaaccttggaactcctgttgtataaacaa

SEQ ID NO: 13774 - DNA, 411 bp, Glycine max
cccacgcgtccgtctgtgtctaggtcacgatctagatctcaatcagcatcaccaatcggatcttctaggccaagatcacgatcccgatcacgatcacgatctggatctggatctcctcatcaggtcctgtcaggtagtggttgaatttctgacaaagctggtggttctctggtgatattgttccattctggtgggcagtatcggaattatattggagttggactaaattgttttaagggaaaattattgatgtgcctaggctgtttggtgattgtcttatttcttttaaattaaaatgttggacattggccttgccctttgtaccttagcaaacacaagaatatctttagtcctcgcaaactgtgaatccaatttgaatggttttaaacagatttattaaaaaaaaaaata

SEQ ID NO: 13775 - DNA, 399 bp, Glycine max
ctacaacacaaggttaattgaaatttgaaatcctagaagagaagtacgatgtggaagtggttgttctctcgggagccagcgccgccgccgccgccggtggttctggtaccgccgctcttcgacttccctcccctcgccgcgcgcaaccgcatgctccattcctcctacgacgtcgttttcggcaagctcgccctcacttcgctcttcgaggactacttccaccaggccaggaacttcaccaccagaatcatgctcaagccgatcgaggatcctcacgtcgatctcattgcaaccgtttcgggtcctcttgatcacaagccaaaagacagtattgccggagatgcattgtttcgctggcaaagtgatgttaatgatcctcatacgtttatggacctttat

SEQ ID NO: 13776 - DNA, 212 bp, Glycine max
cccactcgtacctcaacactttctatataatatcatcccattatcacttcatcgtcaggccgatcacgcatgcccgactagactcaaccttcgactaacccaatcctcacctttacgatcacctctcatcaacgcaagtacaacaaccatcactgttatacagtcttcttcgacgtctcaaatacaccatcaaattcatactgcctatacaa

SEQ ID NO: 13777 - DNA, 386 bp, Glycine max
tgcaagcgtacggaaatttagcaacgcaatgggttctcttatggcaagatgggactttgtgacctaggatccagaattaactacaattgataggaatcgatatgttaacaaagaggaaattaaagctttctggaaaactaagaatgaagccgaattagaacacctgaaagctctttacaaattatctgagactattcgggcacgcagatgcgagtattcaaacagatctcacaggtcaagtaccgcgaccgtggacttaggcatggatggtgacacatgacgtttgtagaatcttatcaagacaaaatgctgcagatactagtcgtgactgcatgtggaccaatagcatctgggcatgtctgaatgaaccgccagttatagaagct

SEQ ID NO: 13778 - DNA, 325 bp, Glycine max
agagaatcaaaaggacacgtttcatggagcttaaagatgacgtccacaaggctttcaacgatggacaaggccgagtttagccgctctgggatttcatcttcatcatcctcatcatccctaagagattctgttgtacattacaaggctaggaaagtgtaataataaaagcatacatagcgttttttattttgacatacatattatatatagtgcaaatttgaaaggtgaagcctaccaactcatctgtaaaattgtgaaagcaggaaagttgatgttatagtaccttttgtaatcaaaaaagatacactgaaaaccaaaaaggtta

SEQ ID NO: 13779 - DNA, 430 bp, Glycine max
cccacgcgtccgcccacgcgtccggtgaaagagaaaatccgagactctgattttgagagtcgagtgagtgagtgctgcttcctctgaatcaaatcattcatcactctctctggttctgagtttctgacaccaaaatggtgaatcctcgaattccacgttcaaggatcccaactttcacacctttcacttctgctatctccatcgccctctgcattttctttgttctctctcttctcttcacttcccattctgattcatcccatcaataccaccacacaggttctgatggtggtgttgcacatggatttgagtcaataaggagatccattctagctctgaaaacagatcctctcaagcctcggttggaccagattcgtaagcaagccgatgatcatcgctccttggctcttgggtattcttcctatgcacg

SEQ ID NO: 13780 - DNA, 335 bp, Glycine max
attgtatgcagggttctttctcatggcattaattagatgaggatatcgtggaaggctgaaacaatgttctcgacacatacaccaaaataaaaggaatatatgttttgcatctaagatttattaaataaagccgaatgttggttcttgtatcattaagattttttttttaattgtcgaagactttatgtattcatattcaccttgacttctacggtcaaatttttcataagtggaataaaagcaacttgttatacaagtttttttttttaaaaaaaaaaaaaaaaaaaaaaaaaaacaaaaataaaaaaaaaaaaaaagaaaaaataaaaaatata

SEQ ID NO: 13781 - DNA, 352 bp, Glycine max
gaggaatcacacaagagaaatttggtgtggatcttggcaatttatatttggtggatgaatcgttagaatgaaaaccatcgcttatatagttcgcatgtacttgctaacggtggcgcaccttagggggtcacgtgagttcatgcgggtctcggaaagacatggcggctaattttgcagtgacggctatggtcaatatggctatggacatgacgatcgtagaggtgctgggtgtgatgagctccgctcgtagtacacgtttcatgtgttgactcatggtgatgaataccttctaggtggcactattagattctcaggagttcaatcggttatacgcctataaaaataacttttt

SEQ ID NO: 13782 - DNA, 360 bp, Glycine max
gttatatctcaccactaagtttattattatcaaaaccaaaagctagcaagctaccttgcgaagcaacacatggcttctacagacaagcatggcgacactgaatacagaacatcatcttcaactccagctcctgcgggtgttgattactttaaatttgatgttatcctaaggtttgtgttatttgcagcatcactggtagctgttgtggtgatcgtcactggtaatcaaacagaggttattcttgtgccacagcctgtgccatggccagccaagttcagatacacaccagcctttgtgtaatttgtagctgcattgtccgttactggcctctacagtatcattacaacacttgcatcactc

SEQ ID NO: 13783 - DNA, 390 bp, Glycine max
  modified_base (38)..(38): a, c, g, t, unknown, or other
  modified_base (320)..(320): a, c, g, t, unknown, or other
  modified_base (365)..(365): a, c, g, t, unknown, or other
  modified_base (377)..(377): a, c, g, t, unknown, or other
ttccaaggagcctggccaggtgcagcttcctccacctnctccacctagtcaggtgccagccaaggctggtgctatccagtctgatggtgctgtgctttctactgagaataagaattcactgtcaagccaggagatcccaaaaatggttgccgggcatcctcctccaaggcaacaaccccctgttccaggacccaccttaatcccaagtttacagcctgatgtattactccctggaatatctcgtttccctccacccccgccaccacccgatatgagaccttctttgtccgtcacagggctacatgctcaggcaccacctnctggaatgatggtccccctaatgccaaggccaccatatggtcctncacctggtcctnctccaatgatgag

SEQ ID NO: 13784 - DNA, 426 bp, Glycine max
cccacgcgtccgcccacgcgtccggtggcagcaactgtcacaggctgcttttgagaaagttgagatagataaagatggctatattactacggaagaacttagaatgcatacatgcttgagaggctccgttgatcctttgctagaggaagctgatattgacaaagatggaaaaataagcctaccagagtttcgtagactcctaagaactgcaagcatgagttctaaaaatgtttcaagcccatctgttcatcggcggcggagattctagattagaggtgcttcagaggctgagataagtttggagatacgagtggtggagttcctctataagtatcttattgtgtgattgtgctgagtctcttaagactatcttctattatgcagattttagccactcatccatgctgacaatctatgaaactcaaa

SEQ ID NO: 13785 - DNA, 422 bp, Glycine max
gcggtgcgttatggaggaatgatcggagtagcagccatgcccagtggatgtagcatcagagcaatatggattctcaacaaccttgacggcgtcgttttttcccggaggtttccggtggtagagaagcgttggcgagctgcttgcaactcaaacgcccacaatgatacccatcaaatcttctcttccttacccactgactccgacctcgctgatgcttttctcgaccgaaagcatagggagggatctgcacgaggatttggcatacgaaagagtaactcaactctgggatcggattcttgggtggatgatcccattactcgccatatcatcggtctttacattagcagagaaggggaggaaaataagaatctattgtggcctttaatcttgcacacaaagggcctttacagtattcttattct

SEQ ID NO: 13786 - DNA, 374 bp, Glycine max
aggacgcgtgggtcagagcaacgctagcattagcattcgcctatattatgcaacgctgtgctcatccgatatcaaccactctcagacaaaccgaacactcgtgctgtgtctatctcattccatttattaaacaatgccattgctgatcaacataattctgacaccctctatagcaatggagttggacctctgattactctaactctagctaggattgagaaacatgatcaatatcaacgactacgagtcgaagagagtggtttgtttcaactgttaataatggctgacgagtatcagcgtcgtgaaactcagatgatcttaccgatattgataattctgctgcttgtgttgatgctggatcgatgtcagggctc

SEQ ID NO: 13787 - DNA, 397 bp, Glycine max
attcaaagggcaacaaacaagaaggcacagactcagagtcagagcaataccaaaacggagaaaatcaactccacacgctttcggaaccatcaccatccttctctctccgttcccgcaaatccccttcgccaccactccactccctctctgactcccccatctccgatgcccacctctcccctgcgccgcagaagccgccgtccgattcctcgccggactcctcgatctccgacggccacttcacgatcggtgaacagcgcctctccccggcgccgtcgaccgtggtgacggctcatcggttgaaggtggagcccgcggtgttgaccagggtcgatcccggcgccgaagagggtttcgtgaaagacgtcgaacaagccaccggcagcgccggtagtcg

SEQ ID NO: 13788 - DNA, 430 bp, Glycine max
cccacgcgtccgttcgtatcaaaattctatttgggacatctcttctcaaaccaaacagggccttatttgtgtagtgtgaatgtgtgatggcgagtcgttccttcttaaaaaattggaaaatccttgattttgcttcgttactactgggagagtttacgagaagtatcaaacccataaaagacgtttcttcaacatcattgaccttcgttgaatttaattcgttcaaaacggcgttgtgtttccggcaataccacgacggaaggcccagaggccccctttggaaaggaaaaaagctcattggcaaagaagcgctttttgtcatatcggggtttaagaggtttaacgatgacgaggataagcttcacaagttcatcaaaactcacgttctcagactcttgaagatggacatgatcgctgttctcactgaact

SEQ ID NO: 13789 - DNA, 409 bp, Glycine max
cggcttcaaccttgtagttattctctttcttcttttttagctatccctctcttgaaagatctagatctcgttcttccttgatctacgttacgcttttagtgaccggatctgtatggatctgaaccagatctacacgccgatggtggttttggcctggtctttcatagatctgatgcatggaggctcagatctactgtacagaggtgtgcgattcatgttcgtctctcttttggaatctgtttcgtagaaagtcgtttggtcttccatgtcgcatggctcttgaggtatttttttttgcagatactgtagataatcgatgagaagaacgcagatccagccgcttccgcttgttcgatcgctacagacgcttgtatcggattattcatgattgaatcataagcagcatgtc

SEQ ID NO: 13790 - DNA, 411 bp, Glycine max
caggactacaggagcaattgaattagtattgattaacgttacatctaacgggtattacgaagtcaaccgatctaaaaaactaaaactcggatcccctttatgttgtttattttgatttggagtggttccatcgggagtttggatggccaccttgaatgttccccctcttcctccttcaccgagagacgatgccatacaactttacgctgctttcaaaggatttggatgcgatactagcgttgtgatcaatatacttgctcatcgagatgctacccagcgtgcctacatccaacaagaatacaaagcaatgtattctggggatcttctcaaacgcttatcttcagagctttctggcaagttggagactgcactactgctttggatgcacgaccctgccggacgtgatgcaat

SEQ ID NO: 13791 - DNA, 420 bp, Glycine max
  modified_base (187)..(187): a, c, g, t, unknown, or other
  modified_base (316)..(316): a, c, g, t, unknown, or other
  modified_base (333)..(333): a, c, g, t, unknown, or other
aaaaacactggcattccatttttcaccggttcccggacttcaccacaacgatgggcaacgaccgggttttccggcggaccgagggccttaacaaccaacttcttcggcggacaacccccacccttcggcccttcttcaaccccaaccctgccttagctactcccccccgagctctcaacaccatctncttcgacacgcgtgagatgcgaaaactaatggattgccacaatctggaggagcgcgactggatcttctctctcatcctccagagccccctcttcaacccccgccaccgcgccggaagggtgttcgtctnccccgactacaaccagnccatgtaacaccagcgccaggccaccatgaagcgcatcggttatctcctccaaaaaggggtcttccgaggatggctcacgggaaatg

SEQ ID NO: 13792 - DNA, 411 bp, Glycine max
  modified_base (320)..(320): a, c, g, t, unknown, or other
cccacgcgtccgcaattgtctttttctgttgtttctttaaaataaatacttattccaggtagttactattttcagcatcctaaatcagaaatagctggagccaagttttgcagttctgacttggatgatggtagttctgagttgagtttaggaagcacagaaggtaataatgaagattattctagaaaaacaattcattggagtggtagagaaaatactggaagaggaaggaataaagaaaagaaaataaaaaaagacaggaagaatttagagacaggagagaatttaaacaagcatttgaatgacataaaggaagcctncagtggaacagatgatggtaaaaatcttagttttatcaaatcaaattttgtcacagattttgcagatgcaaaaaattcaaggtcctcttac

SEQ ID NO: 13793 - DNA, 404 bp, Glycine max
accacttctccaactaatgggcgtgttcagcgaagatccgaatgccaacccgaacccgagcgcgatccgagaggattgggcctacaatctcgaatacgaattcgaactcatccgcgaactcatcgatcgctacccttgtatctcaatggacacagaatttcacggcggtattttccgaccacatgtggaccccaccatacccttcaaccaccgcaaccgtacgtccgaccactaccgcctcctcaagtgcaacgttgacgctctcaacctcatccaggtcgagctcaccctcaccgacaccgtcggcaacctcgtcgacctagccggaaaccgctccatctgggaattcaacttccgtgacttcgacatggcgcgtgacgcctacgctaccgactacatcgatc

SEQ ID NO: 13794 - DNA, 426 bp, Glycine max
  modified_base (369)..(369): a, c, g, t, unknown, or other
  modified_base (386)..(386): a, c, g, t, unknown, or other
ttaactctcttttctagaagaatcagaagcagttttcgtttaacttacagtatccagtgcctggttagaacatgactacgacaataattatgtcgcctgttgttcattattctgatctcattgttcccatttatggtcttatctaagttcaaccagatactattgttcatatcagaagagtgattgctgtattaaggtgcctttctagagctcccaggttgacaagcttggattgcgggtcaagtattagatgttgtatgagatatgaggccaaagttgctgagttgttaccaaaaaattctgcttgtaagaatgtggaactctaatggaggaatgcataatgtttgcaattgctcatgcatatcaatntgattcactgctaactnttcatgattagctatctgacttttccaggttcatgacact

SEQ ID NO: 13795 - DNA, 306 bp, Glycine max
gtcgccgccggtaaggcaattcgatacctcttaaccctaaccagacgcagccaccgttgtcgatttccatacccctctcatactttgcctgattgctttcatgtttcgattctctcttttcatttcaatttttatacggttcgacgttgattgtatccagcaaaaaagtaaagaaaattataattgatttttgtcttgcggtttttttattgattgattacggttgcgtcaatcattgaaaaaaatattgaatcctccgttctgatttttttggagggttagggtttcgaaatttggggatttttt

SEQ ID NO: 13796 - DNA, 390 bp, Glycine max
cggacgcgtgggtgggaagttcaattccgcttcaccaaaccctgaaagcccttaaaccgcaacccaaatctccatcaacaacagcaagagttccatggtcgttgaatcccaacaatgaaagctctgagaaccctaagaagaaccctctattccccaacacccgcaaccgtttttcgcgccttcttctccgcacaaccacagccgcaccacgatgaccccaccgactcctccgtcttcgatagttcccactacgcccttgaggccgagcccacgctcaagcccgagccaaagcccacgtgggacgagaagtaccgggccagggcggaccgggtggtgttcggggaagagggccccaaggggaagctgcgggtgaaggaagaagaggatgag

SEQ ID NO: 13797 - DNA, 418 bp, Glycine max
  modified_base (402)..(402): a, c, g, t, unknown, or other
cccacgcgtccgaatttggtttactcaatcgatcttaggttttggtcgagaagatttcggttatgaatttttttattttatttaaaatttagcgtttagaatattacattgctttcgaatttgtaggtcggtcaactgccgaagaagtgtgaatgggtctatactcaagtacgggaagggaatttcaaatttggtacgaactaaagggctttgaaacttgaatctaatagtgatcggattaagtattcacgtttttttaatggtaatcaatgaaaatatgcgtttcgtcgtgtgttattaggatgatttgcgtgtgtgagatcttgagagtatatgtttttctcttctcggtcttcttgtaacagagagattcaattcatggtgaaactaactgtgtatggntttgattcattgaaca

SEQ ID NO: 13798 - DNA, 383 bp, Glycine max
gtgacgcgttagttcacacactaagttctgaaaaatgagttccaaagtttatgttatggtacttatgttcatggacactatactttagatctcctatgaagttgcacactatgatgcataccagaattttgacaaaacagatgggaagcgtagtgcaaatggagtagatgaaagcaaatattaggcgtggtggctatggcgactatggtggttgacgctgaggtggatggcgtagcggctatggaagctaccgtggtggctatagacgtacgcgtcatagctatagaggctggcgttgtggctatgagtagcgacgtcgagactacaagagttgatgtgggggctatagccctaacgaacatcatgaggctaacaattgatgc

SEQ ID NO: 13799 - DNA, 442 bp, Glycine max
gcataatgtttcaggccctacttcagttacaaataggaaatctgtgtcgaactcatttgaagctcaccagattatttctttgaatccactacctatgaaaaagcatggttgtgacagagctccaatacgagcttgctctgaggaggaattcttgagggatgtaatgcagtttttgatacttcgggggcataatcgtctaattccgcctggtggacttgctgagttcccagatgccattttgaatgcgaaacgccttgacctgttcaacttgtatagggaggtggtttcaagaggaggctttcatgttggaaatggtatcaattggaaagggcaagttttctcaaagatgcgcaatcacactatgacaaatagaatgacaggtgttggcaatacactcagaagacattatgaaacttatctcttagaatatgaattatctcat

SEQ ID NO: 13800 - DNA, 193 bp, Glycine max
cccacgcgtccgggactttagttttcaaatcagagtaattttgttatcatatttggttgataatgcaagattatagaccaatttattgattttgatatcatcattattactatttatattataaatatcattaatgtatttcaggataatttttttcgatattgtgaatttgtgattggaaccttagaaattt

SEQ ID NO: 13801 - DNA, 265 bp, Glycine max
gggattcgcgtttactgatctcaagtttttcacctcactgtcgtaaccaaatgattggtataattcaagattatgtaccaatttattcattctgatatcatcattattactatttatattataaatataattaatgtatttaatgataatttttttcgatattgccaatttgtgattttaaccttagaaatttaatatatattaaaaaggtctttcattctaaaggattcaaacttacttacactttcatgctaatttataccta

SEQ ID NO: 13802 - DNA, 438 bp, Glycine max
ctgatgtaaattcaaatagtggaagccaatttacctattttttgactgctcctttgtcagcattttgccaaatgattggtctcacccccaatgaggctgatacagatgtctacaatgaagcagagaacattatcgctaatgctttcacggagtgggaaataattctttgctcatcaactaccatggatttagtatgggcgcaggttataagtgatccatttctaaggcggcttattctaagatttattttctgccgatccgtgatatcttttttctgcacacctgaggaaagtgaacagtaccttccactttgtttaccctatctaccctcttctgttgcaccaacgtctgaagccgtgcgttctgctgttgtgcaacttgccatgcactttgacgttgctgactcctttcactttactgaaacataagattttggga

SEQ ID NO: 13803 - DNA, 403 bp, Glycine max
aacacgcgtacgttttagaagaaaataaaattgcattgagggagtttgtgggttgtcttgcgttgcttcgttgtcgttgggccggccaaagacacatcctttgatgccgttttagtgtctgctttggacacctctctctctgtccctcagtttgatttgataatctgagatgaactaccttctcactgattcatttgatggcgaggctagtaatggccagccttctagacaaagtgatattgaaatgggacaggttcctagaaacaactccgatatgggaatggaagcttttaataaacagatccatgaggctgataaacaaatcgataagctttccgtgctacttcaaaagctaaatgaagctaatgaggaatccaaagctgtcacaaaagcatctttcatg

SEQ ID NO: 13804 - DNA, 125 bp, Glycine max
aaaaaaaaaaaaaataaaaaaaaaaaaataaaaaaaaaaaaaaagaaaaaaaagggtaaagaaacgttatgggcggagggtaaagtgttcgtgcgtggactttcctatactggctacgtattaac

SEQ ID NO: 13805 - DNA, 389 bp, Glycine max
aacaaagtatagcttctaaattttgtgagtatagtctgggcaattgtaaaatggacttgcgtaatcgtgataaacaactgactgttgctgtgaagaagacagcattgagagatctgcaaaatgataataaaatcatggtgccaacctctgttggaagctcttcatttttcaaggataaggatcttggtactgattctagtagagtttctggcaccaagagacccttgtctgactacccattgaatcaccatcttcaacaatctccaagcaataatgctgcaaatggacatcttgtgtatgtccgcagaaaatctgaagccgaattgagcaaaggcacttgttttgaaaatccaagtattgatgcttattgtccacattctaagcagctt

SEQ ID NO: 13806 - DNA, 432 bp, Glycine max
ctcttctcctttcttcgattttcgccttttcaattcactctctgatgatcaccggttccggttttcggtttcatttttccttccaacattctatttctctttttttgcatttcattttcgatcatccgcagatcgcttgcgtttttgttctacgacgctgatcgtatctttaatttttattttaattttttttccttctggtactttcggtttttttttagaaatatatatatttcttattcatttattttggtgaactcctgctattatgcatatggaatttgggaagaatttgattcagtaatgagttttgcaagtctcgtttggtgttattagactgatctactgaatagccagctagtttgtgtatttggaattttacatgataatctgtgtttacttacggtcaactcaatcggtttcttctcttat

SEQ ID NO: 13807 - DNA, 443 bp, Glycine max
cccacgcgtccggattagcttatcagtctagcatgaatctgactaaagcaatcacagattgtgtcgtgcatttatctcacgtattagaggatgttttgacatggataactgaatggaacaaaagacctgaagatgagcatttggagaatattcttttacttcttcggaaagacgggcataatgatggaccgggggaggtctttcacattttagaaacattcatttcctctatgaatgatgcagaacttggtgatcgcatctcccaatctctaaagtcttggagtcctgctgacgttttcaggaaaatgatgactgggaagctaaaagtactgacagaattttctgccatctgtgagtcaaaattgaagttatttaattctatgaaacagcagatagctcaactgtgaagaattctccatcatttactggtgctgaagttttat

SEQ ID NO: 13808 - DNA, 443 bp, Glycine max
cagcactgtaccgtaagtcttattatctccgaaaactttttgagaatagagagagagagagagagaggaaatgggtaaggggggaatgtcaattgatgaacatggagaaggcaaagaagagaatatggctgcttggcttgttggaataaactctctcaagattcagcctttcaagcttcctactttgggaccccatgatgtcagagttagaatgaaagctgttggtatttgtgggagtgatgttcactacctcaagacactgaggtgtgctcactttatagttaaagaaccaatggttattggtcatgagtgtgctgggatcatagaagaagttggcagtcaagtgaaaagtttggtgcctggtgaccgtgtggcaattgagcctgggatcagttgttggcgttgcgaccactgcaaacagggtcgatataacttatgcgatg

SEQ ID NO: 13809 - DNA, 360 bp, Glycine max
  modified_base (179)..(179): a, c, g, t, unknown, or other
  modified_base (220)..(220): a, c, g, t, unknown, or other
  modified_base (324)..(324): a, c, g, t, unknown, or other
ctccaatagtcaccgtaaagggttgaaaattcggataaggaaaaaggtggttgaaccggttaccggtttggcccaaactcaaatggttccaacctgctgatatttaattagagtctagggaaaaatttgcagtttaggaatacaaacccggtttgaaccggttcggtttttgtatgatnattagttagtgctagtgctaggcagtagtcacactagtcangcaaccaaccgataatattaggaattactagtaattaggcatttattgtttgtatttgtaaggttgtattgtattgtatcccatttacttagtgttgttgattntatttaatttaatacatagtttaagttaacttgagg

SEQ ID NO: 13810 - DNA, 436 bp, Glycine max
cccacgcgtccgagaggagggtgtgttgcttgtttctggaaatttcagcccccatcgaaaggcaagaagccccaacggtagtaatcatcgaaggaatttgaaaggtcgaaacttgagcatctgggatcgcgaaattggggattttggttaaaagggtataatcttcggaactgattgatggcaaaactgtacgtgaaagctgtgccaccggcggatctgaacaagaacacggattggttcacgtaccctggcgtttggaccagttacatgctcatccttttcttttcttggatcctcgtactctctgtcttcggtgatctcctggcatcgcttggaccatcgttaatctcgcacactttgctgtaacatatgacttttttcactggaagaaaggaacttcgtttgcagaggaccaatggatctacaatagattgac

SEQ ID NO: 13811 - DNA, 435 bp, Glycine max
cccacgcgtccgcccacgcgttcggcaaatatggtgactcatgttagcaagggaatcatcgattgactatgctattgcgactttgtttaatcctatgcctacctgtattttgcagtttattattaatgatatgagttaagtttgtcttaaaaaaaaaaaacatcttatgcatagtacaattcacatgtctccctatatccacattgatcttggctatattaattaacacagtgcaacgaggaagcacaagaatcaaggtgctaaggttgaacaaacttgttctcgtcatgtatatgattattgtgccaatgccccctaattagtagttccacaattttatgcttcgactaaggacctatattagctgtcaagtaactagacctagctcgcgtataaaaaaaactagacctagctccaaatcattagaaaagaacg

SEQ ID NO: 13812 - DNA, 388 bp, Glycine max
cccacgcgtccgcccacgcgtccgtccacgcgtccgcccacgcgtccgcccacgcgtccgggtttttttttttttataaaaaaaaagaaaaaagaaacatattcttgcaatttcgttgtacaaacaaaattcccctattttcggcacgcctttgttgaatttccaatctctatttttctttctttctatttatacgtaataattccaaaaagcctaacgcgagagattcatcagtttttcaattattcctcgaattttgaaagaatcatacaaacgcttgaaatattcgtcatcaacaacaaccttacgctgctatagattttttttttctcttcttacagatccaaacatggccgaagaacaccgatgccaagcttccgaaagtcac

SEQ ID NO: 13813 - DNA, 363 bp, Glycine max
gtgaatgatgactcttccttcattgtcctctctattcttcttcttcttccctaactctctctgcaataacaacaccatcaacaaccccttcaagccggcctaaaccccattacccaaaactttttcttttttctttccttcaacactctctattggatcatcacatattcaatttcattctcttcaaaaattccccttcaaaaaaatttaaaattaaaaaaaagtgctctttttgtgaattttgagccatttgccaccgacagatttcgatcttctccgtgccaaagttgtaatcttttcgaattttggcgaggtgggtcgatctgatttcgctcgaataattgcgggttcgattttgatctg

SEQ ID NO: 13814 - DNA, 180 bp, Glycine max
cgttgctttcactttacaaaaatgaatagcatgtaaaagtgttcagagacgctatgcttatcaatagcgttccttaaaagagccgcagcagatcaatgcggcgcacaatctgggggagcgttaatgccaaacagatgattgtgcatcaaattttggcggtgtggttacacatattgctac

SEQ ID NO: 13815 - DNA, 58 bp, Glycine max
cggacgcgtgggcggacgcgtgggcggacgcgtggggtaatgtttcttaatgattttg

SEQ ID NO: 13816 - DNA, 436 bp, Glycine max
ctcattctttattttattttctgtcttaatatcagccccaaactcccttgtgaactgttaagtctctgatcgatcttaagagtccccaacaacgacataagacacaaaaaatggaggggaatctagagaagaagctgttgagcagagaaaaaaaatcagaagaagaagaagaagaagagaaattatcattggtgaagagggtgtgggaagagagcaaggtgatgtggatagtggcagcaccagccatattcacaaggttcaccacctttggcatcagtgttataagccaagcatttattggtcatattggttcaagggaactcgctgcttatgctcttgtgttcactgtcatcatacgctttgccaatggtattctgtattaacatcaatggatgggaaatgatgatagcatttggtttcatggctgcagcaagtg

SEQ ID NO: 13817 - DNA, 421 bp, Glycine max
ctctgttgctgcattcccccatggcttctgcttcagattttgcgttagcggtttcttctgaactcgagtcagttttgaggctgaagactgttaactactttgttacgaggaggccatggctcgatctttatggagttaacgtgagacctgttgcgcctgttgggagtgcaagtaggaggccttacgtggatcctgcacttatacatcgttccttacctgatgagctgctttttgaggtttttgctcgaatgactccatatgatttggggaaggcatcttgtgtttgtcgaaaatggaagtacacaattcgtaaccctgtattttggcgcaatgcatgcttgaaagcttggcagctatttggaattgtagaaaactattagatacttcaatcaaaatatgatggctcatggcggaaaatgtg

SEQ ID NO: 13818 - DNA, 430 bp, Glycine max
caaactttaacaatctcataaataaataatcagaacgaagaagaagaagaattgaattcgaaaaatcgtagcgtagcgttggttgcgattgaaacggtacgatgggaagaggaaaattcaagagcaagcccaccggtcgccgccagttctccaccccggaagatatgcttgctggaacctctaaccgtcctcgaacttttagacagaaagaagctgagcatgaagaggagcctgaggaagtatctggggatgaatctggagaagaatcagaagaggaaacttctaagaaaaaaggaacacatggagttattgagattgaaaatcctaacttggtaaagccaaagagcttgaaagctagagatgttgatgttggaaaaacaacagaactttcaaagcgtgaaagagaagagatagagaaacagagagccca

SEQ ID NO: 13819 - DNA, 100 bp, Glycine max
atcgcaggttcgcacattaacctcttctatgattctcataaactcgtgcgatggacacacgcacaatcttgtaattttaccttctaaagccttacttgct

SEQ ID NO: 13820 - DNA, 325 bp, Glycine max
  modified_base (205)..(205): a, c, g, t, unknown, or other
gttagaaaaaactttcaactgggcatgcatcttatatcttgtgacatgtcatatattggtggcctattagaattaatatgttccagtttgagacttccatttttgcaagcaattcttagtcttgtttagtttgtttgaataaagtagtaaggagcatttcttgtggtatatgtaacttttggagttattgcatatattggcagangggaatggtagagaaatttaagttgatatacttatggttcactactcaagtaagaaagaaggtagaggtctgaagagaaattaaggtgataaacttatggttcactactcaaggtagaaa

SEQ ID NO: 13821 - DNA, 342 bp, Glycine max
  modified_base (308)..(308): a, c, g, t, unknown, or other
  modified_base (333)..(333): a, c, g, t, unknown, or other
tcggccacgcgtccgtgattgacaaccgtcttgatgatcttatttcaaatcttaaaccgggttgaggtgaagggaatcttttgggcctttttcccccttccaaaaggtcttattgaacctttttttggccttttaaccaaggaaggactgttggccttggtggagattaatgaaaggaaaaattttggggggaacctaaaggaaatgaagtcttctttaacacccagttaacaaacaaggctgattcatctgaagtcattgagactgtgaagctgcgagttagagatgctaaattgccggacattgangtggtgcggatcttgtgggatgttntaatggatg

SEQ ID NO: 13822 - DNA, 433 bp, Glycine max
  modified_base (427)..(427): a, c, g, t, unknown, or other
gagagaaactagagagagaaagcaaagcccaaacaccccttttaaccattgcaattctcgttcggtttcagagaaccccttttgaatttttttgaattttctgggaaacagggcgttttgtgaacatcatctgggttctctcgatctccatcttttttttctgggtttccgttttttctcctcagatcctcttctgtttttgttttctccgtttttgaatcggattttcgaagttgtctcgcaattctgcctcgtgggtgtgtgtttttccaaggaaaagattcagtttttcatagcgtgaaagtgggaaaaggattgattcctatctgggttttttttatgcaattgttggtttaaattttgagggcaatgatgttgacctttaaagtttcgttatgaagtaatatgaaagtggtccttatacggntacaac

SEQ ID NO: 13823 - DNA, 153 bp, Glycine max
aaaaggggatcttgtccagaaggccatccccgtttttgaatacttgggaaatgctcttgggaaatttgataatgggccatttttgcttggccaattaagtttgggggaaatggctaatattccatttgttgaaagattccaaattgtctttgc

SEQ ID NO: 13824 - DNA, 361 bp, Glycine max
  modified_base (95)..(95): a, c, g, t, unknown, or other
cgaatccgttaaccaaccccacaggttaaccacaccacaacacaaaacccaacaacagtgtggtctctctctctgtctctcgctgtcactttcgncaccgtcttcgacgcgaatgccaccgtcttcggccactgctcttcagcatcttcactctccagaagtcaatcagatgttgcaaggatcatgagtcctaccttgggtgatcagatagaggataagctgattgtttctgactcaatgagagctacaaattagaaaataaatggaacacccatcaagatgctcatagaccaagaaatgtccaaagaagttgtttcaagcacaacccaccaccaaatgtagttgcaaaattaatggggct

SEQ ID NO: 13825 - DNA, 425 bp, Glycine max
cttttatttacaccacatagccccaccctcaccctcttacagaatgggaaggactccggtgaggtttgagagggtagcggcggcctttgacgctgacgtggcgcgtgtgaggctctgcaatagcagcgagaatgagcagcactcgccggaggactcggctgatttgtcagatctggtgaaatcgttcatggagagagggggagagggagaagatgcggttggtgttcgttcggatgatggggttgagaattttgattctgagaaaagggagattttggagggaatatttgatgatgacgacggggatgccaaagaaaagattagaagagaagttcaacttgcatgggggcttgttgccgaaaaggataactcatcaccccaaattaaacaacaagtggtgtctctcctaccgtacaaaaggtttg

SEQ ID NO: 13826 - DNA, 237 bp, Glycine max
gtgatctttccatcagcatctcgacatgctgcttgctgttacttatgctattcttcaggttcacttcctctatgcgggagatgaagggcaccctttaccatggacaagacactagagccctgtgcttacaatggaaacacatactacagctccatacatgatgcacacatagtgaagcagcttcgagcgagcaacgtttcgaatactggctgcgcctgtggtcacaaatcagtactt

SEQ ID NO: 13827 - DNA, 433 bp, Glycine max
  modified_base (383)..(383): a, c, g, t, unknown, or other
cccacgcgtccgcttctctattttaagtaattcaatggcttacactgcaagtcttgtgttcttagcttccactttccttatcataaactttcctcttctggcaaacgctatcggatgcaatggaccatgcagaaccctcaacgactgcgacggccaactcatttgcatcaacggaaggtgcaacgacgaccgcgacgtcggaacccacatctgcggcggcggaatgccgccaaatccgccaccaagcggcggaagctgccagtcctcgggaaccctaaattgcggcggaaaatcgtatcctcagtaccgttgctctccgccggtaacttcctcgacgccggcgatcctgacgctgaacgacttcagcgaaggcggcgacggangggacccgtcgcagtgcgacgagaagttccataacaacacggagcgtgtg

SEQ ID NO: 13828 - DNA, 363 bp, Glycine max
  modified_base (323)..(323): a, c, g, t, unknown, or other
  modified_base (326)..(326): a, c, g, t, unknown, or other
gattgtttcaacaactcacggtctgggaaggatgaaccacagacttcttcagatggagtggacagtgtgacagatacaatttctaaattagatatcaacacaaatgttgattcaaaatccataccaactgcagagaataagcttgggttgggcattaaagaatgtaaatggtgaatggcactttgcatttgggaaactccaaacccttcctctgatgcaactccccaacagaaacccaatccaagtattgcaactccaataaatcctaaatctaagaagacagatactgttccgaaaaatagaagctccagttcaactagcanatntagttctatgttaaacgttgtcatgtaactaatggta

SEQ ID NO: 13829 - DNA, 396 bp, Glycine max
caggagtggccattgtgtccaagaaaattctaagggtctctcatgtggcaagtgacagaggggttagaattttagcctctatttgtaggtattccgccaatgctagagtgcttcatgaaatgttgcaggttggggcagtgtccaagttgtgcttggtgcttcaagtgaattgcagtttaaagactaaggagagggcaaaggaaatactccaattgcattctgtggtttggaagaattctccatgtattcctgtacctttgttatcttcctatccatgatctaattctttcataattagtaagttctttttgtgtacatgcaatgaaagtgtatggtgttagagatttttgaattatacaaatgaatcttaataatcaagagcgaaaattttttctt

SEQ ID NO: 13830 - DNA, 382 bp, Glycine max
gaaactttcagagctaggctttgtgccaagttcaaagccgatttctattaaggaagggaccatactggcacaaggtgctgtaggagttgtagttgctaccgcagtggtgatcctcagttacttgtatgaagttcgcaaaagagggaagtaaactggatttgttcatctcttggctgttacggttgcgtgaccctgaccctgacccatagtgtgcaaaacagggttcatttttgcagcttcagtttctgtttacttagtaacaataaagaataatgctacagacattcagacttttatatgaatagactaaaaacatccctgagtactcaaattgagagcaacttcattatacgtaaatacaaattttaacattcccagttaa

SEQ ID NO: 13831 - DNA, 434 bp, Glycine max
gtcgattcagatcttaggggttcttcttcttttctttctggggagccccattgaccatagccgccagccagagagagaagagaagccttcgatcgtagggtttcttacccttctttcttccaaatcggacctttcccgttctcgaatcgcttccgcagcttagcgatctggaaaacccagaaaagaaccaaccgaacgttttatatttttcggataatcaatcaattgaagatgtctcgttgcttcccttcccccctcctgggtatagggcacgtggcgaggccttgatcaaatcgattaagctccgagaggagatggagaaagcagagaatgaccggagggagaagaaggagaagaaaagggaaaagaaagagaggaaaagagagaagaaggagaagaaagagagaaagaaagcggagaaagaaaggaaactt

SEQ ID NO: 13832 - DNA, 257 bp, Glycine max
  modified_base (196)..(196): a, c, g, t, unknown, or other
  modified_base (199)..(199): a, c, g, t, unknown, or other
cccacgcgtccggcagaactttgctatagtatattagttataaccaaattctaacaattgggttcccaagaaaagatagggtttgccaatgtgttttcagtgttattgtggcaagaggctgttgtatatattgacatttaaagctgtaaattgttgatctcagaagcagctattggtgctctcaaaaaaaaaaatnaanataaaaaaataaaaaaaaaaaaaaaaaaaaaaaaaaaaaaaaaaaaaaaaaagaaaaa

SEQ ID NO: 13833 - DNA, 418 bp, Glycine max
caaaaatcaaaaccatcgtgagggattctcttttcaaccaccgtcatcagcgatcggattcggattcggactccgtctcgggaaaattcgagaagatttttcgaatttttcaccactgctttgtgcgcagcgatcggtttcggattcgggctccgattttcgcctcttgcgaagagcttgggttcatttgcactaatggaggggaaggaggtttgcgcgtcggagtcggcggttgatggaagccgcgacgtttggagttcggagccctcgctcgcttcctccgcggatcacctcgttgtaatggtgaacggaattctcggacgtgagacggattggaaatatgctgcggagaaatttgtcaaggagttgccagataaagtgtttgttcactgtagcgaacgaaatgtgtctatgcata

SEQ ID NO: 13834 - DNA, 395 bp, Glycine max
  modified_base (288)..(288): a, c, g, t, unknown, or other
agaagaatcatttttcatttgatttggaagctgatgtttctattatttttgccgcgttggcaaaaccctaaattgaagaaatcccaatttcccctcctctctctctgctttggatgattttcaaccaaaaatctgtgcttttgtgcttttcgaatcttttgctctgatgggtacttccaatcttctattgttcttctctctggtgagtctgtgtgctatggcggcttccaaggtggttcttattgggaataatatcactctctccttcgatgatattgaagctaattntgccccaacagtcaaaggttctggagaatatgggatcttatatttggcagaaccactggatgcatgtacagaattgacaaataaagttgaacaacttcccaatgcga

SEQ ID NO: 13835 - DNA, 401 bp, Glycine max
  modified_base (228)..(228): a, c, g, t, unknown, or other
  modified_base (374)..(374): a, c, g, t, unknown, or other
cgccgtacaaatcgtataacaggctgaggagtttcagctcccacccggatctccggcaagagtcgcagtggctcgccgccgatgaacggtggcgattctatgacgatacgcacgttaacggttaccgtggatttgacttggaagaacaccggcagcatagaacggaagccggagaagaagagagcgttgagaacatagaagtggttgcgaaagaagttccaccaccgncagctccggcggagaagaagagtgggggaaataagaataagagaacaagtgcaactaaagagttgttgacatcttcgaaaggaaaagaagaagaaacaaagacaaggaaacgttgaaagtgttaagagcattccttcacaaccttnctcagtttttcataatatggtttcttc

SEQ ID NO: 13836 - DNA, 53 bp, Glycine max
ctttcttcttctcggttttacctttaccggttctaaaaaggggaaagttggta

SEQ ID NO: 13837 - DNA, 321 bp, Glycine max
ctccacaaaaacaaacagaaccacagattcaggttttgatgctcttctgcggtgtgtccagagagagagagagagggttgtagaggatgttctgagaggaccgctctatctgaaaaaagatcttgagtcgcagaaagttatcgttcacacagagagagagagtgagagaaacaggtgttctagaactagagtgttggagcacggatgtttgccactttacattgaattccatcattcttttctttaactagcttgctgtactcgctacaatctatattactgtaagcgaattcatgttttaccgtggcaaaatggacctaa

SEQ ID NO: 13838 - DNA, 175 bp, Glycine max
gccacacctgcgccactaccacttgaccttgagacatatcgtgcagactaaggatagagggtactggcgctttgtatcatatacattaattgctacagcaaacgagattatgaagtactagctactttcagagacatagagaatcactgcgtgcaacctgacgatatccaacaca

SEQ ID NO: 13839 - DNA, 83 bp, Glycine max
acgcccacgcgtccgattttttaatcgattgtttatccatgtatcagaaagcaataccgagtggagatgagaaattacatgtt

SEQ ID NO: 13840 - DNA, 405 bp, Glycine max
cttcacctttcactccacggaatcaaaagcaagtgctaagaagttccgtgttcctattctgaaacctgtagcaccaaagccaagttgtcatccaagttttataatactacatatattattattatacgatacataacaatagtattaatattgttgtgattgtgtgtgatttttggtgtcgtccttttttcttatattaaggtggtacggagcttatatgtgttgattcaattcgtcgacaagaaaccttagtttgatatttgattggttctgtggagagttttcctttggtgtggttggtttgtgctgtttttggttgggaataggaatggctaatgaaggaaagaaaagcaataacttctattcgatcttgggcttgagcaaagagtgcactgaattggagct

SEQ ID NO: 13841 - DNA, 154 bp, Glycine max
gtatacctttttctctgttgttaatttccgacgtagtcttaaatctaagtaaacggcattggtccgtaccacacatacgaacgacgcaatcttctgattcttatggatacaatttctctcttctattactaataaacgcgtacccaatttcact

SEQ ID NO: 13842 - DNA, 437 bp, Glycine max
ctgggtttctgagcgaaagtcaatcaagggtgatgtttgccaaatttctagatcagatttcaaaacttttggtggattctccattatatgaacaatacaacgaggtaagggaaaagctttcgactttgtttgaaacaaagcaaaatgctggtattactagtcaaataactgatctgagtcaaaaactagtaaatattattgaggaaagtcagctatctgtttctcctcaattatttgatctacaagcccgctttacttctacaatcgaagattttcagaagcaacttgacttgatggtgaagtatgattgggacttcgatcattacatggaagaagatgttccagcagcggtgagatagaatacataatgaaacaaagcatgcctaaagatggaaaattacttgcaattggacactccatgggtggtatcctgcttt

SEQ ID NO: 13843 - DNA, 396 bp, Glycine max
ggcaactatgactggtgtgagcctttcatgccccagggttttcttcaacgcatcagcctcaccgcaaaacgcgcatgctgtaaagttctcacttccacccagccaagcagtgcgaccgggtagtatcaagttgggtcgcgtgatgaggatccgacccgttcgcgctgcgcctgagcgcatatcggagaaggtggaggagagcataaagaacgcgcaggaggcgtgcgccggcgatccgacgagcggcgagtgcgtggcggcgtgggacgaggtggaggagctgagcgcggcggcgagccacgccagggacaagcaaaaggaaaaggactccgacccgctcgagaattactgcaaggacaacccggagaccattgagtgcaaaactttcgaagactg

SEQ ID NO: 13844 - DNA, 313 bp, Glycine max
gaaatggctctccaggctgcttctcttgttcctgcttctttctcggttcttaaagagggaaagagtggtgtgtctctcaaggactccaccttgttcggtctttcattttcagaacctatcaaagctaacttcagctcttctgcattgaggtgcaagagggaattcgaacaaaagctctgtgctgtgagggccgaaacagtggctacagcctctccagcagttaccaagtctacaccagaaggcaagaaaacattgaggaagggcagtgttgtgataactggggcttcatctggacgaggcctggccactgcta

SEQ ID NO: 13845 - DNA, 391 bp, Glycine max
  modified_base (341)..(341): a, c, g, t, unknown, or other
ccaaaactcatgctatattctcactctcacaacttcaatcgctttcgctctctctctctctctctctctctaccaaaaaaatggctttggaaactctcaactcaccaacaacaaccgccccatctttccccttcgacgacccaactattccatgggccaaaagaaaacgttcaaagcgttgttcacgcgaccacccttcggaggaagagtacctcgctctctgcctcatcatgctcgctcgcggcggcaccacccgccgcgtcagcactccaccgccgcaaccgactccagatccttccaccaagctcagttacaaatgctccgtttgcaacaaaagcttnccctcttaccaagcgctcggtggacacaaggccagtcaccggaaactcgc

SEQ ID NO: 13846 - DNA, 336 bp, Glycine max
aaggaaacatggacagtcctgctaatgaaaatgaagaaaaggagcctgaggacaaggagatgacactggaagagtatgagaaggtgctggaagagaaaaggaaggccctgcaggctcaaaaaactgaagcaagaaaggtggacatcaaggaatttgcatccatgcagccactgtcaaacaagaaagaaaatgatgagatctttattaaattgggatctgacaaggataagcgcaaagatgctttggagaaggaggagaaatccaagaagtctgtcaacatcactgagtttctgaagccagctgaaggggaaaggtactaccctggtgggcgtggtc

SEQ ID NO: 13847 - DNA, 395 bp, Glycine max
ctgtcttccttctctagggtttttagctcccccaatttctgcgctcaacatggttcttcaaaatgatattgatttgctaaatcctccggttgagcttgagaagaggaaacacaagctcaagcgtcttgttcagtcaccaaactctttcttcatggatgttaagtgccagggttgcttcaacataaccactgtctttagccactctcagactgttgttgtatgcggaaactgccagactgtcttgtgtcaaccaaccggtggccgggcaaggctaaccgagggatgctcctttaggaagaagggagactgagtggattgccatctttttttgtttgtgattggagagtttcagtaatgccttcttttgttttgggtatgatgaatatgtaattttg

SEQ ID NO: 13848 - DNA, 396 bp, Glycine max
  modified_base (279)..(279): a, c, g, t, unknown, or other
caataaactgctaagctaactgaactctccctctctccttgctcgctcctttcgcctctcactacaaatacacatctcatctcatccgtctctcacttttaatttttctctgcaatctgaaccttccggatttcgtttttctttgttccggtagccagccagccagccatggtgctcttcaatgtttcacgcgttgagaccactcccttcgatggacagaagcctggaacctctggtctccgcaagaaggtgaaagtattcgtgcaacctcattacctncataactttgttcagtcaacattcaatgcattaactgtggaaaaagttagaggtgcaacgctagttgtatctggtgatggtcgttatttttcaaaggaagctattcagattataact

SEQ ID NO: 13849 - DNA, 358 bp, Glycine max
gcgaattcagctcgagcaattaactgttaagctaactgaactctccctctgtcctgcctcattcctttggcctctcactacaaatacacatctcatctcatccgtctctcacttttaatttttctctgcaatctgaaccttccggatttcgctattctttgttccggtagccagtcagccagccatcgtgctctacaatgtttcacgcgttgagaccactcccttcgatggacagaagcctggaacctctggtctcctcacgaacgtgaccgtattcgtgcaacctcattacctccataacttcgatcagtcaacattcaatgcattaactgtggaaaaagttagaggtgcaacgcta

SEQ ID NO: 13850 - DNA, 377 bp, Glycine max
tgggttcttctttaagctataaggttggaactatgattgaagttccaagggctgcactagttgcagatgagattgcaaaggaagcagaattcttttcgtttggaaccaatgaccttactcaaatgacatttggatatagtagagatgatgttggcaaatttcttcctatatacctatccagtgggattctgcagcatgatccattcgaggtacttgaccaaaaaggtgtgggtcaactaatcaagatttgcacagagaagggtcgtgctgctagaccaaacttgaaggttggaatatgtggggagcatggtggggagccttcttcagttgcattctttgctgaaatcggacttgactatgtttcatgttctcctttt

SEQ ID NO: 13851 - DNA, 415 bp, Glycine max
atagcatgctacactcgcgggcctttcctgcctagtgtttgttccaagcactctccaccctccatctctccatcttttggcttgaggagtctgaaatcgagctctttatttggagaatctctaagagtggcatccaaatcaacactaaaggtttcaaagacaaagaatacttcactcgtgaccagatgtgaaattggtgacagtctggaagaattcctcacaaaagcaacaccagataaggggttgatcaggttgttggtgtccatgggagaagcattaagaacaatttccttcaaagtgaagacggcttcttgtggtggaacacaatgtgttaatacttttggggacgagcagcttgcagtggatttgctagctaatcagcttctttttgaggccttaaattactctcatttct

SEQ ID NO: 13852 - DNA, 396 bp, Glycine max
  modified_base (353)..(353): a, c, g, t, unknown, or other
aaatatttcatacccaaaaaatgcagtttcattagccgatctactcagcacctgccacgtggcactacacatatagttagccacatatctaaaattgctatcccctcctcctcctctcccttcttagtctcactatcaagcaatgcaataacatcagtacataacataacataacatccttaaccctttgaacatcgttttgcagccatggaaacaggcatagcatgctacactcgcgggcctttcttgcctagtgtttcttccaagcactctccaccttccatttctccatcttttggcttgaggagtctgaaatcaagctctttatttggagaatcgctaagagtggcctncaaatcaacaataaaggtttcaaagacaaagaatacttcactc

SEQ ID NO: 13853 - DNA, 397 bp, Glycine max
gtctcaacttctgctcttccaactcctacaacgcttttctctgcactcatgggcaaggtcaagatcggaatcaacggatttggaagaattggccgtttggttgccagagtcgctctgcaaagagacgatgttgaactcgttgccgttaacgaccctttcattaccaccgattacatgacatacatgtttaaatacgacagtgttcacggacactggaagcatcacgatgtcaccgttaaggacgagaagacccttctcttcggtgacaaggcagtcactgtttttggacacagaaaccctgaagagatcccatgggggtcaactggagctgacatcattgttgagtccaccggagttttcaccgataaggacaaggctgccgcacatttgaagggtg

SEQ ID NO: 13854 - DNA, 342 bp, Glycine max
gcattcagagagagtgccgacaatgagctcaagggaatccgatatgagtgtgatgagccacttgtgtgcattgactataggtgcactgctgtgtgctaaaccgttgactactagttgacgcatggccatgggagatgacatggagaacgtgattgcttggtatgacaatgaatggagctactaccaaagggttgctgaattcgctgacattggtgtcaacaaatggaactgagatccaaacaaattgtcattggtaattaaaatatcatgtatgtaccatgacattgaaaatacggatgcttactactactaacactacgacactagtggcttaaactttat

SEQ ID NO: 13855 - DNA, 373 bp, Glycine max
gcctctactatactgcttcaccttctgctctagaaaatgcagtgctgaaacatggcttcggctactctctctgtagccaaaccagcccttcaggcaaatgggaaaggcttctctgaattctctggcctccgaagctcatcaggcttccttcccttttctagaaaatcttcagaggatttccattctgtcattgccttccagacctatgcagttggaagcagtggaggatacaagaagggtgtgacagaagcaaaactgaaggttgccataaacgggtttggaaggattggaaggaacttcttgaggtgctggcacggtcgcaaagactcccctcttgatgtcattgccatcaacgacaccggcggcgtgaaac

SEQ ID NO: 13856 - DNA, 357 bp, Glycine max
gaaagttaatgttctcttgcttggtggaggaatgatctttaccttttacaaggctcagggttattcagttgggtcatctcttgtggaggaagacaagcttagccttgcaactacacttcttgaaaaggccaaggctaaaggggtttctttgttgcttccaactgatgttgtcatagcagacaagtttgctgctgatgctaacagcaagactgtgccggcatcaagcatcccagatgggtggatggggttggatattggtcctgattccatcaagacatttggtgaagcattggatacgactcagaccattatttggaatggaccaatgggtgtttttgagtttgataagtttgccac

SEQ ID NO: 13857 - DNA, 298 bp, Glycine max
atttattagttctcatccattaatttccattgaagtccgagtacagaaaccaaaaatacaggatgatgaaatctcaaaaagcaaaaacaaatgggaatgtagtttaagtacaaacaaacaaagtggtgtggcggctacaaatgctttgcaaaatatttacacttataatcttgtttgtttttatgcttttaatctatattatttatattttttttatttttttttttttttttatttatattattttttttttattttattttttaattttttattattttttatttttattttattt

SEQ ID NO: 13858 - DNA, 382 bp, Glycine max
  modified_base (301)..(301): a, c, g, t, unknown, or other
caagttgagaactaagaaggagaagcaaatggcttcctcaatgatctcctccccaactgttaccactgtcaaccgtgccggtgccggcatggttgctccaatcactggcctcaagtccatggctggcttccccaacaagaagaccaacaatgacattacctccattgctaacaacggtggaagagtgcaatgcatgcaggtgtggccaccagttggcaagaagaagtttgagactctttcctacctgccagaccttgatgatgcacaattggcaaaggaagtagaataccttcttaggaanggatggattccttgcttggaattcgagttggagcacggtttcgtgtaccgtgagcacaacaggtcaccaggatactacgat

SEQ ID NO: 13859 - DNA, 346 bp, Glycine max
caagtagttgagaactaagaaggagaagctaatggctttggcaatgatctcttccccagctgttaccactgtcaaccgtgccggtgccggcatggttgctccattcactggccttaagtccatggctggcttccccaccaggaagaccaacaatgacattacctgcattgctagcaacggtggaagagtgcaatgcatgcacgtgtggccaccatttggcaagaagaagtttgagactctttcctacctgccagaccttgatgatgcacaattggcataggaagtagaataccttcttacgaagggatggattccttgcttggaattccagttggagcacggttta

SEQ ID NO: 13860 - DNA, 341 bp, Glycine max
gcagaaaaacaagtagttgagaactaagaagaaggaaatggcttcctcaatgatctcctccccagctgttaccaccgtcaaccgtgccggtgccggcatggttgctccattcaccggcctcaaatccatggctggcttccccacgaggaagaccaacaatgacattacctccattgctagcaacggtggaagagtacaatgcatgcaggtgtggccaccaattggcaagaagaagttcgagactctttcctacttgccagacctcgatgatgcccaattggcaaaggaagtcgaataccttctaaggaaaggatggattccttgcttggaattcgagtttg

SEQ ID NO: 13861 - DNA, 295 bp, Glycine max
aagcagaaaaaacaagtatttgaaaactaagaatgagaagcaaatggcttcctcaatgatctcttccccagctgttaccactgtcaaccgtgccggtgccagcatggttgctccattcactggactcaagtccatggctgggttccccaccagaaagaccaacaatgacattacctccattgctagcaacggtggaagagtgcaatgcatgcaggtgtggccatcagttggcaagaagagatttgagactctttccgacctgccaggccttgatgatgcacaactggcagaagaa

SEQ ID NO: 13862 - DNA, 354 bp, Glycine max
aaggaagtcgaataccttctaaggaaaggatggattccttgcttggaattcgagttggagcacggtttcgtgtaccgtgagcacaacaggtcacctggatactatgatggacgctactggaccatgtggaagctgcctatgtttggctgcactgatgcttctcaggtgttgaaggagcttcaagaggctaagactgcataccccaatggcttcatccgtatcattggatttgacaacgttcgccaagtgcagtgcatcagcttcatcgcctacaagcccccaggcttctaagtcattgaaaaatttgcaaagcatctgtagccaccccactttgtttgttgtacttaaactaca

SEQ ID NO: 13863 - DNA, 335 bp, Glycine max
aagtagttgtagaactaagaaggagaagcaaatggcttcctcaatgatctcttccccagctgttaccactgtcaaccgtgccggtgccggcatggttgctccattcactggcctcaagtccatggctggcttccccaccagaaagaccaacaatgacattacctccattgctagcaacggtggaagagtgcaatgcatgcaggtgtggccaccagttggcaagaagaagtttgagactctttcctacctgccagaccttgatgatgcacaattggcaaaggaagtagaataccttcttaggaagggatggattccttgcttggaattcgagttgg

SEQ ID NO: 13864 - DNA, 387 bp, Glycine max
gcagaaaaacaagtagttgagaactaagaagaaggaaatggcttcctcaatgatctcctccccagctgttaccaccgtcaaccgtgccggtgccggcatggttgctccattcaccggcctcaaatccatggctggcttccccacgaggaagaccaacaatgacattacctccattgctagcaacggtggaagagtacaatgcatgcaggtgtggccaccaattggcaagaagaagttcgagactctttcctacttgccagacctcgatgatgcccaattggcaaaggaagtcgaataccttctaaggaaaggatggattccttgcttggaattcgagttggagcacggtttcgtgtaccgtgagcacaacaggtcacctggatacta

SEQ ID NO: 13865 - DNA, 396 bp, Glycine max
taagaaggagaagcaaatggcttcctcaatgatctgttccgcagctgttaccactgtcaaccgtgccggtgccggcatggttgctccattcactggcctcaagtccatggctggcttccccaccagaaagaccaacaatgacattacctccattgctagcaacggtggaagagtgcaatgcatgcaggtgtggccaccagttggcaagaagaagtttgagactctttcctacctgccagaccttgatgatgcacaattggcaaaggaagtagaataccttcttaggaagggatggattccttgcttggaattcgagttggagcacggtttcgtgtaccgtgagcacaacaggtcaccaggatactacgatggacgctactggaccatgtggaagct

SEQ ID NO: 13866 - DNA, 388 bp, Glycine max
ttgagaactaagaaggagaagcaaatggcttcctcaatgatctcttccccagctgttaccactgtcaaccgtgccggtgccggcatggttgctccattcactggcctcaagtccatggctggcttccccaccaggaagaccaacaatgacattacctccattgctagcaacggtggaagagtgcactgcatgcaggtgtggccaccagttggcaagaagaagtttgagactctttcctacctgccagaccttgatgatgcacaattggcaaaggaagtagaataccttcttaggaagggatggattccttgcttggaattcgagttggagcacggtttcgtgtaccgtgagcacaacaggtcaccaggatactacgatggacgctact

SEQ ID NO: 13867 - DNA, 337 bp, Glycine max
agctcgagcgctcacacttgtattctcttcacctacttgctcattagggaacgctttttcctgcattccaatcattttcttttcctccatatataataataatccttcgctcttttttttttatctcttcttcttcgatcgcattgaaaccttgttcgttgtagctatgttcttctccacagcttcaacgaacaacgcttgatggtgaaaaaaccttcaatcgcctattaactgcaatgcaccactcatcatcaactcatccatggctttctccgctttacttcgcccttcctcttctccttctcactctcagttgattcgctctgataggttcaat

SEQ ID NO: 13868 - DNA, 367 bp, Glycine max
cttctcataaccttcttctggatctctctggaagttattatggacacaagcaggtatgagggaaaaagggtcttgaggtacaaagaggaagatgaaaatgatgatgatgaagaagaagaagaggtgagtgaggtgggttttggagaagacagaagaaggaataagagagtaatgagagatctccatggaaagagatcagggtccaaaggtggaggctcaatgccaccttcttgtcaagtggataattgagatgctgatctgagtgaagctaagcagtaccacagaagacacaaggtttgtgagtaccatgccatagctccttccgtacacatggcagggctgcaacaaaggttttgccaacaatgta

SEQ ID NO: 13869 - DNA, 374 bp, Glycine max
gggatctgataggagaggtgcggcgatggcttttgcagttgcgcccaagataataacggtgtcattcgataagcaaaaccaaaggaggagtttcgaaggattgtttgggaaaaggtatcgggtaagggtgaagcgaagtcaagatcattcagtgaagtgtggtattgagcgaagcagcatcgatggaaagaaagggggcagatgaggaggcgtgtcaaattcgaactacgtggtgccgctggacaacatggcgaactcatcctgcataacacgtcctttagccgagatactcagggacctcaataaaagaatcccggatactatcgtcaaacatgatcgcttcatcctctggtatcatgccaacaggatgctca

SEQ ID NO: 13870 - DNA, 308 bp, Glycine max
ggtgtaccgtgttcaaggccgattattctactgcaagtgattaggtggccagagacagcatatataaactgccgttaattgatgcattaatactcctaaactgtggcctactgatcatacatcggattgccaaggatcattccaattacacattttccaggaagattgagccccgactgttcacatgctaatacgcattatctgtctactaattacgcctatactctagcccacagaagttcgatccgagatccaatcggaattacaatttgacacttgtcagacataacgagactgaaatgttcata

SEQ ID NO: 13871 - DNA, 397 bp, Glycine max
gaatggccttattcaacaaggccggtttcaatcctggccggcccagccgtcaccaaccggttggcagtagcaacgcagaggagatcactcgtagtgaatgctgccaaagctgttgaagcggaaaaggtcagttatgacaatgacatggatggtagcaatggaaggaggaacttgatgttcgccgcggcggcggcggctgctgtttgctctgttgctgggatggcagtggcagatgagccaaaaccaggaaccccagcagccaagaaaaagtatgctccgatttgtgtcaccatgccaactgctaggatttgtcgcaattgagggactcggtttttattttacttctgatgatcggaaatgtgcattatggttgtagtaatgttttgatttcacatga

SEQ ID NO: 13872 - DNA, 321 bp, Glycine max
ccttggggaattccaattccacattttcaagaaattagggagccaaaatggtcattttttaattgggattatttggtttcctaataaggcctttcctgaacccaagggaattgaatccggaattcctcggggaattccaattccacattttcaagaattaaggaggcaaaaaggttcatatatgaattggaataatttggtttcttattaggcctatcctgaacccaaaggaaatgagatcggaattcctcggggaattccaattccacattttcaagaaataaggaggcaaaaatgttcatatatgaattggaattattt

SEQ ID NO: 13873 - DNA, 366 bp, Glycine max
gaaacaagtagctggtaaattaaaattggaattagcacaattcgcagaattagaagcttttgcccaattcgcttctgatctcgataaagctactcaaaatcaattagcaagaggtcaacgattgcgcgagttgcttaaacaatcccaatcagctcctcttaccgtggaagaacagataataactatttatactggaacgaatggttatcttgattcattagaaattggacaggtaaggaaatttcttgttgagttacgtgcttacttaaacacgaataaacctcaattcaaagaaatcatatcttctaccaagacattcactggggaagcagaagtccttttgaaggaagctattcaagaacagat

SEQ ID NO: 13874 - DNA, 294 bp, Glycine max
aataaaatttgaaataacaccagtcaggcttatttaaaacctttgcccaaactactttttaacctcactaaacctcctcaaaacaattaaccaaaagtcaaccaattgcaccaatttcttaaacaatcccaatcagctcctcttaccgtgtaataacatataataactatttatactttaactaatggttatcttgattcattataaattgtacatgtaatgaaatttctttttcaattaccttcttacttaaacacaaataaaccttaattcaaataaatcatatcttctacc

SEQ ID NO: 13875 - DNA, 402 bp, Glycine max
ctctttgcgaggaagaccttcatctgagttcaccagtgtgaactcagatgtaagtctctttgcgaggaagaccttcatctgagttcacactggtgacagcagatgtagaggagaaatcggttataattggtgagagaaatagagtagcaatagaggccctgagagcagcaatggacaagggacacaataaaattgcaatactatatgggggtggccacatgccagatcttgggaggagattgagagaggattttgatttagtcccatctaatgtacagtggataacagcttggtccataacgaaaaaggacctaaatactgattcatttccatttctgaagacaattgctaaggcctcaggctggccattgaaccgctatcagaccttggcattgctcatct

SEQ ID NO: 13876 - DNA, 403 bp, Glycine max
  modified_base (389)..(389): a, c, g, t, unknown, or other
gttaactgatactcctgatatcagaaaaagaaaaaagaaaaaaatgtctctagtgactgcagagatcaaagccaaagcagaggtgtatcatggagatgaactctgccaagagaagtcaaagttgctgctaaaggaggtagggctacctaatgggcttttgccattgaaggacattgaggaatgtgggtatgagagggatagtgggtttgtgtggctgaagcagaagaagagcacagaccacaagtttgagaagattgggaagctggtttcctatgctcctgagatcactgcctatgttgaggttggtaagatcaaaaagctcactggtgtgaaaaccaaggaagctctggtttggatcacactcagtgagatctttgttgatgatcctnccactggcaagatc

SEQ ID NO: 13877 - DNA, 397 bp, Glycine max
ggttctgcacgctctgcttccagcgagtgttctttcttcgtttcaacaccttaatttgcacacgctgcttcttcagcttgagaaatggcacaagaaacctttctattcacatctgaatctgtaaacgagggtcaccccgacaagctgtgcgaccagatctctgatgcagtgctcgatgcgtgccttgaacaggaccctgacagcaaggttgcctgtgagacatgcaccaagaccaacatggtcatggtctttggagagatcacaaccaaggccaacgtagactatgagaagattgtccgtgacacatgccgcgaaattggattcatctctgatgatgttggtcttgatgctgacaaatgcaaggtgttggtcaacattgagcagcagagccctgata

SEQ ID NO: 13878 - DNA, 367 bp, Glycine max
cgctcacacctctaatctcttcacctacttgctcattagtgaaacgacttttccctccattccaatcattttcttttcctccatatataataataatccttcgcttttttttttttttctcttcttcttcgatcgcattgaaaccttgttcgttgtagctatgttcttctccacagcttcaacgaacaacgcttgatggtgaaaaaaccttcaatcgcctattaactgcaatgcaccactcatcatcaactcatccatggctttctccgctttacttcgcccttcctcttctccttctcactctcagttgttttgctctgttaggttcaataggaggcatcgtagtagtagccgggtaggtttcgcg

SEQ ID NO: 13879 - DNA, 355 bp, Glycine max
caccaaagtacttgtgagtgtatacccaacacaaactaagatcaacatggactactacacccgcgtttcagaagttgagagggaacctatcatggagtattccacaccacgaccaatgatgggcaactaccaccaccctaatgctcaccgtgtcctcaacgagaagattgtttatgaggaggatgtgattggaggatcccgccacaaccacatgcatcaccaccaccctgagactcatgagagagtcaaggtggtggagtatgaacaagttcctgagaggcgcgttgtctatgaagagaaagttgcttatgacaacgatcgttactactcttcaaggtattgaaattggacaaat

SEQ ID NO: 13880 - DNA, 111 bp, Glycine max
ggggaggctaccccccaaacattcactcactccatttaattaatgtaatgcgattctttcgttttttaatttctatattgaatgtcatatattcaaagaattttgttactg

SEQ ID NO: 13881 - DNA, 204 bp, Glycine max
ctcaagcacttttgctcatgttcaagaaatcccgacacaaagttgtgcctatatgaactgcaactatctcttttcatattacgcctatcctcactccataggatatgacatcccaatacctctgataatccccttctcaacaccctcaagctctcctgatgcacaactattcatatgtgaattagaattatttgatttcttaat

SEQ ID NO: 13882 - DNA, 272 bp, Glycine max
aagcccatcagtattaatcctctttcggtgtcggtctagtctttataaggttacagaaataaatggtcgcaagctgaaagttgtactaaaatttattttttataaaaaaatcgaaggtagtattaaatatgttatatgtatgtattgtgcggaataaatgcagccacgtactatatataatggtacatacggtgtagggctgtacaagttgggcatcctatttcaatattaacgaccactaataaatattaccattggagttattacgtatt

SEQ ID NO: 13883 - DNA, 401 bp, Glycine max
ctcaatatccgccattgaattcttcttccatttctcttttttctgcatacccatttcgtttttcttcccaaatggccctttcttgctccaaagttttaagcttttatctctcgcccgttgtgggtggtggtgatgttccgaaaaagctcactttttcttcttttttgggtctttctaagggtgttggtggaagcaggagctcgagggtgtgtgctgcttcaaatgcacccgcaccactcgctggggtcatatttgaaccatttcaagagctcaagaaggattatcttgctgttccgattgcacacaatgtttccttggctcgtcagaactatgcagatgactctgaatctgcaatcaacgagcagatcaatgtggaatacaacgtttcctatgtgtaccac

SEQ ID NO: 13884 - DNA, 360 bp, Glycine max
ggcttgtgaatcagcaccacattcacctgagctttttgcgaggattccaaagcatggcttcccttgcagcatccactgctgctgcttcccttggcatgtcagaaatgcttggaaaccccatcaacctcagtggtgccacaaggccagctccatctgcctctagccctgcctccttcaagactgtggctcttttctccaaaaagaaggctgcacctccaaaaaaagctgcagctgctgctcctgccaatgatgagcttgccaagtggtatggtcctgacagaaggatcttcttgcctgtaggtctcttggaccgatctgagatcccagagtacttgaccggtgaagtccccggagactatt

SEQ ID NO: 13885 - DNA, 402 bp, Glycine max
gtatgttcagttcttggtctcaagtttcatcttgggctgtagactgtagcaaacaccatgaccaccaaggttccaaaatccgtatacgactttgttgtcaaggatgctatgggagatgttgtagatctctccttttacaagggaaaagtccttctgattgtcaatgttgcttctcaatgatatccttaatctgtgctgtgtttgttacttcttcttttgttttccctgattgtgccttctaattaatttaaagccttgatattttcatcttttctattcttttcagtaactactctcaccgctaatgttataaatgttgagaaaatttacaatatgtttgggattgagacagcggcttgaccaactccaattatacggagctgaatcaattgtatgacaagt

SEQ ID NO: 13886 - DNA, 396 bp, Glycine max
acccctaccatgagttacaaagcatggcgtagagaaccaaaggatggtcctccccaatatagaagcagcactatttttgaagatgctacccctgagatggtgagggacttgttttgggatgacgagttccgaccgagatgggatgacatgcttgcaagctcttcaatcattgaagagtgtcccactactggtactatgaaagtgcagtggatacggaagtttccctttttctgtaaagatagagaatacataattggtcggagaatatgggaatctggaaagcattactattgtgtgaccaagggagtaaattgtccttcaatgcctagaaaagattaacctagacgcgttgatgtgtactactctagttggtgcattagagcagtggaatcaaat

SEQ ID NO: 13887 - DNA, 394 bp, Glycine max
aaagatggatattcatttctctaccctttcgggtggcaggaagtagtaattgaaggccatgataaggtgttcaaagatgtcattgatccactggagaacgtcagtgtaaatgtgataccaactggcaaacaggatattacagaattcgtgtcccctcaagaggttgctgaaactctaataaaaaaggttttggctcctacaaaccagaaaaccaagatagtagaagcaaaagagcaagatgttgaaggaataaagtactatcaatttgaattcattgctaaggcttcaaactatactcgtcatgctctcagcacagtcttcattggcaatggtaagttttacaccttaacaacaggtgcaaaccagagaagattggacaagatgaaagacaggc

SEQ ID NO: 13888 - DNA, 139 bp, Glycine max
  modified_base (7)..(7): a, c, g, t, unknown, or other
tcaactnttattgctgtggtctacctgttttcttactgaggaaggcttcatctctgcatagcgcacttttactcttaagggtcccattggtgctagttatcaccttctattatactactttgactgctgcaacaacaac

SEQ ID NO: 13889 - DNA, 347 bp, Glycine max
cgctcacacctctaatctcttcacctacttgctcattagtcaaacacttttccctgcattccaatcattttcttttcctccatatataataataatccttcgcttttttttttttttctcttcttcttcgatcgcattgaaaccttgttcgttgtagctatgttcttctccacagcttcaacgaacaacgcttgatggtgaaaaaaccttcaatcgcctattaactgcaatgcaccactcatcatcaactcatccatggctttctccgctttacttcgcccttcctcttctccttctcactctcagttgttttgctctgttaggttcaataggaggcatcgtagtag

SEQ ID NO: 13890 - DNA, 389 bp, Glycine max
gaggcttcttgctgaggtgtccctttctcaagagaggtttcaagaagtcaatgatcttgtttttgaagccattggctgtggtgaattggaggatgtcaatgttcaaagtgtcaaaaaagaagttgatgcagtcagcacaagcgaacaccctactgtggtggtggtggctggttcacaagaatgtgtggttctacagtaacaaggctcttgtattttgaacaaattcagaaaatctgcagtgttttaagaataattgctgaaatgtgtcaccgtttaagtcatactattgccttgtgcttgagccttatggtcgtgtgtgttgaatgtatatgcttttatctgcctttatgacactttcatgtgaaagtacgatataataactgctcaac

SEQ ID NO: 13891 - DNA, 372 bp, Glycine max
gattatcctaagtctttgggaatagtgctgcaatggcttcaagtcaagaggaggtgacccttttgggagctactggaagcccatttgtgtgcaaggttcatattgccctcaagttgaagggagttcaatacaaatatgtcgaagaaaatttgaggaacaagagtgaactgcttctcaaatccaacccagttcacaagaaagttccagtgtttattcacaatgagaagcccatagcagagtctcttgtgattgttgaatacattgatgagacatggaagaacaaccccatcttgccttctgatccttaccaaagagccttggctcgtttctggtccaaattcattgatgataaggtttttggtgctgcatgga

SEQ ID NO: 13892 - DNA, 377 bp, Glycine max
tctggtttgtgtggtgtacttggtcaagggtctgaaacagcacagtgtgtagcatttacccggattgatttcccacctttgccacgagtggttcacgtttcagcctcctttaaccatgccgctttcgttatgcaatctggagaggtattcacatgtggagataattcatcttcttgctgtgggcatagagatacaacccgaccaattttcaggccacgccttgttgaatccctgaagggaattccttgcaaacaagttgcagcggggcttaacttcacagtcttcctcaccagacaaggtcatgtttatacatgtggaaccaacacacatggccagcttggtcatggtgatactcatgacagggcaacccccaaaat

SEQ ID NO: 13893 - DNA, 347 bp, Glycine max
  modified_base (324)..(324): a, c, g, t, unknown, or other
ggagagttggcaacaccggtgggatggccgcgattcagttgtctactgagcacaatgcgaattttgaggctgtcaggcaggagcttaaggaattgcacccgaatgacccccagattgttgtcctcaaacatggagtgtggagagtaaagggcattattcaggtttctagatctataggtgacgtatatatgaaacatgcgcagtttaaccgagaacccattaatgcaaaattcagactccccgaaccaatgaacatgcctttcttgtctgctaatccaactattctttctcatcctctccaaccaaatgattccttccttatanttgcatcagatggtttatgggag

SEQ ID NO: 13894 - DNA, 408 bp, Glycine max
gataactagaaacagtgtgatgaaaatgaaggtccttgttttcttcgttgctacaattttggtagcatggcaatgccatgcgtacgatatgttccctctccgaatgaacactggctatggtgcccgtactccggaggtgaaatgcgcaagttggaggcttgctgtggaagcacacaacatctttggctttgagaccattcctgaagagtgcgttgaagcaacaaaggaatacatccatggcgaacaatatagatcagactccaaaacagttaaccaacaagcttacttttatgccagagacctcgaagtccatcccaaggacacatttgtgttcagtatagatggcaccgtactctctaatattccatactacaaaaaacatggatatggggtggagaaatttaactc

SEQ ID NO: 13895 - DNA, 401 bp, Glycine max
gtgaagcagcagagggaggagcggcattaaaaatgcagatgttcgtgaaaaccctaacggggaagaccataaccctcgaggtcgaaagctgcgacaccattgacagtgtcatggctatgattcaagacatggaaggcatccctgcggatcagcagcgtttgattgtcgccggaaagcaacttgaagattgaaggaccttggccgattacaacatccagaaggaatcagccttttaccttgtcctaaggcttcgaggtggcatcatcgagccttacctcatggcttaggctcgtaaatacaaccaggacaagaagatttgccgcacatgctatgctcgtctgcaccctacggctgtgaactgacttaagacgacgtgcggtcttagtatccagttgaggcct

SEQ ID NO: 13896 - DNA, 302 bp, Glycine max
gctttttagtttcagttagatcagcatgaatgttggtatgggaatctgtgacaactagttggcatattataactatcctgcatccaatctaaatcatatccgaattactactggctttccaactccacattctcaagaaatatgcacacataaatgtccatatatgaattcacactatatgttttcttattaagacctatcctgaagacaacggaaatgagatcggaatacctatccatatcccacttcctcattcacactacataacgattcaccaacgttcatatatgaattccaattac

SEQ ID NO: 13897 - DNA, 393 bp, Glycine max
aagcaatgtctcacagaatgcatgtagacaacagtgtaaaactgattgggaagcttttatttggcattgaaaagggtccagaagtactcaacgctgttagaccggctggatcggcacttgttgatgactggcactgcctgaaaaccatggtgaggacttttgagacacattgtggatccttgtctcaatacgggatgaaacacatgaggtcctttgcaaacatctgcaatgtacggataaagaatgaacaaatggctgaggcttcagcacaagcttgtgtcagtattccttccaatccctggagttctctgcaaaggggtttcagtgcataataactccctgtaatgtgcactagtaaagaccaaagtatgattattgctacattatgttaca

SEQ ID NO: 13898 - DNA, 393 bp, Glycine max
aagctttgttttacagaatgcatgtagacaacaggggtagactcattgggaagcttttatttggcattgaaaagggtccagaagtactcaacgctgatagaccggatggatcggcacttgttgatgactggcactgtctgaaaaccatgccgaggacttttgagacacattgtggatcctagtctcaatacgggatgaaacacatgacgcactttgcacacatctgcaatggacggataaacagtgaacaaatggctgatgcttcagcacaggcttgtgctactattccttacaataatggagttctctgcaaaggggacacagcgcatagtaactacctgcaatgcgcactagtaaagaccagagtatgactattgctacatgatggcacat

SEQ ID NO: 13899 - DNA, 405 bp, Glycine max
  modified_base (368)..(368): a, c, g, t, unknown, or other
caaccaaaccctaacacacacccatttgattcagtttccatggctagcctcaaggttgcatttttggctgcagtgctctgcatggttgtggtgagtgcacccatggcacatgcagctatcacgtgcgggcaggtgacgagtagcctggccaattgcatcggttacctccagaagggaggaacgccgtcgtcgggatgctgcaacggagtgaagagcctcaatgccgccgccaagaccaccgccgaccgccagacggcgtgcaactgcctcaagtcggccgccagccaaatctccggcttcaacgccaacaacgccgcctcgctccccggcaaatgcggagtctccatcccctacaagatcagcacctncaccaactgcgctaccatcaaggtttgaagagaaagt

SEQ ID NO: 13900 - DNA, 322 bp, Glycine max
tggcaaaatgccagaatatgaacatatatttacagacttcctgttgagcttggggcaggggaagtacaagaaaaaataggctaaaataactgtttccagcccttttatttatgtcccccacatgacgtaagcccccttgcctctcagtttgaagctcaaaactatggctgtaggaaagtatcttagaaagcattagtgataataactttttcagttatgctgtgtgatggaagtgccatggaaaactatcaagacttgtgtttcaggaacttcgacctgtacagaacaactgctagtattttattgtgcgggaactttcggc

SEQ ID NO: 13901 - DNA, 308 bp, Glycine max
cggttttattccagaatatgaacatatatttacagggtagctgaatagcaaggagcaggcgaagtacaagacctatcctgctaacctaactgtatgaaatcctaatacctatgtgcattacattaccacatcccccttacctatcaatgcgaagctgatcacttttgctgtgggattgtatgttatattacattacctatcctaactccatcagatatgctatctgatgtaatcgccatagaacactatcacgacttgagtatcaagagcttcgaccttgtcaatacatctgctggaattatattgtt

SEQ ID NO: 13902 - DNA, 89 bp, Glycine max
attcagctcgagcacttctcttctgcccatgaaaagaacttgaatggtattgaacctatgagtacgattgctaaccgtgcagctggatc

SEQ ID NO: 13903 - DNA, 364 bp, Glycine max
  modified_base (324)..(324): a, c, g, t, unknown, or other
cccctggtggaatcccatttcaaaattttcaggaattaaggaggcaaaaaggtgcttatatgaattggaataatttgttttcttattaggcctatcctgaagccaaaggaaatgagatcggaattcctcggagaattccaattccacattttcaagaaataaggaggcaaaaatgttcatatatgaattggaattatttgttttcttattaggcctatcctgaagccaaaggaaatgagatcggaattcctcggggaattccaattccacattttcaagaaataaggaggcaaaaatgttcatatatgaattggaattatttgntttcttattaggcctatcctgaagccaaaggaaatgagat

SEQ ID NO: 13904 - DNA, 323 bp, Glycine max
cgcttaaattcccgaagatgaacatatgtctacagagttgctgatgagctaggtgcatgcgaagtacaggagaaaacacgctatgggatctgactccagaccttgtatctatgtacgactgatgacgtatgccaccttgcctctaagaccgtagatcaaaactatggctgctggaaagtatcttagagcgcattagtgatagtaacttttgcattcatgctgtgcgacggaagcgccatggagaactataacgacttgagctctaagaacttcgagctgctcagaccagatgatagtaatgcactgctccagaactttaagac

SEQ ID NO: 13905 - DNA, 302 bp, Glycine max
tgagcaggatgtgtcgctgggagcgaacaagttcccggagagacagccgattgggacggcggcgcagagccaagacgacggcaaggactaccaggagccggcgccggcgccactggttgacccgacggagtttacgtcatggtccttttacagagcagggatagcagagtttgtggccacttttctgtttctatacatcactgtcttaaccgtcatgggagtcgccggggcttagtctaagtgcagtaccgttgggattcaaggaatcgcttgggccttcggtggcatgatctttgccctcg

SEQ ID NO: 13906 - DNA, 395 bp, Glycine max
gtcagcaggtatcataggtctagccaacgacaaactctccatgcttggtcaattgtccaacaaatatggcaatgccttctcctattgtctcccctcatctttttcagcacaaccaaactcttctgtatcaggtttcttgtccattggagcctcatcattgtcatcatcaccatacaagttcactcccttggtcaagaatccaaagattccaagcttgtactttcttggtttgacaactatcactgtggcaggaaagccactaggagtttctgcctcaagctacaatgttcctaccataattgactctggcacagtaatcacaaggcttcctgtggctatttacaatgcattgaaaaaatcttttgtgatgatcatgtccaaaaagtatgcacagg

SEQ ID NO: 13907 - DNA, 311 bp, Glycine max
gtgaaagagaatccgaggcgaagagaagagaaaaattaagatggaggggaaggagcaggatgtgtcgctgggagcgaacaagttcccggagagacagccgattgggacggcggcgcagagccaagacgacggcaaggactaccaggagccggcgccggcgccactggttgacccgacggagtttacgtcatggtccttttacagagcagggatagcagagtttgtggccacttttctgtttctatacatcactgtcttaaccgtcatgggagtcgccggggctaagtctaagtgcagtaccgttgggattc

SEQ ID NO: 13908 - DNA, 400 bp, Glycine max
  modified_base (315)..(315): a, c, g, t, unknown, or other
cgagttacagccgcaccttgattcagagcagagcgaccttgaagagctatggctgtcggaaagaataagaggatttccaagggaaagaagggtggcaagaagaaagccgctgatccctttgccaagaaggactggtacgatatcaaggccccttccgtctttcaggtcaagaatgttggcaaaaccctcgtctctcgtacccagggaaccaagattgcttctgaaggactcaaacatagagtgtttgaggtctcattggctgatctccaaggagatgaagaccatgccttcaagaagattcgtttgagagctgangatgttcaagggaaaaatgttctgacaaacttttggggaatggatttcacaactgataagttgaggtccttggtgcggaaatggc

SEQ ID NO: 13909 - DNA, 404 bp, Glycine max
  modified_base (394)..(394): a, c, g, t, unknown, or other
ggaaaggggagaggattcccttgccgtgggagattctgcagccttcgctcagaatcctggggcactgtctattgggaccgttgaactctcaggatgtgaaggacgccgcttccttcgcggtgcggtgcttgtacgcccgcgcttcgcacgatttggtgccgcaggcgatactcgcgacgaggagtctcattcagcttgatgtgaggactcgagaggctgccaagacgaatgccgccactaactcgaacgccaacacccccaccaaggccaagaagccggagattcttctggtttccaagtgaggaggaggttgctgctgtgtactattactgtaggtcttcatactgtaaacacaatttctatttgtataatagaaacttcatagatgccattntttttttata

SEQ ID NO: 13910 - DNA, 324 bp, Glycine max
cacgcctactctagctgatactctggctcaagcacatttcctcattttcaagaaatcccgacgcaaaggtgggcatatatgaactgcaattatctcttttcttattaggcctatcctcataccataggaaatgacatcggaattcctaggataatcccattcccacattctcatgatatccggatgcacaactgttcatatatgaattagaattatttgatttcttattacgcctatactgacacccaaggacatgataccgtaattcactagagaattccaattccacattttcaagaaataccgaagcaactcctgttcata

SEQ ID NO: 13911 - DNA, 264 bp, Glycine max
caatcgacgccttttttgcgaataaggaggcaaattgggacgaggtgaatgagcatgatgtgtcgctgtaatcgaactattttgcagccagacggcctgttgtcacagttgctcagagcctagacgacggccatgactaccaggagccggcgccggcgcgactgtttgtcccttcggagtatacgtcatggtactttgactgtgctgggatcgcagagtttgtggtcactattctgttgtgtacatcaatgtctcaaccgtcat

SEQ ID NO: 13912 - DNA, 423 bp, Glycine max
ttcagccaagaggaacctttacccctaggaccagcaccacctatcttaacttgaaagggccttttaagggttggcttctggggccttaaaacttgcccttttaactgttgaaaagtcctcagtgagaggccttccctctttttcaaggaactcttcttcattcagagttgtggccagtggcaagaagatcaagactgacaaaccttatggaattaatggtggcatggctttgagggatggaactgatgcatctggcaggaaaggaaagggaaagggtgtttaccagtttgtagacaaatacggtgctaatgtcgatggttacagtcctatctacgacaccaaggactggtctccaaccggtgatgtctacgctggcggtacgactggcttggctatctgggctgtgactctacttggtctttt

SEQ ID NO: 13913 - DNA, 305 bp, Glycine max
acctatcgcttatagacaagaaataatgactctcagatggggatatatgaactggtattagtgggataccttatctagcctatcttcaatccaaatgaaatgcgatcgccattacttgatgaattccaattccaaataattaagacataatccggcacagcagacgatctatctattgctataatgagtcttattataactctcattaataatccacataactggagactggattaccttggtttcagcttacactacatctcgacgtactaaccatacgcatattgtgataagcctatcgtact

SEQ ID NO: 13914 - DNA, 202 bp, Glycine max
acttactggaagccttgttgtgagtaagagaaaaggcttgctgcaccgagcacaccaacttgatacctctgattctttctttgcttagaattccacagaatatggagactgttcttttcaatcactcccaacctttggaatcaaagggtttgagcagggaggaggaagactaatggttgggccaggtggaattttgaaggtc

SEQ ID NO: 13915 - DNA, 388 bp, Glycine max
gattcccttcgtttaaagatacaattaagatgatgcacacaacacaaacggacaggttacatttggagggtggtcggtcacaacaatgtcctattctacactaacaatgctctaaaattattaacaaattcaacaaatccgtagtgctttaaaaataattgctgaattgtgtcaccgtttaaatcacataatattgtgctgtgcttgaaccttaatgtcctgtattgtatgtattcgcttttatctgcctttatgactctttcatctgaaagtactatgtaataactgctcacctgagtactgttgatcatgtttatcagtatgatgtatcataatgctttacttgactcttagaaataataaattcatttatctgtttatccttttt

SEQ ID NO: 13916 - DNA, 339 bp, Glycine max
gaatccttgatctgtgaaaagccttataggcattagaaataacattactaccaagttaaatccatttaattcgctaggttatatgtaattcctttgaacctcattaatactacttcggcttaaatagttgaaatgattaatgttcaatattaaattccaactcccgatcattgacatcgaatggttgacatgtgaaacgagcttcggaaaactgcttaaaccaacccaacacttcagagaggacagtgttattggaaagggaggcactggcacaatgcacagggcaactcttcaaaacgcgcgtttctcgctcacagttaaaactctataagactgaga

SEQ ID NO: 13917 - DNA, 374 bp, Glycine max
gtttactatttctgtgaaaaaccttataggcaggagaaatgtcaataatacatggttctaggcatattattctctagcatatatataattacattgaaactcattaatactactatctcttaaattcaatatattattaattatgtataatcaattacaactacctatcaatgacattatatggttgacatgtaaaacgagcttaacaaaactctataaaccaacccaacacttcagacaagacagtatcattggtcagcgaaggactaggacaatgtacaaagcaacacttccaaacagttgattcttgctcacagttaagaaactttatgattgttagataagtatcacaagttcaaatttagaactaatga

SEQ ID NO: 13918 - DNA, 395 bp, Glycine max
  modified_base (150)..(150): a, c, g, t, unknown, or other
  modified_base (200)..(200): a, c, g, t, unknown, or other
agcaccacattcacctgaggcttccaaagcaatggcttcccttgcagcatccactgctgctgcttcccttggcatgtcagaaatgcttggaaaccccatcaacttcagtggtgccacaaggccagctccatctgcttctagtcctgcctncttcaagactgtggctcttttctccaaaaagaaggctacaccaacacctncaaaaaaagctgctgctgctgctcctgccaatgatgagcttgccaagtggtatggtcctgacagaaagatcttcttgcctgagggtctcttggaccgatccgaaatcccagagtacttgaccggagaagtccctggagactatggttatgacccatttggtcttagcaagaagccagaagactttgccaaatatc

SEQ ID NO: 13919 - DNA, 410 bp, Glycine max
gataaatctgggccttccaaggttggtgatatggtacatgtctcttccctcgggaaacaggtgactgttttaaaagtggattcatccaaaggagaaattgtagttcaagctggaaacatgaagttgaagctgaaactaactgacattcaaagatcatagaagcgggggaatcatggccatggttagaaatgtgaaaaatgtgcattgaaactgctatcatatgataatgacgtaagataaagcaaaggtggggggcactttcagcttcagaaactaaagttcctagatttctccggatgtgtcaagaactacagttttgcaatgtcatcagcaatacaaatagttggcgtgctagttgtgcaagaataaattaaaactgccaaaaaaaaaaagaagaaaacaagccattc

SEQ ID NO: 13920 - DNA, 397 bp, Glycine max
  modified_base (196)..(196): a, c, g, t, unknown, or other
cgagggttattggacacattcttcagcgactgcgtttttggatcggaacctcttctgcggcgtagcaatgggacactccaaacgttggaactctcacccaaaaaactacggtcctggttctcgcacttgccgtgtgtgtggggaatccacatggactgatcaggaagtatggccttatgtgctgcagcagtgcttncgtagcaatgccaaggaaattggcttcatcaagtatcgctaaaagagcagttgtcaactacggaccaatattgtgttctggcactaagatgttttgaagatgttatgtttgaagaaacttgagactttcttttttcatctaattaattatcagacgtaatttgtggtactaagaatacttttatataaattgttttgaacc

SEQ ID NO: 13921 - DNA, 407 bp, Glycine max
  modified_base (300)..(300): a, c, g, t, unknown, or other
gaatcccaacgctccgatgttcgtgccactcgcctatcggacggtggaggatttctccgaccagtggtggaacctcgttcactccttcccctggttccacgactactggctccgcgagtgcttccaagatccccagttccaaaacgacgacgctttcgacttcgactttgacctagatctccaagatgaagatgaaaaggaacgaaaggaagggaaggaggtggtgtcgttgggggtgctgaaatggcgaagctgtggaggaggatgggcccaggcgccgaggtatgtggaaaaggcccncaagtttgtgaagccccaagtgagcccacgggctattcaccagcccaggtagacgcaacccggcccattccccaccagctatagctgtgtacataagcgcaaatgac

SEQ ID NO: 13922 - DNA, 383 bp, Glycine max
gtcagtttctgccatgctttcagtacccaattgctttgtgcggcctagggaggcacaaaaagctgcggatgaagctaaagctaggttcgggcacattgatggagatcatctcactctgttgaatgtctatcatgcgtacaagcaaaataatgaggatccctcttggtgctacgataactttgttaatcatagggcattgaaatcagctgataatgttagacaacaattagtgcgtatcatgtcccggtttaatctgaagctatgcagcactgactttaatagccgtgactactatgtcaacataggaaaagctatgctagctgggtattacatgcaggtagctcatctggagcgtacaggactctacttgacagtgaaagaca

SEQ ID NO: 13923 - DNA, 400 bp, Glycine max
gagaagaaaatagtcgttcgagatggcccgtacgaagcaaactgctcgtaagtccacaggaggaaaggctcctaggaagcagcttgcaaccaaggctgcacgtaagtctgcaccaactactggtggtgtgaagaagccacatcgttaccgtcctggtaccgttgctcttcgtgagattaggaaataccagaagagtaccgagcttttgatcaggaagctccccttccagaggctggttcgtgaaattgctcaggacttcaagactgatctgcgtttccagagccacgccgtgcttgcattgcaagaagctgctgaggcataccttgttgggctctttgaggacactaacctgtgtgccattcacgctaagcgggtaaccattatgcccaaggatatccag

SEQ ID NO: 13924 - DNA, 394 bp, Glycine max
gaagagtttaaggttaatttaaggtgaaggtcctgtggtttgagtagccaaagggccaaccttaccttagttatggatgttgaggcagagattgatcgcttgccaattgatttgttggctcatatttttgttctgttcacttccttcactgatttggcacaggcgagtggtgtttgcaagaaatggaaacaaggggtgaaggagtctcttgctcggagacacaatctcagctttgccggttggaagatggatgatgactccactgctcgccttgtttatcatgcctacaacctcactaaactagatataccgaggagccgctggggttgccaaataactgatgctggacttctcagaatatctttcgctaagtgtataagcaatctcacatcca

SEQ ID NO: 13925 - DNA, 342 bp, Glycine max
taggtcgaggtttatcactataggtaggatcatcatgaagcgggcatgggtatatatgaatcggggctatggctatccttattaagtctatcctgaagccaaacgacatcagatctgaattcctcgtcgaataccaattccacataattatcaaatattgacacttactatgttaacatatcaactttaattattacattacttattaggcctatcctgaatccaaatgaaattatatcatattccctaaattaattccatatacacattttcatcaccatactcctcaaattcatacatatctccaatgtttatatatccactcttattatccacttcttt

SEQ ID NO: 13926 - DNA, 399 bp, Glycine max
attctgcagattaggggcttctgggttttcatgatcatcggctgcagagcaagtcactgaaggaattgatggaactggtttcactgccattgtcacaggggcatccagtggtattggcactgagactacgcgtgttcttgctttgcgtggtgtccatgtgattatgggtgtgagaaatatgcttgctgctaaagatgtcaaagaaacaatactcaaggagattccctccgctaaagttgatgccatggagttagatctcagttcgatgaagtctgtcaggaaatttgcatcagagtttaagtcctctggtcttccattgaacatcttactaaacaatgcaggaattatggcttgccctttcagtctctctaaagacaaaattgaactacagtttgccac

SEQ ID NO: 13927 - DNA, 410 bp, Glycine max
ctcgagccgaatcggctcgagatcaattcccgtaaattatagattctttgacgctgctcggaactctctatcatcacccaactccgcgatcttcaaatggaaaagaaaggccaattataaccgtcatagttctggaatggggaccttcaccactcgcgcgttggcgcagccgcttcagaacgccgacgaactcatcgactccgtcgagacatttatcttcgattgtgacggagttatatggaaaggtgataaattaatagacggagtgcctgaaacgcttgacatgcttcggtcaaagggcaaaagattagtttttgtcaccaataactcaacaaagtctaggaagcaatatggaaagaagtttgaaacacttggcctgaatgtcagcgaggaggagattttcgcatcat

SEQ ID NO: 13928 - DNA, 410 bp, Glycine max
ctcgagccgtatcggctcgagatcaattcccgtaaattatggattcgttgacgctgctcggaactctctatcatcacccaactccgcgatcttcaaatggaaaagaaaggccaattataaccgtcatagttctggaatggggaccttcaccactcgcgcgttggcgcagccgcttcagaacgccgacgaactcatcgactccgtcgagacatttatcttcgattgtgacggagttatatggaaaggtgataaattaatagacggagtgcctgaaacgcttgacatgcttcggtcaaagggcaaaagattagtttttgtcaccaataactcaacaaagtctaggaagcaatatggaaagaagtttgaaacacttggcctgaatgtcagcgaggaggagattttcgcatcat

SEQ ID NO: 13929 - DNA, 411 bp, Glycine max
  modified_base (330)..(330): a, c, g, t, unknown, or other
ttcaaagaataatgatgaagtagatggaaaaccgggtgcagcagcactctttgtgaaggtcagcatggatggtgctccctatctgaggaaggtagatctaagaaattatacaatgtaccaggaactgtcttctgcccttgagaaaatgttcagctgtttcactctaggtcaatgtggttcccatggagctccaggaagagaaatgttgagtgagagcaagctgaaggacctcctgcatggttcagaatatgtactcacttatgaagataaagatggtgactggatgcttgtcggagatgtaccatgggatatgttcattgacacatgcanaagactgaaaatcatgaagggttctgatgccattggcttagctcccagggccatggaaaaatccaggagcaggtgctagtt

SEQ ID NO: 13930 - DNA, 214 bp, Glycine max
gaagtgaagcttgtgtgcttcctgtcatcaaggttgacaagggcacagtcgagcttgctggaactaatggagaatccaccattcaggtactagatggcctatgtcagcgttgtgtcatgttctacatagctggtgcacgtgttgccaaatggtgtgctgagcttaagattgatcataacaagccatctcatctggttatacatctgaactccta

SEQ ID NO: 13931 - DNA, 401 bp, Glycine max
cctaaaacatggaactccgtttaaggaaaggaaaacagcgtacgaggaagagagagatagaaaacggcatgcagtggtgggcttcatggcggaggtgttatattggatctcaacgtttgttctcattttgactcttctttgtattctcggttaccagcttatattattggtggacctggagtttgattatatcaacccatatgattccacgtctcagataaaccaggttgtcttgccagagtttatcatccatggaatcttctgcttcaccaatcttatagccgggcattggtttatattcttgatatctctccctttcctgtattacaatctgcgattgtacattaaaagagagcacttagcagatgttactgaaatctacaataagctaaattgggaga

SEQ ID NO: 13932 - DNA, 414 bp, Glycine max
ggactttggttcttaaaagacgctatatttgaagaaggggatgcggaagaattggctgaagttgaagctaaattggataaagattggaaggctagcaatggagctacaaaaaatagcaataaggatgatgatgccacaaaaaagcataaacggtcatttttatctcagtttttttctcctatctttttacaggcattttctatcaccttttttggtgaatggggtgacaagagccagttggctaccataggtttggctgcagatgagaacccatttggtgtggttcttggagggattctgggacaagcattgtgcactgctgctgctgttgttggaagaaagagtttagcttctcagatatctgaaaaaattgttgcactctcaggtggaattcttttcattggttttggaatt

SEQ ID NO: 13933 - DNA, 315 bp, Glycine max
acaccccgagattccaagattcaaagaacaactgcactgattggacctaggccatcttccattgacatctaggccctctactctcatctcctaccgaactaaaccaataaccgactaatcgaccaatcgtataccctacttctgcctctctcacgaattaaaccctcaacataaatcaatcacccaactcgccctgacaaacttacctcaaatacactgctcctgcactcaatggatcactcactctctggccacctgaggacccatacaactagcggtattaccttaaacccaagctttgaaacggacattcac

SEQ ID NO: 13934 - DNA, 406 bp, Glycine max
acttaacaacagcacaaagcgggttactgtctgttcaagctaccatctctctctctctttcttagtgcctccttgccagaagttaaaatggcccaagaaactttcctattcacatctgaatcagtgaacgaggggcaccctgacaagctctgtgaccagatctccgatgctgtgctcgatgcatgcttggagcaggaccctgacagcaaggttgcctgtgaaacctgcaccaagaccaacatggtgatggttttcggagagatcacaaccaaggccaacgtggactatgagaagattgtgcgtgacacatgcaggaacattggttttgtctctgatgatgttggtcttgatgctgacaactgcaaggtcctcgtcaacattgagcaacagagtcctgatattgctc

SEQ ID NO: 13935 - DNA, 408 bp, Glycine max
caaaagccttctcctccttctctggttcaaccttcccacagacactgcatgcgtctttgaccacaactgcttcttcaatttccaatctttttggacaccctctattgctcttcctcccttggtgtagtttgtgtaaaagggtatctctatttatagagtttccattgtctctggaggcaattttcgaccttaggtgtgttttggagagtttttttttttttttttgtgttgtttagttgttgaggttggttggtttgtgagagagagaatggtgggtgctctatctgttgtgggatcatcagtaatggactctcacactggcccttgtttgtgtgtggatgctctcccaacaacaactagtgtcaatctcaagagtggtggagatgttgttttgtgcaagaatttgat

SEQ ID NO: 13936 - DNA, 409 bp, Glycine max
aagaagcaaatcaagaagtacctgcttggctctcacggtttgctgctcgatcttcttttggtggaggcaggaaccgccgatcaggcggtcgatttggtggtcgtgacttccgaagagatggctctttcagtagaggttcttcagattactacagtgcaggaaacggcagtggtggtggatatggaggctcgggtgggtatgctggtggagggtatggtcctggggtcacgagtgcttgggattgactttcttcttttcatagcattacataccatcttaagtataggtgtggatgcgcctacaggatgatttttcttcccccagtgtttttatgatcttcaatttacttgtgtttcaagccatcatcattttgtactattttacagtgctaatcattgtggggaaatgg

SEQ ID NO: 13937 - DNA, 404 bp, Glycine max
attcggcagaaaaggggcttctgggttttcatcatcatccactgcagagcaagtcactgaaggaattgatggaactggtttcactgccattgtcacaggggcatccagtggtattggcactgagactacgcgtgttcttgctttgcgtggtgtccatgtgattatgggtgtgagaaatatgcttgctgctaaagatgtcaaagaaacaatactcaaggagattccctccgctaaagttgatgccatggagttagatctcagttcgatgaagtctgtcaggaaatttgcatcagagtttaagtcctctggtcttccattgaacatcttaataaacaatgcaggaattatggcttgccctttcagtctctctaaagacaaaattgaactacagtttgccacaaatc

SEQ ID NO: 13938 - DNA, 399 bp, Glycine max
gaaatgttgctaacattgtcccaccatatgaccagtcaaaatacgctggaactggggcagcagttgagtatgctgttttgcatcttaaggtgtctgagattgtggtcattggacacagtgcttgtggtggtattaaggggcttctgtctttcccatatgatggaacctactctactgattttattgaggagtgggtcaaaattggcttgcctgcaaaggcaaaggtgaagacacaacatggggatgcaccttttgctgagttgtgctcacactgtgagaaggaagctgtgaatgtttcccttggaaaccttctaacatacccatttgttagagatggcttggtgaacaagacattgtcactaaaaggaggatactatgactttgttaagggatcttttg

SEQ ID NO: 13939 - DNA, 412 bp, Glycine max
aattatgtacttattgtgaaaccatcagggtttgcttgtccttctattattgttgcttttaggtttctgaagagctcttggaaggcaaggagttggagttttacaaatgggaaggagatgtacctgaattgttgaaagatgttcatgataagctcaacatgctttcagagcattggtctctagatgacaagaatagatgtttaaaagaaactactaaggcattccgttatatgggacaaattgttcgtctaattgtctcataaatagacatttgttctccttttttgttgttgaccttctttgatgtttcaatgttttgtagctgcctggccaaggtgccttacatctgtgatagatctgcacaatcttattgataaggatattaagggcatagcacaaccgataaagacac

SEQ ID NO: 13940 - DNA, 396 bp, Glycine max
ggaaaaaacattgattctggtggtgagttaactgaaaaggaaattatcagagctgagaggaactctgggtttatcagtaacagagtgagagaaattcaaatgctaaatgctttgaggaaaagggaacaaaaagagcgcagggaaaaggatttgagggaaggattacaactatataagaatggcaaatatgatgaagcactagagaaatttgagtctattttaggatcaaagccagaacctgaggaagcagcagttgcaagttacaatgttgcttgttgttactctaagctaaaccagattcaagctgcactttcttcactagaagaagctctgaatactggttttgaagacttcaagagaataagaactgatcctgacctggctaacgcaagggca

SEQ ID NO: 13941 - DNA, 357 bp, Glycine max
aaaccctagtctccatacatcaacttgggaggttaaagagacggcaacgttgtgctgtccgccttgaccgagccagagcttcgtcttggccctcgattttgccctgtaaaactaatcccagtaacaacagaaataatcaatggcaccgaaacagaccaaggctgagaagaagatcgcttacgatgcgaagctgtgcgacctaatggaggagtacggccaaatcctcgttgtaaactccgacaacgtgggatcgaaccagctccagaacattcgcaagggtcttcgcggcgactctgttgtcctcatggggaagaacaccatgatgaagcgctctgtcaggatgcacgctgagaaaac

SEQ ID NO: 13942 - DNA, 410 bp, Glycine max
ctttctcacacaatctgggaaccacacacacaaaccattcccttttctcactacggcaatgaccacccaagcttccaccttcgccgtcgccgttccctccgtcgcaacccctttccgccgccaccggaatcccttcgttgttcgagcccaagcggaaccttcagataaatccgttgaaattatgaggaagttctcagagcaatacgcccgtaagtcaggaacatacttttgtgttgacaagggggtcacttctgttgttatcaaggggttggctgaccataaagatacgttgggtgcaccactgtgcccttgccggcattacgatgataaagctgctgaggttgcacaaggattttggaattgcccttgtgttcccatgagagagaggaaagagtgccactgcatgctat

SEQ ID NO: 13943 - DNA, 173 bp, Glycine max
gctttttctcctccaaagccaagatagaggcaaattttggaatgtaattaataattatctactagtaactcgtggaacacaagtgttccttaaaagacaagttaaagtctagaatgaggagcggaaaacaatttggaaaagtggatatttctgtatgaagcgaacattgtgag

SEQ ID NO: 13944 - DNA, 403 bp, Glycine max
caaattctcattatctctctctctctgtttcgctttcaccgaagaataacttgactttcccgaactccacctgagaaaaagatacccttaattcgcaggcgcgtcttgtgttggacaacaaccacaagatgattaacttcgaagaaaccgagttgcgactcggcctccctggcaacgactcagcactcaagggaagtgctgccaagagaggcttctctgaaactgcttctgttgatttgaagcttaatctttcttcttgtattaacgactctgcctcggattcaccctcatctatgtctacagagaagcccaaagagaacaagactaccactgctgaacctcctccagctaatgatccagcaaaaccacctgcaaaggcacaagtggtgggttggccaccagt

SEQ ID NO: 13945 - DNA, 394 bp, Glycine max
ctatatcctcattatctctctctctctgtttcggtttcaccgaagaataacttgactttcccgaactccacctgagaaaaagatacccttaattcgcaggcgcgtcttgtgttggacaacaaccacaagatgattaacttcgaagaaaccgagttgcgactcggcctccctggcaacgactcagcactcaagggaagtgctgccaagagaggcttctctgaaactgcttctgttgatttgaagcttaatctttcttcttgtattaacgactctgcctcggattcaccctcatctatgtctacagagaagcccaaagagaacaagactaccactgctgaacctcctccagctaatgatccagcaaaaccacctgcaaaggcacaagtggtgggtt

SEQ ID NO: 13946 - DNA, 398 bp, Glycine max
gagttctcatatctccttcaaaagatgttgaagcagctgtcaattgggttattggtggtgaggagaatcctgacatctcattgcatatgcggatgcttatgaataggtccataagagctgtacaggctgcattgcattgcatcaaaaaagtcatagagagtcagcacctaacttctagaccaaaggtggttgtggtgtcagatacaccttctcttgttaaaagtatcatgcccaacataagcgaatttgcacaggttctttattttgattatgaaaagttcaaaggaaatatctttgaaggtttgcccaagttagattttagagtgaaggattggggtccagcacccagatgggttgcttttgtggatttttttcttgcatctcgagctaaatatgct

SEQ ID NO: 13947 - DNA, 399 bp, Glycine max
cacagaatcaagaatcgggatagcacagataagtccagctgctacagaagtttgcacgcacgcattttccttctgtaaaatacatggagtatgctgttgaagttgaaaaccacaaccacagttaaaatgtttttgcagcagaaatcaaatcctcctaataatgcttgactgttacattgagtttaagtgtagccatgagactagcaatatccataaacaccgtttacataatcccataccccttcacaaacctgaaataccccgttccagacacaaccccaaattcccgttccttcatcgtgaagatatctgatccttgaatctccaagctgcttcctttgaatttcccattggtgaagatcacggagaaaaccatgtacaagcctttgccatcaagct

SEQ ID NO: 13948 - DNA, 407 bp, Glycine max
ggaagtccctcaagaacatcaaagctatcttgtccaagggacaaaattccaagctgcacaaaactgcaagacctggatcgatggtgagtggatcacgccaggagagcaatactgggcaccacgtggaacccattatcatcaatatgttgtcccaccaattttatcatttagaaaagattgcacttatggtgacctggcagccatgagattaccagaagacgtggaaggacttgggtgttgtgagtacacgatggataggggagtggttcacgcgtgccatgcaggaggagtggtacatagccttgaaggttggtctcatcacgaagttggggccatagatgttaacagaatcgatcttgtgtgggaagcagcactcagacatggcctaagaccagtgtcaagtttca

SEQ ID NO: 13949 - DNA, 416 bp, Glycine max
cgagctaggaaattactttgcaaagatgaaagatatcttgtggaactggcaaaataccaagctgcacaaaactgcaagacctggatcgttggtaagtggatcacgccaagagagcaatactgggcaccacgtggaacccattttcatcaatttgttgtcccaccaattttatcatttagaaaagattgcacttatggtgacctggcagccatgagattaccagaagacgtggaaggacttgggtgttgtgagtacacgatggataggggagtggttcacgcgtgccatgcaggaggagtggtacatagccttgaaggttggtctcatcacgaagttggggccatagatgttaacagaatcgatcttgtgtgggaagcagcactcaaacatggcctaagaccagtgtcaagtttcac

SEQ ID NO: 13950 - DNA, 409 bp, Glycine max
tagggtatcccctctagaaaatcaaagctatcttgtgcgacttgcaaaataccaagcgtggcaggactgcaagacctggatcgttggtaagtggatcacgccaagagagcaatactgggcaccacgtggaacccattttcatcaatttgttgtcccaccaattttatcatttagaaaagattgcacttatggtgacctggcagccatgagattaccagaagacgtggaaggacttgggtgttgtgagtacacgatggataggggagtggttcacgcgtgccatgcatgaagagtggtacatagccttgaaggttggtctcatcacgaagttggggccatagatgttaacagaatcgatcttgtgtgggaagcagcactcaaacatggcctaagaccagtgtcaagtttc

SEQ ID NO: 13951 - DNA, 420 bp, Glycine max
ctagacgagaatgtcgctcaagtgcaattgcttatcgttttagaagtaacgaggcgaaacaggggatatgggaattggaatgatgagaaatcttattaagcctctcctgaagccaaaggagatgcgatcgagcctactcaggcaactgcaactgcacattttcaagaccagcagaggccacaatggacatgtacgaaccggcattatcagttgaatcattaggcctatcctgtatccagaggacgtgagctcagacttacgtacagaatgccaattacacacttgctagaaatggtgctgcttagatgtgaccatatgaattccaattatgcaggtcacgtattaagactatcctgaagacaaaggacatgagatcactataccattaagataccgagctcgaatgacctataatgagtc

SEQ ID NO: 13952 - DNA, 383 bp, Glycine max
attggtttctgctatccatgctatgatgcataaccggccaccacattttagtgggatgttaatggcttaaccacctgtccaagttgacattctgagggtgtgtgccatgaagatgtgaagcttacatgtaaagaaattaccagctctggttgcattctttggagagtgtgttgttctgaggtatatacatgcacagagagtattttacatttggtggcaatagatcttatttgtaagagttaagttaggagtttgctgcaaaacaaacacaaagtaaaggttccttactcattttcacttattttacttgtttttagacaatattttggttttatttggctccatgtcatcttaatatagtttcaagtataatcgagtttatc

SEQ ID NO: 13953 - DNA, 394 bp, Glycine max
  modified_base (346)..(346): a, c, g, t, unknown, or other
ctcttcttccccaccatcacaccaaccaaacctcactctgggtgccatggtcatgggagcctttcgccacttcaaaccggtttccaaatgcagcaccgaaaaccggtttaaccaaaccgtggcctcggacttggacggcaccctcctgggtgtcccctagcgcctttccttactacatgctcgtcgccatcgaaaccggcagcttcctccgtggccttgtcctccttggatccgtccctttcgtgtacttcacgtacatattcttctccgagaccgcggccatcaagtccctgattttcattgccttcgcgggcctgaaggttaaggacattgagatgggcgcgtnctcggtgctgcccaagttctacaccgaggacgtgcaccccgagagctg

SEQ ID NO: 13954 - DNA, 104 bp, Glycine max
acctggggcaaggtccgcttaaaggtattccggaccttgtgattggaaacctaaggaagcttagattaacccttccaaggggattaccggtggattcccaagga

SEQ ID NO: 13955 - DNA, 192 bp, Glycine max
ctgtgaaagtgctgtccgatgatttcattacctgtgggcttctgtcaatggtatctgaatgaatggaatttgccatgtatggaatattggttttgatttctttatggccagttattgcatgaatgttaatcatgaaagcagaattctttgtggttatgctgttcaaatatagacgagatttggttctaatcc

SEQ ID NO: 13956 - DNA, 304 bp, Glycine max
ggcttccttaagctccttagtgctgctccttgcagctcgaattctatcccctcaagttcttgcaaactatgagaatcccccagtgtacaagcctcccactgagaaaccaccagtttataagcccccagttgagaagcctcctgtttacaaacctccagttgaaaaccccccaatttataagccttcagtagagaagccaccagtgtacaagcccccagtcgagaaacccccagttgataagccctcagttgagaaaccaccaatgtacaagctcccaagtgaaaaacccccaatgtacaagccc

SEQ ID NO: 13957 - DNA, 393 bp, Glycine max
tttagtcacaccaagatcaacttttcagttgagaggtttagccttgattactaagagcaccaagccaacccatatgagcaaaaacaccaagtagtgttttcactcacactgtttaacaaattcttgctccaatggagagcatattttttcagtctctctcccttgcaaagattccaaagtctcaaacttcacctctgctgaattcaccactcttgtttcactccaatgcaacctcagttgctttcagttcggtaccctatcatcaccaccatttgctcaagtgctttctgtttagatccaaagcaaacgaatagcagaacctggtgggagttttacgtgcctctgaggctgcaacatccctaacaaccaatgatgcagaaagatggcttcttg

SEQ ID NO: 13958 - DNA, 388 bp, Glycine max
caagcctccagatgcttttgtaactcgtgtgcattcagctcagagaacagaagacgaagactatgctgagggaagtgagacagggttttctgagtcacctgcaaatcctgctaatggtcctgcatccccacctactgccaggcaatcagcacctacatctgcaataggtgcaccagccacacctccacctgttgcacctgtgccagatttacttggagatttgatgggcatggataattctattgttcctattgatcagccagctactcctactgggcctccattacctattttactacctgctgcaactggtctgggtttacaaattagtgcacaactgactagacaagatggtcaaatattttatagtttggtgtttgagaacaac

SEQ ID NO: 13959 - DNA, 383 bp, Glycine max
ccccttggggaattccaattccacattttcaaaaattaaggaggcaaaatggtgcttttttaaatgggaataattggtttcctaattaggcctatcctgaacccaaaggaaatgagatcggaaattcctcggggaattccaattccacattttcaagaaataaggaggcaaaaatgttcatatatgaattggaattatttgttttcttattaggcctatcctgaagccaaaggaaatgagatcggaattcctcggggaattccaattccacattttcaagaaataaggaggcaaaaatgttcatatatgaattggaattatttgttttcttattaggcctatcctgaagccaaaggaaatgagatcggaattcctcgggggta

SEQ ID NO: 13960 - DNA, 409 bp, Glycine max
gacgagaggggtgccactattatctatgcaacacatatatttgacggcctcgaggattggccaacaaatattgtttatgtagcccatgggaagctgcaactagcaatgcctatggacaaagtcaaagaaattagcaaattatcactaatgagaacagtagaaagttggctgcggaaagaacgagatgaagatagaaagaaaaggaaagagagaaaagcagctggtcttcctgaatttggaaagcgagttgaggaaagccgtgtaacaggggatccagcgcgtgctgcagttcgagtaattaataatggttgggctgcaggacgattaacttccaccgttgctggtgaggaaaactttctcctgagctcaaaccgagtattgaggcagtagataaatttcaaatgctatt

SEQ ID NO: 13961 - DNA, 410 bp, Glycine max
gactataggtttgccactattatctatgcaacagatatatgggacggcctcgaggattggccaacaaatattgtttatgtagcccatgggaagctgcaactagcaatgcctatggacaaagtcaaagaaattagcaaattatcactaatgagaacagtagaaagttggctgcggaaagaacgagatgaagatagaaagaaaaggaaagagagaaaagcagctggtcttcctgaatttggaaagcgagttgaggaaagccgtgtaacaggggatccagcgcgtgctgcagttcgagtaattaataatggttgggctgcaggacgattaacttccaccgttgctggtgaggaaaactatctcctgagctcaaaccgagtattgaagcagtagataaatttcaaatgctattg

SEQ ID NO: 13962 - DNA, 409 bp, Glycine max
gactttaggtgtgccactattatctatgcaacacagatatgggacggcctagaggattgggcaacaaatattgtttatgtagcccatgggaagctgcaactagcaatgcctatggacaaagtcaaagaaattagcaaattatcactaatgagaacagtagaaagttggctgcggaaagaacgagatgaagatagaaagaaaaggaaagagagaaaagcagctggtcttcctgaatttggaaagcgagttgaggaaagccgtgtaacaggggatccagcgcgtgctgcagttcgagtaattaataatggttgggctgcaggacgattaacttccaccgttgctggtgaggaaaactttctcctgagctcacaccgagtattgaggcagtagataaatttcaaatgctatt

SEQ ID NO: 13963 - DNA, 401 bp, Glycine max
gattagaggtctgccactattatctatgcaacgcatatatgtaactgtctaaaggattaggcaacaaatattgtttatgtatcccatgggaagctgcaactagcaatgcctatggacaaagtcaaagaaattagcatattatcactaatgacaacagtacaaagtttactgcagaaagaactatatgaatatataaagaaaatgaaagagagaaaagcaactggtcttcctgaattctgaaagcgagttgaggaaagccgtgtaacaagttatccagcacgtgctgcaattcgagtaattaataatgattgtactgcatgacgattaacttccaccgttgctgatgaggaaaactttctcctgagctcaaaccgaatattgaagcaatacataaatttcaa

SEQ ID NO: 13964 - DNA, 402 bp, Glycine max
ggcaccactttaacttatactataatattataaaatacagggttggataacacggtaactcacatggcacacccgcgtggtactaggttcgtcccgatcaatgtttagtataaactccctgaatcctcacaagggacgacggataagcgttgctgttccacctaagtttccaagcttccggagggaagcagctctgcaggggaatttggaggctgttagagtcccaacttcggtgcctgtgcgtgtagcatacgaacttcttctagctggtcatcgatatttggatgtaaggactccagaagagttcaatgctggacacgctcctggcgccattaacataccttatatgttcagagttggatcagggatgactaagaatagcaactttattagacaggtgtc

SEQ ID NO: 13965 - DNA, 398 bp, Glycine max
ctcttttcgtggaagaccttcatctgagttcaccagggtgggctcatatgtaagtctctttgccaggaagaccttcatctgagttcacactggtgacagcagatgtagaggagaaatcggttataattggtgagagaaatagagtagcaatagaggccctgagagcagcaatggacaagggacacaataaaattgcaatactatatgggggtggccacatgccagatcttgggaggagattgagagaggattttgatttagtcccatctaatgtacagtggataacagcttggtccataacgaaaaaggacctaaatactgattcatttccatttctgaagacaattgctaaggcctcaggctggccattgaaccgctatcagaccttggcattgctc

SEQ ID NO: 13966 - DNA, 382 bp, Glycine max
  modified_base (69)..(69): a, c, g, t, unknown, or other
  modified_base (93)..(93): a, c, g, t, unknown, or other
  modified_base (303)..(303): a, c, g, t, unknown, or other
aaaagttctgccaaatcaagaggggttttaagatcatagtgtgtgttttgcaacaatggctaagttctntgctgctatgatcttggcactctntgccatttccatacttcaaacagtggtaatggctgctaatgaacaaggaggccacttgtatgacaacaagagcaaatatggaagtggaagtgtcaagagttaccaatgcccatcacaatgctcgaggagatgtagccagacccaataccacaagccctgcatgtttttctgtcagaagtgctgcaggacatgcctgtgtgtgcccccggngtattatggtaataaagctgtgtgcccttgctacaacaactggaagaccaaggaaggaggacccaagtgcccttgagct

SEQ ID NO: 13967 - DNA, 363 bp, Glycine max
ggtgaaattcaacgtactcgagaggccatctccgacaacaatgggtgttcacgacaatctggctacctctcaaagtcgctatcatccccgcactttttgacatcccagtcctgattacattcactactgcagttaaggcatcagtgcgtactccatatagacacatgagcgatatggaagtggatgagtcgagacttagcaactggacagacactgctataggagcattagccagacccacttgcacaacagatcattgtggttctgtgaaagagagcatagcgacatgcgatgctcattggccaagtctattaccatggtctagctgtgcacaactgactccacaactgcacgaccgatcat

SEQ ID NO: 13968 - DNA, 405 bp, Glycine max
ctggccaacacgaagccgtgggggttaatgggggtcaagtgggagaatcgcgaaggcccgtacgaaagaagatggtacgactcctgaacaatgtggaaaggctacatgttccatttcattgaagcatgctggtccttcgtgattctccaatacaaggtattatcaggaggaacagagaaacttcaacatatactgttgtacattggactggttccatcggagaacgagactgatacgtcgttattagctgcacaataggtaagaagggcaacaggcacagacttcatcatatctttggccgcagatgatatttctcgctccagctacacatatgttgcaatactgacgtgtaagattatgggtaccaagatcactatttatgacagccaacccccacatggagct

SEQ ID NO: 13969 - DNA, 92 bp, Glycine max
caattcattgtcctttactttagctccaagattatgatgtaatatattcgcctagcaatagaatatatcatatattgtttgcagtaactttt

SEQ ID NO: 13970 - DNA, 317 bp, Glycine max
cattacaggctccggtttttttactggaaaattatgacccaatatatgagggtaacattggaatacattacataccaattgcagtaccatccttaacttaatcaaaatcgttatgccgcaattttgttttggggctatcactgactagcgaccttttctacttgcccaaagcgtacttgccaatacattaaattaacacatgaattctcatgtcaagcattattatatctggggagtacatggtaagagtagcacaccatgaaatctgaatgcctattatcatgtctaacgttcattatcgcacgtgccacgatgcc

SEQ ID NO: 13971 - DNA, 370 bp, Glycine max
gctgaggaagtgttgatggtaaaatcagcacaatgtttttgaagatggctttggattcaatctccgaacaagttgatttccctccttgaactcaagcagatggattatgccagaattttgttttgcaaatataactgcgttccgattctttctatttgcccaaagcgtacttgtaaatacattaaattaagacatgaattttcttggcagcagttcttagattgttggagtaggtggtaagagtagcacaccatgaaatctgaatgcctattatcatgtttaacgttaattatcgcacgtgccacgatgccaggatggtatagaacctgaaatagataatcaagtattgggtggggcacaaaataaaaag

SEQ ID NO: 13972 - DNA, 293 bp, Glycine max
caactctactctaactaatttgctatagcaaaatcagcacaatattatggatagtgctctttagacagtctccgaacaaatcaatttccctccactaactcaatcatattaattattccacaatttaattatgcaaatataactactttccgattctttctatttccccaaaacatacttttaaatacattaaattaatacatgaattttcttaacatcatttcttatattagttcattaatttatatagattaacacactcaacaaatctgaattcctactatcatatttaa

SEQ ID NO: 13973 - DNA, 275 bp, Glycine max
ctgaaaagtgtaggaggctcatgggccacaaagcggtttgggcttccggaagactgtgattgtgtctcttgggttagggtttatgaggtgcacttgcaatgcgttttacaatttacatcacatttcgttgcgcctctgttctctgtcactgctgcgtctctcgtaaccatgcctaagcaaatccacgagattaaggatttccttctcactgctagaaggaaggacgcaaggtcggtgaagatcaagaggagctgagatgtagttaagtacaaggt

SEQ ID NO: 13974 - DNA, 223 bp, Glycine max
ctgataagttgaggaggctcatgggccacaaagcggtttgtgctttcggaagactgtgatggcgtctcttgagttagggtttatgacgtgcacttgcaatgcgttttacaatttacatcacattttgattcgcctttgatctctgtcactgctgcatctctagtaaccatgcctaatcaattataccaaattatggatttacttcttacttctataatgaaag

SEQ ID NO: 13975 - DNA, 365 bp, Glycine max
agacctgctaccatgcatgcacgcctactttagctgatactctggctcaaggcgactatcacattaacaaggcatatcgatgctcaaccgtaccatatacgaattgaagatatctgccttcttaactgtccatcctgaagccacttgaaatgcgatacggcattcctatgtgaatatcaacaacacattttaacgatatattgccgcccctaagatcaaactgtaatcgcaatgatggtgaaaggtaatatggctatcctgaatccataggcaatgctagctgcaaaacgtgattgaacactgtttcacatcaccaagaggtagggatgcctacatgggcatatcttaagagtcatcatgagtga

SEQ ID NO: 13976 - DNA, 393 bp, Glycine max
catcatgaagcatgggtgagatcgggaatcttggttgggatggtggtgtctatgccatatatggtcaataatcatgcttaacccccagtgcagaagataatgtctatcacatggcacccgacgaagaagctctatgagtcatttgttcaataatatacaatgtgttcattgtgcgatggttaaaatgtatccagcaaattagctgctattccttctgttacgaatgtccatcttgtatgaataactatctggctatactagctactagattgtatatgatatggtcaagttagcatgtgtatgatgtatctcttgtatactacttcatagacaaagaaaaatcatcatgtagctcgcgcgagttataagtggatccatcttttgcatatgttg

SEQ ID NO: 13977 - DNA, 417 bp, Glycine max
cctgtgtcctacagaagggtaccctgcaggagaaggggaggcataaggttcacaatcaatggccactcctactttaacttggtcctcataacaaacgtaggaggtgctggagatgttcatggtgtggccatcaaagggtcaagaactgggtggatgccaatgtccagaaactggggtcaaaattggcaaagcaacaactatctcaatggccaaagcctctcattcaaggtcaccactagtgatggccgtacagtggtgtcctacaatgttgcccctgctggttggtccttcggccaaacctacactggtgctcaattccgctagagaggccttaataattgttcacaagttgaagttccaaatatatttagttacactacatatggtatatgctataattcctcaatttaagtgtta

SEQ ID NO: 13978 - DNA, 342 bp, Glycine max
  modified_base (245)..(245): a, c, g, t, unknown, or other
ggggaaaatcctcatttttctgagcagccaaacactctctctctggctctcgaaaattctcagtttgcagagaaaatctgaatcatgtcgtggcaagcgtatgtcgacgatcaccttctgtgtgacatcgaaggtaaccacctgactcacgctgctatcatcggccaagacggcagcgtttgggctcagagtaccgacttccctcagttcaaacctgacgagataactgccatcatgaatgactntaatgagcctggatcacttgctccaactggattgtatctcggtggcaccaaatatatggtcatcccgggtgaacccggtgctggcattcgagggaag

SEQ ID NO: 13979 - DNA, 236 bp, Glycine max
ggtttcaagaagattcacttggcacaatttattgggggaccacagaaagatcaagcattttatggaagaaataaccgtgtcctttaatttgtattcatagtcagatgtgtggtagttgctcacgaacatgtttaagttaatcaagccagctgacatagaatatatgtatttaggatcaattctaccctcaaaagcctattacgaggcttgctcagtgttacacctgtgggtggatt

SEQ ID NO: 13980 - DNA, 412 bp, Glycine max
gggcgttttgagatagtgtgcctgtcaggctcttacttggttgctgatagtggtggcacccgcaatcgaactgttgcattaagtgtttcacttgcaagtcctgatggtcgtgtcatcggtggaggagttggtggagtgcttattgctgcaagtccagttcaggtgatacttgggagcttttcatggggtgcatcaaagacaaagataaagaaaaaagaaggttcagaaggtgcagaagttgctatggagactgatcatcagacggttcataatccagttgcagtgaatagtatttccccaaatcaaaatcttactccaacctcatctctaagtccttggcctgcatctcgaccattggatatgcgcaattcccatattgacattgatttaatgcgcgggtgacaatttattt

SEQ ID NO: 13981 - DNA, 339 bp, Glycine max
gttcgataattgtgctgaagtgcgcaaactctatgaaggtggagttacattgcctacaaactttcttagcaatatcactcctataccaataattaaggaactttttcgaactgatggcgaacagttcctcaagtatccaccacctaaagtgatgcaagtcgacaagtctgcatggatgactgatgaagaatttgcaagagaaacaattgctggtttgaatccaaatgtcatcaagattattgaggagttcccactaagtagcaagctagatactcaagcctatggtgatcatacctgtataataacaaaagagcatttggaacctaacttaggtggtct

SEQ ID NO: 13982 - DNA, 416 bp, Glycine max
tctctatattccattgccacccagttttgaatatatttgtattccttctttgtgtcttcactttcttccatacacataaccatgtcttctcagactgttgtcctcaaagttggtatgtcatgtcaagggtgtgctggagcagtgaacagggttttgggaaaaatggaaggtgttgagtcatttgacattgatctgaaggagcagaaggtgacagtgaaaggaaatgtggagccagatgaagttctgcaagccgtttccaaatctgggaagaagactgcattctgggtggatgaagcaccacaatctaaaaacaagcctttagaaagtgcacctgttgcctcagaaaacaagccttcagaagctgcaactgttgcctcagctgagcctgaaaacaagccttcaaaagctgcaattgt

SEQ ID NO: 13983 - DNA, 408 bp, Glycine max
gttacttgcggaaaaaagctccacaggcaaggaaaaaacgacaccgagccaaaacaagtccctatttacaccaaactagcctacatattaggccttcgtgtttctccacatcacaggagaatgggaatagggatgaagcttgtgaagaaaatggaggaatggttcagggataacggggcagagtatgcatacatggctacggagaaggacaacgttgcatccgtcaagttgttcaccgacaaatgtgggtactcaaagtttcgtaccccctgcattctcgcgaatcctgttttctcgcatcctgctagaatctctcacaaagtgactatcattgaactctctccgagcgatgccgaaatactctaaccgaacaagttttccacaacggagttcttcccgcgcgacgta

SEQ ID NO: 13984 - DNA, 369 bp, Glycine max
cttacctcggctttcaactccgccataggaggtttctttctgaagtgtgcctttctcaaaacaggttggacgaagtcaatcatctcgttcttcaagccattctctgacaccaacttactcatctaaatgttctaactgtcctaaatgaacattctgcaccctgaacagactaacaccctactgctaccatgccatatgcgtcacacgattgtctccatttacaggtacaaacttctattccactgcacattttcacacaatctgcagtctcttaataataatacctgacatcgctcaccggttaagccatactattgccttgcgctttatccctatcttcctcactgtctaacgtatctgcttctatct

SEQ ID NO: 13985 - DNA, 392 bp, Glycine max
  modified_base (324)..(324): a, c, g, t, unknown, or other
tcaactttgagatattgcatgctcggtgggctatgcttggattcgtcggtgctctgaatcctggaatattaaaactattgggagcctttcactttgtagaaccaatgtggtggcgtgttggatattcaaagctcaagggagatactctagattaccttggtatccaaagtcttcactttgctggaagtcagggagtggtcgtgattgctatttgccaagcactccttatggttggacctgaatatgctagatattgtgggatcgaggcattggagcctcttggaatatatctgcctggtgatataaattatcctggaggagctntgtttgatcccttgaatctgtccaacgatcctgaagcttttgaagagctgaaggtaaaagaaataaaa

SEQ ID NO: 13986 - DNA, 375 bp, Glycine max
  modified_base (7)..(7): a, c, g, t, unknown, or other
caccctnctatccaattacttctcgggcacaatcccttgggtccataaccacctggaaatcactgcaatctcttgacctcgcacacaattccctatgtggggatctccgcaactcaatgaactccctcaccacactccgcagactcgatctcaggttcaacagactaaccggttcaatcccgaagctgccacccaacttgctcgaactcgcgatcaaggccaattctctatctgggtctctccaaaaacaaagctctgaagggatgaagcaattggaagtggtggagctcagcgagaacgcgctcaccggaaccgtcgagtcgtggttctttcttttgccatcgctgcagcaagtggacttggccaacaacacct

SEQ ID NO: 13987 - DNA, 409 bp, Glycine max
  modified_base (392)..(392): a, c, g, t, unknown, or other
tcaactgtgttatattgcatgctcggtgggctatgcttgcgtccgtcggtgctctgattcctgaaatattagacctattgggagcctttcactttgtagaaccagtgtggtggcgtgttggatattcaaagctcaagggagatactctagattaccttggtatccaaggtcttcactttgctggaagtcagggagtggtcgtgattgctatttgccaagcactccttatggttggacctgaatatgctagatattgtgggatcgaggcattggagcctcttggaatatatctgcctggtgatataaattatcctggaggagctttgtttgatcccttgaatctgtccaacgatcctgaagcttttgaagagctgaaggtaaaagaaataaanaatggacgcttgcaatg

SEQ ID NO: 13988 - DNA, 170 bp, Glycine max
tcagctttcattggtgtggcctagctgttttcttaatgagaaagccttcatctctgcatagcgcacttttgcgcttaggggttcccttgaagctagttatcaccttctggtatgctacttgtactgctgcagcaacaactcaagtttcagggaatgaagagctgccaaag

SEQ ID NO: 13989 - DNA, 406 bp, Glycine max
  modified_base (342)..(342): a, c, g, t, unknown, or other
tggccgaacaacaatcaccaatggcagtggcgaatctgcagagactgtcctcgcaagtgcaccgcctcccctccgtctcgttcttctccaaatccctgatctcccgcacctccacctcttcctcctccacgaagaaggtcgcggaccgcatcgtgcggctgtcggcgatcgacttcgcgggtaagaagcacgaggtggtgggcctggccggtcagaccctgctgaaggcgctgataaacacgggcctggtcgacccggagtcccaccgcctggaggagatcgacgcctgcgcggcccactgcgaggtcaacatcgcgcaggagtggctcgacaagctacccnctcgctcctacgacgaggagtacgtcctcgttcgcaattcccgagcaagggtcctcaacaaaca

SEQ ID NO: 13990 - DNA, 339 bp, Glycine max
tggcctaactacaatcaccaatggcagtggcgaatgtgcagagactgtcctcgcaagtgcaccgcctcccctccgtctcgttcttctccaaatccctgatctcccgcacctccacctcttcctcctccacgaagaaggtcgcggaccgcatcgtgcggctgtcggcgatcgacttcgcgggtaagaagcacgaggtggtgggcctggccggtcagaccctgctgaaggcgctgataaacacgggcctggtcgacccggagtcccaccgcctggaggagatcgacgcctgcgcggcccactgcgaggtcaacatcgcgcatgagtggctcgacaagctac

SEQ ID NO: 13991 - DNA, 395 bp, Glycine max
cagaaattcatggagattgggattgaagctatttcaccagatgatgactcagctaagtgtagcagtgcatctgctggtactactattgatcttggacttaataaatcaagccaatctggtcagtctggtgcagaagaaattagacaaactgcttcaagttcctcagatcctcaggtattgagcctgacacaaaatataaatattttggaaagcaagttggaggatttacagggtgtgcttgctctgaaggactctaggattgctgaactcgaagcatccttgagtagtgttaagatttctagggaagaatctgcaagcaccataaatttgtccgagaaaaaatgtgaaggggttgagtcggagctcgaggggcctttcaagctaaggattgaagc

SEQ ID NO: 13992 - DNA, 97 bp, Glycine max
cacaaagagaagcattagcactaggagcagcaacaactagtctcagctgaaatggcctcttcagtgatggcatctgtggccctcaaacctgcccctt

SEQ ID NO: 13993 - DNA, 407 bp, Glycine max
ctgaaaacaaagcagtgtctgctgtgggcaaagctgctggagcaaaatggaagaccatgtctgatgctgaaaaagcaccttatgtggcaaagtctgagaaaaggaaagtggagtacgagaagaacatgagagcctataacaagaaacaggcggaaggtcctactggtggggatgaagaagaatctgagaagtctgtatctgaggtgaatgatgaagatgatgatgaggaaggcagtggcgaggaagaggatgacgattagagaatggactgataattgcatttatgtaggttctgatgattttgatcatctgttgtaggtggtctggtcatttcctgataaacatatttcttgcttccaaaaaatatttccctgctccctccgtaaattggttgtctttccaaaacg

SEQ ID NO: 13994 - DNA, 399 bp, Glycine max
  modified_base (358)..(358): a, c, g, t, unknown, or other
ctgtgttaaccactaaaatctctgaagcagaaggcattggctactggcacaagcatgggtgaagaaaagaaagaccaagggaacaaagaagaagccaaagaggaaaagaaggaagaagagaagaaagaagagccaccaccggaaatagtgctcaaaggtgatatgcattgtgaggcctgtgcaaggaaagttgcaaaagcattgaaaggattccaaggagtggaagaggtgagtgcggatagcaggacaagcaaagtggtagtgaaaggaaaggcagcagaccccataaaggtgtgtgagaggctacaaaagaaaagtggtaagaaagtggagctgatttcacccttgccaaaacctncagaggagaaagaagaaccacccatagaagaaccaccaaaa

SEQ ID NO: 13995 - DNA, 236 bp, Glycine max
  modified_base (51)..(51): a, c, g, t, unknown, or other
ggtcaatcaatatagagagagagcaacagttactaactgagctaatactgntggtatgttttggagtctgcaggaaggttgtacatctgtccatatttatgcaatgggcttggatgtctatgcatactcgagtataatactaattggatcaaagtgacattactattcattatggtctcattaccacactgcagggctaaaggtggacctgcgacactcaagcttgtagactggtg

SEQ ID NO: 13996 - DNA, 228 bp, Glycine max
gcccgattacgcattttcaagaaatcatgaggcttaaatggtcatatatcaattggaattagttggactgttattacgcctatcctgaagcccaatggcttgagatcggcatacctcggtggtaccgagcttgcattcgctatagtgaggtcgcttagctacggcatcatgtgatagctgattgctgagtgaaatcgatattcgatcacaattacagacatcatacga

SEQ ID NO: 13997 - DNA, 276 bp, Glycine max
gaaattatatgaagcacttcagcgagactatgtagcggagtgttgttagtttgaatgtgtctggtgttatacgtttagtacgtatatagattattctactataaatgataaggagcctatcgattgagcatggatattgtacacgaaccgataaactgatacctatatagtcagtcttgattattatgtgatccgtccatgctgtcatgattggcgtgtgctaaataccttgaattctaatgcataccctattgccttaccaactttccctataat

SEQ ID NO: 13998 - DNA, 362 bp, Glycine max
cacaactttgcccccttgtaaaacttcttattgtgatgtctaaaagcgaagacttgaagcttttgggaggctggttcagcccatttgccctgagggtgcagattgcccttaacctcaagggtctagaatatgaggttgttgaagagaccttgaatcccaaaagtgacctgcttcttaagtccaaccctgtgcacaagaaaatcccagttttcttccatggagataaagtcatttgtgaatctgcaatcatagttgagtacattgatgaggcttggactaatgttccctccatccttccacaaaatgcttatgatcgtgctaatgctcgattttggtttgcctacattgatgagaagtggttt

SEQ ID NO: 13999 - DNA, 359 bp, Glycine max
tgcttgttgaattgtccaacaaatatgtcaatgccttctcctattgtctcccctcatctttttcagcacaaccaaactcttctgtatcaggtttcttgaccattggagcctcatcattgccatcatcaccatacaagatcactcccttgatcaagaatctccagattccaagcttggacctacctggattgaccactataaccggagccggaaagccacttagagattcttgcttaaagctccattgttcctaccataattaactttggcccagtaatcacatggcttcctgtggctatttcacaatgcatggaaaaaatcttttgagatgatcatgtccaaaaagtttgcacaggccc

SEQ ID NO: 14000 - DNA, 379 bp, Glycine max
  modified_base (334)..(334): a, c, g, t, unknown, or other
tttacatttctctctccagtatggcttctactcacaatgagttttatgcacttatgctagtggtggtggttggctccatggtggcttcctgtggtgctaacttcaaccaagactttgatctaacatggggtgatcaccgtgctaagatattcaatggtggtcagcttctatctctttctctggacaaagtctctggctccggcttccaatccaagaaagagtacctatttgggaggatcgatatgcaactcaagctcgttgctggcaactctgccggcactgtcactgcttactacttgtcgtctcaagggccaactcatgatgagattgattntgaattcttgggaaacgtgagcggtgacccttacattctccacac

SEQ ID NO: 14001 - DNA, 317 bp, Glycine max
ttccaggattcctaagtggggggcccagtcctgattaaaagcagttgtagtctgattaggaatcaaggaagaacttccgcatcaattttataactggtagaaaactcacgagcaaagctgatgcatttgagtatgctgaccaagtcttggagcgttggtacccttctgtagaagaagggtacaacaagggcattgtggttcttgtcacgagtcagaaagaatgagcagtcactgatggcccggctttagtcgaagctgtttgggcatagatccttggtgctaccgtgtcaaagaaccttgcatattttgctaccgat

SEQ ID NO: 14002 - DNA, 351 bp, Glycine max
  modified_base (99)..(99): a, c, g, t, unknown, or other
gcgcgacgttttgatacgtactattcatgctgcgcgtgatacgacctcctctgatctgagctggttttctggattctgtactgcatacccgacgtgcanagaaaaatgccggacgaaatctagacggctcgtttgaatacgaagaggtgaacgagatgcgctatctgcaagccgagatttccgatacgatgaggttgtacccgccagtgccagttgacacgatggactgcctatacgacgacatattgacggacggaactagggttgggaaggcgtgcctcgagacttaccacacgtacgcgatgggcatgatgaatagcctgtctcacaatgactgtaccgaacttaatg

SEQ ID NO: 14003 - DNA, 286 bp, Glycine max
gattcaaaaggaagtccctcctgaatatcagagctatctggtccaagtgacaaaataccaagctgcacaaaactgtaagacctggatcgctggtaagtggatcacgccaagagagcaatactgggcaccacgtgtaacccattttcatcaatttgttgtcccgccaattttaccatttataaaagattgcacttatggtgacctgtcagcgatgagattaccagaatacgtggaaggactaggttgctgtgagtacacgatggataggggagtggttcacgcgtgc

SEQ ID NO: 14004 - DNA, 373 bp, Glycine max
accccttcttgatgagtgctgaaaagttgcaaagtggaattcccgcatagcctccagaactgatcaggcatagatcccgtgaagctgcagacatgatcaagaccggaaagatgtgcgctctcttcatgaacgatcttgatgcaagagctggtcgtcttggtggaaccacacaatacactgtgaacaaccagatggtgaatgccactctcatgaacattgctgataaccccaccaatgtgcagcttccaggtatgtacaacaaggaagagaacccccgtgttcccatcattgtcaccggtaacgatttctcaacactctatgcacctgtcatccgtgatgggcgtatggagaagttctactgggcaccaacagg

SEQ ID NO: 14005 - DNA, 352 bp, Glycine max
  modified_base (219)..(219): a, c, g, t, unknown, or other
tagggagccaaaatggtgatatatgaattgggaataattggtttcctaattaggctaatctgaaacccaagggaattgaaatcggaattcttcggggaatcccaattccacattttcaagaaataaggaggcaaaaatgttcatatatgaattggaattatttgttttcttattaggcctatcctgaagccaaaggaaatgagatcggaattcctcggngaattccaattccacattttcaagaaataaggaggcaaaaatgttcatatatgaattggaattatttgttttcttattaggcctatcctgaaaccaaaggaaatgagatcggaattcctcgggggtaccgagc

SEQ ID NO: 14006 - DNA, 361 bp, Glycine max
aaagacagctcatgaatcttcttcttcttggtgccatttcactccccactgctggaatgcttattccctacacctacttctttgtccctccaggttcaggttcttcagctggcggtactgttgccaaggatgccgttggaaatgatgtaattgccgagaattggctcaaggcacatggacctggtgaccgaacccttacacaaggattgaagggagatcctacctatcttgttgtggagaaagacagaacccttgcaacatttgcaattaatgccgtgtgcactcatcttggatgtgtcgcgccatggaatcaagcggggaacatgttcatctgcccttgccatggatctcagtacaatga

SEQ ID NO: 14007 - DNA, 152 bp, Glycine max
aactcaaaaacacttcttatgaatcttcttattcttgattccagtgcgctcaccactgatggtatgctgatcccctacacctactctctttatccctcccaaatcacatcctaaaacctccgataatgccaacaccacatcctcaagaaact

SEQ ID NO: 14008 - DNA, 369 bp, Glycine max
gagacatagtaccacgagcattttcttgcaattaccctagagcatgttgcagaactattgaaggctgtcaatgggaacttccgtagtcatccttgtctcaataaacagaagctactatatgcaccaatgggtaatctgctgattctgcagccagatgagaaattttcaccaagccatcatctcctaccatctggcagtggtctatatcttttgtgttgtccattatcagaatccgatgacacagagaagcggctccgagctgctcagatggtcttcttaaactcacctcatccacttgagatattaagtgaccgatctgcttatggatctggaggaagtatacaaagagatcatgacatgaactcttac

SEQ ID NO: 14009 - DNA, 382 bp, Glycine max
cacagtacttgtgagtgtatacccaacgcagactaagatcaacaaggactactacaaccgcgtgttaaaagattgagagggaacctatcatggaaggttccgcaacccgaccaatgatgggcaactaccaccaccctaatgctgaccgtgtgctgcacgagaagatttgttatgaggaggatgtgattggaggatcccaggacaaccacatgcatcaccaccaccctgagactcatgagagagtcaaggcggtggagtatgaacaagttcctgagaggcgcgttggctatgatgagaaaggtgcttatgacaacgatcgttactactatccaaggtattgaaattggacaaatggaagaacacctatgacgccgtatcatgt

SEQ ID NO: 14010 - DNA, 141 bp, Glycine max
attttggaagaaaaggaggggagactattagatccagttaaaataataggttaatggactagaatatgtgaaggattttatttcttataaaaatggattttttggacggacagttaaattgatattactgtcctcatcttg

SEQ ID NO: 14011 - DNA, 341 bp, Glycine max
ggaacttaatggtaccagagtagagtagtgcggaagaaaagaaaaacgaaatccctcgctttgagaaatgggtgtattactcttccggtgggttctgccactgactctgttgctcacttgcgcgttaggtttccaatcggacgagcttctcctcgacgaccaagagttcggcatcgagggaggacgagcctccttcgattccgattcgcacccatctcccacctccaccttgaggaagagcttttctgactcctcctccgactccaagatccacttccctctccaacacgctttcggcgactccgatttctccgacgccggcaacttctccggtcgcctta

SEQ ID NO: 14012 - DNA, 403 bp, Glycine max
cgagggttattggacacattcttcagcgactgcgtttttggatcggaacctcttctgcggcgtagcaatgggacactccaacgtctggaactctcacccaaaaaactacggtcctgcatctcgcacttgccgtgtgtgtgggaatccacatggactgatcaggaagtatggccttatgtgctgcatgcagtgcttccgtagcaatgccaaggaaattgtcttcatgaagtatcggtacaagagcagttgtcaactactgaccaatatagcgtcctggcactaggatgttttgacgatgccatgatcgcagaaacttgagactgtcatttttcatctaactaattatcagacctaatttgtggtactaagaatacttttatataaatcgaattgaacccataaa

SEQ ID NO: 14013 - DNA, 405 bp, Glycine max
gctgcagcaatgaaagctaaattgtttgctgatcatgaagagcgagaaattcagaggctatgtgccaatattgttaataataagttgaaaagattggaactgaagctgaagcagtttgcagaaattgaaacacagttgatgagagaatgtgaacaagttgagaaggtgaagcagaggttggcttctgatcggtcccatattgtatcaacacgtcttggaaatggtggaaccactccgccaatgaatgttgcaagtgctggtccatccatggttaacaacaacagcaatggtaggcaacaaatgatttctgcttcttcctcacagcctagcatctcaggatatggcaatagccaaccagttcatccacatatgtccttcgtcccacggccttcaatgtttgggttg

SEQ ID NO: 14014 - DNA, 406 bp, Glycine max
  modified_base (389)..(389): a, c, g, t, unknown, or other
ctcacacactttgtactctccgtccttccttcttcgatccagatctgtctccttctccctcaaatggcttcccttctgcaatgttccatgcccctcgtctctctttccaatcgagctctggtacccggtaccaggatctccaacccaagttcagtttccctttcaattaagggaagaagtttcccatccgttacattgcagcccagagggcgtcggtttcagcttagatgtgcggcaaaaccagagacagtgaagaaggtgtgtgacatagtcaagaagcaattggcactgccagatgaatcagctgttactggagagtctaaatttgctgcacttggagctgattctcttgacacggttgagattgtgatgggacttgaggaggaatntggtattaccgtggaag

SEQ ID NO: 14015 - DNA, 280 bp, Glycine max
  modified_base (15)..(15): a, c, g, t, unknown, or other
  modified_base (21)..(21): a, c, g, t, unknown, or other
  modified_base (24)..(24): a, c, g, t, unknown, or other
  modified_base (26)..(27): a, c, g, t, unknown, or other
  modified_base (42)..(42): a, c, g, t, unknown, or other
ggttttagttttggntcctgnggngnnggaccggtgcttgcnatatccaaagggccaagggaaccttaatcaatcttccatacgcttagactcattttttaaaatcattttactatcctgaacctatattattcgtaccatcctaatattgcatatcccttttggtgctacgataactatactaatcatattgcattaaaataagctgataatattatacaacaactaattcatctcattttccggattaatcttaaaccattctttactaacttttata

SEQ ID NO: 14016 - DNA, 412 bp, Glycine max
  modified_base (88)..(88): a, c, g, t, unknown, or other
tggtgtttgagttccattgaaaatgcattgcgacatggtgatgcctacactgatggagagggtaactctttctttttgaatccatggngattagaatttttgaagtgttattctacagggaaagatctgatagaaaccagtggaacctctgctactgctgagcaaattgcatggatggtttctggtgcagctgatacttttgtcagaaaagagaaagaagggttgtcctttcccgggccttttcttttattccttgtaccctcccaagaaaaatctacccaggttcgaacagtttgcaagcctttaaaatctgttggaatacatacagtgagtattcatccaggtgcttccttagatcatcagattcaaggtctgaaaacttgtgagcctgagtttcttggttctactcctg

SEQ ID NO: 14017 - DNA, 428 bp, Glycine max
  modified_base (197)..(197): a, c, g, t, unknown, or other
  modified_base (269)..(269): a, c, g, t, unknown, or other
ggccgagggtagaaggtgggctgatatcatcaagccaggctgtgtcaacactgaccctatctttccaaacacaagcttacaggactgatgtggggtacccaagtgggctttggtttgatccacttggctggggaagtgggttcttctgagaaagatccagggagtttgagaacaaaggagatcaagaatgggaggtntggccatgtggctgtgatgggggcatggttccagcacatttacactggcactggtcctattgacaacctctntgctcaccttgcagatcctggtcatgctactatttttgctgctttcactcccaagtgagaagggttggaacaactctatgattgcaagccttggagaaacattgggaaacttgtttaactaagttgtaaggcttaaatgtctttaggggggagttttta

SEQ ID NO: 14018 - DNA, 362 bp, Glycine max
caattaattccaattccatatgttcaataaataaggatgcaaaaattgggaaggttaattggaatgagtgggctggcttattaagcctatcctgaatccaaatgaaatgagatctgaattcctcctcgaattccaattccacatttccaagatataacgatgcaaaaatgttcatatatgaattgtaattatctgttattcttattacgcctatcctgaatccaaatcaaatgatatcggaattcctcgtccaattccaattccacattctcatgacctaagtaatgcaaaaacgttcatatatcaattgtaaatatttattattcttatcatgcctatcctcaatccaaaagacatgagat

SEQ ID NO: 14019 - DNA, 181 bp, Glycine max
gatggcatattatgccctcaaacctgcccatttcaatgataacaagatctcacagagaatcctaatctctcattcacaaaacttttattcattcatattttcatacatcaacaataataacaatactgactaaccttattaaactaatgccaacataaatttgatcgatataactcataca

SEQ ID NO: 14020 - DNA, 352 bp, Glycine max
gtgaaagagaatccgaggcgaagagaagagaaaaattaagatggaggggaaggagcaggatgtgtcgctgggagcgaacaagttcccggagagacagccgattgggacggcggcgcagagccaagacgacggcaaggactaccaggagccggcgccggcgccactggttgacccgacggagtttacgtcatggtccttttacagagcagggatagcagagtttgtggccacttttctgtttctatacatcactgtcttaaccgtcatgggagtcgccggggctaagtctaagtgcagtaccgttgggattcaaggaatcgcttgggccttcggtggcatgatcttcgccctc

SEQ ID NO: 14021 - DNA, 391 bp, Glycine max
  modified_base (298)..(298): a, c, g, t, unknown, or other
gtaatggtggatttattcttctatagagaacctgaagaggccaagcaacaagaggaagatgaagcaccacctgcccaagattatgccatttcagacttcaatgctgctggcattggcagcttccctgctactgatggccaatggcctgctgcagtcgaacaaccctggactgaagaagctccacaaccaatctcagcagctcctactaactggacaccagaagcagctgctgcaggagattggggtgaggctgttccagctcctgctccagctccagttccacaagctggtgcgcctncagctcaagcttttcctcctgctactggctgggactagcttttgacaagagattttattccatggtgtcaaaaccatagtttttcttcccctc

SEQ ID NO: 14022 - DNA, 398 bp, Glycine max
gtcagcaggtatcatattgtctaagccgacgacaaaaaatgatcaaacaggttcttcttgttctgctcttcttggcctctggattgaccctctcagtctcagagactgaatctgtttctcttctgcctcacgccgctgagtccttcaatgtcagctatatccagatgaagaacgccgggacttgttcttacttggtggttatatctactagctgttcgtctcctaggtatacaagggatcagatcagtatttcttttggggatgcttatggcaatcagatatatgcaccaagactggatgatccagcttcaggtacatttgagagctgttcttcggatacatttcagataactggtccgtgtgcatatcagatatgttatgtgtacctatatagatct

SEQ ID NO: 14023 - DNA, 344 bp, Glycine max
cgaagggctatatagcataaacatttgagtcttcattgcacaatgtcgacctcttccattaacgggtggtgcctctcttccatctccccagccaaaacctctctcaagaaggccacattaggcccttctgtcttcgcaaccgttagcactccttcttctccttcttcttcttcttcttcttccttcccttctctcattcaagacaggcctgtctttgctgcccctgcccccatcatcaccccaactgtgagagaggatatggcaaaggaatacgagcaagctattgaagaactccagaaattgttgagggagaagagtgaactcaaagccacagctgctgagaa

SEQ ID NO: 14024 - DNA, 405 bp, Glycine max
ctcgagccgtttcggctcgagagccctacagcgaggtgttgcggctgcagaggttccgcgagtgcgagctcattcacgggaggtgggccatgctcgccactctcggagctctcactgttgagtggctcactggtgttacatggcaagacgccggaaaggtggagctagtggaaggttcatcatacctagggcaaccacttccattctcaatcaccacactgatctggatcgaggttctcgtaattggctacatagagttccagaggaacgcagagctggacccagaaaagaggctgtacccaggtggcagttacttcgacccactgggcctggcctcagatccagagaagaaagccacccttcaattggcggagatcaagcacgcccgtctcgccatggtgggct

SEQ ID NO: 14025 - DNA, 403 bp, Glycine max
  modified_base (192)..(192): a, c, g, t, unknown, or other
cgccgccatgtccaccgtcaccacccaagccttcgccgcagttttccggccatgtacctcgaaatcgaggtttttgaccggctcttccggtaaacttaaccgggaagtgactatgcggccaatggggtgccctccttctgcctctttcaaggttgaagccaagaagggagagtggttacctggcttggcctncccaacttacctcaatggcactcttcctggtgacaatggatttgaccctctggggctagctgaggacccagagaacttgaggtggtacgttcaagccgagcttgtgaatggacgttgggccatgttgggtgttgcaggaatgttgcttcctgaggttttcaccaagtttggaatcatcaatgcccctcaatggtatgatgctgggaaatca

SEQ ID NO: 14026 - DNA, 404 bp, Glycine max
gatgaaatgtataattttgggttggagaagttcccttctgtggagagtgattgggcggcaatatgactcgctgaattttcgttacgtcaaatggttggtttggctttgctctgcttttgggtttagtatgtatctactacttattatgttttgtaattttttaggtttatgtttcggtagtgtctttggctgcttctgcaatggattttttgacatttgcggatgttttgcttagacacgagggttgcaaattttaggcagtgaaatcagagagggtcgtagtggtctttttgtggtctgctcgtgttttttgttacttgcatgaccgtggggacttctacttgtgtgtcttgggtagctacttcttgttcaactgtaattgaagtgcccttccaatatatgaa

SEQ ID NO: 14027 - DNA, 387 bp, Glycine max
tggtgacaatggatttgaccctctgggactagctgaggacccagagaacttgaggtggtacgttcaagccgagcttgtgaatggacgttgggccatgttgggtgttgcaggaatgctacttcctgaggttttcaccaagattggaatcatcaatgcccctcaatggtatgatgctgggaaatcggagtactttgcttcatcgtcgaccctctttgtgatcgagttcatcttgttccactacgtcgagatccggagatggcaggacatcaagaaccctggctctgtcaaccaagaccccatcttcaagcaatacagcttgccccaacatgagtgtggataccctggtagtgtgtttaaccccttgaactttgcacctactttggaggc

SEQ ID NO: 14028 - DNA, 357 bp, Glycine max
aagaaagaaaacaaagaagagaagtaaggtatataaggaagatacgtacaatttttgcaaattgttcaaaatctccttccaagaaacctcatcacacctaatacaagaactacatcacatccaactactcaagcaatttcgagatacaactctatcaatactcaacattgaattattaaatgactctcaatacttatccattacccaacagagtcctgatcagcttatccaagtttaatccaattccgtattctgcatagttaacttaccaagtgtcaacaaatatatagttgaattctaagtgagagttaaagaccattgcttcagccgaagttgcacctacctgctattcattgc

SEQ ID NO: 14029 - DNA, 410 bp, Glycine max
acacagaagagaaagaaagaaaacaaagaggagaaagaaagtagttgaggaagatacaaacaatttttgcagattgttgagaatgcctttcaagaagcctcatcacacctcagacaagaactacataacaggggacgacggaggcaagttcgagatacaacctagaggactcaacattgtgtggggaaatgattctcgatactggaaaattccagaacaaggtcctgcggagctgatccaagtttcatggttggaggtatccggcgtggtaaacttaccaggtgtcaagaaatatagggttgaattcgaagtgagagttaaagacgatgggttcggttggagtggcacggacgtgctagtgatggctaagattgggaaaacgggaaaatatacgtataaagtgacgaaac

SEQ ID NO: 14030 - DNA, 254 bp, Glycine max
tcgtaatatttagtacagtgattatttctaaactgtgaagtaaaaaattatatgaatggatttagaaataatcgtaatatggagtacagtgatttttttttgacagaatgttgatatagatacataaaacgttttcttttttagacagaaagaatggagaattatatattatgctgtacatgtagaagtgagtgttcagtcaggactctcgcaggatcatgttctgagtcggtgatctatgtgtcatggtctga

SEQ ID NO: 14031 - DNA, 86 bp, Glycine max
aactgacacacaaaccaaattaactatatcatgctcaaggcttcatggtttcttattttgtaataaagtttatatattgttacttc

SEQ ID NO: 14032 - DNA, 377 bp, Glycine max
cgttgaaagtgtcaaagaagttgatgcagtcagcacaagcgaacaccctactgtggtggtagctggttcacaagaatgtgtgattctacactaacaaggctctaaaattatgaacaaattcagcaaatccgtagtgctttaagaataattgctgaattgtgtcaccgtttaagtcacatagtattgtgctgtgcttgagccttaaggtcctgtgttgtatgtatttgcttttatctgcctttatgacgcgttcatgtgaaagtacgatgtaataactgctcacctgagtactgttgttggtgttttggggtatgatgtatcataatgcttgacttgactctgagaaataataaattcagttatctgtttgtccttgt

SEQ ID NO: 14033 - DNA, 401 bp, Glycine max
  modified_base (21)..(21): a, c, g, t, unknown, or other
  modified_base (23)..(23): a, c, g, t, unknown, or other
ctacttttatattcacaacananaaaaaaaaaagagagcataaaccaatggctacttcactttcagcaactgggtgtgttggttcttccttctatggaagttggggaacttcaattgttggtgaggactacaccatgctggccaagtcagtgccatcacaagttcgcatggggaagggaaagcccacgagattgcagcctatgatgaagaatgttaatgaagggaaaggtatatttgcacctcttgtggtgatcactcgcaacatcgttggcaagaagcgtttcaaccagcttagaggcaaagcaattgcactacactcccaggtgatcacggaattctgcaaatcaataggagcagatggaaagcagaggcaagggctaatcaggttggccaagaagaat

SEQ ID NO: 14034 - DNA, 386 bp, Glycine max
  modified_base (23)..(23): a, c, g, t, unknown, or other
ctactttgattttcacttcaganaaaaaaaaaagagagcagaaaccagtggctacttcactgtcagcaactgggtgtgttggttcttccttctatggaagttggggaacttcaattgttggtgaggactacaccatgctggccaagtcagtgccatcacaagttcgcatggggaagggaaagcccacgagattgcagcctatgatgaagaatgttaatgaagggaaaggtatatttgcacctcttgtggtgatcactcgcaacatcgttggcaagaagcgtttcaaccagcttagaggcaaagcaattgcactacactcccaggtgatcacggaattctgcaaatcaataggagcagatggaaagcagaggcaagggctaatcagg

SEQ ID NO: 14035 - DNA, 343 bp, Glycine max
tagcgttgaaagttacaattaagttgatgcaatcagcacaagggaacagcctactgtggtggtagctggttcacaagaatgtgtgattctacactaacaaggctctaaaattatgaacaaattcagcaaatccgtagtgctttaagaataattgctgaattgtgtcaccgtttaagtcacatagtattgtgctgtgcttgagccttaaggtcctgtgttgtatgtatttgcttttatctgcctttatgacgcgttcatgtgaaagtacgatgtaataactgctcacctgaatactgttgttggtgttttggagtatgatgtatcataatgcttgacttgactc

SEQ ID NO: 14036 - DNA, 402 bp, Glycine max
tttaaagtttcattgaagttgatgcaatcagcacaagcgaacgccctactggggtggtagctggttcacaagaatgtgtgattctacactaacaaagctctaaaattatgaacaaattcaacaaatccgtagtgctttaagaataattgctgaattgtgtcaccgtttaagtcacatagtattgtgctgtgcttgagccttaaggtcctgtgttgtatgtatttgcttttatctgcctttatgacgcgttcatgtgaaagtacgatgtaataactgctcacctgagtactgttgttggtgttttgaggtatgatgtatcataatgcttgacttgactctgagaaataataaatccatttatctgtttgtcctttgtaaaaaaaaacacattttataaaaatt

SEQ ID NO: 14037 - DNA, 377 bp, Glycine max
cgttaaaagtttcattgaagttgatgcagtcagcacaagcgaacagcctactgtggtggtagctgggtcacaagaatgtgtgattctacactaacaaggctctaaaattatgaacaaattcagcaaatccgtagtgctttaagaataattgctgaattgtgtcaccgtttaagtcacatagtattgtgctgtgcttgagccttaaggtcctgtgttgtatgtatttgcttttatctgcctttatgacgcgttcatgtgaaagtacgatgtaataactgctcacctgagtactgttgttggtgttttggggtatgatgtatcataatgcttgacttgactctgagaaataataaattcagttatctgtttgtccttgt

SEQ ID NO: 14038 - DNA, 412 bp, Glycine max
ttcttctgttgtgtctaggccgtcttctcccaggtgacagaatgaaagtgaggggtacaacagtgctgatgaacagaagccttgcctggtttcatcttatgatgattttgaaagggagcgacagttcgaaattgatatcagaagggcaaaaggttatgaagtcaaaaaaatgatggaggatggaaattgtctattccgagctgttgcagatcaggtgtatggggattctgaagtgtatgatttgatcagacagatgtgcatagattatatggagcgagagagagatcacttttctcagtttataactgaaggcttcacatcttactgcaagagaaagagaagagacaaggtctatggaaataatgttgagatccaagccatgtgtgaaatgtataatcgtccaattcacata

SEQ ID NO: 14039 - DNA, 398 bp, Glycine max
aacatcgagtttgaaataaatgaactgggtgcacggaggagggcaggattcagtgcacccccaattgggtgtttgccattacatagaacagtgggaggaggattagaataaagatgtgcagaaaggcccaacagttcggcccaattatttaacaccaaattgtcaaaggagcttgattccctcaaccgcaactttcccaatagcaggaatgttttcatcaatgtttacgaccctctacttgacatcatcaccaatcaccataaatatggctataaagttgcgagacacatgatgctgtggcacacgcaggatagaggttgcaatactatgcaaccgcttcgattccagctgtcccaatgttcatgattatgacttttgagacagttttcatcctacag

SEQ ID NO: 14040 - DNA, 332 bp, Glycine max
aacaaatagatagtaaattaatgaactgagtacacggagcagtaccggtttcagtgcacccgaacttggatgtttcccattacatagaacagttagagcaagattataatacaaattaccagaaacgcccaacaatccttcccaattatttcacaccaaacagtcaaaggaactttattccctaaaccgcaactttcccaataacaggaatgttttaaccactgtttacacaccctttacttgacatcatcaccaatcaccaaatatatagctataaagttacagacacctgatgctagatcacacacaggatataagctgcaatactatcc

SEQ ID NO: 14041 - DNA, 330 bp, Glycine max
  modified_base (148)..(148): a, c, g, t, unknown, or other
caaaaccacaacctcaacgcgtgcgttctcagattttcgcggtggtcgaaaaatctgcgtgggttccgggacttggctcggacattgcagcttaaggatctctgcattggaaatttgtttcaatttatatgttctaaacacggcttangaaacctggcatgggagttgttactgtgtctaccttagctgctaggacgccattaagattgaatacaaggttgaccagtcatcagcaggtgcataaaagacctttaattgtagcttttaaaggagatgcattgaataaagccgctttggtttcacctcaggagcaaattcctctacccatag

SEQ ID NO: 14042 - DNA, 411 bp, Glycine max
tgcagttgataccgatgaggtggtgacaaaggagacagaggaggagaagccagcagcagaggagaaatcacaggagaaaactgataaagtgaaagaggaagcagaagagcctaaagaaactactgaaacagaaacagaatcagcaccagcagcaaccacagaggaagagaacataccagctgagacagtggaagccccagtagaggttcctgttgagaaaactgaagcttagacttatggacagtgtgagtgagaaaaacaagtttaaaaatggtcctagttgtggggatcattaggtctaccattttgcatgtcatgttgaaaagcttttttttctatttatttctttagtttactttaatagtaagtatattattattatatggaggtttaagccttgggtggaatatg

SEQ ID NO: 14043 - DNA, 239 bp, Glycine max
acatgcttgcatgcctgcacgcgtactctagatgataaccctgctcgagtgcaattgcttacctttgaggagtgacgaaggagacaggggaagagatgcctggtactgatgagaaatcatatgaggcctctgatgaagtccaaggagaagcagatcagcctacctaggctactgccactgacacattatcagcacctgcagcggccacagtggacgtgtacgaaccagcagtaacagtg

SEQ ID NO: 14044 - DNA, 398 bp, Glycine max
ggcaaacactccactagtccagtgtaccagccatatgtgtcctattcgagtgcattggcatgtgaagctcaattacaaagagtactggagggtcaagatcacaatcacaaatttcaattacagaatgaactactctcaatggaaccttgttgtgcagcatcctaatttagataatattacccagctcttcagttttaattacaagtcactaaatccctatgagggcttgaatgatacaagtatgctgtggggagtcaagttctacaatgattttctttcttcagctggatctcttggtaatgttcagtcagaaatcttacttagaaaagacaaatcaaccttcacatttgataagggatgggccttccctagaagaatttatttcaatggggataact

SEQ ID NO: 14045 - DNA, 371 bp, Glycine max
gcacgcctactctagctggtcctctagctcaatgccattgactcatctactacagataaccaggcatagatggtcaaatatgaatcggaggcaggcgaatccctattacgcctatccctaagccaacggaaacgcgatcgcaattcctaattgcaattccgatctcacatcaacaagacctagtgatgcagaaatctacatatatgaataggacccatctcttcacttatcattcctatcctctaaccaaatgagatgacatcggagttcctcgtgtaattccaacaccacatttacacgatgtaacgatgctgtcatgtgcatatatgaattgtgatcattcgtaaacctaacatgcctatcccgaatcc

SEQ ID NO: 14046 - DNA, 384 bp, Glycine max
aatttgttgtacggaaattaatgaactgggtgcacggacgagagcagctttcagtgcacgccacaattgggtgttcgtcattatcatagaacagggggaggaggattagatacaagatgtgcaggaacgggccaacagttcgggccaattatttaacaccaaattgtcaaaggagcttgattccctaaaccgcaactttaccaatagcaggaatgtttacatcaatgtttacgaccctgtacttgacatcatcaccaatcaccaaaaatatggctataaagttggagacacatgatgctgtggcacaagcaggatagaggttgcaatactatgcaaccgtttcgattccagctgtcccaatgttcaagattatgacttttggga

SEQ ID NO: 14047 - DNA, 102 bp, Glycine max
ctcgagcctgtaatataaacatgccttccagtttcgaaacgaaatggaatgtaaaaatttgaacaggtgtttctgaggattattcagagtaatgcttttgag

SEQ ID NO: 14048 - DNA, 405 bp, Glycine max
agggaaggttcctaccatcatctatgtttggtctggattgctctccgattattatctctatgctttgggtgtacataaaccctccttcacgaagaacacaggattacatgaatttccaattcccttgagtttgaaggtagatagatgaagttcctctgcttgatcatctatgtatggtctggattgctctccattattatctctttgctttgggtctggattactctgcttcatcatctcgtagtaatagtagtactgtgcctttgttgtgctagattgattacattcaattgtgattatatcttactttctgctatgtgtgggccacactctcaatatgtgtccgagaaaaacaagtaggtatctgttaactctttttgttaatatctcataatgactgagata

SEQ ID NO: 14049 - DNA, 405 bp, Glycine max
caataaacgatgattctcattatctccctcattttttctggtctctctttctcccatgcttctgtcctagatttctgtgttgcagattatgcaggtcctattggacctgcaggatattcctgcaagaagccttcaaaggtcacagcagatgattttgcttacagtggccttggcattgctggtaacacctcaaacattatcaaagctgcagtgacccctgcatttgatgctcagtttgctggtctcaacggtcttggcatttccgcagcacgtttggacttagcagcaggtggagttataccacttcacactcatcctggagcttcagaattacttgttgtaattgaagggagcatcctagctggattcatttcttctgccaacattgtctacctcaaaactctt

SEQ ID NO: 14050 - DNA, 420 bp, Glycine max
caataaacgtttagattcattatctgcctcattttttctcgtctcgctttctcccatgggtgtgtcgtagatttctgtgttgcagattatgcaggtcctattggacctgcaggatattcctgcaagaagccttcaaaggtcacagcagatgattttgcttacagtggccttggcattgctggtaacacctcaaacattatcaaagctgcagtgacccctgcatttgatgctcagtttgctggtctcaacggtcttggcatttccgcagcacgtttggacttagcagcaggtggagttataccacttcacactcatcctggagcttcagaattacttgttgtaattgaagggagcatcctagctggattcatttcttctgccaacattgtctacctcaaaactcttaagaagggggatgtt

SEQ ID NO: 14051 - DNA, 420 bp, Glycine max
ttcacctgctgggtctaggccgtcttctcccaggtcacataatgaaagtgaggggtacaacagtgctgatgaacagaagccttgcctggtttcatcttatgatgattttgaaagggagcgacagttcgaaattgatatcagaagggcaaaaggttatgaagtcaaaaaaatgatggaggatggaaattgtctattccgagctgttgcagatcaggtgtatggggattctgaagtgtatgatttgatcagacagatgtgcatagattatatggagcgagagagagatcacttttctcagtttataactgaaggcttcacatcttactgcaagagaaagagaagagacaaggtctatggaaataatgttgagatccaagccatgtgtgaaatgtataatcgtccaattcacatatactccta

SEQ ID NO: 14052 - DNA, 358 bp, Glycine max
ttgagctcaacaaaacttgatgagaaaccactgttccctgtgcttgctacaaaggatggaatctgctcattgtctcaaaaaactgtggtctcgggcaacaaaagaggttttgctgacacaatggaccctgagtttcctggcaatgcagggataaacatgatgctatcacctaaaccttctggagttcagcctaccacagtgaaagaaataccaagcaaggtgttacaagaacttccttcagcggcaaatggaactggtcataaccatacatcaggagcttctatcagtggcagtgcaccggctgctaaggcacaggttgttggttggcctcctataagatcatttaggaaaaactcat

SEQ ID NO: 14053 - DNA, 363 bp, Glycine max
  modified_base (218)..(218): a, c, g, t, unknown, or other
  modified_base (254)..(254): a, c, g, t, unknown, or other
  modified_base (281)..(281): a, c, g, t, unknown, or other
  modified_base (284)..(284): a, c, g, t, unknown, or other
cggttgagccaacccaaatcccggaccttcggtttggattcttattcaggaattcctggttggaaccggagggttcccttaccttgggccccatttgggccaacttcggattaaccaccaattccttttcttcggctttaagggactggcaccagtggccggatcttgcgaaattcggccaccggttcttcggaaaacgcggcggggttctcatcgcnctgccgccaccgaaaaattccgacgacttgatccgncaaactcgtcgccgatctccactcctnctncatcgacgatcagaagcaagccgccatggaaatccgattactcgcgaagaacaagccggagaatcgcatcaaaatcgcg

SEQ ID NO: 14054 - DNA, 387 bp, Glycine max
aaataatgcagtccatgttaaccatccgtgccacccatggccttcctctgtgtctctcagggatgattcaccctcttgctctctctcacgagtaagaacttagaatatcatgaaatttattaactaattaacacaccatatttttctgattccactcttatttctaacaactaacaagtgctgtgatctgctgtggtttttttttttttctatccataaatatatattaatggttagtatattagtttttcgtgatcccactcttatatctctgtagtgtgtgtaggatagcggatcacgaccgtaggagacgcaccatgaggaagcaaaggcaaagatcactcaccagagagggtgtagtgcatgatgcggttcgagaaattcact

SEQ ID NO: 14055 - DNA, 376 bp, Glycine max
gttgaaactttatggtcctgaagctatggaattgtgtaaacctgacttggaggagagaatgaaagtgttggcaatgaccacaacagaagaagaagaaatgggagacacttttgctgaaagagcagaaacttactaccaaaagaggcctcagctactgtcccttctgcaggacttgtacaatggctacataaccttatctgaccgttacatccaaacactggccaagcacaagcaccatagtagacactcttctcaagtttcaactgtagatgaaggcttctctgaccaagaagaggctagtggtgtgagccacagggatttagacatctagagctgagtctactagcatcacaggacacccatgatgatgatgcca

SEQ ID NO: 14056 - DNA, 355 bp, Glycine max
ctcgagccgcaaaacacaaccaaaatcttaaatttcttggaacccttttaattgttttttttctttaaaaaaatcattttcctttaaacttcaaatttagagttctctctctgattcatccccagcaatggcttgtgcattgcaagcaaccttagcagccaacgcctatgtcttttcttccaggagattctccttgaagctccaaaagaacagtaagagaaggttttctttggtcactgttagagttgattctgatgaatctgattgcaatgaggaagaatgtgccccggataaggaagtagggaaggtcaatgtggaatggttagcttgggagaagaccaaagtagtgggtaca

SEQ ID NO: 14057 - DNA, 347 bp, Glycine max
ctttatccgtaaaaacacaaccaaaaccttaaatggcttggaacccttttaattgtttgctgcctttacaaaaatcatattcctttcaacttcaaatttagagtcctctctctgatttatgcccagcactgcctcatccattgcaggcaaccttaatagccaacccctatgtcttttactccaggagattctacttgaagctccaacagaacatccacagacggttttctttgattactgttcgagctgattctgatcaatctgattgccatgaggaagaatgtgccccgaatcaagtactagcgaaggacaatccggaatgactaactggagtcaagacgaccgta

SEQ ID NO: 14058 - DNA, 402 bp, Glycine max
aaagaaatatatcaaattgatcgcttgtgtgttacccttcgaaccaaagaacttaacatgtaaaatgatctatttttcttatctatatagatagatctatctgtattctatcatttacagttgaatatatacaaatatcagtatataacaacatatattaaaaaaataacaacatatattaaaaaagtcagaataaaaaaacaaatcctttatagtatttcttgtaataaatgtgatttttggaatagggataaataaaccatggaaaaatctaagcgactctttatgaaatccaagcgatcttttcgtaggcgtttgcccccgatccaatcgggggaccgaattgattataaaaacatgggtttaattagtcgatttattagtgaacaaggaaaaatatta

SEQ ID NO: 14059 - DNA, 283 bp, Glycine max
taaactataaagatctaactatgattgagttaacaagaactgtactattgccatatcatattacaaatcaatcacaattcttattcatttaaaccaatcaccttactcaaatgacatttctatataatacatatcaaccttacaaatttcttcctatatacctatccactgtaattcttcatcatgacccattctaagtactttaccaaaaatgtattcgtcaactaatcaacattatcacatacaattttcatacttctacaccaaacttgaatgttataat

SEQ ID NO: 14060 - DNA, 320 bp, Glycine max
  modified_base (37)..(37): a, c, g, t, unknown, or other
  modified_base (279)..(279): a, c, g, t, unknown, or other
ggctcgctactccttcctcttggccctcctcctcctnctcggcgccggcgtgtccaacgcccgcgaagacatcctgatccgtcaggtggtgccggatgccgtcggcgaagcggcggagaaagaggaggaccacctgctgaacgcggagcaccactttgcgagcttcaaggcgaaattcgggaagaagtacgcgaccaaggaggagcacgaccgtcgcttcggcgtcttcaagtccaacctccgcagagcgaggctgcacgccaagctcgacccctccgncgtccacggcgtcaccaaattctccgatctcacttcggccg

SEQ ID NO: 14061 - DNA, 409 bp, Glycine max
  modified_base (395)..(395): a, c, g, t, unknown, or other
tcgtaggtgaagttgttaaacatttctagcttcttcgctctccttcgtccattcttgcacatccccctcttcctcttccttattgtcaatttcacctccaaaccccaaaccctctcacttcctacctttcgtggtcgaagccaaagacaggacccgcagggaagacaggaccgctcgccacactcgcatcagaaagaaggtcgaagggacgcccgagaggccgaggctgtccgtgttccggtcgaacaagcatctctctgtgcaggtgattgatgacaccgcaatgcgcacgcttgcttcggtgtcgacaatgcagaagacggttgctgatgagttcaactactccgctggccctacagttgaagtagcaaagaggatgggtgagatcattgcanaatcctgtttggag

SEQ ID NO: 14062 - DNA, 364 bp, Glycine max
catgcaccgcacgtgcacgctagagggtcctgtcaatgaatctcaagcgcatatttttaagagctatagagtcaaaactgtgcatagattaattggaatgatagggtgtcatattaagcctatcctgaagcccaaataaatgagatcggaatccatgaccgaactccaataccacatctataataactaaagcaccatacatgactcatatactcaatatccaattatgacgagatcctattacgccaatcatgaagcctacttaccttatatcgcgatactgatgctattaagaatttcacatatacaggacatgctgatacacaaacctccatagttgaaatggaatgaacccatacttaac

SEQ ID NO: 14063 - DNA, 403 bp, Glycine max
  modified_base (372)..(372): a, c, g, t, unknown, or other
catagacatggccaccgtcacttctgcagccgttgctattccctcattcactggcctcaaggcaagcgcaggcaaagtgagtgccgcagttaaagtctcagctccccaagccacaaggttgggcatcaaggcttcgctgaaagacgttggagtcgctgttgtggccactgccgcgagtgcagtgctggctagcaacgccatggccattgaagtgttgctgggtggtgatgacgggtctctggctttcgttcccaacaatttctccgtggcctctggggagaagatcgtgttcaagaacaacgcaggtttcccccacaacgttgtgttcgacgaggacgagattcctagcggcgtggatgcagggaaaatctncatgagcgatgaagaccttctcaatgcgcct

SEQ ID NO: 14064 - DNA, 400 bp, Glycine max
cttcataaacgcctttcttctccgtttccgtttcctcgttcaaattcgctttttgatctgcgaaaatgagagagtgcatctcgatccacattggtcaggctggtatccaggtcggaaatgcttgctgggagctctactgcctcgagcacggcatcgggcccgatgggcaaatgccaagtgacaagacagttggcggtggtgatgatgctttcaatactttcttcagcgagactggtgctggaaagcacgtgccacgtgcagtgtttgtagatcttgagcccactgttattgatgaggtgagaaccggaacttaccgccagcttttccacccagagcagctcatcagcggcaaagaagatgccgccaacaactttgcccgtggccattataccattgggaa

SEQ ID NO: 14065 - DNA, 382 bp, Glycine max
  modified_base (378)..(378): a, c, g, t, unknown, or other
ggaagcccctccagaaaatcaaagctatcttgtccaagtgacaaaataccaagctgcacaaaactgcaagacctggatcgttggtaagtggatcacgccaagagagcaatactgggcaccacgtggaacccattttcatcaatttgttgtcccaccaattttatcatttagaaaagattgcacttatggtgacctggcagccatgagattaccagaagacgtggaaggacttgggtgttgtgagtacacgatggataggggagtggttcacgcgtgccatgcaggaggagtggtacatagccttgaaggttggtctcatcacgaagttggggccatagatgttaacagaatcgatcttgtgtgggaagcagcactcanacat

SEQ ID NO: 14066 - DNA, 316 bp, Glycine max
tgcaactgctgatgacgagggctatgagtatgaagatgaggaagaacctcaggaagatgaggcttaaaacagtgtagtagtgttttgcagggtgttcttgtttgtgtgttttgttgtgatactctgtttaacgttgtgttttttttcatcatcccttgacctgaatatctttttcgggattttggattgctttgggggcactctctggcttcgtggcttatctcttctagtttagggattttatttttctgcatgttttcattattggtaacatggtggtcgccctttgatggaacgtagttgatatattcttagt

SEQ ID NO: 14067 - DNA, 265 bp, Glycine max
agaaaatgatagggcatagtagagaatttcttgagtccggttcctcatcggtggtctcaaacgcggttcagcagcgcctgcaattcattctgcagagccgtcccgagtggtgggtatatgccatcttctggcaagccacgaaagacagtgattcgcgtctcaaattagaatatggcgacggctactttcggggcaaagaggagaatggagaggaacaaacgaggaacgtgaacgacatctaatgggtctacagaatgttgcaaac

SEQ ID NO: 14068 - DNA, 238 bp, Glycine max
tgatctgcatgaggctctggctgccttggagaatcaaaaggaagaaaccatcaagtcccttgattcccagatcgcagcccttagccaggaaattgttaataaggttcttgccactgtttaatatgtctgtgtaattttgattttaatgccctcaccatacgattcatagtttctacttttgaatggctctattctgtattctcgatacttctgaatgtataataccgtattcaaggta

SEQ ID NO: 14069 - DNA, 173 bp, Glycine max
caaccctggtgtgccggcccaggggttgaatcccgtgcttggacaggcgttgactgcattgattaatcaaggagctggattggggcttgtgaatcttattggagggcttggtcgtgcgaccgtgaaccaaagggggccgtctagtccatatgcgaatcaacctgctatggggt

SEQ ID NO: 14070 - DNA, 426 bp, Glycine max
ccggcatattactatcaaagatccagcactggaaaccaagaaaggccagcgacagaagccaacaagagtgtgcctttgcaggcaaaacatgcacagcaacaatgcggagttaatgccaagatggcaccagacatagctattaatattgatacaaatcccttttttatgacaagggcaggagttaacaagttagagcaaggtgatcaaatagccatagagacaaacatgctgcagccaaaggcacatcaatatggtggaatcggtgctgcagctggggccactgctcatagaaaagttggtcctgttcagtatggtatgacaagaatgttctagaagaagggtgtttttcttgtgaatattttggccagggggagcaatcctgttagagaaaaagacactttttagggatggagctgttgtagtctc

SEQ ID NO: 14071 - DNA, 407 bp, Glycine max
cgcaaacactctgttcctacaatcattccaaatgtgcccttccggtcgcaccctcctcccttcctccgtctccgatttccgaccggcattcgacgtcctcgatgccgaccgcgacggcaaaatcagccgcgacgacctccgcgccttctacgccggagtcggcggcggaggagatgacgtgatcggggcaatgatgacagtggctgacaccaataaggacgggttcgtggagtacgaggagttcgagcgcgtggtctcggcggagagaaagcccgtggggtactgtggggccatggaggacgtgttcagggtcatggacaaggacggcgacggcaagctcagccaccatgatctgaagacttacatggcctgcgctggttttccggccaccgacaacgacatcaacg

SEQ ID NO: 14072 - DNA, 410 bp, Glycine max
  modified_base (44)..(45): a, c, g, t, unknown, or other
cgcaaacactttgggcttacaatcattccaaatgtgccctgccnntggcaccctcctcccggcctccgtctccgatttccgaccggcattcgacgtcctcgatgccgaccgcgacggcaaaatcagccgcgacgacctccgcgccttctacgccggagtcggcggcggaggagatgacgtgatcggggcaatgatgacagtggctgacaccaataaggacgggttcgtggagtacgaggagttcgagcgcgtggtctcggcggagagaaagcccgtggggtactgtggggccatggaggacgtgttcagggtcatggacaaggacggcgacggcaagctcagccaccatgatctgaagacttacatggcctgcgctggttttccggccaccgacaacgacatcaacgcca

SEQ ID NO: 14073 - DNA, 88 bp, Glycine max
gtcagtgtatcttataaatgtattgttatttgttaatcatcggttcgttgaacatttgcagcagtgttaaatcatcgattcatttaac

SEQ ID NO: 14074 - DNA, 417 bp, Glycine max
  modified_base (363)..(363): a, c, g, t, unknown, or other
  modified_base (370)..(370): a, c, g, t, unknown, or other
gttttctccactatggctgcacaacgaaacttccaagactacttgcctgtgatggccaacaagcttggtggggatggcctaattgatgaactgtgcaatgggttcaatctgttgaaggattctgataaaggggtcatcacctttgagagcctcaagaggaactctgccttgtttggccttcagggtcttagtgatgaagatcttcggtccatggttttggaaggtgactttgatggtgatggtgcactcaatcagttggagttctgtgttttgatgttcagactcagccctgaattgatggagggctcaaagatgtggcttgaacaagtccttcaacaagagcttaaggattatttctaactntcctttnttttttttctcccttacccttttcattcatttgtcattttgggctat

SEQ ID NO: 14075 - DNA, 345 bp, Glycine max
tcgtgtgcgtgcacgtctaacatgttcacgatcgtgaattccaattccacattttcaagacataaggacgcaaaaatgtgcatgtatgaattggaattatttgttgtcttattaggcctatcctgaagccaaaggaaatgagatcggaattcctcggggaattccaattccacattttcaagaaataacgaggcaaaaatgttcatatatgaattggaattatttgttatcttattaagcctatcctgaagccaaaggaaatgagatcggaattcctcggggaattccaattccacattttcaagaaataaggatgcacaaatgttcatatatgaattgggatta

SEQ ID NO: 14076 - DNA, 362 bp, Glycine max
gtagacccagctttcatccaagacctagaacacagaccagggctctccataatccaagctgaaggaattcccataattgacctctctccaatatccaaccacacagtttcagatccatcttccattgaaaacttagtgaagcagatagggagtgcatgcaaggaatggggtttcttccaagtaaccaaccatggggtgcccctcactctaaggcaaaacattgagaaagcctcaagattgttctttgcacagaatttggaggagaaaagaaaggttagcagagatgagagttctccaaatggttactatgacacagaacacaccaagaacattaaggactggaaaagaagtctttgattttc

SEQ ID NO: 14077 - DNA, 409 bp, Glycine max
gtatacccatctttcatccaagacctagaacacagaccagagctctccataatccaagctgaaggaattcccataattgacctctctccaatatccaaccacacagtttcagatccatcttccattgaaaacttagtgaagcagatagggagtgcatgcaaggaatggggtttcttccaagtaaccaaccatggggtgcccctcactctaaggcaaaacattgagaaagcctcaagattgttctttgcacagaatttggaggagaaaagaaaggttagcagagatgagagttctccaaatggttactatgacacagaacacaccaagaacattaaggactggaaagaagtctttgattttcaagccaaagaccccactttcatccctgtcacttttgatgaacatgatg

SEQ ID NO: 14078 - DNA, 408 bp, Glycine max
agcgagcattctacaatggctactataccagttaatcccgggcctttcttgaacaatttgactgggaagcctgtaattgtgaaactgaagtggggaatggagtacaagggctatctcgtttccgttgattcctatatgaacttgcagctggccaacaccgaggagtacattgagggacaatttactggaaatttgggagagattttaatcagatgtaacaatgttctctaccttcgaggagtaccggaggatgaggaaatcgaagatgctgctgaagactagagagtgatagaagctgctaatggctatgacataaacagaactcgaatttctactgtgtatgtatcttcacataaatgtaggttttttgtagtcaatgtgtacagatttgaatcaatgatgcactcg

SEQ ID NO: 14079 - DNA, 354 bp, Glycine max
  modified_base (24)..(24): a, c, g, t, unknown, or other
ccctcgggaattccaatgctattntcaagaaataaggaggcaaaaatgtgcatatatgaattggaattatgtgttttcttattaggcctatcctgaagccaaaggaaatgagatcggaattcctcggggaattccaattccacattttcaagaaataaggaggcaaaaatgttcatatatgaattggaattatttgttttcttattaggcctatcctgaagccaaaggaaatgagatcggaattcctcggggaattccaattccacattttcaagaaataaagaagcaaaaatgttcatatatgaattggaattatttggtttcttaataagcctaatcttgaacccaaagaaa

SEQ ID NO: 14080 - DNA, 310 bp, Glycine max
catataactatcatcacatctatcatctctgaacccaaattaccaaatcacctcattactatcacaacatgctttcatagcattctgctccagattacaacaatagatgtttaaaaaaatctacaaaggcattccgctatatcggacaaatcgttcctctaattgtctcataaatagacatttcttctccttttttgatgatgaccttctttgatgttccaatgtattctatcttcctggccaaagtgccttacatctgtcatacatctgcacaatcttattgataaagatattaagggcataacacaac

SEQ ID NO: 14081 - DNA, 363 bp, Glycine max
ctcgactcatccacccaattcatatggggggtgctccagcaaaacgctggtgctgatagaaaagatgtgcaaaaagttaactaggtcgtggatgacatggatggcgttgcatataccagtaacgattagatacatttgagtgcaagatatttcaatgactatagtggtgacctgaaaacacagatcacaggtgtgttgtaccatgaaatggtccacgtttgacaatggaatgacaatggccaaactcctagtgtattagttgaaggtattgtagactatgtgaagcttatagccaattatgcacctagtcactgggtgaaagcagggcaaggacatatatgggaccagggatatgaagttact

SEQ ID NO: 14082 - DNA, 196 bp, Glycine max
ggcacacccacatcatacagagcctccagtatcgctcatgatcatatattcatagctaacagtagatgggttatatcgcctgttctgttacctagggcattgtcatcgggatctctacttggttcttagctcggatacattatcattagtcgtatgaaattaatcactatgtgaaagctgagtcctgtgaggaatg

SEQ ID NO: 14083 - DNA, 414 bp, Glycine max
cctcactttacttctcttcttcggcgcttcgcggcctcggtcctcctctgcccttctcaattcaattgcgacgctcgcgggggcgccctgcaattcgatgtgcttcctcttcctcagactcagatgcttccaacaaagtctcgtctcgtctgtcgcaagttcagcatcttcttcagcaggccgaacaccgcgctctctccgccgaccagggcccacctgctaaaatcaccttagatcatgttaccgtgagctttgccagaagtggaggacctggaggtcagaatgtcgatatagtgaacaccaatgtggacatgcgcttcaatgttaaaaatgcatattggttgagtgacaggatcagagaccagattttgcaaactgagaaaaactcgtataacaaggatggggagcttgtga

SEQ ID NO: 14084 - DNA, 352 bp, Glycine max
aagaagcagaaagagaagcattagcaaaagcaagaagaactagtctaagcagaaatggcctcttcagtgatggcatctgtggccctcaaacctgcccctttcactgttgagaagtcctcagttagaggccttccctccctctcaaggaactcctcttcattcagagttgtggccagtggtggcaagaagatcaagactgacaagccttatggaattaatggtggcatggctttgagggaaggagttgatgcatctggcaggaaaggaaagggaaaggggcgttaccaggttgtagacaaatacggtgctaatgtcgatgggtacagtcctatctacgacaccaaggactggt

SEQ ID NO: 14085 - DNA, 330 bp, Glycine max
tgggaagtggtccacgctgcggtcttggggagctcattcttcctgaaaacgaaccaggaagcagtattatgcctgggaaggttaacccgacccagtgtgaggctttgacgatggtgtgtgcacaggtcatgggaaaccatgttgcaatcacagtgggtggatcaaatggtcattttgagctcaatgtgttcaagccaatgattgccaattgtctcctgcattcgctgagactgcttggagattcgtctgcttcctttgaaaagaattgtttgagaggtattcaagctaatagggaaagaatttcaaaattactgcatgagtcacttatgc

SEQ ID NO: 14086 - DNA, 420 bp, Glycine max
  modified_base (416)..(416): a, c, g, t, unknown, or other
ctttctattataatggacagagggttaataggaatgtatcatgattggtgtgagtcctttaacacctatcctcgcacatacgatcttcttcatgctagctttcttttcaaatatcttgagcaaagatgtgacatcgtagatgtggctgtggagattgatcgcatattgagaccaaatggatatctcgtggttcaagattctgtggaaatacttaacaagctcaatccaatcttgcgttcacttaactggtctgtaacgttgcatcaaaatcagtttcttgtaggtagaaaaggtttctggcgtcctacgagctcttgagactgaatgtatattaggttaataaaaatgacgtattcttcaatcacccgtgtatcagtatattctggataaaaattaggtgcaaaaagaatgaattntaag

SEQ ID NO: 14087 - DNA, 421 bp, Glycine max
  modified_base (404)..(404): a, c, g, t, unknown, or other
ccacacttcacttctcttcttcggcgcttcgcggcctctctcctcctctgcccttctcaattcaattgcgacgctcgcgggggcgccctgcaattcgatgtgcttcctcttcctcagactcagatgcttccaacaaagtctcgtctcgtctgtcgcaggttcagcatcttcttcagcaggccgaacaccgcgctctctccgccgaccagggcccacctcctaaaatcaccttagatcatgttacggtgagctttgccagaagtggaggacctgggggtcagaatgtcaataaagtgaacaccaaggtggacatgcgcttcaatgttaaaaatgcatattggttgagtgacaggatcagagacaagattttgcaaacggagaaaaaccgtattaacaaggatggngagcttgtgatttcttc

SEQ ID NO: 14088 - DNA, 273 bp, Glycine max
ccttattcttcgggaacaactggtcttcccaagggagtgatgctgagccacaaggggctggtgaccagcattgctcagcaggttgacggtgataatcccaacctctattaccactgccacgacaccatcctctgcgttctttccctatttcacatttactttctcaacttcgttcttctctgtggcttgcgtgccaaggctaccattctccttatgcccaagttcgatattaacttcttgcttgctctcattcacaagcacaaagtcactatt

SEQ ID NO: 14089 - DNA, 85 bp, Glycine max
tcgggggttggcttggccataagaagccgggctcgtgtcatgcaccgagattgatccatttgtgcccttagctctaaggaggtct

SEQ ID NO: 14090 - DNA, 268 bp, Glycine max
gttgaagatgagaagttaagaagcctcaagcaggaatggggggatgagatatattcagctgatgttacagccctaaaagaaataaatgaatacaatgcaagtggtgggtatactggtaaagagctatggaacttcaaggaaaaaggaaaggctacattgaaagaagttatgaattatattatgaatcatatcaagccgcttaagcgcaagagagcttaggcaaaagtctttgcatgtgataaatgcctgatagctcaaacagtagatg

SEQ ID NO: 14091 - DNA, 355 bp, Glycine max
  modified_base (183)..(183): a, c, g, t, unknown, or other
  modified_base (334)..(334): a, c, g, t, unknown, or other
gaacaaaacaattcccgagcacctagattccaacaaaacaaagggcagaaaaccggttgaccgttcctcatgtggttcccacacggcctctagcagcgatgtggaaactgatgcactagagaagggtgagaaagggaaggaagagcctgaaacacctgatgctaaccaattagccattgactntagtaatcgtcgtagaagtgttagcaatcttactgattcttggaaagaggtctctgaagaggggagactggcctttcaggctctattctccaaagaggtgttgcctcaaagcttttcacctgctcatgctttgaagaataagaatcagcanatggacaacgccaataataac

SEQ ID NO: 14092 - DNA, 397 bp, Glycine max
atttggttctcactggttgccaatatgtctatcacggggatgaactttagcctcatgctcaactccgttggattctaccaaatatcaaaactgagcatgattccagtggtttgtgtgatggaatggatacttcacaacaagcactactcaagggaagtgaaaatgtcagtggtggttgtggttattggtgtcggtgtttgcactgtaactgatgtaaaagttaacctcaaaggtttgatgtgtgcctgtatagcagttttgtcaacatctttacagcaaatttcaataggttctcttcaaaagaaatattcaattggatcttttgaattgctgagtaaaactgctcccattcaagcgctttttcttgttattcttggtccattggtggattactacc

SEQ ID NO: 14093 - DNA, 412 bp, Glycine max
aaagattcgaaacgaagaaagaaagcgttgtgaagaatggcggaagagggacaagtgatcggtgtccacagcgtagaggagtggaaggaacatctcaagaagggagaagagtccaagaaattgattgtggtggattttactgcttcttggtgcggtccatgccgtttcattgccccaattcttgcagagtttgctaaaaagttgccgaatgtcaccttcctcaaggtggatgtggatgaattggagactgtttccaaggagtggggaattgaggctatgccaaccttcctgttcttgaaagaaagcaagctggtggacaaggttgtgggtgccaagaaagaggagctgcaattgacaatagccaaacatgccgcaattgctgctgctttgagtgccatatgaatatgttaag

SEQ ID NO: 14094 - DNA, 399 bp, Glycine max
gcaacaacaagttctggtactcttaaagcaactcctttccttggccaaggcaagggtgccaatgccaatgctcttagggatgttgtctccatgggaactgggaagtacaccatgggcaatgatttgtggtatggaccagacagagtgaaatacttgggacccttctcagctcagaccccttcatacttgaaaggagaattccctggggattatggatgggacactgctggcttatctgctgacccagaagcatttgccaagaacagggctcttgaggtgatccatgggcgatgggccatgcttggagcactaggatgcatcaccccagaggtgctagagaagtggttgagagtggacttcaaggagccagtgtggttcaaagctggagcccaaatattc

SEQ ID NO: 14095 - DNA, 270 bp, Glycine max
ctgaactctacatcttcaagtggacatccttgttgatccctcccttgaccctactaatcttaaacatcattggagtcattgttggtgtctcagatgccataaacaatggctatgattcatggggtcctttgtttgggaggctattttttgccctttgggtcattgtccacctttaccctttcctcaagggtgtcatgggaaaacaagaaggtgttcctaccatcattttggtttgggctattcttctggcttccatattgacactacttt

SEQ ID NO: 14096 - DNA, 364 bp, Glycine max
cctgaacattgtaaagaagccagtgctaggatttgttagtgaagcaatggctcaaaccatgttgctcatgtctagtgtctctagcagttattccgtggatttgaagaaagaccttttcctccaattgcagagtcaaagtttaaggcctaagttctctcagctctcattcaacccacttccatcatcaacttcttccttttcttcaccccgtacattcacaactctggccctcttcaaatctaagaccaaagccgctcctgctaagactaaggttacaaagccaaagcagaaggttgaagatggtatctttggcacttctggaggatttggttttactaagcagaacgagctctttgtgggtcgt

SEQ ID NO: 14097 - DNA, 252 bp, Glycine max
tgcgtcatcgttgggatttacatacgccggatctgctaaaagacgctggatccatatgggcctactaggaccacttgtgggacgacaccgtcgccggtccaaggccggaggacggtctcggcaagctccgaaaacaccacacgttaactttccgacctagctacggcaagggaaacgtacggcggaagcgtgagatcgtacagggacgaatcgtcggaggaagcgacgagagtgacacgtgagtatatgatc

SEQ ID NO: 14098 - DNA, 419 bp, Glycine max
caatgtgcaggcctccgcttctagagagcagatgggttacacttttgatgccttgaaaacctatgttcctgaaatggtcgagctacttgttgattgtgtcaggaaccctgttttccttgattgggaggttaacgagcagcttctgaaagtgaaggctgagattggtgaagcttccaaaaatccccaagacttgcttttggaagcaattcattctgctggtttttctggtgccttggcaaatcctcttttagcttcagaatcagctctaaatagactaaatggtacaattctggaggagtttgttgctgagaactatacagcacctcggatagtacttgcagcatctggtgttgaacatgaggaattgttatctgttgcagaacctctcttgtctgatctacccagtgtcccacgtctag

SEQ ID NO: 14099 - DNA, 423 bp, Glycine max
  modified_base (375)..(375): a, c, g, t, unknown, or other
gagagaacttcaactgagggtgagagtgacacaaatctagggagcactactctaaaagttctattagattcttcaaaacatgaccatgcatcgcgagtcttgggcttttgtcttcggcgttatgggcaacatcatctcctttggagtgttccttgctccattgccaaccttttaccaaatctacaagaagaaatccactgaagggttccagtcacttccttatgttgttgcactgttcagtgcaatgctttggatttactatgctttcgtcaaaagggaagctgccctccttctcattaccattaacacatttggaattgttgtggagtcaatttaccttgcaatcttcctactttatgccccaaggaagcctangcttacaaccatcaagcttcttctcttactgaatgtgtttgggtttgg

SEQ ID NO: 14100 - DNA, 304 bp, Glycine max
ctgaagcgtctcttacggcagaaattggtgcggcactttgtgcaaccctaaccttggagatcaagggagaaattgaggagtttctcaaagtggttttcactctgtttcaagacctggattttactttcttagagatgaatcctttcacattggttgatggaaagccttattctttggatattataggcgagctaaatgacactgctgctttcaagaacttcaagaaatggggagacattgaatttccactgccattttgaagggttattagtgccaccgagtctttcattcatggattagatta

SEQ ID NO: 14101 - DNA, 421 bp, Glycine max
attttagtacttgtgcttgtaaccttttcatccatgatcattgactcaagggttgcagaggcacgtaccctgccaaaatcagccttattgccttccaaagttgatatacctactgttgttcctcttccactggtggcaccactgccaaatttgcctgttactctccctccagtgcctgaactacctgcagtacctaaagtaccaattcctgaagtaatagttaataacgccaaaataatcccttgagtacctatgatctatccagtcactactacttattttgtcacttgctaaattaacttgttgttgccatcccagggtggttctggttctgttggggtttaatttctgtcattcaattacatgctatgttcaagttatatgttgcttcagtcagttgaacttcagcatattatttatt

SEQ ID NO: 14102 - DNA, 264 bp, Glycine max
cgactttgaagggggaaaggtaatagggacatactttagagggaggatgggatagtctggaaaaccaattgggtggtgatgggtaagaccccaagaaaggaaccaacttaaagaatggaacattatttgagactaaagatgaataattcgggaataacattcttacattaattaccctgagactgaatacattcttggaagacacttataccagcgaggtgagagtttatcaatcccttgagtaagcttgttaaataaatatgt

SEQ ID NO: 14103 - DNA, 422 bp, Glycine max
  modified_base (369)..(369): a, c, g, t, unknown, or other
  modified_base (388)..(388): a, c, g, t, unknown, or other
ccgactatgatgacgatgatgattttggcggtccggtgtcggcacatttcgtccgaccggatcggctatcggactccggtgttttggaagacatcacgatggactcgacggctttctcactgcactaccagagtcttgctggctcagactccggcgacatcaagacgcgccagttcgtcaggcttggaactccaagctctcagggaagttacatggagctcacggaggcgacaaagaggcctgccgaagtggtactcgacgcaaatagtgccggcaaagactccaacgacatgagcattgaggtagaccaccaaatgagttttggctatgacataccctcttctgcgtttgatgctgctgctgcaattntggcagaaggagcacctanggaatcaccacatcacaggtttggaaggttcggt

SEQ ID NO: 14104 - DNA, 402 bp, Glycine max
caggagtgtctcttacgtcagaaattgttgccccacttgttgcaacccttcccttggagatcaagggagaaattgaggagtttctcaaagtggttttcactctgtttcaagacctggattttactttcttagagatgaatcctttcacattggttgatggaaagccttatcctttggatatgagaggcgagctagatgacactgctgctttcaagaacttcaagaaatggggagacattgaatttccactgccatttggaagggttatgagtgccaccgagtctttcattcatggattagatgaaaagacaagtgcatccttaaaattcacagtgttgaacccaaagggccgaatttggacaatggtagcttggggaggtgctagtgtcatttatgctgata

SEQ ID NO: 14105 - DNA, 247 bp, Glycine max
  modified_base (57)..(57): a, c, g, t, unknown, or other
  modified_base (59)..(60): a, c, g, t, unknown, or other
ccctgtaacgtcgcaacgcaaagcaaattgttgtccatttttgaaacagagaaacanannataaaaaaaaaaacttttcaaaagtaaaggcaaaaaatctgaaagctagggttgggaatgccaaaaaacaaggaaaaggaaggaaagaaccgaaaccccgtaagaaccaagccgaccaacaaaaaccggaacttgtattcaaggaagaacgacaggaatacccgcaagttcttcgaatgctcggaaa

SEQ ID NO: 14106 - DNA, 418 bp, Glycine max
cacatcaaaccaacattcagttcataatttcttccaacaaattatatttttcttacaaaaaaaatggcaggtgaggtggtgaagaaggaagagtctctcaacctgaaagtcactaacaagagccatgttcaatcagaggagaaaattggaagaaaagagtaccaattggtcacttttgatcttccctacttggccttttactacaaccagaagctcttgttttacaagggtgaagatttcgagggcatggtccaaaaactcaaagttggacttggagtggtgctgaaggagttccaccaacttgctggcaagttagggaaagatgaagagggggtgttcagagtggagtatgatgatgacatgcttggtgtggaggttgttgaagctgttgtagctgatgatgaaattggggtggatg

SEQ ID NO: 14107 - DNA, 378 bp, Glycine max
ttcgaatcatctacccagttccactattgaacttagtggccatcctattaccagacaattgggaaaaatgtgaaatcaaagttggatttgtcaattattttcatgccgcgccaggaggttctctgtgctgtttgtgatgctcatcttggacatgtgtttgacgatggtccttcacccacgggaaaacgtttctgtatcaatagtgctgcccttaagctcaaaccaaagcagtagacagtgaaatacctacctatcactcggaagcagatggtataatattctaaatatgtgatatactttgtggctgtttttctatttatggagaacaacaatgaatattgtcttgaactggtgatgtataaaacacaaattttatag

SEQ ID NO: 14108 - DNA, 371 bp, Glycine max
agagttctgagtttcataggagaaaaaaaatgacagaagaacaaaccaaaacggttgagtcagaatcagtaacaccaccacctgctgctgctgctccttcacaggttcctcctgctgctgaggctgaacatgttcctgaggctccaaaggatgtgactgaggagaaatctgtaattccagtgccttcttctgatgacaagcctgatgaatccaaggctcttgtcttggttgagaagactcaagaagttgctgaagtgaaaccaactgaaggctctatcaaccgagatgcggtgcttgcaagagttgcaactgagaagaggttgtcattaatcaaagcatgggaagaaagtgaaaaatcaaaagctgaaaac

SEQ ID NO: 14109 - DNA, 422 bp, Glycine max
ttgaattcttcagagagaagaagaaacttaatcgatcatcacttcacttcactaatacatcatggcagacgagacccagaacaagtatgagagctctgaggttgaggtccaggatcgtggtgtttttgactttctcggtaagaaaaaggatgaagaagacaagcctcatcctcaggaggaggtcatcgccaccgagtttcaaaaagtcactgtctcagaccaaggagagaacaagcacagcctcttagaaaagcttcaccgatctgacagcagctctagctcttcaagtgaagaagaaggagaagatggagagaaaaggaagaagaagaagaaggaaaagaaagggctgaaagagaagatcgaggagaaaatagagggtgatcatcatcatcacaaggatgaggacacaagtgtccctgttg

SEQ ID NO: 14110 - DNA, 133 bp, Glycine max
aatcgttgttaagtaataaggtgccaaaaaaaagggaaagaaataaaaataaagttgagaaggaccactcggttggtggaatttcatgcattttattattttgaagcttgaagctgaatgtaccagtttgagg

SEQ ID NO: 14111 - DNA, 274 bp, Glycine max
ttttcaagaaataatctggcgaccatgtgcacatacccaattggctttatagaaatctcttattatgaccgaccttgattcctattaaagaactaccctttattcataagtatagccaattccacctagaatatcaataatgacgaaccttattgcatttatggatgcatagcttttaaggaattagtatatccatcctgcagcaaaaggaaatgaaaacgcaattacccatttaatgacaaattcccatctaaaatacatagtgacactccta

SEQ ID NO: 14112 - DNA, 238 bp, Glycine max
cactcactgtatttttatttttattttttgttttgtttctgccaccaaattatctttagtaggtggtgcattaattgagggttgcataattattgcaactcgttgcaactgtgaagttatgtatgctaaggaaatgaaaaagtttctttgttgctctattaatgtaaagtgtgaattacactattatagtataaattctatcaaaggtatcaattgaatttgaaaggtttcacttttt

SEQ ID NO: 14113 - DNA, 173 bp, Glycine max
aaaacttcccaccgtattctcattctcctctattaagttactcacctcctcatctaattttattaattcttttctgtacacccaaaagatgaaaactgctacttataattatgtatgtatgtttgtactctgttgtatgcttctgtatgatattcaatattggtactttgatg

SEQ ID NO: 14114 - DNA, 428 bp, Glycine max
atggcttctgcttctgttcccatggctttctcgctgagctctgttatcaacaacaacaagccttcatccgaagccttcttcaggccactacccctacggcaaccaaagaggaccctcttcaccacaaaggcagtgtcaaactccaaggctcaaatcaatgcatctttgaaggagaaggcagttgcaggactcacagcagcttctgtgacagcatctatggtggttccggaggtggctcatgctgctggatatgagttctccccttccctcaagaactttctgctaagcatctttgctggtgggtttgttctagtagccatatttggagccgttattggggtttccaactttgatccggttaagagaacttaaagcccgcatgctccaatgctgtttaatttcatatggctttgtcactactcttctat

SEQ ID NO: 14115 - DNA, 414 bp, Glycine max
gtggagcaacacactggtgttatgcatgcagacagccaattgtgcttgatgggagagatcctgtttgcccttactgtgatggaggatttgtgcaagaacttgacgagttgcgaggaattgcacccaaccataaccataccttttcgtcacagtcaggagactttcatcaaatgcctgacattttcgatgctatacatgcttttatggggcagagaggttctgaccagagatttgggcttatggacgccgttgataatttcatgaggcatagaatggccggaagaaactcaaactttgatgttagaaggaggtctggttcttttccagttcctgaacagagttggggcgtttatagttccggtccttatttaatatttcacggtcaagttcctggattcaccttgtctgctggca

SEQ ID NO: 14116 - DNA, 378 bp, Glycine max
ggcatcagcattatcttctctctcctccacctcttcttcactgttacagcacagtttcaccggaaactcgaaggctcctcccactactcaattccccaacagaaatgtacgcttttcggtcttcgctcaaaagaaggcatggaaacttcgaaagattattttgaaggaagatgtggcttatgtaggaaagcaatggcaacttcttgatgtgaaggctggctttttcataaattacctgcttcctatgggaaaagcacaacttgttactccacagcttctcgaggaaatgaagattgaagaagaaagatttgaggctgagaaaaaacgggtaaaagaagaggcacagcaacttgctctaatttgtgaaactgttggggc

SEQ ID NO: 14117 - DNA, 420 bp, Glycine max
  modified_base (406)..(406): a, c, g, t, unknown, or other
actgaaggtgtgcaattcagtggagaagtatgcaaataagtgcaagagaatggttttcgagtatggacccttgatttttgaccatgcagagaaaatcctagagacgacagatatatgcaatataatacatgcctgcaaatcttcagatgtagctggacagcaagcctttctttcggtctcttaattatagaaacaaagctctaccagatttatgcttcacttgttggctgaaagattgccatatattcaaatataataagggggaggggagtacaaattcgatccgtattcagcgcaaaatttttaatactatctaaatttctaattatgtgtcagcacatcatcaaaaaagttgaaacttaagttgaaacttcctgtgtagtagtggctgtgatactcatgcttngttaattattttac

SEQ ID NO: 14118 - DNA, 155 bp, Glycine max
cttgcaaaattaaaaataacacaatggcagcgagcgctcgcactccacgcgaagagttcgtgtacatggcgaagctggcggagcaggccgagcgctacgaggagatggtggagttcatggagaaggtctccgcctgcgtcgagagcgtggagctg

SEQ ID NO: 14119 - DNA, 338 bp, Glycine max
gctggcttgggcttggcgtggttccatccatggcagactacgaaaccagcaccagccacaaccaccactcgaaagaaacagccttccaggccctgaacaccataatccagctccacttcgagaaaaccctggagaagaagcgcgccatcgacctccagaagaaggagcttcacaagctcttccagatattcttcatcttcttgggcctcgtcttcctggcccaggcccagtcccctcgcctccaatgccgccactgctggatccccatcactctcctctccatgggccacctcatcttctacgtgtccgtcggccaaaccctaaggtgcatcaacgcc

SEQ ID NO: 14120 - DNA, 415 bp, Glycine max
tgggcatacggcatgaatgtttttgatttggtccagtggaagaggcaaaacatcaccgatgtgtaccacaactggcaaaagatgaatcatgatagacaactatggaagttaggaacactgccgcctggtcttataacattctggaaacgcactttccaactgcaccgatcttggcatgtgttgggtcttggctataaccccaatatcaaccaaaaagaaattgaacgggctgctgttatacactacaatggaaacatgaaaccgtggctggagataagtattcccaagttccgaggttattgtacaaagtatgttgactacaatcttgtgtatttacgagaatgcaacatcaatccataaaaagatctggtggcatgtgtagagcatgaaatttatttaaagcttttatgattat

SEQ ID NO: 14121 - DNA, 108 bp, Glycine max
ctattctattagactcaggtactgcgtgtcggaagcagactcagattgctcgtacgaagcagaccgttcgtaagtccacaggaggaaaggctacgagcaagcagcttg

SEQ ID NO: 14122 - DNA, 389 bp, Glycine max
ctcactcactgcagatctcaattgcatcgctgtccatggctaccatcgttagcatcaaggcccgccagatcttcgacagtcgtggcaatccaactgtcgaggtggatttgacttgctccgatggtacttttgccagagctgctgttccaagtggtgcatccactgggatttatgaggcccttgaattgagagatggaggatctgactaccttggaaagggtgtatcaaaggctgttgacaatgtgaacaccgtcattggccctgctttgattggcaaggacccaactgagcagactgctattgacaacttaatggttcaacagcttgatggaactgttaacgaatggggttggtgcaagcaaaagctaagagcaaatgccatattggca

SEQ ID NO: 14123 - DNA, 308 bp, Glycine max
tggtcatcgttgggatctccatacgccggatctgctaaaatacgcttgatccatatgggcctcctcgaccacttgtgggacgacaccgtcgccggcccaaggccggaaaacggtctcggcaagctccgaaaacaccacaccttcactttccgacctagctccggcaaggaaacggagggcgggagcgtgagatcgtacggagacgaatcgtcggaggaagcgacgagagtgacgcgtagtatcatgatcgtgaaaccgcccgggtaccagagtgggatcgctccggtttcttccggcgggtctactac

SEQ ID NO: 14124 - DNA, 354 bp, Glycine max
gaaccactaaaagttgctctaaaaaatttggaggatattcaggtacctgttgatgtagctccgacatttcccattggcaacaaaatattgcaatgaaagcaagcgaaccaatgtgtaaaaaattgccagcctggaaaatttattcaattagtatattttcactagttgttactgtgaaataatggaatgcttgtttctttgggatgttgctgttttctgttgattgatttaaaagaaaatcaaataatggtcttagaaaggagttttagaccttgtcttagttacagggttattatgccaatgatgaatgacccaactgatattgaattgtatcgattgcaaggttttgattcc

SEQ ID NO: 14125 - DNA, 396 bp, Glycine max
gccaaagttgcaaaatttattgaggataaatcaaagctgtctgaagacaagattgcagccgtaactgacatagttcgtgatgaagataaagcgaaggagattgtggaagctgccaaggcctccatgggacaatatttgtccccagtggacttgattaatgtccaacaatttgcacagagagtaatggacctatccaagtacaggcggaagttgtatgattacctggttgctaaaatgaatgacatcgcactaaatttggcctctttaattggtgaagttgttggtgcacgattaatttcccatgcaggtagcctcacaaatttagctaaatgcccttcttcaactcttcaaattcttggtacagagaaagctctgttcaggttcctgcttcacaca

SEQ ID NO: 14126 - DNA, 409 bp, Glycine max
aactcactcactggaagccttgttgtgagtaagggaaaggcttcctgcactgagcaccaagttgaaacctcttgattctttgcttagaattccacagaatatggagactgttcttttcaatgactccccacctttggagttcaagggtatgagcaaggaggaggaagactcattgctagggcaagttgaaatatggaggtacatgacatgcttcacggactccgtggccttgaaatccgtcatagagctgcgcatagccgacataatagaccgttatgggaaaccactatccttgtcacaaatcgtggagaacatagatgatgcacccttcccagatgcctctcttctacagagagtgatgagagtgatggtacgtagaaagatcttcagtgcagaacaatcagagact

SEQ ID NO: 14127 - DNA, 404 bp, Glycine max
atcacagggtcagttttgcactatgacaatgggagaaccagaaaaggcgcttatgaccaaagggtcgcttcctcaattcgtctctccacattgtttccatagagtgcagcaacccactaacataaaaactacctcagaaacatataagggtatttcacaacaagacaaacatccactcccatcccagcagtgtagcatgcacgggaagagcgatcacttaaatgatcctgttgcttccattgatgcgaaactgctgcatgcacaatctcaatttggtgctgtcgatgctgctgcagtaactggtgctgctcacaagcattcaggggcctttcagtatggattgtcataagttgtgaggttttagagagatgcatacaataaatatgcatgctttatgtaattgc

SEQ ID NO: 14128 - DNA, 299 bp, Glycine max
atatatgaatcggagctatgcagatctcttattacgctctatcctgaagccaaaggaaatgacatcggaattcctcggtgaattccaattccacattttcaataaataaggaggcaaaaatgttcatatatgaattggaattatctgttttcttattatgcctatcctgaaaccaaaagaaatgagatcgtaattcctcggggaatatcaattccacattatcaagaaataatgaggcaaaaatgttcatatattgaattggaattatttgttttcttattaagcctatccttgaacca

SEQ ID NO: 14129 - DNA, 398 bp, Glycine max
atcacagggtcagttttgcactatgacaatgggagaaccgtgaaagacgcttatgaccaaagggtcgcttcctcaattcgtctctccacattgtttccatagagtgcagcaacccactaacataaaaactacctcagaaacatataagggtatttcacaacaagacaaacatccactcccatcccagcagtgtagcatgcacgggaagagcgatcacttaaatgatcctgttgcttccattgatgcgaaactgctgcaggcacaatctcaatttggtgctgtcgatgctgctgcagtagctgttgctgctcacaggcattcaggggcctttcagtatggattgtcataagttgtgaagttttagagagatgcatacaataaatatgcatgctttatgt

SEQ ID NO: 14130 - DNA, 275 bp, Glycine max
ctgatctgctgaaacacgccacactcttcttaccatgggcgtcctcgatcacttgtgggatgacaccgtcgccggtcctcgcccggagaacggccttggcaagctccgaaagcaccacaccttcgctttccgatctgcctccggcaaggaatcagacagcggaagcgtgaaatcgtacggtgaagatttgccggaggatgcggtgagagtgacgcgaagtatcatgatcgtgaaaccacctggtggtaaccagagtccgagcggatccgatccgg

SEQ ID NO: 14131 - DNA, 376 bp, Glycine max
  modified_base (293)..(293): a, c, g, t, unknown, or other
gattcaaaaggaagcccctcctgaatatcagagctatcttgtccaagtgacaaaataccaagctgcacaaaactgtaagacctggatcgttggtaagtggatcacgccaagagagcaatactgggcaccacgtggaacccattttcatcaatttgttgtcccgccaattttaccatttagaaaagattgcacttatggtgacctggcagcgatgagattaccagaagacgtggaaggactagggtgttgtgagtacacgatggataggggagtggttcacgcgtgccatgcangatgagtggtacatagccttgaaaggtggccttatcacgaaagtggggccatagatgttaacagattcgatcttgtgtgggaa

SEQ ID NO: 14132 - DNA, 389 bp, Glycine max
atgcttaatttagttgtgaacaacagcaacgacataaatgaagccgatgcatgagggttttggattcatttcattaagatgatctggttatctgtcttcttatttttaaaatttaaagtctttgtgtgatgtctgtaaggcattctaagtatgattattatgagcagcttgattcgcgtcatgggccaatgatatcctctgcttataagctttaataagcccaacttatgtgtgatgtacggttgtgattagaggattgaatgtgcagactctagcattgcagcaaagtcatatatatgcatcatttaatttactgtaaggctattatggcagtctacggctaatgagcttgatgaccctgtaattaattgctgaccgttacctgcaag

SEQ ID NO: 14133 - DNA, 408 bp, Glycine max
tctagatcacagggtttagtttttgcactatgtacaatgggcagaaccagtaaaagacgacttatgaccaaagggtcgccttactcaattcgtactctccacattgtattccatatgagtgcatgcaacctcactaacatataaaactactctcagaaacatatataagttatttcacaacaagacaaacatccactcccatcccagcaatgtaacattcatgggaagagcgatcacttaaatgatcctgttgcttccattgatgcgaaactgctgcaagcacaatctcaatttggtgctgtccatgctgctgcaataactgttgctgctcacaggcattcaagggcctttcattattgattgtcataagttgtgaggttttagatagatgcatacaattaatattca

SEQ ID NO: 14134 - DNA, 217 bp, Glycine max
ttcttgaaatgggactctaggattcaaatttaagcttcctcctgaatatcaaatctatctggtccagtttacataataccaagctgcacaaaactgttatacctggatcgttggtaagtggatcacgccaagagagcaatactgtgcaccacgtgtaacccattttcatcaatttgttgacccgtcaattttaccatttataaaagattgcacttat

SEQ ID NO: 14135 - DNA, 368 bp, Glycine max
ctgaagagaataagtgaaggatctcttttttggggagtttgtcttggaaattcatcaacatcgctctattgatttgggaaattgaaagtatccgaagccttttgtacagttagcttactattgttgttattacgaattactattattattatcatgtgctatgttacttaattaactctatcgtgtctgttattttcacttacttgctaatctcatctcattgatgtacaaatgtataaatatgtaggatccaagaggaatcttgttattcaaaaaaaaaaaaaaaaaaaaaaaaaaaaaaaaaaaaaaaaaaaaaaaaaaaaaaaaaaaaaaaaaaaaaaaaaaaaaaaaaaaaaaaaaggggcggc

SEQ ID NO: 14136 - DNA, 355 bp, Glycine max
  modified_base (157)..(157): a, c, g, t, unknown, or other
aaataaaggaagcgggaaatgtgtcatatattgaaattggaattatgttgttttcttattaaggcctaatcctgaaagccaaagggaaatgaagatcgtgaatatcctccggggaattctcaattctcacaattttcacagaaataagtgaggcaanaaatggttcatatattgaattggaattattatgttttcttattaaggcctatcctcgaagcccaaaggaaatgagatcggaattctctcggggaaattccaattccacattttcaagaaataaggaggcaaaaatgttcatatatgaattggaattatttgttttcttattatgcctatcctgaaaccaaaggaaatg

SEQ ID NO: 14137 - DNA, 395 bp, Glycine max
ccgtgaactcgaagtgatccactccaggtgggccatgctcggagccttgggctgcgtcttcccggagttgctgtcccgcaacggggtgaagttcggagaagccgtgtggttcaaggccgggtcccagatcttcagcgagggtgggctcgactacttgggcaacccaagcctgatccacgcccagagcatcctcgccatctgggccacacaagttatcctaatgggtgccgttgaaggttaccgtattgctggtggccccctcggtgaggtcactgacccaatctacccaggtggcagcttcgacccattgggccttgctgatgacccagaggcttttgctgagcttaaggtgaaggaactcaagaacggacgattggccatgttctctatgtttg

SEQ ID NO: 14138 - DNA, 312 bp, Glycine max
atgcttaatcaagttgggaacaacaacaacaacaaaaatcaagccaatgtttgtgggttttggtttcatttcattaagatgatctgtttatctcttttcttctttttaaaatttaaagtctttgtattttgtatgtaaagatgtaaaattatgattattaggtggtgcatgtgtcgcgtcatgggccaatgttatcctctgcttttaagttggaagaggcccaactcatgtgtgatgtacggctgtgattgtgtaatttaatttgcaaaatcaaaaataacaccagagtcatatatatgcatctctttattt

SEQ ID NO: 14139 - DNA, 255 bp, Glycine max
gtgatgacatatggaaagcaccaaagtccaaacccttcatgtttgacagaattgagtttttaaggaggtttgtgtaattaaggaggggataccatgagtgccatgtgatttttgtatgtattggttgtaccatatgttttcttcttttacttttcattgttttgccccctctgttctgtaatttaattagcaaaggacaaacgttgacatagtatctgaacttttacaggatatatcgaatatgttgaatttcac

SEQ ID NO: 14140 - DNA, 264 bp, Glycine max
acataacataaaatcttcctccgggtcaagcttcatctctatctgtgtattcatctccgttaagcataaatcatgggttcgatggtgctgagccaactcgccaccggtcttagcgttctaaccggagcggatctggtgaaatcggttatggaccataagcccatggcaggcccattcactcgctgccccacgtgcaacagaacccgtcgagtcacgtacctctgctcgcgtttgtccgacagctacgtctgatgcttcacgtgc

SEQ ID NO: 14141 - DNA, 419 bp, Glycine max
acacttcacatacataacataaaatcttcctccgttcaatcttcatctctctctctctattcatctccgttaagcaaaaatcatgggtccgatggtgctgagccaactcgccaccggtcttagcgttctagccggagcggttctggtgaaatcggttatggaccagaagcccatggcaggcccattcactcgctgccccacgtgcaacggaaccggtcgagtcacgtgcctctgctcgcgttggtccgacggcgacgtcggatgctccacgtgctccgggtcgggtcgcatggcctgcagcagttgcggcggctccggtaccggtcgacccttgccggcgaaaatcgcgattcgcccgccgaaaccgccaattaattagttcaccaattcgttgggctcgctcgctcgcttgctactac

SEQ ID NO: 14142 - DNA, 436 bp, Glycine max
ctatgacgcacacgcacgcatacttaaactgggactccaggttgatacttttatttatttatggaagtggaatgcaagaggtttagtttcatacgttgatggaactattacaaagtctgatgttttggggcaattcatgcctttagttggcaaagattggacacaatctgtagtggcaaggcttttctgtgctattaatgaaaatggataccaactactttttctgagtgcccgtgcaattgtccagtcatatctaaccataaacttcttgcttaacctgaaacatgattgaaaaaccttaccaaattgacctgttgttatatcacctgatggattattttcctcgctttaccgtaaatttattaataataacacctttattaattcaaaaatgcttgattaaatgatttattataaactttttcccaatttactt

SEQ ID NO: 14143 - DNA, 54 bp, Glycine max
gttcactgtacattatttatggattacctccataaaagaaaagagcgttaatcg

SEQ ID NO: 14144 - DNA, 228 bp, Glycine max
acatctaatgcacgccatgcacacctgcgtaatctggctatacatctcgagttcaaagcttcttaacatattgacgattaatcgtatctggttaaatacaaaattgcagccgccactgacatatttcgtgatgaatataaagcgaatgagattgaataagctgcccaggcctacatgtgacagtatttgtccccagtggactttattaatgtccaacaatttgcacat

SEQ ID NO: 14145 - DNA, 368 bp, Glycine max
gctgtgatgtctcttacgtcagaaattgttgcggcacttggtgcaacccttcccttggagatcaagggagaaattgaggagtttctcaaagtggttttcactctgtttcaagacctggattttactttcttagagatgaatcctttcacattggttgatggaaagccttatcctttggatatgagaggcgagctagatgacactgctgctttcaagaacttcaagaaatggggagacattgaatttccactgccatttggaagggttatgagtgccaccgagtctttcattcatggattagatgaaaagacaagtgcatccttaaaattcacagtgttgaacccaaagggccgaatttggacaatggt

SEQ ID NO: 14146 - DNA, 421 bp, Glycine max
gttgatgctcatatttatttatggaagtggaatgcaagaattgtaatttcagacgttgatggaactattacaaagtctgatgttttggggcaattcatgcctttagttggcaaagattggacacaatctggagtggcaaggcttttctgtgctattaaggaaaatggataccaactactttttctgagtgcccgtgcaattgtccaggcatatctaaccagaaacttcttgcttaacctgaaacaggatggaaaaaccttaccaaatggacctgttgttatatcacctgatggattatttccctcgctttaccgagaagtgataagaagagcacctcacgagttcaagattgcttgtttagaggatatcaaaagacttttcccatctgactataatccattctatgctggatttggcaata

SEQ ID NO: 14147 - DNA, 434 bp, Glycine max
gcagaacagttatctgcagttgtgtaatttcctagtcatggatttctgaagactgaacagcattgataatctttccccctcatcagatggatggctactgtatataattttcctctgggccctgtggtgcataagattggctttgcttagattctgagaaggaagttcctgagctctgccattcaaatatctgatttattttcatgaacatgaagcttagcttcccttctgagatgaaaagctggttactatctcccttgcaccgaggtttctgctaaagctttgccatctgtaaaacagtaagttatgaaattcccataaatatgtatggaccttgattatgaggttttttggtcatactgcccgcttaaagtattttaattcaatcttttttttcatccattctggatgtttttagcttcctatattatttt

SEQ ID NO: 14148 - DNA, 253 bp, Glycine max
aaccttaaccgttcatcggttaattttcaaccagaactatgattaaactctctaaactaaaggcaaaacatataaaactggcataaaatgcgaattttggaccacccattaagaagcaaagtgccggcaagattcgtcttctcaaaaatataagcgagctgaatctaccaaaatcatgtaccatacaattccccaatggcaaagatgacccgatgaacttccaagcttcaattccctctaatgatggatatta

SEQ ID NO: 14149 - DNA, 192 bp, Glycine max
ggatcaactttccaggcttccccatgcacccagtgcaccgtttcaaacaacaccatcggtcatcgaagttccagaagaggaagaggaggacatggatgtaaggccaaaacgtcgtatatggagtggtgaagattttgaatctgatcatgatgatgtcatgttttgttcattgaaattttatgtatctttatt

SEQ ID NO: 14150 - DNA, 357 bp, Glycine max
gttttctctttcttcctctctatcacactcacctatggctcccatctcaaaactcattcctttcctattcttaacaacccttttagtgtctctccaagttaatgccagagacagccaattcttcagcaaagtcacccctctcaacatcaacattaaagagactgaggttcccaaatatgaaggccaagtaaacaagccagaacaacaaccagttttcaccccagaaacagaaaacagctatggtctatatggtcatgagactggtctgcaccctgccaccactacattaacttatgctgctccctacaccaccgtcaccatctacaagccattcaaaactaccacagctgaagagga

SEQ ID NO: 14151 - DNA, 419 bp, Glycine max
gaaaacccctaaccccaacctcaaccttaacctctcctcactttcttttcaaccagaactatgattaagctttttaaagtaaaggaaaaacagagagaactggcagaaaatgcgagtggtggaccacccgttaagaagcaaagtgccggcgagttgcgtcttcacaaagatataagcgagctgaatctaccaaaatcatgtaccatgcaattccccaatggcaaagatgacctgatgaactttgaagtttcaattcgacctgatgatggatattacttaggtggcacatttttgttttcctttcaagtgtctcccatctatccacatgaagcaccaaaggttaaatgcaagacaaaggtctatcatccaaatattgacttggaaggaaatgtttgtctcaacatcttacgagaagattg

SEQ ID NO: 14152 - DNA, 206 bp, Glycine max
gccacttgcttatgtagttgcactgtttcagtgcaatgctatggatttactatgctttcgtcaaaagggaagctgcccttcttctcattaccattaacacatttggaattgttgtggagtcaatttaccttgcaatcttcctactttatgccccaaggaagcctaggcttaacaccataaagctgtttctcttactgaatgtgttt

SEQ ID NO: 14153 - DNA, 347 bp, Glycine max
gatcccctcgcgaatgctatactttattttcaagaaataaagaggcgagaatggggatatatgaattggaattatttgttttcttattaggcctatcctgaagccaaaggaaatgagatcggaattcctcggggaattccaattccacattttcaagaaataaggaggcaaaaatgttcatatatgaattggaattatttgttttcttattaggcctatcctgaagccaaaggaaatgagatcggaattcctcggggaattccaattccacattttcaagaaataaggaggcaaaaatgttcatatatgaattggaattatttgttatcttattaggcctatcctga

SEQ ID NO: 14154 - DNA, 266 bp, Glycine max
ctcgagccgttatgactctggtttcaacaagccatcgtgtgagtctgctggcggtggctatgaaggtggttacaacagaacatctgattctaaggatgagccagttaccggtgaaggctttaaaaggggcatttttaaatcaggggagaaatttgaaggaaaatattaccaattgttaatttttaactttccttactttggcctttaattacaacaagaacttttggtttaacaagggtgaaaatttttagggccttggtccaaaa

SEQ ID NO: 14155 - DNA, 271 bp, Glycine max
gtgcttcactatgagcttctgcaaatgggctgatatcattgtcatctgtgcattttcagcagacacccttggcaagattgctggagggttgtgtgacaatctactgacatgcatcgttcgagcctgtgactactgcaagccattctttgttgcaccagtcattaacacttttatgtggatcaattctattacagatcttcatcttcattttctttgtttatctttgctttttttttcaatttagttttttacatttattttattttttttt

SEQ ID NO: 14156 - DNA, 342 bp, Glycine max
tcgctgtagagatcccctcgggaatgtctatcctctattgtcaagaaataaggaggcaagaatgggcatatatgaattggaattatttgttttcttattaggcctatcctgaagccaaaggaaatgagatcggaattcctcggggaattccaattccacattttcaagaaataaggaagcaaaaatgttcatatatgaattggaattatttggtttcttattaggcctattctgaaaccaaaagaaatgagatcggaattccttggggaattccaatttcacattttcaagaaataaggaagcaaaaatgttcatatatgaattggaattatttgttttctt

SEQ ID NO: 14157 - DNA, 386 bp, Glycine max
atcacagggccagttttgcactatgacaatgggagaaccataaaagacgcttatgaccaaagggtcgcttcctcaattcgtctctccacattgtttccatagagtgcagcaacccactaacataaaaactacctcagaaacatataagggtatttcacaacaagacaaacatccactcccatcccagcagtgtagcatgcaggggaagagcgatcacttaaatgatcctgttgcttccattgatgcgaaactgctgcaggcacaatctcaatttggtgctgtcgatgctgctgcagtagctgttgctgctcacaggcattcaagggcctttcagtatggattgtcataagttgtgaggttttagagagatgcatacaataaatatg

SEQ ID NO: 14158 - DNA, 325 bp, Glycine max
attttatctttccctaaatatgatgtacagtatcgtactgttcccttaaaaaaaaaaaaaaaaaaaaaaaaaaaaaaaaaaaaaaaaaaaaaaaaaaaaaaaaaaaaaaaaaaaaaaaaaaaaaaaaaaaaaaaaaaaaaaaaaaaaaaaaaaaaaaaaaaaaaaaaaaaaaaaaaaaaaaaaaaaaaaaaaaaaggatagctcctccaaattaaacattttaaccccttaaataatttctaaacctaatccatacgtaaaaaaaaattacaaaatttaggatattttaaaaatttacctaaataagtctaaaatctattccctc

SEQ ID NO: 14159 - DNA, 404 bp, Glycine max
gcagagaagtgagatacactaagttatcctcataaatacactctaattaggtggcaagataagtgtctaaccttagtaacattgccacatattgtgttcattttggaattgtgccactaaaattctattcaattcatctatggctgcctcttcttatgctatgcaatcaatcctggcaaaccctttgatccgcatttccagcgggtctagggtgaaccaatttggcgttcctgctttgcacatgagaaggaatgttggcctgagagttaggtccatggctaaggaagaacaaccaagtgagcctgcaaccccagttacaccgtcaccatcagtagaacccaagccacagccagtctctgctccttcaccaaaagtgagcactaagttttctgatgtgttggcat

SEQ ID NO: 14160 - DNA, 402 bp, Glycine max
taggataattcttattcctcattttcaagaaataatgaggcgaggatgtgcatatatgaatcggaattatgtgttttcttattaggcctatcctgaagccaaaggaaatgagatcggaattcctcggggaattccaattccacattttcaagaaataaggaggcaaaaatgttcatatatgaattggaattatttgttttcttattaggcctatcctgaagccaaaggaaatgagatcggaattcctcggggaattccaattccacattttcaagaaataaggaggcaaaaatgttcatatatgaattggaattatttgttttcttattaggcctatcctgaagccaaaggaaatgaaatcggaattcctcgggggtaccgagctcgaatttcctatagtga

SEQ ID NO: 14161 - DNA, 257 bp, Glycine max
ggtaataccaaatttgacaaagctttttaggggaagaaaaacactagggatacatagtgaaattaaatagaaaaagtgataattatggctcttgatatttatcactgctaaaatttagaagcagggaagagtgtgtgtgaggcaacatatctattagtgagtgtcatgtaattcccatcacagaacccatgttctcactatgtcccttcttcccttccttttaatattatcattcccacctggctcgagtgtttttc

SEQ ID NO: 14162 - DNA, 354 bp, Glycine max
gtaccacttttagttgctctaaaaaattagggggatattggggtacctgatgatgtagctccgacatttcccattggcaacaaaatattgcaatgaaagcaagcgaaccaatgtgtaaaaaattgccagcctggaaaatttattcaattagtatattttcactagttgttactgtgaaataatggaatgcttgtttctttgggatgttgctgttttctgttgattgatttaaaagaaaatcaaataatggtcttagaaaggagttttagaccttgtcttaattacagggttattatgccaatgatgaatgacccaactgatattgaattgtatcgattgcaaagttttgaatcc

SEQ ID NO: 14163 - DNA, 203 bp, Glycine max
cccctcggggaatttctatagctcattatcaagaaataaagaagcggaaaagtgcatatatcaatagggattatgtgacttcttattatgcctatcctgaaaccacaagaaatgagatcggaattccttcggggtaccgagcttcaaattccctataatgaggtctattaaaatcctaaacattttataaatgatttcttggg

SEQ ID NO: 14164 - DNA, 413 bp, Glycine max
gaaattaaacgtctgcggaaagcaacaatgtcaggacctgagtgttgctcaaacccaccagttctgaaccccaatgcaggagctggccatgttgaaaaactcgctggtctcaattcctatctctccggttcccctaattccattgccattcttctcatctccgacatttatggctatgaagcaccaaatttgaggaatattgcagacaaggttgcagctgctggttattatgtggttgttcctgacttcttccatggtgatccatataatcctgagaatgctagcaggtctatccctgtttggttaaaagatcatggcacggacaaaggatctgaagctgcaaaatccataattgaagctttgaaaagtaaaggtgtgatggctattgcggctgctggattttgctggggggc

SEQ ID NO: 14165 - DNA, 328 bp, Glycine max
gaagagttttactgtttaagtgggacggttatcatcaacagaatgcgtatcttttggagtggagtctgctgttgccgtatttggcctatcatgaagacaagggacatgtgatcggtgttactcggggaattccaatttcacattttgaagaaatacaggaggcaaaaatgttcatatattaattggaattatttgttttcttattaggcctatcctgaagccaaaggaaatgagatcggaattcctcggggaattccaatttcacatttttaagatataaggaggcaaaaatgttcatatatgaattggaattatttgttttcttatt

SEQ ID NO: 14166 - DNA, 405 bp, Glycine max
gtccctcaatacagccttcatggaatggctgaggcctttatgtcaattggacacttggagtttttctatgaccaggcccctgagagtatgaggagcactgccatggcattattttggactgctatcgctgctgggaactatgtgagtaccattatggttactttggtccacaagttcagtgctgggtctaatgggtcaaattggctccctgacaacaacctcaacaaagggaagttggagtacttttactggcttatcaccatattgcagtttctcaatcttatttactacttggtttgtgccaaattgtacacctacaagccaattcaggtccatgacaaaggggatagcaattcagaagggaaccaaattgagctctctaccacggtttaagtgtggtgttgt

SEQ ID NO: 14167 - DNA, 409 bp, Glycine max
  modified_base (374)..(374): a, c, g, t, unknown, or other
caaaatgactaggagctcagagtaagagctaacatcttggaatatatcagcatgtgctaaatctttatactggcaggcatgctggaggcttctgttctcatttacttccctaaaatgattgagctgaggtagccaattggcgagccacatttttgtcattaacacgatcccccatgcgttttcattgctaaattttattatcaaataacatgtattagtgttttattttatttttttacctcatccatattgtaaatttaataggcattggtgtagattgtagcgtttattgttgtaatcaccatatggtatggtgcagcttccaatatagtttgacagcgggaagctttgcttgtaactgacgtacataaatntatccaatgaaaatgcaaatataagtattttctat

SEQ ID NO: 14168 - DNA, 277 bp, Glycine max
taatggctagagccaacatgtcagtatatctcatcaagtgctaaaactacaaactggcatgcgattctgaaggccactgccatgacatacattcctaacagcaatcacctcaggtaactatttgactaccaacatggttactattaacaacatcttcaatgcttggtcaaagctaacaaatatgatcaaataccacgtcttaaacaattataagattgagttaccttactcacatagcaccataaatcagcatcgcagtctaatgtactacttattg

SEQ ID NO: 14169 - DNA, 175 bp, Glycine max
atccctacttcaaggatccatttccctcataaaatgctgcggttccttgtagggttcaactgaaaccattccaagccttaatctgtctattctgctgccctctgcaccgagattgacattcttcctcagtcccaagctgtgattacgtataccgagtcgtgttaaatgtctgatc

SEQ ID NO: 14170 - DNA, 393 bp, Glycine max
gtccctcaatacagtttttcatggaatggctgaagcctttgtgtcggttgtacacttggagtctatctatgaccagtcccctgatagtatgaggagcactgccatggcattatttttgactgctatcgctgctgggaactatgtgagtaccattatggttactttggtccacaagttcattgctgtgtctaattggtcaaatttgctccctgacaacaacctcaacaaatgtaatgttgagtacttttactggcttattaccatattgcactttgtcaatcttatttactacttgtgttgtgcctaattttacaccttctatccaattcatgttcatgactatagttattgcatttcataaagtaacccaattagatctttttaccatgttta

SEQ ID NO: 14171 - DNA, 385 bp, Glycine max
  modified_base (302)..(302): a, c, g, t, unknown, or other
atccctcactaggagctcttctccattggttcttcatctgcatgcacacacttgcatagttttggaaaccaagaatttttgaagggtagcatcaacaagaagttctgaaaatggagatcaccaatgtcagcgagtatgaagctattgcaaagcagaagttgccaaagatggtgtttgactactacgcatctggtgcagaggaccagtggactctgcaggagaacagaaatgccttttccagaattttgtttcggccacgtattcttattgatgtgagcaagatagacatcacaactactgtnctgggctttaaaaaatccatgccaatcatgcttgccccaacagccatgcagaaaatggctcatcctgagggagaatatgcaac

SEQ ID NO: 14172 - DNA, 60 bp, Glycine max
ttcagataatgtgaattatcttgtgtatccgaatccaacttaatgttacttgctttttac

SEQ ID NO: 14173 - DNA, 243 bp, Glycine max
gttaaagcatatatttatttatggaaatccaattccaaaggtatggtttcaaactttgatggaactattacaaaatcttattcttttaatcaattcattcctttatttgtcaaatatttacacaatctattatataatgcttttctgtgctatcaatgaaaatttataccaactactttttcttaatacccatacaattatttcagtcatatttaatcttaaactattttcttaaccttaaac

SEQ ID NO: 14174 - DNA, 215 bp, Glycine max
tagcttcgagatttcgttttggaaacccgaccaccttaaaggggaggggtcgaacttaagagaggcgaggacaacactaaaccaaccttagaagtggctgtacatcctaagaattgtcctacaaactgaaaacacagacgcttctattgttcacatcactgaattaccatacatgctggacctgataatcaatagataatattaccatagcctta

SEQ ID NO: 14175 - DNA, 304 bp, Glycine max
cctttttcttatactattgttggcaataacaatgatgggtgtgattgctgcaagggcaggacaagagaaatggaactgttctcgttagagtgtagcaagaaacctaagattattggtgctttgtaacgttacgttaggttttttttttctttttatttttcggcagtttctgtaactgatgaaagaaagaaggtacaagaactgcggtgtagtgacatgacaagttgctgcaaattgcaaaatgtcaattgtatattacttaatattattagatgttgaaattaggtgtaatgtaacaaaaact

SEQ ID NO: 14176 - DNA, 390 bp, Glycine max
cccggttcagatactattgttggcaataacaataatgcaagtgggtgctgcaatggcaagagaagagaaatggaactgttctcgttagagtgtagcaagaaacctaagattattggtgctttgtaacgttacgttaggtttttattttcttttgttttttcgggagtttttgtgactgatgaaagaaagaaggtacaagaactgcggtgtagtggcatggcaagttgctgcaaagtgcaaaaggtgaattgtatattacttaatattattagatgttgaaattaggtgtaatgtaacaaaaactgtacaagatgatgataaaaggttctaagaaggggagaagaataatatacataaaagatatcatatgaaaactcgttaatggtaaaa

SEQ ID NO: 14177 - DNA, 121 bp, Glycine max
ctctttttcttatggcagcgcaaccaataacgaaagccaggctattttctaacgtgctctggtcatctttactccaagatgaatgccacaaaggaatttatcgatcatgtgaacgaaaact

SEQ ID NO: 14178 - DNA, 414 bp, Glycine max
ggaaaaggcacgtacacgaccaccgtttagctgtgtttgaagttcgaacgttgaaattaattgagctgcgcctgcgcgtgtcactgtttgagagcacacaaacaatgtcctccgaatcacacgccgttgattgtaacttgaaggagacggagctcaccttaggccttcccggcaccaaaactactgccacaaaacgtggcttctctgatacccttcctccttctcaaaataaaatcttgcgccccacctccaaattcccaacacccaacagggaacaactggtggggtggccgccggtgagggcaagcaggaagaatgctatgaagagctgttgcaagttggtgaaagtggcggtggatggagctccttatctaagaaaagtggatcttgacatgtacgatagttatgagcatt

SEQ ID NO: 14179 - DNA, 288 bp, Glycine max
cgcatactcttgtgttcgaacacacggtagctagaataggaatcgtgacgttcctaaccattcataggctcctgcacatgtcgctgacacagaccacacatacattttcctcttaattacacgcttatgatatacctttactggaaaacatgatctgctcaaaccttgaccatcccagaaccactggcacaaacttcgaattctatggtctcctaactgcctgataacattcatgcccgagcactacctgcacattccaaagatcgaacaagcttcacctaatgagtt

SEQ ID NO: 14180 - DNA, 391 bp, Glycine max
cgacggtggcacaggaaagacaaccttcgtgaagaggcatctcactggtgaattcgagaagaaatatgaaccgaccattggtgtggaggttcatccgttggattttttcacgaactgtggaaagattcgcttctattgttgggatactgctgggcaagagaagtttggtggcctcagagatggatattatatccatgggcaatgtgcgattatcatgtttgatgttactgcccgtctaacatacaaaaatgtccctacctggcaccgtgatctttgccgggtctgtgaaaacatcccaattgttctttgcggtaacaaggttgatgtcaagaataggcaagtgaaagcaaaggcagttacttttcacaggaagaagaattgcagtactatg

SEQ ID NO: 14181 - DNA, 428 bp, Glycine max
agctaccactgttcagaagtgctacattgagcttgccaagcaagtcaaggaaaagctttccaaggtagatccttactttgacaagttggcagatgccatggtcacttggattgaagcttgggatgagcttaaccctgcgggagcatcagtggccaatggcaaagcgtgaatcggtttttggttaactgcataacagccacaaaacttggaagtggaactatttatatactgtattttttttccttagtatttatcttcaacttagctgttattctcggcttaaaatttgcagcattgttagctgtaattctgtttaataacttcatcatttgagcttagaaacaataagtacacccatagggcgttactttctttttattattggttgatgggtaaagatcacatggcagcatttcggtacatgtgaa

SEQ ID NO: 14182 - DNA, 121 bp, Glycine max
gccaaacttgtttaatgtgattaatttcttgctttcttgtgtaagctttgtgcatcattttctcagacactttgttgactgatattttaagaaaatcaaatgatgagggaaaattttctat

SEQ ID NO: 14183 - DNA, 421 bp, Glycine max
gtctaagcagaaatggcctcttcagtgatggcatctgtggccctcaaacctgcccctttcactgttgagaagtcctcagttagaggccttccctccctctcaaggaactcctcttcattcagagttgtggccagtggtggcaagaagatcaagactgacaagccttatggaattaatggtggcatggctttgagggaaggagttgatgcatctggcaggaaaggaaagggaaagggcgtttaccagtttgtagacaaatacggtgctaatgtcgatggttacagtcctatctacgacaccaaggactggtctccaaccggtgatgtctacgctggcggtacgactggcttggctatctgggctgtgactctacttggtcttcttgctggtggtgcacttcttgtctacaacacaagtgctt

SEQ ID NO: 14184 - DNA, 371 bp, Glycine max
gcaagctagctaggttgaaaatagtttggttttgtagtaagtgaggtgaggtgccaaaatggtgaagataactcttggtactttcgatgactcttttggtgttgcctctcttaaggcttatttggcagagttccatgcaactctgattttcgtgttcgctggtgttggttcagccatcgcttacaacgagcttacaaaagatgcagccttggatccaacggggctggtggcagtagctgtggcccatgcatttgcactgtttgtaggtgtctccgtcgcagccaacatctcgggtggccatttgaacccagctgttacttttggattggccattggaggcaacatcaccctcattactggtttcttatact

SEQ ID NO: 14185 - DNA, 291 bp, Glycine max
gcataaatgctacattgagctatccaagctagggacggaaaacctgtgcatggtagatccttaatgtgacaagttagcagacgccattgcctctcgaattgaaccttgtcattagcttaaccctgcgggagcatcataggacaatgactgacatgaatatgcacttaattaactgcataacagtcacaaaactagtaaatgcaactatatatatactgcatgtaatttgcttagtccagatcttcaacttatccgctaatcatggctaaaaattccgagcattataagact

SEQ ID NO: 14186 - DNA, 402 bp, Glycine max
ctcgatcgatcgatctcgaacatgagcactggggagcttgtcaacatcgaacctctcgaactcaagttcccctttgagctgaagaagcagatctcatgttctcttcaattgtccaataagaccgatagctatgtggccttcaaggtgaaaacaaccaatccgaagaagtattgtgttcgtccgaacactggtattgtcacgccacgatctacgtgtgatgttatcgttaccatgcaagcgcaaaaagaggctcctgctgatatgcaatgcaaggataagtttcttcttcagagcgtaaaaactgttgatggtaccagtccgaatgatatcactgcagacatgttcaacaaggaggcagggcatgtgtgtgaggagcgcatattgatagtgctttatgttttt

SEQ ID NO: 14187 - DNA, 411 bp, Glycine max
catatatccattaggagacagctacaactaatcgaagaggaagagcaggggcgatccctggaacttaagaagagaagtcttgcacagctgccgtttgcccaaaaatatttcttcagttcacctcattttggcttctccatggatgagtcaaggatttcagatgatcacttcaatttccagcctgcagaagaatctttcagttttccactgcatgccaaatccaggcatacagactccaattactctgatgaggacagcaatcaaggactcaatctcccggacagtccattcgcatttccactagatagtgggatgtaaacagtcatagtttcagatacatatacaagaaatatagagttcacaaacagaaccaggccaatggtagcagctttcttttgatacacaattctt

SEQ ID NO: 14188 - DNA, 413 bp, Glycine max
gtttttctccgtttgcagcacaacgaatttcgaaatcccgtggagaacgtaacgtgctctggtttctggactcgaagatgaaggccacaaaggaattgagcgagcaagtggaggaaaacgaggtcaaggttttggttgaggaggacgacgaagaatacgagtccgtggatgaagtagtagacgacgcagaagatgatgaagacgaagaagaggacgatgacgacgacgaaggagacgacaatgacgacgaggaagatgatgctcctgacggcggtgacgacgacgacgacgaagatgatgaagaagaaggtgatgtccagcgtggtggtgagcctgacgatgacgataacgactcagacgacgactcagacgacgacgaagatgaagacgaggaggacgaggaggagcaaggg

SEQ ID NO: 14189 - DNA, 395 bp, Glycine max
gaagcacatagagaagcattagcactaggagcagcaacaactagtctcagctgaaatggcctcttcagtgatggcatctgtggccctcaaacctgcccctttcactgttgagaagtcctcagtgagaggccttccctctctctcaaggaactcttcttcattcagagttgtggccagtggcaagaagatcaagactgacaaaccttatggaattaatggtggcatggctttgagggatggaactgatgcatctggcaggaaaggaaagggaaagggtgtttaccagtttgtagacaaatacggtgctaatgtcgatggttacagtcctatctacgacaccaaagactggtctccataccgtgatgtctacgctggcggtacgactggcttggcta

SEQ ID NO: 14190 - DNA, 354 bp, Glycine max
cagagaaaaatcggttggggttcgtagtgatgcgctgcgtatttgtgaaattgatgcggcgcggtgcacgctgaagtgaagaatcactatgaatatgactaagggaataactccaagagattattctctgttgctcaagccctgccctttatcttctcttggtttactccattctctccaggtaaccttttatttatttccctcattaggtgggaaagaaatagatggcaacgtggtttgctttgtccagtatatttcccaaacgtaagttggttcaacttttgattcgtcgcttctcattttccctaaattaattgcttcattgcgtcagtgttctctggtcaattggtaacc

SEQ ID NO: 14191 - DNA, 413 bp, Glycine max
caaaaaaagacaaaaactacttccttctctcctttgctgtgttttctttctcaaaaatgggtcgtacctatgttcttatgatggttgctgcattgttgttgagctccaccatggctcaatctccagcttcgtcgccggctttgtcccccacccacacgccggtggccactccacctaggagggcgttgtcgccgtctccgtcgtctgtgtcaccagcggcttcacccgccaccggaaattctcctccggcaccacctacttcttctccttcggaatcgccacttccatcagctgctactcccaacatctctccctcgaccatctcgactccaccatctgaaggaccagctgcaaacggtgccgttttcaacagagtttccggatctgctctgcttctcattttcgctgcggct

SEQ ID NO: 14192 - DNA, 400 bp, Glycine max
aaagatctcagttgggaaagaaattcgagagaaattttctggtgcagttgaagtgttctcctggaggaaccctgcaaatgctagtcctcgtggtgatcacaccaaacatagaagttttgaggatgcaccagtgcaaaaggatttgcactatgcgcaacacaattccactcgatatggcagcagttcaagaagagccatgatctcatcgaacaggccaatatcctcaggtgaccatactggcaggcaaaccataactgggagccgtccatctggtgctcacagagttcaaccagtgtatgacaccaaacaagcaacttatacgcatggtggctctataagaggccgtgatgatcctctgcggaactttgagctcctcaatatcaagaagtaattaagtaaa

SEQ ID NO: 14193 - DNA, 104 bp, Glycine max
aaaaggaatggttcgctacccatattcttatctatcctgaagccaaaggaaatgagatcggaattcctcgaggaattccaattccacattttcaagaaataaag

SEQ ID NO: 14194 - DNA, 395 bp, Glycine max
ctcgagccgtcattgttcactttcaaatcaactcaagagagtcaaccaagaaatatagaagctagggttttgttacatttgtgttagcacgcaatactttgcaaatatggagagcagcttaggagacatgttggttaaggttgtggtgttcattctagttcaagccttggtttaccttatcctctccaattcatcaaacgtgttcaacaagaacatgaagaaatctaacagcttcaggccggcacgttcggtgagcattcgccggatgctcgctttgatctctgattttcctccagaagaagaaccctctccttcaccgaagggtgctaaaacaacatcacttcatcaaagtgatcaataattgtaaggatttaattaaattggggctgcaatta

SEQ ID NO: 14195 - DNA, 395 bp, Glycine max
cggctcgagctattataaccaaacactcttcttcatatgcttcttcttcttcttgttcttgttctatctgtgacgagcatcatggcctcgagagcagtgctattgttggctatgtgtgtgcttccggccatggttgtggccattcgcccagcaaagaaccctttttgcgtgaagggtcgcgtctactgtgacccttgccgtgctggttttgagacctcagcaaccacctacattgccggtgctgagattatgttgcaatgcaagagcagggttagcaacgaggttgtgtacaccaagaaggggtacactgactcaactggagcatacacaatgtacgtggacgaggatcacgcagatcaaatatgcagtgccaagcttgtaagcagccctcaccc

SEQ ID NO: 14196 - DNA, 302 bp, Glycine max
ctcactcaatggcttggcactcgttcctcttattagcgacggccattctcgccgttgtgtgctccgccgtgagcggttgctcgccatcggatagggcggcgctgctggccttccggaaggcgctgagcgagccctaccttggcctgttcaactcgtggacgggcttcaactgctgcctcgactggtacggcatcagctgcgactccacctcctgtcgtgtcaccgacatcaaccttcgcggagagtcctaatacccgatttccgtgaatgcctgtcgttccgattacatgacaggaaaactc

SEQ ID NO: 14197 - DNA, 428 bp, Glycine max
tacgatgcctgcacgcctactctagcatgatcctctggctgaagcccaattccacatcttcaagaaataaggacgcgcgatgcgttcatatagtcgaattggagcttattcagttacacttattaagcctatcctgaatccaaaggaaatgagatcggaattcctcggggaattccaattccacattgtcaagaaataaggtggcatatatgttcatatctgaatcggaattattcgttatcttattaggcctatcctgaagccaaaggaaatgatatcggaattcctcggtgaattccaattccacattttcaagaaataaggaggcaaaaatgttcatatatgaatcggaattattcgattacttactacgccgatccatgagccaaaggacatgagatcggaattcctgggcggtaccaagctcg

SEQ ID NO: 14198 - DNA, 414 bp, Glycine max
  modified_base (364)..(365): a, c, g, t, unknown, or other
cttgaaattggaatttgatgacagcattggaatgagtggcgaggatgtaaagccattgcctgatcatataaaaaatgctctgcataccatttttgatcgctactccacctatttgaattcctttggacccgacgagagctatctacggaagaaggtggagacagagttgggtgcaaagatgattcacttaaaaatgagatgcagtggccttggtgccgagtggggaaaggttacggttcttggaacttctggacttgcaggttcatatgttgagcaaagagcataaaagcaatattttagaaacagtgcatgtaattgtttgtctctgttttatatcatgcttttgaggatgcctgtagactcnnttgatttgttttgcctgaccctttttgtcccaagcgtttgatagcatgg

SEQ ID NO: 14199 - DNA, 406 bp, Glycine max
  modified_base (386)..(386): a, c, g, t, unknown, or other
cttggaaaacccacaggcacgctgagcatggaacacagaaccctagaactcaacctggcttcagcaaaggatctcaaagacttgaatatattctcaaagatggatgtatatgctgtgctttcactctccggcgatcaaaagaccaagactcccgtccacagaaacggcggcaccaacccaacatggaattttccggtcaagttcacttttgatgaatcggtggcgcggcagaaccgtttggccctcgaaatcaagatccgctccgagcgcgccctcgccaccgataaggacatcggccaggtccacgttcctctcatggaactcctcaagcaacctggcgacgataaatccttccagcacgttagttaccaggtcagaaaaccctncggcaaacccaagggagccc

SEQ ID NO: 14200 - DNA, 401 bp, Glycine max
cttctaaaaaaataaaattaagaaattttcatggtaaccattcgtgcagatgaaattagtaaaattatccgtgaacgcattgagcaatataatacggaagtaaaaattgtaaatacgggtaccgtacttcaagtaggcgacggtattgctcgtatttatggtcttgatgaagtaatggcgggtgaattagtggaatttgaagagggtactataggcattgctttgaatttggaatccaaaaatgttggtgttgtattaatgggtgatggtttgatgatacaagagggaagttcagtaaaagcaacaggaagaattgctcagatacctgtaagtgaggcttatttgagtcgtgttataaatgccctggctaaaccaattgatggtcgaggagaaatttcagc

SEQ ID NO: 14201 - DNA, 115 bp, Glycine max
caaaaaccttatttctgatgtttacatttcaggaatttgtggcagttatttagtacgtgaggaaggaaactctgaaaatgtataaaatttgactgaggcttatttaattgatgag

SEQ ID NO: 14202 - DNA, 244 bp, Glycine max
attgaaatggggcacaaaaatattagctctatcctgaagccaaaagacatgacatcactattcctacaccaactgcaattccacatttccaagatatacagctgcacaaatgtacatatatgaatagcaattacctgttttctatattatgcctatcctgaacccaaactaaatgatatctgaatctctcggtgaattacaattccacatttccaagaaataaagtggcatatatgttcatata

SEQ ID NO: 14203 - DNA, 379 bp, Glycine max
cattctccttcttgagatccaggacactctagagtctcctccaccagaaaatcaaacaatgaaaaaggcttccatggttgcaatcttcattacaacattcttctacctgtgctgtggatgctttggatatgcagcttttggaaatgatacaccaggaaacctcttgacagggtttggattttttgagcctttctggctcattgaccttgctaatgcttgcatcattcttcacttggtgggaggatatcagatttacagtcaaccaatatacagtactgttgacagatgggcttcaagaaaattccccaacagtggctttgtgaataatttctacagagtgaaacttcctttgcttcctggttttcagctaaatcttttc

SEQ ID NO: 14204 - DNA, 375 bp, Glycine max
tggtgacaatggatttgaccctctgggactagctgaggacccagagaacttgaggtggtacgttcaagccgagcttgtgaatggacgttgggccatgttgggtgttgcaggaatgctacttcctgaggttttcaccaagattggaatcatcaatgcccctcaatggtatgatgctgggaaatcggagtactttgcttcatcgtcgaccctctttgtgatcgagttcatcttgttccactacgtctagatccggagatggcaggacatcaagaaccctggctctgtcaaccaagaccccatcttcaagcaatacagcttgccccatcatgagtgtggataccctggtagtgtgtttaaccccttgaactttgcacc

SEQ ID NO: 14205 - DNA, 298 bp, Glycine max
gtacatcatagaaggtagcacagtcagcgtaatgggagttgttcaaagaaacgacaatgtgcttatgattgtccctcctcctgagcctttgactaccggatgccaatgggctaaatgtatatttccagctagccttgagggtattattttgagatgtgaggatacatcaaagattgatgtcattccagtgtagttgcactctccagacacctcttaggtattcttctttaaagaagtattttcttacctcatttaaaaaaatggtggttgatgtttgtatattgtaagtgttattggt

SEQ ID NO: 14206 - DNA, 409 bp, Glycine max
gttggcgtatgttgaagaagaagaagagagagagagagagagagagagagagagagagagagagagagagagagagaagggtaaggtaaccctagagtggtgaatcgaattcgaaacgatggaaagtgtttctcgaagaagaggtggaggcattttcgaaagcctctacaaggtcgttatgcgtcgcaactctgtctatgttacctttgtcatcgctggcgccttccttggagaacgggctgttgattatggagtccacaagctctgggaggcaaataatgttgggaaacgatatgaagacattcctgtgctagggcaaaggccgtcagattagtgaccagcttgttagccattttgaagttttattattttcataaagatttgaagtgattaagagctggaagcagtt

SEQ ID NO: 14207 - DNA, 412 bp, Glycine max
tggagcgagtacttgtacgcatagccactatgactatcaccttcgcgaccgttgcaggactcggtggtgcatcactgtcatccacctcatctcgtctcacctcagggtttgtgaaatcgccagtgagtgctaggaatcccttgaggaaagctgtggcaatgggaaatgggagggttacatgcttcgagaggaattggctgcgggcagattacagtgtcattgggtttggattgattggttggctagcaccctcaagcgtaccggctatcaacggtaaaagtctgactggcctcttctttgagagcattggagctgagctagctcacttgcccacccctcctgcccttacttcatccttttggttatggcttggtaccgtggcaccttggcttggtcatctgcctcacttttg

SEQ ID NO: 14208 - DNA, 403 bp, Glycine max
gcggcgatgcaccagatagggcatctacttggacttgatcactctcacaaagaggactctgttatgtatccttacatattgtcctcacagcaacgaaaggtgcagctttccaattctgacaaggccaacattcaccttcagtttgctaagcatgattaagatgttctctgctgccaaactcgcatgactcagcaagccacggtgggggtttggatgtgcttttagttaccactttctctcttggatttgcttacgtattgctcctttggtattagtcgttcctgtcccaccttgcttttggaattatgtgctttttatatttctgattggtccaatgttaattggatgtcctcccaaccctgtggtgacttttcggtttattctcacgtggctgtttcttata

SEQ ID NO: 14209 - DNA, 202 bp, Glycine max
taggcgtctcaattcttttatcgtcatctactagtacttgatggcagtctcaaatagaacgatgctatctatcctcacatataggcctcacaccatctaaacgctcttcttcttaattcttacatgactaacattcatcttcagttcgctaatcatgatcaatatcttctcacttatctaccttccttcactcatccaccca

SEQ ID NO: 14210 - DNA, 375 bp, Glycine max
aggcaaccttattgatggacctggaagttcaaagcttggttttcggacaactgctgctattatttttgcacggttacttttagtgcctctggttggacttgggattgtcacgttggctgacaagcttggttttcttccctctgatgacaagatgtttcgatttgtcctcctccttcagcattcaatgccaacatccgtccttgcaggtgctgttgctaatttaagaggttgtgggagggatgcagctgctgtattgttttgggttcatatttttgctatattctcaatggcaggatggattattctatatctaaacatactcttctgagactgtatagagcaaattgatccaattcattttgttcattttgatga

SEQ ID NO: 14211 - DNA, 397 bp, Glycine max
gggcgacgcaccggcattgccagagactcttaaaaattacaacaagctgttgtctcttggcttcaagattgtattcttgtcaggaagatatcttgacaaaatggccgtaacagaagcaaacctaaagaaggctggcttccacacatgggagcagttaattctcaaggatccacatcttatcactccaaatgcactttcatacaaatcagcaatgagagagaatctgttgaggcagggatacagaattgttggaatcattggagaccaatggagcgatctgcttggagaccacagaggcgaaagcaggacctttaagcttcctaatcccatgtactacattgagtagtaccttcacctctctcaacaatctagctagaagttgctcctatctatatgt

SEQ ID NO: 14212 - DNA, 392 bp, Glycine max
caatcattagcaaaagcaagaagaactagtctgagcaggcatggtacaattagcgatctcatgttcaagacgaggacccgaggccacccactccgatcattccccggcaacaccaaccagatctctgtgatggacatccacgttctaaagtcgaacactatctagatatcggtgaagacctgttaaagatatcacagcatctgaatatcgatgaaattgactaggacatcctgagcagacgaagcactggacctccccataatacttctgaagtagattcatttttgggttcagatcgccgggccccaacaattcgatctgaaacatggcactcaagtgaggcaagaagtgaaagcttggaaatcgggtctgaggtccttgccaatttaact

SEQ ID NO: 14213 - DNA, 396 bp, Glycine max
atttagcaatacggaatcccaatgagcctaaagcaaaccttgttactcctggaaaagaggttcatcgccctcaatccactttcaattacctatgcaggttaaagcctccatctgaatcccttggtgctgcttctttagccctgcactatgcaaatgttatcatcatgatcgagaagttagcaacatctccatacttgattggtgttgatgcaagagatgatctgtacaacatgttaccgagacgtttgagatctgcacttaggaccaagctaaagccatattccaaggccatggctgcagcagtctacgatgcaggtctagcagatgaatggaccgaagcaatgacgggtatgttagaatggttagccccgcttgctcacaacatgctaagatggc

SEQ ID NO: 14214 - DNA, 417 bp, Glycine max
cagcaactgttgcacaccaccacatgacccctctactgcggcaccctcagtcccaacaacaccatcaaccccaacaacaccatcaaccccatcaacaccatcacaccctccctcaggaggaggtgggtactataactcaccaccaacttatggaggtggtagccccccaacaccaatcactgtgagcccaccttcaaccccaattgaccccggcacccccactatcccctccacacccccttaccttccttccccaactcccttcactggtacatgcaactactggaacactcacccaggaatcatttggggattgctaggctggtggggaaccttaggccatgcatttggtgtctctagtatgccaggatttggtgccagtctcagcttgccacaagcactttccaacactagaac

SEQ ID NO: 14215 - DNA, 410 bp, Glycine max
tgaatctctcagcccctcaaaccttccgctctaaggaaatctccaagagcaatgttgttgacgatatggtcaacagcaacgccatcctctatgagcccggtgaacatccagaccatgtggttgtcattaagtacgtgccttatgtaggggacagcaagagggccatggatgagtacacttctgagatattcatgggtggaaagaacacaattgtgttgcacaacacatgtgaggattcactgttagctgctcctattatcttggacttggtccttcttgctgagctcagcactcgaatcgagtttaaagctgaaaatgagggaaaattccactcattccacccagttgcgaccatccttagttacctgaccaaggcccctctggttccaccgggtacaccagtggtgaat

SEQ ID NO: 14216 - DNA, 276 bp, Glycine max
aagcccatcagtattaattctctttcggtgtctgtctagtctttataagattgcagaaataaatggtcgcaagctgaaagttgtactaaaatttattttttataaaaaaatccaaggttgtattaaatattgcttaaatttagaaaattctacagtaaatggacatctttatatatttatttatgtataataccgtaacattcttgcaagcatttaactcattattgtcattctactcattctacgatatatttatatttattcctattacctttt

SEQ ID NO: 14217 - DNA, 272 bp, Glycine max; identical to SEQ ID NO: 13882

SEQ ID NO: 14218 - DNA, 272 bp, Glycine max
aagcccatcagtattaattctttttcggtgtcggtctagtctttataaggtgacagaaataaatggtcgcaagctgaaagttgtactaaaatttattttttataaaaaaatcgaaggtagtattaaatatgttatatgtatgtatagtgcggaataaatgcagccacgtactatatataatggtacatacggtgtagggctgtacaagttgggcatcctatttcaatattaacgaccactaataaatattaccattggagttattacgtatt

SEQ ID NO: 14219 - DNA, 358 bp, Glycine max
ttcacaatctctgtttcagctttctctcttttctacaatggcttgcaccaccgtcgtgttgacgctagtcgccgcattgttggtaacctccgtcgtggctcagtctccggcgtcctcaccagctctgtctccaaagcgcacccccgtcgccacacctcagaagtctccctcgccggcgatttctccctccgccgtgtcgccgtcgtcctctcctcccgctccggtggtgaacactccgtctccgtcaccaaactcagtcgactctccgccatctcctccgcagtctccgtccgtgtcaccagccggtgttccctccgtcactccttcagcaatctccgctcctcccactggagcaccg

SEQ ID NO: 14220 - DNA, 291 bp, Glycine max
tcccattgtttcctttcctcctttccttgtttccgaggaagtccgaccacatatgctaaacaaggaaactaaattctaacctccttcagatctacaccacccttctctttttttccagtttcataaattctacaccatgggcacggaggttctactgccacaagattgtttcacccaccgcatcgctgttccaccggctgggttttcccggagaagaacctctgagacacacatcaacaattacttcatggtcacgcataaacccggttacccaacccgaacagataaaac

SEQ ID NO: 14221 - DNA, 240 bp, Glycine max
tcccattttgccccttcctcctttccttgtttccgaggagggccaaccacatatgctaaacaaggaaactaaattctaacctccttcagatctacaccacccttcctctttttttccagttcattaaatcttacaccttggccacggaggttttacggccacaagattgtttaaccaaccgaatcgttgttccaccgtcggggttttcccgaagaagaacctctggcacacacaacacca

SEQ ID NO: 14222 - DNA, 412 bp, Glycine max
  modified_base (396)..(396): a, c, g, t, unknown, or other
gacacttagtgcagaagaaataaggagaatacttctcccatatcgggaaggatggctgccagaacaacaggaacaagaagcagcagaaggggatctggtgttggtgtaattgttctctccacttcctgtctattactgtactattttaagggaagcactgtacagtatacctagaagccctacaggtatttttcttaatctggtttctgcagcttccctcctttgtgcatgccattctcgttgtatgatgcatataggaaaaaggatacgcagcgttggatatctgcgaagcaacgattcctgtgtacaacagcaagggtctgctattagagtatgatcgccctttgctaagggcctgagggcaatattttttggtgagaactgtgtaatatgtangaatttgacattttca

SEQ ID NO: 14223 - DNA, 393 bp, Glycine max
gattagtgtggcctagttgttgttttctcgatgagaaaggcttcttccactatgcattgcgcacttctgcgcttttgggttcccttgttgctgcttgctagcttcagctatgctccttctgtttcggccacaactgaaatttcagggaatgaagtgaacacagatgggaaggtgataaatgaagagttagcaaaaccaagtctaaaaggacatgatgaagaagcaaagttcaaaggattttttccaaaaccaattcctatagttaaaccaattccaaagccaattcctattattaaacctattccaattccagtttataagcctattccaaaaccaattcccattgttaagcctattccaaagtcaattccagttgctaagccaattcctaat

SEQ ID NO: 14224 - DNA, 341 bp, Glycine max
tagcctttaagtgaaatcctgagcttccattgtgcgcactggtctattacaacgaagccctctccatcctgttctatctgtgactagcatcatggcctcaatagcagtgttattgttggctatgtgtgtgcttcctgcaattattgtggccattcacccagcaaataaccctttttgcttgaagggtcatgtctactagtacccttgccttgctgatttcgataccttatctaccacctactttacttgttctgatattatgttgcaatgcaatagcattattagcaactaagtttgctacacgaaaaaagtttacacctacttaaccctaacatacacaa

SEQ ID NO: 14225 - DNA, 301 bp, Glycine max
ccttttattgaaatcctgagcttccattgtgcggactgagtctcttacaacgaaaccctcttcatcttgttctatctgtgacgagcatcatggcctcaagagcagtgttattgttggctatgtgtgtgctttcggcgatggttgtggccattcgtccagcaaagaaccctttttgcgtgaagggtcgtgtctactgagactcttgccgtgctggttttgagacctcatctactacctacattgctggtgcttagattatgttgcaatgcatgagcagggttagcatctaggttgtgtactc

SEQ ID NO: 14226 - DNA, 387 bp, Glycine max
gtcccaaagagctaacaagagattcaagaccggcatggctaatgaagaggaacagaaaaaccacctcttcggcatcaaagatctcggtcacaagactctccttcagagtgatgcactctatcagtatatacttgaaaccagtgtctatccaagagagcacgagtgcttgaaagagatacgcaagatgactgcaaaacacccactgaacatcatggcaacaccagcagacgaaggacaacttctgagcatgcttgttaagctcacgaattcaaagaacgccttggaaattggtgtattcactggttactctctgctctccactgccctggctcttccccctgatggaaagatcttggctttggatgtgaatcgcgaatactatgagtt

SEQ ID NO: 14227 - DNA, 410 bp, Glycine max
gtgaattagctatgaacaatgatgagctacatgtggttatgttcccattccttgcatttggccacattagtccatttgttcagctctccaacaagttgttctctcatggtgttcatgtcactttcttgtcagctgcatccaacattcccagaatcagatcaactcttaatctcaatccagccatcaatgttatctcactaaagttcccaaatggtataaccaacactgctgaattgccacctcacttagctggaaatctcatacacgcccttgacctcactcaagatcaggtgaagtcccttttgttggaactcaaaccccactatgttttctttgactttgcacaacattggctcccaaaattagcttctgaagttggcatcaagtctgttcatttctcagtctactct

SEQ ID NO: 14228 - DNA, 402 bp, Glycine max
ggtgcactgatggccagagtatatgatgatgaagtgaggaagtggatttctggtgttggtgttgacagtgttgggaagaagcttgtgaactcaaaagatggacctccaacctttgagcagcccaagatgactctggagaagctcttgctgtatggtaacatgcttgtccaagaacaagagaatgtcaagagagtccaattggctgacaagtacttgaacgaggctgctcttggaaatgctaacgaggatgctattcagaggggaactttcttccagtcttgaattggaggcaaagcaaacttggcaagtaaatatttctgttcgtgaaggttgttgtactaatccaagtgctagaagttgtgatggaacttgcgtgtaacattcttagcattctcaatgtct

SEQ ID NO: 14229 - DNA, 408 bp, Glycine max
ttcgaatcccaattccatattttcaagaaataaagaaccacaaatgtgcatgtttcaattccaatcatttggtctcttattacgcctatcctaaatccaacacaaatgagatcggaattcctccatgaatcccaattccacattttcaacaaatttcctagcataaatcctcctatatcaattacaataatctgccatcttattacacctatcctacaaccacttgaaactcagatctccataccaactactaactccaattctacattttcaggaacttacctaccactctttaatagtatgcaaatcaaacttgtcaagtaaataattctgtccatgaaggatgctgtactaatccaagtgctagaacttgtgatggaacttgcgtgtaacattcttagcattctc

SEQ ID NO: 14230 - DNA, 380 bp, Glycine max
gggtactggtatctaaaaaatgggttctaaaactaatgctgtcgggccatagagcacgaaggccgctgtcaatatttgctgtgcttggtctttgctgtttcttttatcttttgtgagcatggcaaataagtggatctgtgtagggtgattaccttgcattgaaagttaataacctgatgactgactgcactgttttacccaatttgagttttgaatctcatcacaatgatgtagaaattgtcgaacctgctgagccaaaagctaaagagttcaagccgtgtgatgtgaaatatactgattatacaccttgccaagagcaagaccgagcaatgacatttcccagagagaatatgatctatagagaaaggcattgtcccgct

SEQ ID NO: 14231 - DNA, 284 bp, Glycine max
cctatcatactctcatccacaaaaatcaattacatatactctatcaaacaacataataccacattgtcaactaatatccattaaccttaaataatcctcctttctcacctatttccatattcttctcccccctcaccatcatcacataaatcaacactcaattcaaaattttctaaaccctactatactataaatataccaatccttttccccctgaaacctccttcttcccctctcctgttccaacccttcctcttaccctatacctttcccactttcttcct

SEQ ID NO: 14232 - DNA, 404 bp, Glycine max
tttctgagcagccaaacactctctctctgtctctcgaaaatgctcagtgagcagagagagcctgaatgatgtccaggtaagcgtgtgtcaactaacggcttgtgagagacatcgaaggtaaccacctcactcacgctgctatcatcggccaagacggcagcgtttgggctcagagtaccgacttccctcagttcaaacctgaggagataactgccatcatgaatgactttaatgagcctggatcacttgctccaactggattgtatctcggtggcaccaaatatatggtcatccagggtgaacccggtgctgtcattcgagggaagaagggtcctggtggtgttactgtgaagaagaccggggcgggcctgaacaattgcatttatgatgaaccaatgactcca

SEQ ID NO: 14233 - DNA, 371 bp, Glycine max
atggatttgaccctctgggactttcggaccctgaaggaacaggagggttcattgagccgaaatggctagcatatggtgagataatcaatggtcgttatgcaatgttgggtgcagttggtgcaatagcacctgaaattctaggcaaggctggtctgatccctcaggagacagcactcccatggttcagaaccggtgtgttcccacctgcaggaacctacaactactgggcagactcctacacactgttcgtgtttgagatggcactgatgggatttgcagagcacagaagattccaagactgggccaaaccaggctctatgggcaaacaatacttcctaggactagagaagggtcttggaggttctggtgag

SEQ ID NO: 14234 - DNA, 130 bp, Glycine max
gagcggaaaagccgggctggcgttcataggctgccctgacgcataaaaatactataagtggaaaccgcgactataagataccagcgtctgaagctctgccttctgtcactgcgtaccgatacgcgctttc

SEQ ID NO: 14235 - DNA, 128 bp, Glycine max
cagtttctttatcaaaagcaagaagaactagtctgtccagtttcaattcgaaggaggggtggccttatcaactctatccttctacccctaagaactgaattcagtatttctacgacaactccaatttc

SEQ ID NO: 14236 - DNA, 405 bp, Glycine max
cttgttttttgcaaattcgcaacccacacagcaagggaaggtgcgagtgagtgagtatggcgtctccattatcagctcaattggttcaatgtcagaactcacttccacctcttcagggtaattttagccaagatgtgtctaaggttcaaaggtcgcgtgtggtatgttacggtaccagatcaccgcttggttattatggtaaagcattgacatcaagatcacataacgccctgaggttttctgtcacgcgacaatctgaagcacggtcaattggatataggagaatgacatgtgtcaatgctgcagacaatgttgtagagcttcaagccaaggtgacaaccaagtgtttctttgatgtaaaaattgggggtgaacctgtgggccggattgttttggccctatttg

SEQ ID NO: 14237 - DNA, 304 bp, Glycine max
cttaaagttttcgaataggcaacgcacacactagatgggggggctattgattatgagggtgctatggcttctaaactcacaattgctaataacgtaactgattaacacctagatatgatacttaaatccagtacctttaatgagttcaaagctcacaatgaggattggacgaaaccctatgatgctttctgtatcatgctgaactatttacatacatatcatctcactcaatgaggtcatctggctcactactcacaagatcaccgtcaaaaacttgtatccaaatacagtctgcattatcaga

SEQ ID NO: 14238 - DNA, 403 bp, Glycine max
  modified_base (381)..(381): a, c, g, t, unknown, or other
cagaaagagattgaaaaggcaaagcagcaactagatgggaaggatgttgattatgaggctacaatggctactaaactctcaattgctaagaaagtttttgctcaagagaaagatttgatacttaattcaagttcctttaaggagttcttttctgagaatgagggttggttgaaaccctatgctgctttctgtttcctgcgggacttctttgaaacatcagatcgcactcaatggggtcattttgctcattactcagaagataagctagagaaacttgtatccaaggacagcctgcattatgagataatttgcttccactactatgttcaataccatttacatttacaattatcagaagctgcagaatatgcaagaaagaanggagtgatactaaagggagatc

SEQ ID NO: 14239 - DNA, 166 bp, Glycine max
caatatgagctcactcaaatgcaataatactactattcacagaatcattttataactcattaaataacattttatcaaaatcccatcatattgccattaaccttataaattccatgtttccagcattttttccatattcttcatctccctaactatcattacttaa

SEQ ID NO: 14240 - DNA, 232 bp, Glycine max
  modified_base (106)..(106): a, c, g, t, unknown, or other
aaaaagaatggttcaatccatttactaacatacagaaaacattgtaaaatacttttacgcgaggttttgttgaaaactcgaaaacattagaaaacgacaaatattnttagttttaactctacggtatagaagaaatagaaaaggatcatataaaagttttaaatttaaaacggatcgtacacccggttacgaattattctaattataacgaatccctcgaattttaggggca

SEQ ID NO: 14241 - DNA, 292 bp, Glycine max
gaatcggctcgagccagtccacgaaaaggcttccaaaacccacggagaggaaaatcaagcgacattggtcccttgaaacttcgagatcggaaaacctctcggtaggggcaaattcggtagagattacgtcgccagagaagataagagcatatttgttgaggcgttgaaggttatatttaaggaacaaattgataagttcagagttcatcaccaactgatgagagagatgggagatcagaccagtctacggcacgcaaacatcctgcgtctttacggttggttgcatgatgct

SEQ ID NO: 14242 - DNA, 394 bp, Glycine max
atactacacaattcacaatcccaacacccattgtggagaatcagaatctaactagccaatagccatgaagagacagagagagaacgaagtaacaacgttggaaagctgggacatgcaaatttgttcaacttcaatcacacccgacacaagtgtttccagttccaccatatctccggaagatgtatttgagtgcaaaacgtgcaaccgcaagttcaactcttttcaagcgctgggtggccatagggcttgtcacaacaagagggtgaagatggaaggtgaagaacaacaactcaaaacaagggcaaaatatctgggtttgggaaaacacagtgagcccaaaatgcataattgctccatttgtggtcaaggtttctctctgggccaggccttggga

SEQ ID NO: 14243 - DNA, 396 bp, Glycine max
ctgaacaccccttcatggtacactgctggagagttggagtacttcacagacaccaccacactcttcatagttgagctctttttcatcggttgggccgagggtagaaggtgggctgacatcatcaagccaggctgtgtcaacactgaccccatctttcccaacaacaagctcacaggaactgatgttgggtacccaggtgggctttggtttgacccacttggctggggaagtggttctcctgagaagatcaaggagttgagaacaaaggagatcaagaatgggaggttggccatgttggctgtgatgggggcatggttccagcacatttacactggcactggtcctattgacaacctctttgctcaccttgcagatcctggccatgctactattttt

SEQ ID NO: 14244 - DNA, 290 bp, Glycine max
aagattaattcctcattatcttacaaatgtcacttcaaggttagttcttttatactttggttatacccccccatatctctcattaacacttcatttagatatatgtaatcattcactttacactaataatataccttctctctacatcatgaactaatatacatctcatacatactattctaccatttacttaatacatgaacacatacccaacttctttcattctctctataacataactactgctataattaaatatcacctaatacaatatgacaaccaatacaccc

SEQ ID NO: 14245 - DNA, 361 bp, Glycine max
cgcatttccacgaaaatggcttcccaaaacccagcggaggaagaaaattcaaagcgacattggtcccttgaagacttcgagatcggaaaacctctcggtaggggcaaattcggtagagtttacgtcgccagagaagttaagagcaaatttgttgtggcgttgaaggttatatttaaggaacaaattgataagtacagagttcatcaccaactgaggagagagatggagatacagaccagtctccggcacgcaaacatcctgcgtctttacggttggtttcatgatgctgaccgtgttttcttgattcttgagtatgctcataagggagagctttacaaggagctgagaaaaaagggtcatc

SEQ ID NO: 14246 - DNA, 348 bp, Glycine max
cgcatttccatttaaatggcttcccaaaacccagcggagggggaaaattcaaagcgacattggtcccttgaagacttcgagatcggaaaacctctcggtaggggcaaattcggtagagtttacgtcgccagagaagttaagagcaaatttgttgtggcgttgaaggttatatttaaggaacaaattgataagtacagagttcatcaccaactgaggagagagatggagatacagaccagtctccggcacgcaaacatcctgcgtctttacggttggtttcatgatgctgaccgtgttttcttgattcttgagtatgctcataaaggagagcttttacaaggagcttag

SEQ ID NO: 14247 - DNA, 408 bp, Glycine max
cagctggagtaactggcagacccaatgtcgattggtgtgaatctcataagacggaaaccattcgcaccaacgttgctgggactttaacattggctgatgtcagcagagagcatggactcttgatgataaattatgctactgggtgcatatttgagtatgatgcagctcatccagagggttctggcattggctttaaggaggaagacagacccaacttctttggttctttctattccaaaactaaggctatggttgaggagctcttaaaagaatatgacaatgtgtgcaccctcagggttcgcatgccaatttcatctgacttgagcaatccacgcaatttcatcaccaagatttctcgttataacaaagtggtcaacattccaaacagcatgacccatttggatgaac

SEQ ID NO: 14248 - DNA, 406 bp, Glycine max
cgcatttactttcagacccaatgtcgattgctgtgagacgggtaaaaccgaagccacattgacccacgttgctcttactttaacattggctgatgtcagcagacagcatggactcttgatgataaattatgctactgggagcataatttgattgtgctgcaaatgatatatatagtgatcgcattgacttttacgaggaagacagacccaacttctttggttctttctattccaaaactaaggctatggttgaggagctcttaaaagaatatgacaatgtgtgcaccctcagggttcgcatgccaatttcatctgacttgatcaattcacgcaatttcatcaccaagatttctcgttataacatagtggtcaacattccatacagcatgaccattgttgatgaact

SEQ ID NO: 14249 - DNA, 176 bp, Glycine max
ccccattattccctttcctccttaccttgtttcccagtaggtcgaatcacatattctcaacgcggaccctaaattctaaccttctaaaaatctacaccaccctccaatttttttccaatttcataattcctacaccatactcacgcatattctacgcccacaaaattatttcaccc

SEQ ID NO: 14250 - DNA, 342 bp, Glycine max
tggatatgtttaattatttcgcttctgtcgattctagtagtcctgtatatactgatgatggatgatataacctgaatggtcggtatgttgatggaaatcggattattgtggaatttgcaaaaaggtcttctcgtgggtcccgggaatattcagggcgaggtcctcctcctggctctggacgctgcttcaattgtggccttgatggccattgagcaccagattgcaaagctgctgattggaagaataagtgttaccgctgtagagatagaggacatatagaaaggaactgcattaacagccccaaaaaatttaggcgaagactgaaatattcacgctcaccaa

SEQ ID NO: 14251 - DNA, 215 bp, Glycine max
gatgaatggtccgaagcaatgacgggtatgttagaatggttagccccgcttgctcacaacatgctaagatggcaatccgagagaagctatgagcaacactgctttgtttccagggcaaatgttttgctggtgcaaaccctttattttgctagtcaagaaaaaacagaagcaataatcactgagcttcttgtgggtttgaattatgtgtggagata

SEQ ID NO: 14252 - DNA, 381 bp, Glycine max
  modified_base (150)..(150): a, c, g, t, unknown, or other
ctcctcgcatactggagttgaaagggagcatagacattgctgacggagatcaaggcgataccaactctgctgggaagacagcaaagaagatctatgacaagaaatttgcagaactttcagggaatgacatattcaaaggggatgcaccgncttcatctgctgagaaatcattgagcggggccaaactacgagagatgagtggcagtaacatctttgctgatgggaaggtagaagctagagactacctaggtggtgtacggaagccacccggtggcgagagcagcattgccttggtataatttattagggtctaacttatcttcatactggtcttgtttggtttaattaatttttagtggggatgtgttattatattatttg

SEQ ID NO: 14253 - DNA, 333 bp, Glycine max
cataacgcttgctttcttagatcgcagcatagatcttggtcgggttactaaggtgaggctaagtacattaaccacaagggtgatattctctatgaccctagctttggagacctgtcatctattcgcttattgaatcgatatacatcatcttaacctactatttaattatagctatgaaccctacttcacaagatgactgtcaccttcttcagaactggcgcgaaaatagaatcttgataatacttatggatgatacagtatccagaagctgtgaaaagcactgatgatatgacttacttgattacggaacatattatattcatagtgtcttga

SEQ ID NO: 14254 - DNA, 404 bp, Glycine max
aataacttgtaactcgcgtagtgcacgggacagcttaagggacgccgcgctgatcaacgactccttacgtaaacgacgacggtgtcagacaaacggtgccggttggtggtgccgtcacgctattacgctaatcgtatgcatcagcctcatcaaaaccccttctttctcttaatttagaaaccctaattcagaagaagaaagtcaccttcttcagaatttgcgcggtaatggcatcttcttcagactcatggatgaaggaatataatgaagctgtgaaacttgctgatgatatcactggcatgatttctgaacgtagttcattccctgcatctggaccagaaacccagcgacatgcatctgctataagaaggaagatcacgatattggggaccagacttgatagc

SEQ ID NO: 14255 - DNA, 372 bp, Glycine max
agcttgctttcatcatcaagaaatattgacgcaggggtgggcatatatgaatgggggttatttgttttcttattacgcctatcctgaagccaaaggaaatgagatcggaattcctcggggaattccaattccacattttcaagaaataaggaggcaaaaatgttcatatatgaattggaattatttgttttcttattaggcctatcctgaagccaaaggaaatgagatcggaattcctcggggaattccaattccacattttcaagaaataaggaggcaaaaatgttcatatatgaattggaattatttgttttcttattaggcctatcctgaagccaaaggaaatgagatcggaattcctcgggggtaccg

SEQ ID NO: 14256 - DNA, 376 bp, Glycine max
tgctcgtccactctcaagacctctctccctctctgctcgccttctctcacaggcccatttctagaaccaccttctctctctatcctctccttttgaagccctccaaatggctccacatagagcccaaatccaggacttgccatgccctcgtcgccgctttgtctgcagaggtccaagtgcccgaaactttcgacgacacggatgaggacgactgtgctgatggctccaccgccaccaacaccgtccccaccaccaagcctaagaaaggcaaggccgcattgcctctcaagagggacaggacgagatctaagaggttcttggaaattcaacaattgagggagcgtaagaaagagtatgacttgaagacagcaatatc

SEQ ID NO: 14257 - DNA, 399 bp, Glycine max
gttttaacaatttcctagaagtattttgtacaaaagtgagaccctcaaggaacaatttccgagcttttgttcaagaggaggtaccgaggccaccccctccggtcatttcccgggaacccgaaccagatctgggtggtggagatccacgttctaaagttgaagacgatctagatatcggtgaagacctgttaaagatatcacagcgtcggaatattgatgaaattgacgaggacatccggagcagaggaagcaatggacctccccataatacttctgaagtagattcagttttgggttcagatcgccgggccccaacaattcgatctgaagcaaggcactcaagtgagggaagaagtgaaagctgggaaatcgggtctgaggtccttgccaattcaactg

SEQ ID NO: 14258 - DNA, 356 bp, Glycine max
gcatgcaaaacatgcacagcatcaatgcggagttaatgccaagatggcaccagacatagctattaatattgatacaaatcccttttttatgacaagggcaggagttaacaagttagagcaaggtgatcaaatagccatagagactaacatgctgcagccaaaggcacatcaatatggtggaatcggtgctgcagctggggccactgctcatagaaaagttggtcctgttcagtatggtatgacaagaatgttctagaagaagggtgtttttcttgtgaatattttggccagggggagcaatcctgttagagaaaaagacactttttaaggatggaactggtgtagtctctggtgat

SEQ ID NO: 14259 - DNA, 394 bp, Glycine max
ccaatctcacccatttcaaaaaaaggccgttagtgttactattcgtaaaatggccactcttgttctttaccaattctttctcaaactcttgctcctaatttcagtctttcagctttcctttgctgctaggagactcaaccagctggttcaggaccagtcacagttactccattaccacaacggtcctcttctatacggcaaaatcgccgtgaacctaatctggtatggtcacttcaaaccatcccaaaaggccatcatcaccgatttcgttacctcactgtcatccccatcgtctcagagcagccagccatctgttgccacgtggtggaaaaccacggagaagtactaccacctgagtcccaagaacaagaaagctgcttcttctctttctcta

SEQ ID NO: 14260 - DNA, 361 bp, Glycine max
ccaatcgatcaccgtttcggcaaaacggcgtctatatgggtatgatgaaaatggtcacgcttcaatggctcctatactctctatagctattaatgctaatgctaatcatacagatttgcttcgcaattaaaatacttatacagagttctcatctaccaaatgagggttacttcattcccatatgctgctttttgtatactgcgaaacttctttgaacctaatcatcgctctcaacgtggaaatatcgctcattactaacatgatcaactacagaaactcactgtcatggacatcctgtattatcagacaatcatctgtcactactatgtgcaataccattgacatgtactaccatcagaat

SEQ ID NO: 14261 - DNA, 296 bp, Glycine max
gccttcggtttcagcccaggtacactgcctacaggctcgctcactttaccaggacagctgggttaatcttgcatacaaataccagcgttatgcctagagcacgtgctagcacggaacagcacgttgatcaaatcgccatagattcatacatgcttcagccaatatctcattagcatgtatgcatcagcgcattaactctatcctgagctcatagaaaatgagatcgctatcactatggtatttccagtttcacatttaaaagaggtaatgatcctgatatgttcatatctaaaatt

SEQ ID NO: 14262 - DNA, 307 bp, Glycine max
aaacactcttatcacaaagcacacagcaaagctcattcgggagcggaaaaatggcagcagcgttttacatggcatctgttattcgcatcactggctggcaaggctcgaaagctagtcccatcagccttagtaggagaaagaggttagcatgagataagaccgtgatcaaacacgtctacaaatgacgccgatgcattagtgcatacagagttacacagctgtggcatactgtttatccagccggatagtctaatcgatcaggccagtgaccagtcgagcgagactattgcacatcctcgctttacag

SEQ ID NO: 14263 - DNA, 346 bp, Glycine max
ggctgcggttgcagccgaggagcctgtcctgcagtcgggggctctggaactggcagcgtaagtcatattgctacaaagaccagggttagacctagagcacgtgctagcacggtacagcacgttgatcgtatcggcgtagagacatccatgcttgagccaatggctcatcagcatggtggcatcagtgctgcatctggtgccactgctcatagaaaagttgagcgtgatcagcatggtatgacaggaatgctctagaagaagggtgtttttctggtgaatattttgtccagagtgagcaatcctgttagagaaaaagacactttttagggatggagcttttgtagtc

SEQ ID NO: 14264 - DNA, 382 bp, Glycine max
gcttccatgaaagagcatgttgtaaagagaattgcagacgcgacatgtcatgcaagtgcttagtttcaatttcagcttggaattcagtgagcttcaagttcaatgagcaagtgcgtaatacttcaatgcactctaagtgcttattgcaaattgtattcttgcggttagttttaattaaagttgtttatgtttgtctcagattacagatactctactattttatattattttattccatttgctcccctcccacatttacatagcgtttgaatttgtggattggacctcaatgggttcacacatttagtctgatattcatgacctcaattgctataataatgttagaccggttcgcccagacatcgataatgattatatggtg

SEQ ID NO: 14265 - DNA, 390 bp, Glycine max
tgattaaggaacatcccaagttatgtcaatctcatgatgaatgcatgaagaaagggagtggcaaattttgcgctcgttatccgaatcctgagagtgagtatggatggtgtattgactctgattctgaagccctaaaaggcttcttgaagatgcctacaacatttgccgagtaacatggtatgcccaatgaaaaagttgcacacaaagatgcgtctactacttcgaataaatgtgtgctccatgcaataagtagtttttgtttccaactcagttggtaatgatggttcatgtttgtttttgagcctacaagtaatttttcttttggatcttgatatccaagtattctttggatatatgaattattaattatagcctaatgtcagtgtatat

SEQ ID NO: 14266 - DNA, 375 bp, Glycine max
caaatccctacattcctatctcgcctacttcggctccgaataatttgctaggcaacaggatgtggaggtatgctacaacagaatctatatcacacctgtataatgtcctcatgactcaaccacccaaaggatgcatacatattcacgaagcgatacaccgaatatggaacttcgcactttcgtagaccacatgataacaatattacactgatcactgaagagctaagagacgttggatcagaactctaactcgatctggatccaatggatgcgtaaacaaagtagctctttgctggcagcacgttatagataccctgatgtcagcactagacggactttaccgaatgcatttgcaacagcaccatacatgtggac

SEQ ID NO: 14267 - DNA, 420 bp, Glycine max
gtaacctgggatttcggttcgaggtgaggaagtggatttctggtgttggtgttgacagtggggggaagaagcttgtgaactcaaaagatggacctccaacctttgagcagcccaagatgactctggagaagctcttgctgtatggtaacatgcttgtccaagaacaagagaatgtcaagagagtccaattggctgacaagtacttgaacgaggctgctcttggaaatgctaacgaggatgctattcagaggggaactttcttccagtcttgaattggaggcaaagcaaacttggcaagtaaatatttctgttcgtgaaggttgttgtactaatccaagtgctagaagttgtgatggaacttgcgtgtaacattcttagcattctcaatgtcttaagtgcaaagagaagatgctaagtttg

SEQ ID NO: 14268 - DNA, 367 bp, Glycine max
gtgaggaataggatttctggtgttggtgttgacagtgggggggataagcttgtgagctgaaaagatggacctccaacctttgagcagcccaagatgactctggagaagctcttgctgtatggtaacatgcttgtccaagaacaagagaatgtcaagagagtccaattggctgacaagtacttgaacgaggctgctcttggaaatgctaacgaggatgctattcagaggggaactttcttccagtcttgaattggaggcaaagcaaacttggcaagtaaatatttctgttcgtgaaggttgttgtactaatccaagtgctagaagttgtgatggaacttgcgtgtaacattcttagcattctcaatgt

SEQ ID NO: 14269 - DNA, 198 bp, Glycine max
tagaatgcgaaacccgacagagctgttcagataccagccctcaaaccctggagactcccatgtaccctcttctagtgccacacttcacgttacacgattccaacatatactcaactaactaattaacgtatcggcattcatacatgtcatccttttgctatttaatgtcggatgatgtgatgatatattttctgttca

SEQ ID NO: 14270 - DNA, 351 bp, Glycine max
gaagaagattaagattaaagtgtgatttgatgattatgagttgaagtgtgagaggtgaagagatgaacgttagccatgcttcggttcacccagttgaagaagcatcagctactgaaggtggtggtgacttacacgtttacgctacttagggaaggatgaatgatgatatatgaattgctatcatttgctgtcttattaggcctatcctgaagccaaatgaaatgagatctgaattcctcggggaattccaattccacatcttcaagaaataaggaggcaaaaatgttcatatatgaattggaattatttgttatcttattaggcctatcctgaatgcctaggaaatgagat

SEQ ID NO: 14271 - DNA, 414 bp, Glycine max
ccccttccttagcctgggattccggttcagggaacccattgccggcctttccaggaaggaaaaccaaaggggaggttccgtctttccatcatgaacgctcttcccattctcctcttcttcctcttcgtttctgcattagtttctgcgaagaaaactggtgatgtgacggagctgcaaattggcgtgaagcataaaccagtatcatgtgaagttcaggcacacaaaggtgacagagtcaaagtacactatcggggaaaactcactgatggaactgttttcgattctagctttgaaagaaataatccaattgaatttgagcttggtactggtcaagtgatcaaaggttgggaccagggattattgggaatgtgtcttggtgagaagcggaagctgaaaataccatcaaaacttggc

SEQ ID NO: 14272 - DNA, 359 bp, Glycine max
tgaccgcagtatgtgctgtgggactcctccagattgtgagtggaaggcacaagcaggtaacatatgtgttgcatcctttgactggagctgtagtggaatctgcaagtcggtagagaagatcaaatatgtgcactcaaagtgtggtgaaggggatggagctgtttggagtgccttagtttaggtttgatgggttcaacagaaagccaactaactaattcacgtgttggtatgcatacctcccagctttttgtttttgggtgtgggaggatatgatgatatatttttggttcaactatagtctatacttggtattatgtgacatagacctctcttgttacatgtatctctttatatttttg

SEQ ID NO: 14273 - DNA, 386 bp, Glycine max
aagatgtataactttccacttcgcagagataaaggatcgctttcagaaaataatgtaagaggtcgaataatgcttgaaaagaatggaaaaaccacaaattcctttcctggggatgtgaccacagaaaggattgctgctcttcaggaagcatactggagtatggcatcagcactttctgaggcagatggaatcgattacactgatcctgaagagcttgagttgttggtcagaactcttatagatctggatgcaatggatggtaaacaaagtgtttctttgttggcagagtgttctagttcccctgatgtcagcactagacgggctttagcgaatgcattggcagcagcaccatccatgtggactcttggaaatgcaaggatgggggc

SEQ ID NO: 14274 - DNA, 209 bp, Glycine max
accaatctatgccaagcccaatacatgcaatctctatcggaatcacttacactcaagtgtgcatggctagcctcacagttggattcatatctgttgcattatgaagtgatgtggtgaatgcactgatggagcatgcgcatatacagtaccagcaggtgccgagtgaagcggacagttgggtctgctagattgaaaaagtagaagctcgc

SEQ ID NO: 14275 - DNA, 319 bp, Glycine max
tgattgatgttcatcccacgatgtgtcaatatcgggaaggatgcatgaagaacgggatgggcaaatgctgccctctgtattcgcatcctgaaagagagtatggatggagaattaactctaactctgaagccgtaataacataactgaagatgcctacaacatctgccgcgcgacctggtatgacgactgaaaaagtctcacactgagatgcacttactacttcgaataaaagaatgattcatgcaatatggacttattgactgcaactaagattgtgcatgatagttcacagtggcttttacaacctgcaattaatgtc

SEQ ID NO: 14276 - DNA, 401 bp, Glycine max
gccaggtggttcactttcgatctctggagagaccgaaggaggaggactttttcttggagatgtcaaggctttttacatatgatgatgtggtggagagagtagcccaacatcttggtttggatgatccgtccaaaatacggcttacaccacacaactgctactctcaacatccaaaaccccagcctatcaaataccgaggggtagaacatttgtctgatatgttagttcattacaatcagacatcggatatactatactatgaagtacttgacatccctctaccagaattacaagggttgaaaactctgaaagtcgcatttcatcatgccactaaggatgaagtggttattcatactattcgacttccaaagcagagcattgttgggatgttcttgatgatc

SEQ ID NO: 14277 - DNA, 409 bp, Glycine max
gccaggtggttcactttcgatctctggagagaccgaaggaagatgactttttcttggagatgtcaaggctttttacatatgatgatgtggtggagagagtagcccaacatcttggtttggatgatccgtccaaaatacggcttacaccacacaactgctactctcaacatccaaaaccccagcctatcaaataccgaggggtagaacatttgtctgatatgttagttcattacaatcagacatcggatatactatactatgaagtacttgacatccctctaccagaattacaagggttgaaaactctgaaagtcgcatttcatcatgccactaaggatgaagtggttattcatactattcgactcccaaagcagagcattgttggggatgtccttgatgatcttaaaac

SEQ ID NO: 14278 - DNA, 404 bp, Glycine max
  modified_base (275)..(275): a, c, g, t, unknown, or other
tgattaaggaacatcccaagttatgtcaatctcatgatgaatgcatgaagaaagggagtggcaaattttgcgctcgttatccgaatcctgagagtgagtatggatggtgtattgactctgattctgaagccctaaaaggcttcttgaagatgcctacaacatttgccgagtaacatggtatgcccaatgaaaaagttgcacacaaagatgcgtctactacttcgaataaatgtgtgctccatgcaataagtagtttttgtttccaactcaatttntaaatgatggttcatgtttgtttttgagcctacaagtaatttttcttttggatcttgatatccaagtattctttggatatatgaattattaattatagcctaatgtcagtgtatattggtctcttgtgt

SEQ ID NO: 14279 - DNA, 332 bp, Glycine max
tgattaatttcatcccaagttatgtcaatctcatgatgggtgcatgaagaaagggagtggcaaattctgcgctcgttatccgaatcctgaaagtgagtatggatggtgtattgactctgattctgaagccctaataggcttcttgaagatgcctacaacatttgccgagtaacatggtatgcccaatgaaaaagtcgcacacaaagatgctcttactacttcgaataaatgtgtgctccatgcaataagtactttttgattgcaactcaattggtaatgatggttcatgtttgtttttcagcctacaagtaatttttcttttggatctttat

SEQ ID NO: 14280 - DNA, 388 bp, Glycine max
gccaggtgtttcactttcgatctctggagagaccgaaggaagatgactttttcttggagatgtcaaggctttttacatatgatgatgtggtggagagagtagcccaacaacttggtttggatgatccgtccaaaatacggcttacaccacacaactgctactctcaacaaccaataccccagcctatcaaataccgaggggtagaacatttgtctgatatgttagttcattacaatcagacatcggatatactatactatgaagtacttgacattcctctaccagaattacaagggttgaaaactctgaaagtcgcatttcatcatgccactaatgatgaaatggttattcatactattcgacttccaaagcaaagcattgttaggga

SEQ ID NO: 14281 - DNA, 66 bp, Glycine max
ataactctgtaacgactgtgggataccgagaaagattacgattgaatacttaacggaccggaacct

SEQ ID NO: 14282 - DNA, 398 bp, Glycine max
  modified_base (348)..(348): a, c, g, t, unknown, or other
gcagagagtgcggtaggctcttccgagacccgaagcaggcatggggatcgatctcaaggccggaggtaagagcaaaaagaccaaaagaacagcacccaagtccaatgatatctatctcaagctcttggtcaagctttatcgcttccttgttcggagaactggcagcaacttcaatgctgttatacttaagagattgttcatgagcaaggttaacaaacccccattgtctttgtcaaggttgattaagtatacgaaggggaaggaagataagattgcagtggtggtggggtctataaccgatgatattcgtgtttatgaagttccaccattgaaagttacagcactcangtttacagagactggccgtgcaagaattgagaaaggcaggcggtgaatgc

SEQ ID NO: 14283 - DNA, 370 bp, Glycine max
gttgtattttggagggaatctcaaaaatgcacttgacggcatctgaaatgggagagggagccggtgtcgcgcaagttgtagattcattttaggaattagggaccatttccatcatggaattctgtataatgctttgttgctgcttgttcaataactgtgtatagttgggtgtttattattattattagccattaggctcttcctattgtttgtagtgctttgtctgtaaggtggctttcattattcattctaagatggtgaacttgctgcaatttaatcattgtaatattcttaaacatatatttttattgttttaaaaataaaagcggtgaaaactgaagaccacatctgctttgtggccttgtttcgc

SEQ ID NO: 14284 - DNA, 375 bp, Glycine max
gttacactgctctagttacaaacttatccccaagagcagcgagaggatgatgtgagaaatggttttacatactgtggtttaattgagcatattgaaatattaagatctggtgaaaatgcgtctactgcatatgtgacttatcgggatgcttatgccctggaaactgcattattgctaaatggatccatgatcttggaccaatgtatattcatttcacgctatgaagcttatgtaaatgactatgataattggagtagtcatgcatcaaagcctgaatacagtattacaacctcacaggatgttcacatggataagtttgttggttcccctggagaagcactaactatggctcaagtggttgtcaaaacaatggtg

SEQ ID NO: 14285 - DNA, 388 bp, Glycine max
gtggcttctttggtgttactaatacttcttctgaacaattgtgtagtgctttttccctcaaaatgtcgtgtcccaaatcagtaccccaatcttctttgtaaatgcagcctatgactcatggcaggtcagattattctctttctcaagaaacattctatttttggaatggtgttcatttggaattttggtcctacttaaaactgataatatgtttatattcattgatcaattgattggcttgtttataaggttaagcaacgttggttatatatgaggatttatacagaacaacataatatataatagactttagattttaactttgaattcccagtgaaaaatactatgattgcttaattatctcaatattgaaaattctgcttacata

SEQ ID NO: 14286 - DNA, 416 bp, Glycine max
  modified_base (59)..(59): a, c, g, t, unknown, or other
  modified_base (64)..(64): a, c, g, t, unknown, or other
agggaagggtcctaccatcatctatgtttggtctggattgctctgcattattatctctntgctntgggtgtacataaaccctccttcaggaagaacacaagattacatgaatttccaattcccttgagtttgagggtagatagatgaagttcctctgcttcatcatctatgtttggtctggattgctctccattattatctctttgctttgggtctggattactctgcttcatcatctcgtagtaatagtagtactgtgcctttgttgtgctagattgattacattcaattgtgattatatcttactttctgttatgtgtgggccacactctcaatatgtgtccgagaaaaacaagtaggtatctgttaactttttttggtaatatctcataatgactgagatattaactcaatca

SEQ ID NO: 14287 - DNA, 252 bp, Glycine max
cgcactactttgcatcatatggagcacattttaacatacatctatactcctgctgtctcggtcactctagttcatgccttggattaccttatcctatccaattcatcaatcattgatcaacccgaacatcattaaatctaacagcttcatcactgcacattcattgaacattcgtccgatgctcgctgtgatctctgaatctactccagaagacgatccctatccttcacctaatactgctaacacaacatc

SEQ ID NO: 14288 - DNA, 392 bp, Glycine max
  modified_base (287)..(287): a, c, g, t, unknown, or other
ctttctctctcttctttttactctctctctgtctctctgtacgctttctcgttcgagatccctcaagggatccactaactgaaggagaaatggggttgacattcaccaagcttttcagccggcttttcgccaagaaggaaatgcgaattctgatggtgggtctcgatgcagctggtaagaccaccatcctgtacaagctcaaacttggagagatcgttaccacaattcccaccattgggttcaatgtggagactgtggaatacaagaacattagtttcactgtctgngatgttggtggccaggacaagattcgtcccttgtggaggcactacttccaaacacacagggtctcaattttgtggttgaccagcacgacagggacagagttgttg

SEQ ID NO: 14289 - DNA, 365 bp, Glycine max
aaaaaggagcatgttgattatatagaaagtaaagggcaagaatcatttttgtttaccatgggtaaggacaccatcgctgacataataacctatataagaaatgctgacatgaataaaaaaggaatggttcaaataccatttactaacataacagaaaacattgtaaaaatacttttacgcgagggttttgttgaaaacgtcagaaaacatagagaaaacgacaaatattttttagttttaactctacggtatagaagaaatagaaaaggatcatataaaagttttttaaatttaaaacggatcagtacacccggtctacgaatatattctaattatcaacgaatccctcgaattttaaggggcat

SEQ ID NO: 14290 - DNA, 394 bp, Glycine max
ctcgatccggaaaaaactaatagagttatataagtggtaggggcatgtcttgtcagaggattctgatatggaccatttcaggaacatactgaacatgggaaagaagtttgcaaaacttgaacttaaagcttgcattgaagagttcgaggataagctgaataagtttcacacagattaaaaggaacaggaagttactgctctaaatgctcaaattcatcatcagatgattggcagcagggaaggttttaccgtgactataaattctgaagatcacttgtcatctaattcttcttcagatgaaacagaaggtgaaataattgatgcctacacttaaaaagccactaatccctttaatgagagatcagaatctaaacttgtgtcagaatcacattct

SEQ ID NO: 14291 - DNA, 412 bp, Glycine max
cgtcgaacagggtttaaaccttacaaaagatgttcggtagaggccaatgaaaacaggatcggaacagcctgcatccaaggtgaagaaaaaggtcccaagagattacgcttgaatggggaggcttcaacttgatgcctgatattcccatgcaaccacacaaagaaaatctctagttttgcatatatttctaagtttccttgttcattgtctgtattgcttattttctaattctgcagctcacgaaacttgtcgtgtaagtctgtgtaccatattaaattactacatacacactttttactttcttggcctgatgttactgcagttaaaaactccgcttaaatagacttttaccagaaacatttagtaccgcttgagcatttgatcatcttaaggatttatgatgcttcattct

SEQ ID NO: 14292 - DNA, 303 bp, Glycine max
cttcaccttcttccctcaacgtgtcttctttctaaggttgcaggatcagatctcgttccctcgccactcatcctcggccgcgcgtcgctcgccacgcgccaccatcaaccgcacctctcgccgtgaatgatcaataatatattcaatattttattgcaacttggaactagcaatggcatctgaagaagttctgaaggctgttttccctttcctggacggtgttgatcttgcttcttgtatggctgttgataagcagtggaaagacatagctagcgatgatttcctttggaaatgtctgtgtgc

SEQ ID NO: 14293 - DNA, 344 bp, Glycine max
  modified_base (20)..(20): a, c, g, t, unknown, or other
cacaatcaatcacatttcanaggcatgtttttttcaacagagttcgttctacccacgagtcgattcaacaaacccagacgctaattctcccttctctatccccgcaccatcttcttcttcttcttccatttatccctcagtggaaacaacagagaatctcatttgggaagagccaaacacgactacagaagaagccatggaaaacgttctggtcacggtcccgggtgcgattctgcatctgatagaaaaggattccagcgtgcaccttgcttcgggcgacctcaccatatcgaccctcggagaaggcgacaaagtggtggcggttctggcatgcgtcggcgatc

SEQ ID NO: 14294 - DNA, 353 bp, Glycine max
caaatacatatgtgacatcctctgcatatgggaaccttacgaatgcatattcttctatgtcaatgctaccacaggctcagtcaggagttcttatgcgacagcctctgctttctcgctatgaagcatctcttggtgttatgaatcctgtgagcaagtctgtggacttagttaagcctcttacaatgactccccaggaaaaaattgaaaaattgaggaggcggcaacaaatgcaagcaatgcttgctattcagaaacaacagcaagaattcggccatcaagttcctagcactaataaatcaatgaatgaaaaatgtgccatagaaatccatagtcaactctgtgatggggctgat

SEQ ID NO: 14295 - DNA, 405 bp, Glycine max
atggggcgagagctggggagagaatggatattacaagatctgcagaggtcgaaatgtgtgtggagtagattccatggtctcaactgtagctgctatatatccatccagccattaaatacaaagatatgcctgattgtggttgtgatgtgatactggactaaggggagtttgtataaatatttatgttgcgaactttatcatttggtactggtaaaattatctccgtataggatcaggaaactgctaagaccatgttgcttatgtagtatgtaatttctgtatgtatgcttgacatatacaagtgggaaatccaaggaaatgtgtggtcctaaaaatggtgcaagataagcaactctctatggagattggcagggtaaggctgtccaaactgcaacaggggaatac

SEQ ID NO: 14296 - DNA, 250 bp, Glycine max
attcaactctatcttcacctttttccctcaacttgtctattttctaaggttagattatctgatctctttccctccacactcatcctctacctctcaacactctccactctccaccatcaaccacacctttctccattaataatcaataatatactcaatattatataacaactcttaactcacaatctcatccaaataaattcttaaaactatttttcctttcctttacaatttacatcttacttcttat

SEQ ID NO: 14297 - DNA, 293 bp, Glycine max
cttatctcaagatttatttatcccgaaaatcccgtgtctgagcccgaaaaacccgaaactcccaagaatcccgctatttaaatctcccccaccgccaatgtaccgtttacaactaaagtccgatcccccaccgccaatgtaccgtttacaaccaaagtcccctaccccactgccaaacgcaccaccgaagcaaatcaatattaagggcctgtccgtcgtcaaagattacttatctgactacggctacattgaatcctctgggccatttaacgattctttcgatcaggaaataa

SEQ ID NO: 14298 - DNA, 366 bp, Glycine max
tcagaaccctcgatcactcccacgcgctcctatatcctctgcttcaccgtcgctctctccaacgatcacaacaacatcgtcatcccatggcaaacgccgcatctggtatggcagtccatgatgactgcaagttaaggtttttggagctgaagacaaagaggacacaccgtttcatagtttttaagattgaggagcagcagaagcaggtcattgtggagaagcttggtgagccagcccaaggctatgaagatttcactgccagccttcctgctgatgagtgccgatatgctgtttatgattttgagtatctgactgaagggaatgtccctaaaagcccaatttttttcattgcatggtcccctgaca

SEQ ID NO: 14299 - DNA, 385 bp, Glycine max
ggtttttgcaattaaagctcaaaatcatggcatcagtgcgattggaaaattgcaacaaggaataaatcctccatcatggaatatgttgctctttcatggaagtcacctaggcctagttatgaaaacagggcttatcaccgggattttgtccctcactgaaggtattgcagtaggaaggacatttgcagctctcaaaaactacaaagtggatggaaataaggaaatgatggcaattgggtttatgaatgtggttggctccttcacttcctgctatgttacaacaggtgctttctctcgatcagctgttaacaattacgcaggagccaaaacagctgtgtcgaatgtagtgatgtctgtgacagtcatggtaacactcctttttctc

SEQ ID NO: 14300 - DNA, 354 bp, Glycine max
attgtttgttgttgtaactcgttcttcttcttttgttgttgtgtggttgtgtttgttttttctctcacctgaaaatgtcttgctgcggtggtaactgtggttgcggaagctcctgcaagtgcggcaacggctgcggaggctgcaagatgtacccagacttgagctacactgagtcaaccaccaccgagaccttggtcatgggagtggcacctgttaaggctcaatttgagggtgctgaaatgggtgtgcccgctgagaacgatggctgcaaatgtggaccaaactgctcctgcaacccctgcacttgcaagtgacgtgttgggagagcaagcttcaagcagagatagcccttaa

SEQ ID NO: 14301 - DNA, 390 bp, Glycine max
gctacttgattccgttgtctctgcagattcttaatctctgtctggttaaaagtttctagaggatggtcatgctgcagttgaattttgaagtttggactcaatgcatagcctttgtttttttaacaagctcttattagtctgccatttttccttctatgtaaattatggaatatattttccttacctactcctggggcatattttcagacaagggtttgccaacctgaaggtaaataattttgcatgaaatgggttggtttaccaagttgcttaagggctctgattataaaattttacgagggcaataccatggcaaatatggagaggacagaatttgggataatcatcatagatcgatggatgatttgacagatattgagaaagaagaca

SEQ ID NO: 14302 - DNA, 210 bp, Glycine max
accaacacgcttggacccaattgaaccgggccagaattaaatggcccgaccatttggcaacgggccttccagggccaaactgaaggtggcacgcccattaagaaccaacggttggcccgccagtggttggcccccccggttggaatggaaatcaagttcggccatggccgtttcaactttttccggggtttcccaaaaaccgtggttggc

SEQ ID NO: 14303 - DNA, 359 bp, Glycine max
gccatggatccttacaagctccggccatccagcgccttcaattctcccttctggactacaaattctggtgctcctgtttggaacaacaactcctctttaaccgttggagctagaggtccaattctgcttgaggattatcatcttgtggagaagcttgcaaactttgacagggaacgtatcccagaacgtgttgtccatgccaggggagctagtgcaaagggtttctttgaggtcacacatgacatttctcacctgacatgtgcagatttccttcgagcccctggagttcagacgcctgtaattgttcgtttctcaactgtcattcatgagcgtggtagccctgaaaccttgagggaccc

SEQ ID NO: 14304 - DNA, 80 bp, Glycine max
ttattatgcccttccttaatccaaaatgaaatgacatccgaattcctcatggaattccaattccacattttccacaaatc

SEQ ID NO: 14305 - DNA, 370 bp, Glycine max
cgagccaggctagccactcccatccgcactgttcagaagatatacagtgaggctgactcagaaaatataccctttggggacaccattttcactcgatctagtgcgggaaatcgcccattcctactgatagaaccactatataaagttaatggtgaagataaaactaagccttcaacacgttcaactcgtgcaagtgaggaaaaagatttcaagattgatgaaaccatggcatctgacaccaaagaagatgagaactttgcagcaacattaacctcctcacctgatgtaaattccaaggataaatccaagtcactgtctgaagcccagccaaaaaaggaaaatgcagtagatgcaggaaagggacctacag

SEQ ID NO: 14306 - DNA, 398 bp, Glycine max
ctcgagccggaaaaaactaatagagttatttaagtcctatgaacatgtcttgtcagaggattctgttatggaccatttcaggaacatactgaacaagggaaagaagtttgcaaaacttgaacttaaagcttgcattgaagagtttgaggataagctgaataagtttcacacagataaaaaggaacaggaagttactgctcgaaatgctcaaatccatcaacagaagattggcagcagggaaggttttaccgtgactataaattctgaagatcacttgtcatctaattcttcttcagatgaaacagaaggtgaaataattgatgcttacactgaagaggcaactatgcctttaaatgagagatcagaatctaaacttgtgtcagaatcacattctggtg

SEQ ID NO: 14307 - DNA, 105 bp, Glycine max
tccaacaacaccctcttctcgcgttgtctccaaatcgctccgaattacccacacgcaaacgacaacaaccgttctcgtttcacacctgcataactcggaataaca

SEQ ID NO: 14308 - DNA, 314 bp, Glycine max
cgctctccaacaacagcagcaccatgctccgtctcacactgcgtcgcggctttggccgtcgtcgccctctccgggagcgcgttcgctggttttgaaggacaaacccagaacaagttcatcgtgacctacaatgtcgtccccgacgtgttcggtctcttcgccttctacaccatgccccgcaccctccgagaggccaaggatctccacttcgactgggcttctgagcgcaacgccgtcgacaacaacaccgacctctactgccgcaagggagaccaccgcgtctgcgtgctcttcgacaaggctggcagcgtggc

SEQ ID NO: 14309 - DNA, 85 bp, Glycine max
ctgtaaagaaaaagtatggaggaatgctgcccaaaaagccgccacgcatatctaaggaccatgaacgtgcttacttcgattctgc

SEQ ID NO: 14310 - DNA, 149 bp, Glycine max
tatatatatatatatatatacacacttgcgattttgtacgtgctttagtatggattacagtttaaaagttgtatcagaacaggtaggctctctattctgtaaattgtgctaagttttataatttataatatagagtttaaatgcctttt

SEQ ID NO: 14311 - DNA, 366 bp, Glycine max
ataaattatactccatgcactctactaactcggaattcgctcgacataaaccttccatcctctatcataacataataggcagtatcaatatccttaactctaccttccgataactaagactatctttcatagcatacaataattatcatctctaatattaacacagattcactaattccattttttaaaaaaaattaaaaataccatcaaatacctaatgatctcatcgatcctaaaattaattctataactctacttaacaacttcctacttttccttatatataatactataaaagctaacattattcatgacctaaggtttttcctattataaatcgtaatccattcacatttccaaacaaaa

SEQ ID NO: 14312 - DNA, 278 bp, Glycine max
tctacatccgttctcatcatttgcatacgcatcgagagcatagttacaatatcggttccccttaccttcccataatcaatattatatttactattcattacaattatcattttctctaatatataaacaacctaatcactactctctctaaaacaaattatatataccttccactccataatgatctcatccacccaataattaatacattaactctacctgacaactttccacctttccatctatttcatactattatatcctacattattcatcta

SEQ ID NO: 14313 - DNA, 297 bp, Glycine max
caagagcagtgttattgttggctatgtgtgtgcttccggcgatggttgtggccattcgcccagcaaagaaccctttttgcgtgaagggtcgtgtctactgtgacccttgccgtgctggttttgagacctcagctaccacctacattgctggtgctgagattatgttgcaatgcaagagcagggttagcaacgaggttgtgtacacgaagaaggggtacaccgactcaaccggagcatacacaatgtacgtggatgaggatcacgcagatcagatctgcagtgccaagcttgtaagca

SEQ ID NO: 14314 - DNA, 340 bp, Glycine max
tgaagtgactgattgcagcgatcataccagcttctttatggatgtgtacattgaaggcattccgtatgattaataactcaactcgatagctcatgatagttatcacgaattagtaaagactattgcacatatgtttgacactaccattctgatgtggacttaaatggattgaattcaacccgtaaaatgtcatgttctaacttattaagattgaaaaggaaatttgaatattgatggtgatttacctttgaaaaatttattataaactgttaataagtttaaaatctcaaatgtggatgcattcatgtgataaattcattcaccttaaaaaacttttact

SEQ ID NO: 14315 - DNA, 172 bp, Glycine max
atatatatatatatatatacacactttctatttgggtcagtctatattatagattacgatttaaaagttttatcataacaagttcgctctctattctgtaaattgttctaagttttaatatttataatatatagtttaaattcctttttaaaaaatataaatatttataatt

SEQ ID NO: 14316 - DNA, 378 bp, Glycine max
ctggaagtctcgttgactttgttgaataattgtgtgaggattgaagcttgatgcatacgtatgggtagttgaattttttttccctgtcatttgatgtctacctttgaagcgaaccaatatatgattcttgagggaattagggctcaaaatgttcagagttaaccaatctattatctaactaggtaaaaatctctcccagatgtcaaatgttgcgaactcgacaaatattatgtggcatgactgtccaattcagaaacaagatagacagcagctgcttcagcaaaaaggctgtgttatatggctaactggcctcagtggttcaggaaaaagcactattgcatgtgctttgagtcgaagcttgcactccaaaggaaaact

SEQ ID NO: 14317 - DNA, 393 bp, Glycine max
agacgaatgagctggtggcggttaagaagatagcgaacgcggtcgacaatcacatggacgctaagcgtacgcttcgtgagattaagcttcttaggcatttggatcatgaaaatgtaattggtttgagagatgtaattcctccacccttgcgtagagagtttaatgatgtctacatagccactgaactcatggatactgatcttcaccatatcattcgctccaatcaaaatctgtcagaggagcactctcaatacttcttgtaccagattcttcgtgggcttaagtatatacattctgcaaacgtaatccatagagatttaaaaccaagcaacctgctgctaaactcaaattgtgacttgaagattattgattttggtcttgcgagaccaactt

SEQ ID NO: 14318 - DNA, 272 bp, Glycine max
cacgttcaccacaactaagaaatagacgctatactgggtcgcttaaatctctgggccagctcttaccactattattcgtcccagtaccctcattctagcttcaatcatttccattattcccatcgctggcttctccacttcaacgaccatcaataacccaatctccatttctagatacatttctagacttcaatgcacgcacctttcaaatccatatagccagaaattcactccatctcctaaatacctaccaaaccttacttattcacaat

SEQ ID NO: 14319 - DNA, 359 bp, Glycine max
cgaaaaatactgacagcattgtgttgtgcggttacagaagatgagtgaagacgaggagatgaaagatcaggctacgccttcacacttgctttcttcagttcctccatctacattgcaccatttgaagggaatagcatcaattattgaaaccggttcgtactcaaaggaagttcgtcgaattgctcgtgccctgcgccttacatttgcatttaggcgtgaattgacaacaccagttctctcatcttttcttgattatgttcttactcccgcttctgaacctcacactaagttatcctcttatctgcctaatcctaaggaaggtgatcgagagatggaagtggacagtgcaacatctacta

SEQ ID NO: 14320 - DNA, 149 bp, Glycine max
ctcgagccgctcgagccgtttgcatatgcaagggtaaggttgtgtacaatatccctcccccataccttcgcatagcgaagagtctctgggcaatggggtacgaattttattttttttaatgttgaaacagtttgtccaggtctctctct

SEQ ID NO: 14321 - DNA, 391 bp, Glycine max
cacgatcaccaccgcaaagcgatccaaaatccgtgtgcgagcttgttgtcaaggatgctaacggagatgatgtagatctctacttttacaagggagaagtccttctgattgtcaatgttgcttctcaatgcggcttgaccaactccaattatacggagctgaatcaattgtatgacaagtataaagaccaatgcctggagattctggcattttcatgtgatcaatttggtaagcaagaaccagaaagccctgattaaaatgtggattttgtctgcaatcgcttcaaatctgaattccccatctttgataagattgaagtgaatggggacaattctggtcctttgtacaaattcttgaagatgtggaaatggggaatttttggtgatgatat

SEQ ID NO: 14322 - DNA, 371 bp, Glycine max
  modified_base (9)..(9): a, c, g, t, unknown, or other
ggtactgcngctcaaggctgaagcataccattaccaccatagatccaaaatccgtagactagtttaatggcaaggatgctaagggagatgatgtatatctctacttctacaatggaaaagtccttctgattgtcaatgttgcttctcaatgcggcttgaccaactccaattatacacatctgaatcaatcgtatgacaagtataaagaccaatgcctgtatattctggcatttccatgtaatcaatttgttaagcatgaaccataaagcactgattaaattgtggattttgtctgcagtcgcttcaaatctgaattccccatctttgataagattgaagtgaatgcggacaattctgctcctttgtacaaa

SEQ ID NO: 14323 - DNA, 342 bp, Glycine max
cacgatcaccacaactaagaaggagaagctattggtggtcgcttagatctctgggccagatcttaccacagtcaaccgtgccagagccgtcatggtagcttcaatcactggcattatgtccatcgctggcttctccactagaacgacctacaataacctaacctgcattgctagatacatttgtagagtgcaatgcatgcacgtgtcaactccatatagccagaaaaacactcagactctgaaatacctaccagaccttactgatgcacaatcgacataggaagaatgagataccatgtttacgaaggagatgtaatgccgtagcttgatagatccacagtt

SEQ ID NO: 14324 - DNA, 277 bp, Glycine max
cacgatcaccaccgcaaagcaatgggcgctatactttctgccttaactggcggtgccgcaacggcggcgacgtcttcgccggagagttctgcttctagggtccagtctttccactcttcggcgcgctggcagctccacttcaacgagctcaaagaaaccaataagctcgttgtgatagatttctcggcgtcgtggtgcggcccttgcaaattcatagagccagcgattcacgccatgttcgaaaagttcaccgacgttgacttcgtcaagatcgacg

SEQ ID NO: 14325 - DNA, 196 bp, Glycine max
tctcaacctactctgacaaccagcccggtgtgttgattcaggtctatgaaggtgaacgaacgaggactcgtgacaacaatttgcttggcaaatttgagttatctggaattcctcctgctcccagaggtgttcctcagatcactgtttgcttcgacattgatgccaacggtttattgaacgtgtctgcggaggacaa

SEQ ID NO: 14326 - DNA, 398 bp, Glycine max
gggaaagaaaagccacttcaaatttcagccccataccataggcattaaagtccacacacacagagcaacactgcactgtgtggaaacgaaacatggcaagagtggtggcactccaacagaaccaactatctttctctaccttagcttcctctctttctgacttcagtggaaccagacttcaaactcaacttcagttcaagagaaagcaatgccatccaaaagggtctttctacgtctccgcatcgagcaccaagaaaatcctaataatgggaggcaccaggtttattggtgtgtttttgtctaggctccttgtcaaagagggtcaccaggtgactttattcacaagaggtaaagcgcctgtcactcaacagttgccaggtgaatcagacagtgattat

SEQ ID NO: 14327 - DNA, 398 bp, Glycine max
gggaaagaaaagccacttcaaatttcagccccataggataggcattaaagtccacacacacagagcaacactgcactgtgtggaaacgaaacatggcaagagtggtggcactccaacagaaccaactatctttctctaccttagcttcctctctttctgacttcagtggaaccagacttcaaactcaacttcagttcaagagaaagcaatgccatccaaaagggtctttctacgtctccgcatcgagcaccaagaaaatcctaataatgggaggcaccaggtttattggtgtgtttttgtctaagctccttgtcaaagagggtcaccaggtgactttattcacaagaggtaaagcgcctgtcactcaacagttgccaggtgaatcatacagtgattat

SEQ ID NO: 14328 - DNA, 371 bp, Glycine max
tcactttaaagttacatagtttttcattgttttacttaatgtacaatggctgcttcaacaatgactctctcttcatcatcattggctggccaagctatcaagcttgccccctccacccctgagcttggtgttggaagggttagcatgaggaaaacagcctccaagactgtttcctcaggaagcccatggtacggcccagaccgtgtcaagtacttgggcccattctctggtgagcccccatcctacctcactggtgaattcccaggtgactatggttgggacactgctgggctttctgctgacccagagacttttgccaaaaaccgtgaactcgaagtcatccactccagatgggccatgttaggagccct

SEQ ID NO: 14329 - DNA, 327 bp, Glycine max
tataatggctcgggaacttatgaatgagattaggtgccctggtgatcaatcatgaacgacagttcacgcttggatcactgagatggcatcttacctgaaatccatagatggaaaccacttgctggaagctggtctggagggtttctactgccagtcaaagcctcagtctaacccaaacttcaatgtaggaaccgatttcattggcaacaaccaaatcccaggcattgatttcgcaacagtgcactcctacccggaccaatggctatcaagttctagttatgaggaccaaatctcatttttaggccgttgggtggattaacacattcc

SEQ ID NO: 14330 - DNA, 232 bp, Glycine max
cactctatatatcaaacaatactccaacacaccacataactagggttagttattatcactatttacactacctctctcactgactcctttagctgagtcttaaatctagctatatatacatacaatcactcacagtctcatacacatcatacactaaaaattacaacctcacacaatacataacacgttaccaaatatccaacaaaacacacatcaacaataataactcaca

SEQ ID NO: 14331 - DNA, 177 bp, Glycine max
  modified_base (52)..(52): a, c, g, t, unknown, or other
  modified_base (88)..(88): a, c, g, t, unknown, or other
tgtttgtccaaaggttgttgcaaaaggtttcaggtgcattgacagggatcanggtgtctggtatcttgaccatctggatgtaccttgngatgaggtctacactactgagccactacagggaatacatatagcttctgaacaagagcttgtaattggaggagaagttgcatgtggggt

SEQ ID NO: 14332 - DNA, 291 bp, Glycine max
tgttggtaaaaaaaaaaagacagagaaaacgcaagtttctggtaggacttccccctttatgtatatttgtgaatgtgataagggatttaactggaattaaaaaaaggggggattcacgaagatttaattactaaatgaataacttacccatgaatcatttccccggggtatgtttcaagttcccttatataattaatgcaaattggattttgattataggatatgtttccaaaaagattcaacgtactttttatgggtatacgattaaaaaaaaaaataataccttaatag

SEQ ID NO: 14333 - DNA, 104 bp, Glycine max
aacaactcctattaagttttcagttctcacaaatgaaaaagtaaaaatattatatatacatatatatatatatatatattctcttcgagtccgtcgaaaaagaa

SEQ ID NO: 14334 - DNA, 288 bp, Glycine max
aacaactcctattaaacttacaaatctcacaaattagccagattaatcattatatatacacatatatatctatatacactctcatcgaatcctacctaaaatacatcaatggcaacccctagctgcaaactgccatagaagcatactacttccaatcactacctaagtctcccacagacttaattgtacaaaccgatatccttaacaacactaccctacaacccatagatgattcaacagtgatcctacaacaccaccaataactaccaacgtgcctttaacacgacc

SEQ ID NO: 14335 - DNA, 451 bp, Glycine max
atgagacccgctaacacgtacagaattaataggtctcataggtgagttcatgttctctactgcgactcatccggtgctcttaagcgaactgaataggaacccttcaagtagttcatgaacactgcattttgattgaccattctgaccgattcaaacaaccaagattgtagatgggttttgatcacatgaactctaattgctgaacatggattggatgctgcatcaaataagacaagttctctcagcatatttgcttaatatggtgtggcatagcatcttaaacattgcttttagacatgaaaagattaatgacatattcattactcagttgtaagatatgctaatatgaactgaaaatttcatcaatattggcgtatctgttacctaagtccattttttgaaaataatgatttttactgtatgatatacaattaccattttaaaattaatt

SEQ ID NO: 14336 - DNA, 101 bp, Glycine max
cttcatgcctgcagtgtacttacagatctctcgtgaattcaattcacattttaagaaataagagcaaaatggcatggttcaattgaattatttgcttctta

SEQ ID NO: 14337 - DNA, 214 bp, Glycine max
agaaaaccaaaaaataatgtcaatggaaatgatggcaacggaacgtgtttgttatgttcactgcaacttctgcaacaccattctagcggttagtgttccattacagcagtttggctaacattagtgaccggtaaaattggaccatggtcccatttggtaataagttaccatggaaccttaatttaaaccttttccccttaagaaccttaaaaac

SEQ ID NO: 14338 - DNA, 440 bp, Glycine max
  modified_base (394)..(394): a, c, g, t, unknown, or other
ggaagtactgctgcaacccacagcattagaggcagactgagatggcatatgatgcccatgcaccacagcagggtaactcaaaaaggatcagaaagtaagatctctgagtgtttccagatgcaatcatttttaaagagtagaaaaagccgagcttcaagaacaaagatgaaattcaattttatagtgttctaatgttctataacttctgaagtgggggctctaaggttttctattcatctcttctttctttcgttcgttttctcttttgttttattggatttataaatacggtcgaacttgttagaggttctgtgatatgcttttttaggtgctgttcttgtaacttatattgggaccataacatgttgcgttcttatctttaacatatacgtcngtttgagtttttggcagttcaatgaaacttattgtttgcaccatat

SEQ ID NO: 14339 - DNA, 334 bp, Glycine max
ataatggggacttgtgggattgtcttgttgaccacagcttgccctgaaccatggccacttcggagttcgtcaccacgcgctcttcccgttccccgcattcgctgctgctctgtttcagagctttccccagataagcttccaactagtattgatttttctgtaactggtggggcatatgatttctcaaaagcaacaacatcactaacaaatgagttcatctcttcaccaaagaaagtaactcttttaaggcatggtcttagcacttggaattcagaaagtacgattcaaggaagctcagatttgtctgtattaactgaagttggggaagagcaag

SEQ ID NO: 14340 - DNA, 404 bp, Glycine max
tacaagagtcatcactgccgcgtcgtactcggattcgctcgagaaaatgggactttcgattgcttgtgacacactcgccggaaccatggccacttcggagttcgtcaccactcgctcttcccgttccccgcattcgctgctgctctgtttcagagctttccccagataagcttccaactagtattgatttttctgtaactggcggcgcatatgatttctcaaaagcaacaacatcactaacaaatgagttcatctcttcaccaaagaaagtaactcttttaaggcatggtcttagcacttgcaattcacaaagtacgattcatggaagctcacatttgtctgtattaactgaagttcgtgaagagcaagcaaaaaggtgcaagaaagccttggaaaatatatac

SEQ ID NO: 14341 - DNA, 395 bp, Glycine max
tttttcaaaacaaacgccacttcgctggcaagactggttggatgttgggactggaagtggcattcttgctatatggtcggcacaagcgggtgcgaggaaggtgtatgcagtggaagcaaccaagatgtcagaacatgcgcgtgcacttgtcaaagcgaataatctccaggatgtagttgaggtcattgagggatcgatggaggaaattaccttgccagagaaagttgatgtgatcatctctgaatggatgggttattttcttctgcgtgaatctatgtttgattcaggtataaatgctcgtgaccgctggctcaaaccaacaggagtgatgtatcctagtcatgctcgcatgtggatggcacctatccagactgggatagtagatcacaaattgg

SEQ ID NO: 14342 - DNA, 282 bp, Glycine max
tgcttctgttgatttgaagcttaatctttcttcttggattgactactctgcctcggagtcaccctcatctatgtctacagagaagcccaaagagaacaagactaccactgctgaaccttctccagctaatgatccagcaaaaccacctgcaaaggcacaagtggtgggttggccaccaattaggtcatttagaaagaacatagttcaaaggaacagcaatgaagaagaggcagagaagagcacgaagaatgctttcgtgaaggttagcatggattgtgcacc

SEQ ID NO: 14343 - DNA, 121 bp, Glycine max
gaccaaaaaaggccaaaacctacttcttttgttccttggcggggtcgccttcttaaaaattgggtggtcccaaggtcctaataagggttgctgattggtggttgaccttcaaccttggttt

SEQ ID NO: 14344 - DNA, 387 bp, Glycine max
tgaaaactgcacctgctgattttcgttttcctacaacaaatgaagcgagacattgtttcactcgctacatagagtttcacagatgcttggcagcaaagggtgaaaactctggtgaatgtgagagatttgctaaatattaccgctccctttgcccgggtgaatgggttgaaaggtggaatgaacagagggagagtgggacttttccaggacctctttgaaatcatgtggcacttggatatccttctgaggcatgagaagtcttgaacattctgttggctcattttcttcagttgttgagcaattgtgaataaggcagtttgtggatattcattacttcacaaatggttgaaaccattttgctttttgagttgatataattggtctgac

SEQ ID NO: 14345 - DNA, 333 bp, Glycine max
  modified_base (300)..(300): a, c, g, t, unknown, or other
ggggaaggcctgaaatcctaaaggttcatgctagcaccaaaaggtttgatgctgatgtttctcttgaagtgattgcaatgagaacacctggctttagtggagctgatcttgcgaatctgttgaatgaagctgctatattagctggtcgccgtggaaagacagctatttcatctaaagaaattgatgattctattgataggattgtggctggaatggaaggaacagtgatgacagatgggaagagcaaaagtttagtggcatatcatgaagttggtcatgctatttgtggaaacttgactnctggtcatgatgctgtgcaaaaggtaacactag

SEQ ID NO: 14346 - DNA, 371 bp, Glycine max
tcgcttcaaggtcctttggttcaccagtggcaacttcttgttccaaattgggggtgctcgactgaaatcctaaacgttcatgctaccaacagacagttacacgctgatgaagctcttgaagtgatagccatgacaacacctgactatagtggagctgatctcgcaaatctgtagaatgaaactgctatattagctagtcgccagctatagacaactattctatataaagaaattgatgattatatcgatacgaatgtcgctagaatggaacgaacaacgatgacagatcaggaagagcagaagtttactggcatatcatgaattacatcatgctatatgtgaaactatgactgctgatcatgatgctgtgc

SEQ ID NO: 14347 - DNA, 70 bp, Glycine max
tgaaaactgcatctactgattatcgcttctatacaacaaatggcacaggtcattggttcagtcgctacat

SEQ ID NO: 14348 - DNA, 400 bp, Glycine max
  modified_base (385)..(385): a, c, g, t, unknown, or other
tgagtattctgatcgctccctgagagagctcgtcgcggcggttgcagaagaagattgcaagatgaagttcaacatcgcgaatcccaccactggatgccagaagaagctcgagatcgacgacgatctgaaactgcgagcattttgggacaagaggatctcacaggaggtcatcggagatgcactcggtgaggaatttaagggctatgtcttcaaaattaccggaggttgtgacaaacaaggatttccaatgaagcagggagtgctgactcctggtcgtgttagacttttgcttcacaggggaactccttgcttccgtggatatggaaagcgtaatggagagcgtaggagaaagtctgttcgtgggtgcattgtcagcccagacctntctgttttgaacttg

SEQ ID NO: 14349 - DNA, 383 bp, Glycine max
ctgagtggaaactctacatccaaacattggatcccgaaaacgaagacaggcttgactttgacccccttgatgttactaagacctggcccgaggacgttttgcccctccagcctgttggccgcatggtcttgaataagaacattgataacttctttgccgagaatgaacaacttgcattttgccctgccattattgtacctggtgtatactactccgatgataaattgcttcaaactcgcgtattctcctatgctgatacccagagacacagacttggaccaaattatctgcagcttcctgctaatgcccctaagtgtgcccatcacaacaatcaccatgatggtttcatgaatttcatgcacagggatgaagaggtcaattac

SEQ ID NO: 14350 - DNA, 285 bp, Glycine max
gaacctaactttattctcactatatcttacacccaaatcaaagtaaggtttctaagtaggtcgattccctttaatttttcaacacatactatcacccaatttatcattccactactcatatttcacattaacacaaattcacttatcttattataacaataccaaatatcatttcaataaattcataaatcaacaatttattctatatcaatactaccaacatttattatcaatatatttatatctcatctacatttcataaatataaaacaatataataccaat

SEQ ID NO: 14351 - DNA, 111 bp, Glycine max
aaaataatcaaatgaaattttgtaatagcattcagttagcgtacgtatcaggataaagtgataaaaccaagtgtgtgggtgtaaatgataagaactgaaataagtgggtgc

SEQ ID NO: 14352 - DNA, 398 bp, Glycine max
gcgatctctctctattctttgaaaccaaagttcaaactctggctggcctgggttctatttcgaaatcaacgacgatgagttccacagaggcagcagccacagagaagaaaggtggaagagggaaaccgaagacttcaaagtccgtttcccgttcctccaaagctggccttcagtttcccgtcggccgtgtcgctcgctacctcaaggccggtcgctacgcccagcgcgttggctccggttcccctgtttatctctccgcggttctcgaatacctcgctgccgaggttttggagcttgcggggaacgctgcgagggacaacaagaagacgaggatcgttccgaggcacattcaactggcggttaggaacgacgaggagttgagcaagctgatgggatct

SEQ ID NO: 14353 - DNA, 377 bp, Glycine max
  modified_base (335)..(335): a, c, g, t, unknown, or other
tgaagtgaatgattgcagcgatcataccagcttctttgtgagggtgtacatggaaggcattccgattggtagaaaactcaacttgttagctcatgatggttatcacgagttagtaaagactcttgaacagatgtttgacactaccattctgtgggggactgaaatggatggagtgcaaccagagagatgtcatgttctaacttatgaagatggagaaggagatttgattatggttggggatgtcccttgggagatgttcttatcagctgtaaagaggttgaagatcacaagggtggaggcattcgggtgataaatgcatacatatgaagaagctntgcctctcctgtgacttcaaatttagtcctatagagtgagag

SEQ ID NO: 14354 - DNA, 408 bp, Glycine max
ggttcagggcctggtggggtgaccggggtattaatccgaaaaaaccggtgaccggcttccgataggtagagaagcagcaaaccattaaccacaacacatggcgctatgttcctcactctcacttgtctctcccatcaaactcacttccaagtccttcttatctccaacaccagtcagttggcatggcatcttgataaagaataacacctcaacaagattcttgctgaaagctgtttttaatgagattgaacctgacctcagtgaagatcctagagaccaatttgccaccaatggcgttgacgctgatgattttgtgtatggaatatatgatgaccaccacacttaccatgaaggagaacagaaaggaacattttggggctcaattaaagaagagatggcagaagcaga

SEQ ID NO: 14355 - DNA, 420 bp, Glycine max
gaggttgagattgaagtagcaaccaagtttgctgcactgccgtggagatttggccgtcaaagtgttctcaatgcccttaaagattccctttgtcgactaggactgacttcagtggatctttatcagctacattggcctggagtttggggaaatgaagggtatattgatggtctgggagatgctgttgagaagggacttgtgaaggccgttggagtttcaaactatagtgagaagcgactccgtgaggcttatgagaagcttaagaagagaggtattccattagctacaaaccaagtaaactacagcctcatctaccgggcccctgaagaaaatggtgtaaaggctgcctgtgatgaacttgggataacaataattgcatattcaccaattgctcaaggtgctctcactggaaagtatact

SEQ ID NO: 14356 - DNA, 282 bp, Glycine max
ctcgagccgctcgagccgcaacacagttatccattcacattgcacagttagcacttagcgagactctgctgcagtgaggtgaggggaggtttgtttgttgtttcgtttttcctttcctttccgccagaatccgttgagaatggcgttgccggtagtcgtcgatgcagagtacctcaaggaggtcgacaaggctcgccgcgatctccgcgcactcatcgctaacaggaactgcgctcctctcatgctccgattagcctggcacgatgccggaacttacgatgc

SEQ ID NO: 14357 - DNA, 367 bp, Glycine max
ctgagtctcactctctctcccatggcgaaagacatcgaaactgaggtccaaagtgggctgccacacaaggactaccacgacccacccgccgccgcattctacgaccccgccgagctccgcaagtggtccttctaccgcgccctcatcgccgagtttgtcgccactctcctcttcctctacgtcaccatcctcaccgtcatcggctacaatcaccagaccgccaccggcagccccgacctctgcaatggcgtcggcgtcctcggcatcgcttgggccttcggaggcatgatatttgtccttgtctattgcactgctgggatatcaaggggacacataaacccggcggtgacgtttgggttggttctgg

SEQ ID NO: 14358 - DNA, 365 bp, Glycine max
ctgagtctcactctctctcccatggcgaaagacatccaaacggaggtccaaagtgggctgccacacatggactaccacgacccacccgtcgccgcattctacgaccccgccgagctccgcaagtggtccttctaccgcgccctcatcgccgagtttgtcgccactctcctcttcctctacgtcaccatcctcaccgtcatcggctacaatcaccagaccgccacctgcagccccgacctctgcaatggcgtcagcatcctcggcatcgcttagggccttcagaggcatgatatttgtccttgtctattgcactgctgcgatatcagggggacacataaacccggcggtgacgttaggattgtttc

SEQ ID NO: 14359 - DNA, 344 bp, Glycine max
actaactctcactctctctcccatcacaaaatacatccaaagttagatccaaaaccatcttccacacctccactaactttaaacaccccactccacattctaccacccctcctatctcctcaatccttccttctaccactccctcatctccaaatttatcaccactctcctcttcctctacttcaccatcctcaccatcatcaactacaatcaccacaccaacaccatcatcccctacctctccaatatccttcatcatactcaacataccctttcacctatcatacacatgatatcctctccttatctattccactcctaccatatcatacatacacataaac

SEQ ID NO: 14360 - DNA, 409 bp, Glycine max
gagagagaacttcaactgagggtgagagtgacacaagtctggggagcactactctaaaagttctattagattcttcaaaacatgaccatgcatcgcgagtcttgggcttttgtcttcggcgttatgggcaacatcatctcctttggagtgttccttgctccattgccaaccttttaccaaatctacaagaagaaatccactgaagggttccagtcacttccttatgttgttgcactgttcagtgcaatgctttggatttactatgctttcgtcaaaagggaagctgccctccttctcattaccattaacacatttggaattgttgtggagtcaatttaccttgcaatcttcctactttatgccccaaggaagcctaggcttacaaccatcaagcttcttctcttactga

SEQ ID NO: 14361 - DNA, 315 bp, Glycine max
tacataatctattttcacctgacgatcataacaacactcgtcaggattatattctactcttcgaatcccatcacaactataaaaacaccaccattcatccccagtattctccttctttctctctccttttccaacccttcctcttacttttacctttcttccttcattcctaacctaataccaaatctacatcataacttacactctaagtatctaatcactttcttatctttttgctctaatctattctatattcacgatctactattctatccttaccacttaacctgaccccctatctattaccattaacac

SEQ ID NO: 14362 - DNA, 302 bp, Glycine max
atctctaattttacaaataaaaaatccttcttattctcaatattccttctcaatacatctacaccaactacaattatacatatctcaatcaatattataacaattataaataccaatacctctatattctttcattatcatataatcaatttattcatcatcaaccataaatcactcatcaaattatccattttatctacaattcctacaaatctaaattccccatcttatataatatttaaaccaatccttacaattatactccttattacaaattcttcaaatattacaaatctctaatt

SEQ ID NO: 14363 - DNA, 171 bp, Glycine max
gcgcttgaacgggttgagacccatattgcaagccttaccttgggaatggttgaaccaattaccccaaacttaatcggttaagttctcaagggatttcaataattaccggatttgttaaaatttgtggggccttggaaggggaatgtaatggagtccaaaactacccgggtc

SEQ ID NO: 14364 - DNA, 286 bp, Glycine max
agaatataggaaatcctgatttaccaatggcaatgggcatgggaccagatcaaaaaggtgtgcgtattaaaagaattggacccactggttcaaaatcttatggtctgaaaccatttgatggaattcttaactttgattgggtcaatatttcgaatggatgaaccagggttattcctttccttaccaccacctttgatctggttcatttaaggcttggggagcccatgggttcaagtaacctggcttttcaaaagtccactggggataaagctctattaaaggtttt

SEQ ID NO: 14365 - DNA, 417 bp, Glycine max
ctttctcacacaatctgggaacaacacacacaaaccattcgcttttctcgctccggcaatgaccacccaagcttccaccttcgccgtcgccgttccctccgtcacaacccccttccgcagccaccggaatcccttcgttgttcgagcccaagcggaaccttcagataaatccgttgaaattatgaggaaattctcagagcaatatgctcgtaaatcatgaacatacttttgtgttgacaaaggagtcacttctgttgttatcaaggggttggctgaccataaagatacgttgggtgcaccactgtgcccttgccggcattatgatgataaagctgctgaagttgcacaaggattttggaattgcccttgtgttcccatgagagagaggaaggaatgccactgcatgctaattcttac

SEQ ID NO: 14366 - DNA, 401 bp, Glycine max
gccaagtgtttctttacacctataggacccatgccagggccacctgctccacttggtaccatcgctgccgcaccatggggctcagcactcatattgccaatctcttacacttacatagccatgatgggttctaaaggactcaccgatgcatcaaagatagccattttgaatgcaaactacatggcaaaacgattggagaattattatcccgttcttttccgtggagtcaatggaacagttgctcatgaattcatcattgacctgagaggctttaagaatactgctggaattgagcctgaagatgttgcaaagcgcctcatggactacggttttcatgcaccaacaatgtcatggcctgtgcctggcacactcatgattgagccaactgagagtgaaagcaa

SEQ ID NO: 14367 - DNA, 371 bp, Glycine max
gccaaattcctgttttgcaatggattggcaattcgaaacgagacttgggttccaagatcatggtataatttcggacctatatgaatcttaatcttaattggaacgaaatctttcaaaattggatttctaattcttaatgatattctcgtgcattcgatcttttctttttcttagattataattcgaaaaccaaagagttaagtgaattaaaaacccaagggaggttcatggccaaacgtaaagatatgcgagtaattgtgatcttggaatgtaccggattgcgataaaagagtgtccataaggaatcaacgggtatttctagatctataactaacatgaatcgacagaatacgcctatgcgattggaattg

SEQ ID NO: 14368 - DNA, 406 bp, Glycine max
ccgagcagccacacctcccgcagcagccatggttctcaaagctgagctatgccgattcagtggtgccaagatctacccaggaaagggcatcagatttgttcgtggtgattctcaggttttcctgtttgcaaactcaaaatgtaagaggtatttccacaatcgcctgaagccttcaaagctcacctggactgcaatgtacagaaagcaacacaaaaaggacattgctcaagaagctgtgaggaagaggagacgtgctgccaaaaagccttactctaggtccattgttggtgcgaccttggaagtaatccagaaaaagagagctgagaagccagaagttcgagatgcagctagggaagctgctcttcgtgaaattaaggagaggatcaagaaaacaaaggatgagaag

SEQ ID NO: 14369 - DNA, 376 bp, Glycine max
gccaaatgaagatggtaaacttgagctgcttcactcacacgaagcatatgagatgattcaaaaccacctggctctcattctcggtaacagagctggagatttaacatcaatagctgaaatcagcaaattcagggtagggcaggtctacgcagcatcagtgatgtatggttattttcttagacgagttgaccaaaggttccagttggagaagacaatgaaagttcttccaaatgcaacagaaaaagagaatagtgctcatcaaactacaatggacaatgcaagacccagtattgaagaggacacttctcaagtgatgtctcatcctgaagtatctacctggcctggtggtgatgtccgtccccgtggatttggctat

SEQ ID NO: 14370 - DNA, 107 bp, Glycine max
ctcgagccgctctatctttgttcctgctgactaatttgagagcaggctatctatgctatgcatgcatgtaaaataatataaagttatcgaagtattttctttgtacc

SEQ ID NO: 14371 - DNA, 107 bp, Glycine max
ctcgagccgctctatctttgttcctgctgactaattggagggcaggctatctatgctatgcatgcatgtaaaataatataaagttatcgaagtattttctttgtacc

SEQ ID NO: 14372 - DNA, 412 bp, Glycine max
gttaatcgccaccgccagcaccaagggtacgctgattcggagtttcgacacagatcacggcacgcttcttcaggaagtgagaaggggtgcgaatactgctgagatttgtagtttggcattctcttctactgctcagtggctagcggtctcaagtgataagggtactgtccatgtattcagccttaagaaacattctaacatccccgagctggaaaagacacaaagttcatccaattcagaggctgccgttaccctatctaactcatctcgctccttcattaaattgaaaggagtgttgcccaagtacttcaattctgagtggtcagttgctcagtttcacttacaagagggctctcattacacagttgcatttggtctccaaaagaatacagtcattattcttggcatggat

SEQ ID NO: 14373 - DNA, 405 bp, Glycine max
gattggaaaaggtttcagtcccttccctctgcgaattgaagaattggcaaaaattgtctcttcgtatgtgtaatacaaggcaggcttttgaaaactgttctatccaaatctcaaatgcaatgccatgtcttgaggaaatgagcattgactattgcaatgatttgattacattacctgatggactgtgtgagattagcccattgaagaaacttagtatcactaactgccacaaactttctgcactgccacaaggtattggaaaactggagaatctggaagtgctaaggctatgttcctgctctgatttgctagagatgccaaattcttttgaagggcttaacaagctaagctgtcttgacatctcagactgtgtaagtcttaccaaattaccagatgatattggtg

SEQ ID NO: 14374 - DNA, 438 bp, Glycine max
tatcatgcctgcgcggggactctagcagatccccgtcgtgaattccaattccacattttcaagaaataatgaggcaaaaatgttggtatgttaattggaatcgtttgttttcttattaagcctatcctgaagccaaatgaaatgagatcagaattcctacgcgaattccaatttcacattttcaagaaataacgaggcaaaaatgttcatatatgaattggaattattcgttttcttattaagcctatcctgaagccaaaggaaatgagatctgaattcctcgatgaattccaattccacattttcaagaaataaggaggcaaaaatgttcatatatgaattggaattatatgttttcttattaggcctatcctgaagccaaaggaaatgagatcggaattcctcgggggtacctagctcgaattccctataatgagt

SEQ ID NO: 14375 - DNA, 417 bp, Glycine max
  modified_base (389)..(389): a, c, g, t, unknown, or other
gcctgtccctttgtttcaagttccctctgcttattctgcacgggagcgatgtctgagaaaaccacagctgagaaccttattgaaaaccttgtggacacatttgttgataagaaaaaatctgtatcattctttgaggatgataagtcagactcagtgagttctcagatcaatagactgtttggacgccagaaacctgtgcaccatgttttagggggtggaaaatctgcggatgtcttgctatggaggaacaagaagatttctgctagtgttttagcatgtgcaacgattgcatgggtgcttttcgaatggcttaattacaactttcttactatcttatgctatggtttggttcttgtcatgcttgcacagtttctatggtcaaatgcttncagcatgtttaacaggtcaccatctaat

SEQ ID NO: 14376 - DNA, 408 bp, Glycine max
ccaacaacaccctcttctcgcgttgtctccaaagcaggcgggattacccacacgcaaacgacaacaaccgcgcgcgtttcacacctgcataactcggagtagcatacgcagcgtcgttgactcgcaactcgtaacttggcctcgcgcgccgatggcgtcggtccccagcaccgtcgctccccgtaccttactgccgtcgattcccaagccgagagctcctcttcacgccgcgaaatccgtcgccagcgccgcgcgcaacttcccgagactttcgcacaacctcattctctccggaaacaaacgcgcggtggcggtgaactcggcgtcggaggagttcgacgtgatatcggtgcagagcgaggacattaccgaccagcaggagggcgtcgtggtgagccgcgtccagat

SEQ ID NO: 14377 - DNA, 392 bp, Glycine max
cgactctctcgaagttagtttaggtttagggttaagttttgttttgcttcaatcttgcaagaaattcttctccgcacgatgcctcccgggcctctctgaaatccccatgacgtgaacgccccgatgcacgtgccaaatcgccgccgttcgtgttgcagtttagccccaattttcccacggttgatctgtgtcaaagtaacggcgaaattcctctttttcaatttctctctcttagtttcgatttggtgttgaatggatgcttgctgaattcgccttgctataccttcagcttcttttcgaacaccacacgtgttctctgaaaacggagctagtcctaaaggcgtaaatcgaaacgcggtcgtttttcaccttggggcgagggttcttctttt

SEQ ID NO: 14378 - DNA, 419 bp, Glycine max
acatgatctacttgtataacttaacattggctatttcacacaggagaaatacattggtgaccataagtttcttctggaatctgctgcaaaggttggtatagaaggagcagaagagtttcttaaggaccccaacaatggtttgaaggaagttgaggaggagctcaaaacttactcaggaaacatttcaggggttccatattacgtgattaatgggaatcacaagttgagtggtggacaaccccctgaagtcttcttgagagcttttcaagttgctacaaattagaatttcaccttctcacattttctgcttccctctataagaatgaaaccttggaaataaaaagttggccattcactgctttataatactctatcaaatgtgaaaccttgattgatataatgtaagacaatattcatta

SEQ ID NO: 14379 - DNA, 419 bp, Glycine max
  modified_base (392)..(392): a, c, g, t, unknown, or other
gactcaagaggatcccctcggggaattccaattccacattttcaagaaataaggaggcaaaaatgttcatatatgaattggaattatttgttttcttattaggcctatcctgaagccaaaggaaatgagatcggaattcctcggggaattccaattccacattttcaagaaataaggaggcaaaaatgttcatatatgaattggaattatttgttttcttattaggcctatcctgaagccaaaggaaatgagatcggaattcctcggggaattccaattccacattttcaagaaataaggaggcaaaaatgttcatatatgaattggaattatttgttttcttattaagcctatcctgaagccaaaggaaatgagatcggaattcctcgggnggtacgagctcgaattccctatagtga

SEQ ID NO: 14380 - DNA, 314 bp, Glycine max
caggtcaactcaagaggatcccctcggggaattccaattccacattttcaagaaataaggaggcaaaaatgttcatatatgaattggaattatttgttttcttattaggcctatcctgaagccaaaggaaatgagatcggcattcctcggggaattctacatccatattgtcaggatatattgagacccttgagatcagacatgtctacctgcagcatccatgttacgcctgagcaactctgctacatcccctgcaacttctgcaacaatgttcttgcggtgaggtgttcaacgcagtaccctgtgtgacattg

SEQ ID NO: 14381 - DNA, 262 bp, Glycine max
tttattatatctatactgaagccaaattaaatgatatcgaaatttctcttctaattccaattccacattttcaataaatatctattcaaaaatgttcatatatgaattttaatttttattttttttaatatttctatcctaatatccaattaatttttacattttaattcctcttttaattccaattccacattttcaataaataatgatacaaaaatgttcatatattaattataattattagttttcttattattcctat

SEQ ID NO: 14382 - DNA, 382 bp, Glycine max
  modified_base (343)..(343): a, c, g, t, unknown, or other
gcaagctcatcctagagttttaaaaatggcagcagcctcctgcatggctctctcttccccatccttggctggcaaggccgtgaagctgggcccatcagcccccgaagtcgggagggtcagcatgaggaagaccgtcaccaagcaggcctcctccggaagcccatggtacggcccagaccgcgtcaagtacttgggcccattctctggcgagcccccgtcctacctcactggcgagttcccaggtgactacggctgggacactgctgggctttcggccgacccagaaaccttcgccagaaaccgtgagctcgaagtgatccactccaggtgggccatgctcggngccttgggctgcgtcttccccgaactattgtcccgcaac

SEQ ID NO: 14383 - DNA, 293 bp, Glycine max
aagtgtctttcaaggcttctcaagatgatcagactgacaatacagtgtggtgtaccttatcatcttctgggtttatggctatctcatatgctgaagcatttgacactacataaaaacgctctgctggtgaaccccagaagtctttcaatcatgatgggcaaggtgaccttcatttttcgctgacttcatatcctgtacaacatgatgtgaatcatgctcatgatgtgaagatgttttcagttccaaatcaagcactttcagacatcttgaagaattcattactgaaaaatcat

SEQ ID NO: 14384 - DNA, 415 bp, Glycine max
tgtctttcaaggcttctcaagatgataagactaagaatacggtggctgataccttatcatcttctgggtttatgtctatcttaagtcaagaagcatttgacactagtcagaaacgctctgctggtgaaccccagaagtctttcaatcatgatgggcaaggtgaccttcatttttcgctgacttcatatcctgtacaacatgatgtgaatcatcctcatgatgtgaagatgttttcagttccaaatcaagcaatttcagtttccttggggaatccattcctgaagaatcattttgcagctgctggtcagaagccgttacttgggggaatacctgttaccacatctcattcagttcttccctctgctgttgctgttgctggaatgaccgaatcatgtgtgaaaccatctgctcaact

SEQ ID NO: 14385 - DNA, 263 bp, Glycine max
gaagcgggaaaacattcaaccagtttggcaatcacgggggccgttgaatgtcggacctggttctggaaaaacatcctaggaatttgaggcatagatatctttactcacataggatctgaggatggcgacacactgctttcttctgtaactacaaaatatcaggcgtacttgaggactgctgatgtcactggatatgttgagttgaccgtaaatgttaaaatgatacatgcctggatacaatgttactgccatgtttgaattga

SEQ ID NO: 14386 - DNA, 383 bp, Glycine max
atcagcgagtgagagtgagtgagtggttctcttgcagggagatggtttagtgacaccaaacagactggaaatgggtcgtggggtcagtgctggtggtggacagagttccttggattatctctttggcagtggggtacctgccagcagtgcaaatggtgctcgcactcaaaatgcaagtgctccttcaccaccggttgataagcaaagtccagcaccagcagcagcagcagcacctgcacctgcagcagcagcagcaccagcacctgcaccagcaccagcaccagcaccagctgataagcaaattccagctggaattcctggaagtctcaaaaacaattaccatcgcgctgatgggcaaaactgtggcaactttctcactgatc

SEQ ID NO: 14387 - DNA, 346 bp, Glycine max
cgattgagcccttcttgaattatccaaatatggtccatgaaaaattttgggtagtcaaaaaaaggttaaaatatccccttacatgaaatggatggactgcctatgtaagcattcttttggaaattggcaaagggtaacatatgcacacttcatgtattactgaagctgtggttttttagtcgggggttaatatcgatggtaatgcttgtgcacgtacatgttctaaataatgttcgcattgcattgcttcgttaaatcatgaattgtgcaagtttgattgccttaattcgccttctaactcggatgtatcatgaaacatcgtctaattttatcattatgtccatat

SEQ ID NO: 14388 - DNA, 396 bp, Glycine max
  modified_base (359)..(359): a, c, g, t, unknown, or other
ctgtgttctgtttatctatccagatttttcgatttcttagcggtagcatgttctcacgccttcgtcaaccttctgcgttttgccacactcattaatctataatcttgaggcttcgattcaccacagaccctgaattttgaattgctcttaaacttcaaacttcccacttttttgtttttgtttttgtcgtttggatttggtgttttcaagatcatggggtggtacagaaggggaaagctcgctcttgatcattttcgtagattggcttcaagggttacccctcaaaatccaatttttcagcgtggtgcgaggatttgctcatctgggtatttggattcaggttctaaagtagctagctntaatgggttctcttctttttgttcaacttctcagaga

SEQ ID NO: 14389 - DNA, 323 bp, Glycine max
ctcacatacctttcctacctaagaataatttcaattcatattcaccctccatctctccatctattcacttcactactctcaaatctaactctacatttctacaatctctaacacttctttcaaatcaacactaaacatttcacaaacaaacaatacttcactcataaccacatctaaaatttttaacaaccttaaaaaattcctcacaaaaacaacaccaccataaatattaatcaacttataaatatccatcttataatcactaataacaatttcctttaaaaacaaaaccccttttatttctcaaacaccaaattttaata

SEQ ID NO: 14390 - DNA, 408 bp, Glycine max
  modified_base (165)..(165): a, c, g, t, unknown, or other
  modified_base (188)..(188): a, c, g, t, unknown, or other
  modified_base (361)..(361): a, c, g, t, unknown, or other
acatgacctagttgaagaacttaccattggctatttaacacggggaaaatccattggtgaccataagtttcttctggaatctgctgcaaaggttggtatagaaggagcagaagagtttcttaaggaccccaacaatggtttgaaggaagttgaggaggagctcanaacttactcaggaaacatttcangggttccatattacgtgattaatgggaatcacaagttgagtggtggacaaccccctgaagtcttcttgagagcttttcaagttgctacaaattagaatttcaccttctcacattttctgcttccctctataagaatgaaaccttggaaataaaaagttggccattcactgctntataatactctatcaaatgtgaaacttgtatggatataatgtaagac

SEQ ID NO: 14391 - DNA, 257 bp, Glycine max
tagctctcacattatgtgctccttgttaagatctgcggggcgagtcatcttaaccaaccggaaaaccatcaaatgatgaacacctaccattactatcgacaccattagacgaacaccttcacacatctcacaacacacaatcatctcattaccgatcgctatcaaaccataccgattaaggctcatcacccactcttgcattaacacaaaattccgattctccatgcaccccaacatgaaatctcaaccttaattaa

SEQ ID NO: 14392 - DNA, 379 bp, Glycine max
ctaattcaaccatcgaatacactattgaccattaactagaaaattttgaaatctcatctgatttttttcaattgaaacggagcttcaaagcatggcagcttttacatcaattgttgtgcagtactcatccacatcatctttacagtctttggtaccttctttagaagctacacgcgatcataattcatggtgggggagagtgagatcatacagatccacaggaaaaaattcactccaacagaatatcacaagaggcttaacaatccaaaatgcagccacaaaaccagctaagtcaccagttattagctgaagaagactggaaggttaagcgagaatatctgctggaaaaaagggtaagaagtgtggatgcaaaggaagc

SEQ ID NO: 14393 - DNA, 332 bp, Glycine max
ccaccgtaattgacaagatcatcaataaggaaattccttctactgtggtctatgaagatgataaggtccctgcctttagggacatagatccataggctcctacccatattctaatcattcctaaagttatggatgggttaactggtctgtccaaggctgaggagaggcactgtgagattctaggtcgacttttgtgcactgctaagctggttgcaaagcaagaatgtcttgatgatggcttcaggattgtaattaatgatggacgagacgggggccaatcagttttacacattcatgtgcaccccattgggggacaacaaatgggctggccc

SEQ ID NO: 14394 - DNA, 286 bp, Glycine max
ctttgcgagtggagctgctcatattggtgccatgtttactgcatttttgtctgtggccactgctctggggactccgccattctttggagccatagtgctgtccttcctctccagccttatgggtggccttactcattatggaattggatcagctcctgtgtttttcggtgccaacgatgttccccttgctaaatggtggggcgatggattcctcagtagtagtgttaacattgtgatctggctagggcgacgaggagtggggcggggaattcattgggttgtggta

SEQ ID NO: 14395 - DNA, 360 bp, Glycine max
agcaaaacatattattttcattttcatctttttttgagtatcaacaaatggcaaccactgtgatgaccactctcccccaattcagtggtcttagaccccaattctcagctgcccctgtgaagaacttggttgctgtgcaacccatgagtcgcaaggggaagggtgcattgggagctcgatgtgactacattggttcatccactaatctgattatggtggcttctacaaccctgatgctgtttgctggaaggtttggattgggtccatcagcaaacaggaaagccactgcagggctaaagctggaggtgagggactcaggcttgcagactggtgaccctgctggcttcacccttgctgaca

SEQ ID NO: 14396 - DNA, 205 bp, Glycine max
caattgcgaccgattggttccccaccttcaaacctcctggaccaaggtgtttttggctatgtccattaatggatttctcccaattgggaaaattgtctcagtcatgcatttcaattctgaaattacacatggggatcgtgagttccatccatattttgatgtcattacccgtgtgcatcacagacaccttgtttcccaagttgga

SEQ ID NO: 14397 - DNA, 270 bp, Glycine max
atcggcgttcctcggggaattccccttccacattttcaagaaatacggaggcaacactgttcatatcctccactggaattatttgttttcttagtaggcctatcctgacgccactcgaaatgggatcggccttcctcgggggtaccgagcgcgaagtcgcttctcctgagtcggtccggcttacgccttgggttatccagggtcacagctgttcccggggtgactttgttacccgcccaaaattccacacaccttacgacccggaaccat

SEQ ID NO: 14398 - DNA, 87 bp, Glycine max
caattttatgatttcaaaattttatacaatattgttcaagattgtcttatttttagaatgaagtgctgatgaatgttttgctttctt

SEQ ID NO: 14399 - DNA, 359 bp, Glycine max
tcactctagagatccctcagagaattcgaattcgacattttcaagaaataacgaggcaaaaatgttcatatatgaattggaattatttgttttcttattaggcctatcctgaagccaaaggaaatgagatcggaattcctcggggaattccaattccacattttcaagaaataaggaggcaaaaatgttcatatatgaattggaattatttgttttcttagtaggcctatcctgaagccaaaggaaatgagatcggaattcctcggggaattccaagtccacatttgcacgatataaggaggcaaaaatgttcatatatggattcgaattatttgttttccgagtaggcctagcctgaa

SEQ ID NO: 14400 - DNA, 287 bp, Glycine max
ggtcaagcctaaaggttcccctaggggaattccaattccaaattttcaagaaataaggaggcaaaaatgttcatatatgaattggaattatttgttttcttattaggcctatcctgaagccaaaggaaatgagatcggaattcctcggggaattccaattccacattttcaagaaataaggaggcaaaaatgttcatatatgaattggaattatttgttttcttattaggcctatcctgaagccaagggaaatgagatcggaagtcctcggggaatgcgagttccac

SEQ ID NO: 14401 - DNA, 367 bp, Glycine max
gtttgaggcttgagggataagaagggattctcctgttgtggcgtgggagagagaatgggagaggagcagaggagcatagcaaggctacccttgttctccatacagtctccagagacagagagatcaggaatggccactcctccacttgagaccttagcatcagtcccatttcggtgggaacaagtgcccggaaaaccaaggccatccactgccctcgtgcctttctccaacccccctgacttgttgcccaacggcttagaacgttcctcccaggttgctcagaccttctcccgccactgtctgttaaggtttccaccaagaattgctatggttcggatacaaaactgcttggtgccatggttctcac

SEQ ID NO: 14402 - DNA, 387 bp, Glycine max
cagcttcaaatcaaatccaattgaaatcaaaaataaaaaggaaaaaagaaaaagtaaagacctctcaacacatggctgcttcaatcccatttacaggtatcaactcctcaagggtgcttcccattcctagagaaccacaccacccattttcccatttgctctcaaacatgtcaaagtttgcatctttgagaaccccttcttcttcttctgcttcttcttcgtcttcttctgtgtcttgctctctcagcaaagacccttactctgttgtgccattggaggaacatagcacaatggataatgggtctgttctgcttcagagacccgattcgtttgggacgtttggcaagtttggatggaagtatgtccctgagactctgatacatgctc

SEQ ID NO: 14403 - DNA, 182 bp, Glycine max
aaacattaatgctaatgcaatcatgtggaacttttcactgcttttctgagacttgtttcaatcttaaaaagctgttaatatgtaatgtgtttttctatccatgggatgcagtatgcgactgatggatgtgtttcgctgtattattaaaaatatttgggatgattagataaaatgctgttaat

SEQ ID NO: 14404 - DNA, 376 bp, Glycine max
ttccttttcatcattctcatatcctcaatcaccccccctcgcactcgctcttcccttcctctggtggcgacaatgtcgactcctgctaggaagaggctgatgagagacttcaagaggctgcaacaagacccgcctgcagggatcagtggtgccccccaggataacaacataatgctgtggaatgctgtcatatttggtcctgatgatactccatgggatggaggcacgttcaagttgacactccaatttactgaggactatccaaataaaccaccgactgtacgatttgtgtctcgcatgtttcatccaaatatttatgctgatggaagtatttgtttggatatattacaaaatcagtggagtcctatttatgatg

SEQ ID NO: 14405 - DNA, 384 bp, Glycine max
acccaaccctagattgagagaaaaatccccaaaaacaaaacacacatctctttcattctctccctcaccaaaccctagattgaaagaaaccctaacacaccatgggaacacccgagacatcgcgcgaaccctgccccgatcgcatcctcgacgacataggcggcgccttcggcatgggagcggtgggtggctccgccttccattttctcaagggtctctacaattcccccaagggcgatcgcttcgtcggcgccacccaggccgtgcgcctcaacgccccccgcgtcggcggcagcttcgccgtctggggcggcctcttctccgccttcgactgcaccatggtctacgcgcgccagaaggaggacccctggaactccatcgtcg

SEQ ID NO: 14406 - DNA, 187 bp, Glycine max
gcccaatcctacattgtgataacaatcttgatagcaataacagagatcttgttcagtctctccctcaacaaatgctaggttgatagaaactcttagacaccatgggaatatctgaattatcgagcgaatcctgctctgatcgcatcctcgaatacataagcggcgccttcggcatgggagccgtggg

SEQ ID NO: 14407 - DNA, 378 bp, Glycine max
caacattaattccaatccaatcatgttcaacttttcactggatttctgacacgtgtttcactctcagtaaactgttgcttcatgcccagttatacgtaccatctcgacacagtgtcctaccattcgaagtgtttcactgtactcattttcctatttgcgctcactcaagtcaaatgcttgtatctgtgagaacagattctgcttattccgcatcatcgacgtcgtctactctgtcatgagttctcaacaggtacctgcacgctgtcgagctattgctagaataattcgtaatggataatgggtctgtactgcttcacatatttcctgctgtagagatgtttggcatcataggtcggaagtatgtaccagacacactga

SEQ ID NO: 14408 - DNA, 110 bp, Glycine max
tacgttggtatctctgtgttgtaacccgattcgttacaaaatgttacatggaattagacaggtagctattgaaacaaataggtgagttggttttttcaggagctacctgt

SEQ ID NO: 14409 - DNA, 303 bp, Glycine max
aactcttcatcatattcttcttcttcgtcttgttcttgttctatctgtgacgagcatcatggcgtcgagagcagtgctattgttggctatgtgtgtgcttccggccatggttgtggccattcgcccagcaaagaaccctttttgcgtgaagggtcgcgtctactgtgacccttgccgtgctggttttgagacctcagcaaccacctacattgccggtgctgagattatgttgcaatgcgggagcagggtgagcagcgaggttgtgtagaccaagaaggggtagactgacgcaactggagcata

SEQ ID NO: 14410 - DNA, 375 bp, Glycine max
tggcaacagatggattctccagatcaaatcttcttggtcaaggtggttatggctatgtccataaaggagttctcccaaatgggaaaattgtcgcagtcaagcagttgaaatctgagagtacacaaggggagcgtgagttccatgcagaagttgatgtcattagccgtgtgcatcagagacaccttgtttccctaattggatactgcgtcacagacagccaaaagatgcttgtcgacgagtatgtgggaaatgatacactacaatttcacttgcatggaaacgacagactacctatggattggtcaacaaggatgaagattgctataggatctgcaaaaggattggcatatttgcatgaatactgtaatcccaaaa

SEQ ID NO: 14411 - DNA, 227 bp, Glycine max
gtgtgtgttcgaaacccaatgtggggccaccgtctgctccggacaccggtttctctgcgttgttctgcattcgactcgtccccgactcagctacccgactcggtcgcgacccgttccggttcaacttggatccgtgtttgtgtcaaatggtaatggcgatagtaagcggttcagctccaagttgagcctcattcccagagccgttgattcttccaccgcacaatctt

SEQ ID NO: 14412 - DNA, 389 bp, Glycine max
gttttaagagagagagagagagagcgaataattaaaaggcccttgccttcacctttggtgtccaaagatattgctagagagaagaactagttgttcaattagcttcttcttcttcttcatcttcttccacccttcttgtttgagtaaattaagaagcttgagatcagacatgtcgagctgcagcatcgatgttgcgcctgagcaactctgctacatcccctgcaacttctgcaatattgttcttgcggtgagtgttccatgcagtagcctgtttgacattgtgaccgttcgatgtgggcactgcaccaatctatggtccgtgaacatggccgccgcgtttcagtcactgtcatggcaagatgttcacggatctgggcactgcaatccaa

SEQ ID NO: 14413 - DNA, 377 bp, Glycine max
ggagggaagggaaacgggaaacaggctgcaagtggaagtgatgagaatgcttctaacggaaaatgaaagggtgcgaaatgtggatatgggcttggtacttgcacctatgtcaaagcaaggcatatcttatgtaataaacaacgtaagatcaatgaagcctacaagaagctgcaagattgttggctttgcaacggagataaggtcacaccagctgagtttgcaaagatagctcatgagtattcagaatgtccttcacgaaagaagggtggagaccttggatggtttcaccgacgaaagatggctgggccatttcaggatgttgccttcaacacacctgttggagctactattgctcctttcacatcaactcatggcta

SEQ ID NO: 14414 - DNA, 370 bp, Glycine max
cagaagagcactgagctcctaatcaggaagcttcctttccataggttggttcgtgaaattgcccagtatttcaagactgatctgcgtttccagagccatgctgtgcttgcattgcaagaggctgctgaggcataccgtgttgggctctttgaggacactaacttgtgtgccaatcacgccaagcgtgtgactattatgcccaaggatattcagctggcaagaaagattcgtggtgagcgtgcttgagttggtgcgttctgtgtttgtgaagatggattgttggtggctgcggatggtgttttgttactaagttatctttatgttgaagcctatatgttattacggaaaaatacgtgtttacttggtagtc

SEQ ID NO: 14415 - DNA, 379 bp, Glycine max
tcacctatggtttcagacctacgaagttggacatcatggcagcaagattgatcgcagccgtaagtactggcactcataatgcgtctccttgcttaggccagtgcaatggtgccactgcaaatgcacttagggaagttgtttccaagagatctgggaattacaccatgggcaatgatgtgtgggatggactaggcatagtgaaatatgtgggacccttttcagctcagactccttcacacttgagcagagaattcccactggatgttggatgagacacggcaggcttacctgcataccctgaatcatttgagatgaacatggctcttgacgttatccatgggagatgggctacgcttggtgcactaggttccatcacccc

SEQ ID NO: 14416 - DNA, 344 bp, Glycine max
aagtgatgatgaagatgacattgaatttgtggggggttcaggcacaaccaatccaaccacagaaaaagatgctagcagctttcaaatctttgacatcattggccattttgctcaacccaatccccacacagttttgccaaagacaccaattagttgcaaaccatcagaaaatgccattgagttggccctcaagatagccaaccttaatccacaaagaactttgttctttgaggatagtgtccgcaacacacaaggtggaaaacgtgggggtcttcacactgtgctggttggaaaatctcagacgattaaaggagcagattatgcattagaaagcatccacaacc

SEQ ID NO: 14417 - DNA, 385 bp, Glycine max
caaaaacgaagtactactacaagggaagaacaacttagctactagtgaaggatcaaagagaatggctcaagcaatggcatcaatggctggcttgcgtggttcctctcatgctgtgttggaaggtacccttcaagtgagtggctccacacgcttggatgtggggagtggtaccagggtggcctcagtcatacgtacaaggttcacagttagagcacagcaacaacagatgagtggtgaggtacaaagcatccgtacggcactgctttcacttgtatgctgctggtttggccactggctcttttgttcaaactgtgcttgctgatgccaaatctatcaaagttggaccagctcccccagcttctagtggattgcctggaacgttgaa

SEQ ID NO: 14418 - DNA, 367 bp, Glycine max
gattccggtccaacaacgcttgaaggcaagcaagaaccccaactcctggcaagcggccgaatttcgaatttggaatttccaagcccgggaaccccggttaagcgacgggctaagtccaataattccaacagaatgttgaaagtcgtcactatgaagggaccacctgttctgttgcactctacactgatgtgacgacttcataaggactcttggaaagtatgcaagctgggacattggagcgagaagttgcattcctcaatgctttacctatcccagataatttccctgttcgagcagctgcacacaggacacatgtagccaagtctcgagacacgttgaccacacacactcttcattcagagcttgt

SEQ ID NO: 14419 - DNA, 147 bp, Glycine max
cacttctacatactctgtgaggatcatggatctcgcagtagtgggtttacttggtacagcatcacatcccactcaaatttcaggtccagctataggcaattggtccgtagcggctcggcacattcctagagaagtggaggtcgcgat

SEQ ID NO: 14420 - DNA, 61 bp, Glycine max
caactctgcatactcagtctcaatcctgtgcatcgaagtagttagatcacgcactggcggc

SEQ ID NO: 14421 - DNA, 387 bp, Glycine max
ttacactctctctgtgtatttcactagctctcccttcaagatgcagatcttcgtcaagatcctcaccggcaagatcatcacccttgacgtggaaagctctgacaccatcgacaacgtcaaggccaagattcaggacaaggaaggaatccccccggaccagcaacgtctcattttcgccggaaagcaacttgaggacggccgtacccttgctgactacaacattcagaaggagagtactcttcacctcgtcctccgtctccgtggtggcatgcagatcttcgttaagacactcaccggcaagaccataaccctacaggttgaaagctccgacaccatcgataacgtcaaggccaagatccaggacaaggagggtatccccccggacca

SEQ ID NO: 14422 - DNA, 240 bp, Glycine max
aattccagtgttcccatgtctcatgctcactgaagtcgaaccccgaatggcttctcaagttcttcatcacaaggcactgtttgcccccacgctaagtatcccttcttcatctcgtaacgtcacgttaatttctagggttccttccacctcaatttcatggcattgcactcctctcattgctaagcttagtttcgctgtgaaaactgactccaacgtagaacgcccaggtgatgccatcga

SEQ ID NO: 14423 - DNA, 324 bp, Glycine max
  modified_base (105)..(105): a, c, g, t, unknown, or other
aagctcttgatgcgcagactcactcatatgccttgtcagagagagaaatggcactgatggcagtcgtgctccgcgaagttcgtgtgacactccaagccgctccanaagtgcaaccaaggagtgccaatgtagcacacggtgacgatcatcactccaactatgacgtcctcgacagagtcctcgacgtcgtcaaagatctcgccaaagtcgatccctccagagattagtccagatgtacacatccacaaagtacttagtttggatagcttgtacaatgtggcaattgatatggcactagaagatgagttcaagctacagatacag

SEQ ID NO: 14424 - DNA, 302 bp, Glycine max
  modified_base (113)..(113): a, c, g, t, unknown, or other
  modified_base (123)..(123): a, c, g, t, unknown, or other
caaggtccagcagaaagcacctgaatctcaatgattgacatcaatggaagagtggcataattcatgttcccacttgcagattggagagctttgcttgttgccttaaaatatanaacaaacaanaaataataataaaaaaactcggtcttatcattttgtaattaaaaaatagctcctaccactactttccctactgctccatttcgtttatggttatgctgctgctaggtgtcatcaaaatttaattgtttcataaaaatggctaagcgtgtatattatagttcttttttcttttcccttat

SEQ ID NO: 14425 - DNA, 387 bp, Glycine max
cgtacactggcagactacaacatccaaaaggagtccacccttcaccttgtccttcgtctcaggggaggtatgcagatctttgtgaagactttgacaggcaagactattaccttggaagttgaaagctcagacacaatcgataatgtcaaagcaaaaatccaggacaaggagggtatcccaccagaccagcagaggttgatatttgctgggaagcaattggaggatggaaggactcttgctgactacaacattcagaaagagtctactcttcaccttgtgttgcgtcttcgtggtgggttttaaaagtctgagaatgttctgtaggtgtcttgaagtctaagcatgtgggagttccgaagatccttgggttttttttttttaaaggtc

SEQ ID NO: 14426 - DNA, 396 bp, Glycine max
gtcgacctagagatccctcggggaattcgaattcgacattttcaagaaataaggaggcaaaaatgttcatatatgaattggaattatttgttttcttattaggcctatcctgaagccaaaggaaatgagatcggaattcctcggggaattccaattccacattttcaagaaataaggaggcaaaaatgttcatatatgaattggaattatttgttttcttattaggcctatcctgaagccaaaggaaatgagatcggaattcctcggggaattccaattccacatttgcacgatataaggaggcagaaatgttcatatatgaattcgaattatttgttttcttagtaggcctatcctgaagccaaaggaaatgagatcggaattcctcggggaaat

SEQ ID NO: 14427 - DNA, 271 bp, Glycine max
cactagagtattcagatctagcatgctcaatgaagtagtaccgggaatagcagctcaagttcgtcatcacaaggcaatgtcttgtccaacgctaagtatcccttcttcatctcgtaaggtcatgttaatttatagggttgctgcgatctcaagttcacggcgttccgctcctctcattgatacggtcaatttcactgtgagagctgagactacctgcgatcgcacattcaatgccatcgtcgatgtgccgtcgtatactgtggatgaagtt

SEQ ID NO: 14428 - DNA, 378 bp, Glycine max
gaacatggcacagtgcctatcctacctgatgcagggaggaacaccttcaacactttgctgcagcggagtcaagaacattcttggctctgctgtcaccaccgttgacaaacagactgtgtgcaactgtctcaaggcggatgctgcaaggtacaacatcaatgaccagtatgctcaggcactccctggtttctgcaaggtcaatgtcccttacacgatcagccgctccactaactgtgcaagcatcaggttctgaacaagccatggacagatttgctcatttctgcagcgggatactgaggcagctgtgacccatttactatcagaataagagaactctagtgtgactgtacggcttcacttatgcgacccttttattgt

SEQ ID NO: 14429 - DNA, 240 bp, Glycine max
ctccggcttcgggtcgcggctctccgcacccgcagcctcctggttggcatcagtgggcaggtggcatgcttcatgttcccacttgcagattggcgagctttgcttgttgccttcggctctcctccgccggggtggtgtgcgtggcccactcggtcttatcattttgtccttgtggcgtagctcctaccactgctttccctactgctccagttcgcttatggttctgctgctgctaggtgt

SEQ ID NO: 14430 - DNA, 124 bp, Glycine max
caagtgaggagacacggtaactatgctgtccctcgaagtcatgggattactcctgacggaaattgatgcgatgcgaagtgtggacccggccttaggcagtgggtctagacctgatcgggacaaa

SEQ ID NO: 14431 - DNA, 361 bp, Glycine max
gtcaagttctgtaagtggtggtcagggccttatttttggaaacaagaatatgaataagttgttggagaaagaaaatgatcaaagtggcagttttcttaaaaagccccaccatgagaagtatgctccattgaagttaattatcatgtctgctagtcttgatgcacgtgctttctctgagtactttggtggtgccaaagctgttcacatccaagggagacagtttcctgtagatatattttatacccgtgatggagagacagagtatgtagatgcttccttgataacaatattccagattcagttagaggagggccctggtgatatactagtatttctgacgggtcaagaagagattgaatct

SEQ ID NO: 14432 - DNA, 377 bp, Glycine max
  modified_base (349)..(349): a, c, g, t, unknown, or other
gtcgaggagaagctccggctcaagccggagaaactccagtccacccggcatgtgctgagtgagtacggaaacatgtcaagcgcgtgtgttttgttcattctggatgaaatgaggaagaagtctaaggaggaagggaagagtaccactggagaagggttagagtggggggtgctattcggattcgggccgggtctaaccgttgagaccgttgttcttcacagtgttcccttggagggataaatcttgctgatgcggtgactagtgatttaagagtgatcaataaggaaccctcggaaataccagggaaagtttgttattattactagtttcacttgtggatttatcgtancataatgttgtacaagaataatttaata

SEQ ID NO: 14433 - DNA, 384 bp, Glycine max
caaggaaaaagcaagctcaacctaaaattttaaaaatgggaacaacctcctccaagggtctctcctccccaaccttggctggcaaaggccttaaactgggcccaacaacccccgaaattcggaaggttaacattaaggaaaacgttaacaaacaaggctcctccggaaacccaatgtacggcccagaccgcgtcaagtacttgggcccattctctggcgagcccccgtcctacctcactggcgagttcccaggtgactacggctgggacactgctgggctttcggccgacccagaaaccttcgccagaaaccgtgagctcgaagtgatccactccaggtgggccatgctcggggccttgggctgcgtctttcccgaactattgt

SEQ ID NO: 14434 - DNA, 316 bp, Glycine max
ctcgagccgcaagtattaacccttttctctctgaatactctctactcaatacattgcgctctagtctcgtttcaaatattaattttaggttcttcgttacgcgttgtgttgcgttgtgcgtgagaaagtgcgcgtggtgaaaaagcatgggttctcagctcctgagacgaaccttcggaagtcgtttccttgcaaacccgagggccttctcctccgctgcgtcgactccgatccgcgccactctcttccgcggcgacggcagtgggcgccgagatcgccggttccgtcaaacaggtagtccgagcagctgatgtcc

SEQ ID NO: 14435 - DNA, 314 bp, Glycine max
agtgaagccccaaaacaggatccttctccacttccatacttgactgagaaagaacccaaaatctatgatatttccctagaggctcacataaaacctgctgggcatgaagattcgggtgtggtgtcacggactaatctaaagcacttagagtggacattgacccaacaacttgctcacgatacaatcaacggttgcaaccttaggccaggcgatctccgtggaactgggacagttagtggtcctgagcgagagtcccgtgcaggcgggcgagaattaacatggaatggacaaagcagagtcgcagtgaatgagtt

SEQ ID NO: 14436 - DNA, 294 bp, Glycine max
  modified_base (4)..(4): a, c, g, t, unknown, or other
  modified_base (11)..(11): a, c, g, t, unknown, or other
gcanatcacanaccttcccccggtaaccaaactccgaccagcgttctcccggacgtctccggcgagtggtccgaagtcgccgccgccgccgttgacgtgcggtgggacctcgcgcaagccttgcgcctcatcgaccgcgacaacgacggcgtcgtcacgcgacaggacctcgagtcgcttctcacgcgccttggcgcgtcgccgagccccggcgacgtggcgctcatgctcggcgaggtcgacggcgacggcatcacggttgagtcgctcatgagctacgtcgggtcgggtctc

SEQ ID NO: 14437 - DNA, 277 bp, Glycine max
tgtctgcgttctatggtcctcccaagcctgaccccgatatgattgctctcatccaccacgctgttcagactggtgtcacttttcttgacacttctgacgtctatggtcctcacaccaacgaactccttctaggaaaggctctgaatggaggggtgagagatgaggttgaattggctacaaagtttggaatcaacgttgctgaaaggaatagacagatccgtggtgatccggcatatgtgatggctgcttgtgagggaagcttaaagagacttgggat

SEQ ID NO: 14438 - DNA, 382 bp, Glycine max
caagcttgttgacaccttccctggccaatctattgatttctttggtgcactcagggctagagtatatgacgatgaagtgaggaactggatttctggtgttggggttgacttgattgggaagaaccttgtgaactccaatgaatgacctccaaccattgaccaaccgacgatgactttgagcaagctcttggagtatggtaacatgcgtgtccaataacaagagaatgtgaagagagtataactggcagacacgtacttgaacgaggctgctcttggtgatgctaatcaggatgccatcaaaagaggaactttctatggcaaagcagccgagcacgtaaaaattcccgttcctgaaggttgtactgatccaaatgcctcaaac

SEQ ID NO: 14439 - DNA, 355 bp, Glycine max
caagcttgttgacaccttccctggccaatctattgatttctttggtgcactcagggctagagtatatgacgatgaagtgaggaagtggatttctggtgttggtgttgacttgattgggaagaagcttgtgaactccaaggaatgacctccaacctttgaccaaccgaagatgactttgagcaagctcttggagtatggtaacatgcttgtccaagaacaagagaatgtgaagagagtataactggcagacaagtacttgaacgaggctgctcttggtgatgctaatcatgatgccatcaaaagatgaactttctatggcaaagcagcccagcacgtaaaaattcccgttcctgaa

SEQ ID NO: 14440 - DNA, 374 bp, Glycine max
caacgctgtgagcttcaatgcagatggtgacattctggtctctggttccgatgattgtgggattattctctgggactgggaaactggccgcattagactctccttccattctggtcattctaacaatgttttccaggccaagatcatgcctcactctgatgatcgaaccattgtcacctgtgctgccgatggacaggtgagacatgctcaacttcttgaaaatggacgagtcgaaactaagtgtctggccaagcatcaaggaagggctcataagttggctattgagcctggtagccctcatattttgtatacctgtggtgaagatggattagtgcagcgttttgatctgagaactggggctgcaacagaacttt

SEQ ID NO: 14441 - DNA, 273 bp, Glycine max
tcacttcaggttacacatttacgaacttggccatcgaagtagcaagattgctcgtggcaacaatttctggcacacgaaatgcgaatctagtcttatgccgttgctctggtgctaatgccgatgctcctagggatgtcgtttccatgggatctgggaagtgcagaatgggcaatgatttgtaggatgtactagacataatgaaatacgtgtgaccctttatcaggacatagtgcttcatatatgactggagaattcccattggatcaatgctgc

SEQ ID NO: 14442 - DNA, 293 bp, Glycine max
aagctttgttcaagagtgatttccccactgagcttatcacgcagaccactttcattgatgctgcagttgtcaagaagctcaagggtgttcttggagggtcaggttaattaaatatggttaacgcgtgttgatgtgtttttaattaaacggagttgttcattcaaaacacaagagtctagagtgtgttgtgttgtgtcatttttgtgaaatttgtttgtgttggttttgtactgttgtggatttagcacgatcgatgtaatttggtggactatgaaggtaggggtttcttcttc

SEQ ID NO: 14443 - DNA, 313 bp, Glycine max
ttaagaaaaaaatagaagcattttcagagactatggagaatttaagtactcatgcggataaatgctgtcgacagataacgagagcaaggactgtggttatacaaaatagaattaaaaaacctgagtgagatccctttggaatgtttcattgattacttacactttctcttgctggaatcttcctttgcttcaaataggtagaatacttcaataagctgcgtgcgtagaaagataaatgaatatagaacttgggcagaagattgctgtactttctaggtagagatagttggattacagatgattacaaatatgt

SEQ ID NO: 14444 - DNA, 379 bp, Glycine max
gaaaattgttagaagagttttcacgtcttttgagaaatgggtgcctcgctatcggtctcggaaaaatccatccatgaattcatggtcaaggatgctaagggcagagacgtgaacctcagcatctacaaagggaaggttcttcttgtagtaaatgtcgcttcaaaatgtggatttacgaataccaattacacccagttaactgagctttacagcaaatacaaagacagaggccttgagatactggcatttccatgcaaccagtttctgaagcaggagcctgggagtagccaggacgtagaggaatttgcctgcacaagatacaaggccgcgtatcccatttttggaaaggtacgtgtcaatggacctgatacagcacctg

SEQ ID NO: 14445 - DNA, 351 bp, Glycine max
accgcattccccttcttctccttctaacccaacctgtttgtccgacaatcacattcaacgcttctgtcatggaagaagttaatgtcgtggaaactaaggatggaactgtctcagtagctgctgcgtttgctggtcaccaggaagccgtgcaggatagagaccacaaatttttaagcaaagctgttgaagaagcatataaaggggtagattgtaaagatggaggcccttttggtgccgttatagttcataatgatgaaatagttgctagttgtcacaatatggttctgtgtaacacagacccaactgctcatgctgaagtgacagcaataagagaagcttgcaagaagctta

SEQ ID NO: 14446 - DNA, 345 bp, Glycine max
ctctttcgcccccttctccctctctctattatttggttctttcccgctttttcatagcaaaacgaaaaagaaaaccctagaacgggagagatttcattccccaaaaaatctcttccttctctctcctcatttctgagttcccaactttcctcacctgaggtcagaatcatacaataattcctttctgttttcagtttcttattacaattcaattggatgatgattattgagtctaataattttgaacagatctggtgtgacgtgcatcacaattgaatcgaattgaaatttgttgtcgtgggtgcagcaaggaatgccgctggtattagcgaaaagcgattcgat

SEQ ID NO: 14447 - DNA, 377 bp, Glycine max
aacctggggattcagaaccccattaacctgacctttttgggaggatgccaaaccatggcttcccttgcagaatccactgctggctgcttcccttggcatgtcagaaatccttggaaaccccatcaacctcagtggtgccacaaggccagctccatctgcctctagccctgcctccttcaagactgtggctcttttctccaaaaagaaggctgcacctccaaaaaaagctgcagctgctgctcctgccaatgatgagcttgccaagtggtatggtcctgacagaaggatcttcttgcctgagggtctcttggaccgatctgagatcccagagtacttgaccggagaagtccccggagactatggttatgacccatttg

SEQ ID NO: 14448 - DNA, 346 bp, Glycine max
ctctttcgccctcttctccctctctctattttttttttcttggccgctttttcatagcaaaacgaaaaagaaaaccctagaacgggagagatttcattccccaaaaaatctcttccttctctctcctcatttctgagttcccaactttcctcacctgaggtcagaatcatacaataattcctttctgttttcagtttcttattacaattcaattggatgatgattattgagtctaataattttgaacagatctggtgtgacgtgcatcacaattgaatcgaattgaaatttgttgtcgtggttgcagcaaggaatgccgcttgtattagcgataagcgattcgatc

SEQ ID NO: 14449 - DNA, 380 bp, Glycine max
ctcaattactacatcgtattctgcaaattcaaaccgggtcttggttttctgaaagatgggaggtggcaaggacaagcatcatgatgaatctgacaaaggaattttttcacaccttgctcatggggtagctggtgcagcacatggtggacatgggtacccacctggggcttacccaccaccacctggggcataccctccacaacaaggatatcctccagctgggtatcctccacaacaagggtatcctccagctgggtaccctccacatcaaggctatcctcctgctggttaccccccagctggttatcctggttcatcacatgcaccaggttctcatgggcacggcggtatgggagcaatgctcgctgggggtgctgctg

SEQ ID NO: 14450 - DNA, 346 bp, Glycine max
atttttctccatcatttcagggctttctttcttctcttttgcctcccatattccattctcctcaaaatatctctacattttcctctctaccccaacaaaattccaaaaatttcccctcctatctccttttcacgtcacttaccacaactgggatgctccactttcttaaggattatttgttaactgagtcctaagtgtaattgagatggacggtgatatatttggagaattaggcaattcaactcaagtagatagcaagcttctacaggtatttcaaaagagcttattgcaagctcaagatattttgaatcagaatcggttgctgatcaatgagataaaccaaaac

SEQ ID NO: 14451 - DNA, 415 bp, Glycine max
tctcggtgaagaccaatcccacacattcaagggctaacgaggctaaattgtgcatataagaatcggaactactcgaaatatcattacgcctatcctgataccacaggaaatgtgctcggatttcctctgctatctccaattcacagatacttacgacatctggaatgctacacgttcatatggataatgtgataactgagtcctatatgaagccgatacggacggcgatgtatatggagtctgaggcacttgaactcatgtagatagcaagcttctacaggtattgcagcagagctgatcgcatgctcaagatatttagaatcagaatcagttgctgatcaatgagatcaaccgaaaccatgactgcaagatgcctgataatctgagtcgaaatgtgggtttgaatagagagctc

SEQ ID NO: 14452 - DNA, 246 bp, Glycine max
gatctcgataaagctactcaaaatcaattatcacgaggtcaacgattgctcgagttgcttaaacaatcccaatcagctcctcttaccgtggaagaacatatactaactatttatactggaacgaatggttatcttgattcattagaaattgtacaggtaaagaaatttcttgttgagttacatgcttacttaaacacgaataaacctcaattcaaagaaatcatatcttctaccaatacattcact

SEQ ID NO: 14453 - DNA, 206 bp, Glycine max
gttatcaagttgattcacttgccacacttcatcgctggacgacagactgatcaggcattttatggcagaaataaccgtgttctttaatttgcattcatatgcagatgtgtagcagctgctcaagatcatgtgtaagctcctcaatccagctgacatcaaatgtctgtatttaggagcaattgctcactataccgcctattactagg

SEQ ID NO: 14454 - DNA, 332 bp, Glycine max
tttttcttcatttcataatttttctcaaaaggtcaactttcatgtggaaaatcttccttctaatttccatctttcaaatctctttcgccactaggaggttgaatgagttagttcaggaccaaactcagcttcttcgttaccacaatggccctcttctctctggcaaaatctccattaacctcatttggtacggccacttcaaaccttcccagaaggcaatagtctccgatttcatcacctcgctgtcaccctcatcccctcacagcacccaaccatccgtcgccacgtggtggaaaaccacagaaaaatactaccaccacctcagtaatact

SEQ ID NO: 14455 - DNA, 361 bp, Glycine max
gtatcagcagagacactcagctgatacagatcttggaactatttactctgtcacagtgcctgtacggcgggttaaaccagaatatcaagaaatggatgaatttgggacaataacaaatgttgagtataaggacaccggagagacttctggttctgttgatgttacatttgatttctatgttccagacgaaaggtcttgattttgagttgaaagttcttgaattttgatttctttgtcaaaagttagtgtctgaaatgcttaccagtgaaagctaatctggatttctgtatatatttttaaattgaagcttacattagggtgacactagattttgatgagaagttttgtttttgtactatct

SEQ ID NO: 14456 - DNA, 400 bp, Glycine max
gcgacgatgaaagcaatgacagcaacgacaacgtttgatgtctctgccgcttgcttccgtgcccctccttcttgttcaccgaatccatgccacaccagtttttcagttataaactccctgaatcctcacaagggacgacggataagcgttgctgttccacctaagtttccaagcttccggagggaagcagctctgcaggggaatttggaggctgttagagtcccaacttcggtgcctgtgcgtgtagcatacgaacttcttctagctggtcatcgatatttggatgtaaggactccagaagagttcaatgctggacacgctcctggcgccattaacataccttatatgttcagagttggatcagggatgactaagaatagcaactttattagacaggtgt

SEQ ID NO: 14457 - DNA, 369 bp, Glycine max
tggaaattggggagtttgcttgacttatggctcttggtttgcacttggaggtctagcatctgctggttagacttacaccaattgtgctgccattcgcaaagccgattaatttctacttactacacagagagaggacggtggatggcgagagagtcatctctcaagcccatagcagatatatgtacctgtagaaggaagccgatcaaatgttgtacatacagcatgggctcttatgggactaattcatgctggacaggcggattgagaccccatgcctcttcaccgtgctgcattagtagctcattaattgtcagcttgaagagggtgattggcccccacaggttatcacgggagtgttcacgaaaaatt

SEQ ID NO: 14458 - DNA, 359 bp, Glycine max
ctcgagccgaatcggctcgagcggctcgagaaacaacaattgattaagagtgttgagtgagatcagaatggccgacttgatgaaaagaatcctcctaatggaggccgagcaagcaagcaaatggtccaaacatgttacttcaaccatcaacagtggcaatcatcacaacatcggtaacaggtatgaccactcataccactacgatgaacgccctatttataacagaggcactttcaatggtgatggcaatgggtcacatatccagggtgactttgactcctcagaacggaactactatggtcgtcgttatgggtattaattatctggatttgatacataagatatgctgggcaacatca

SEQ ID NO: 14459 - DNA, 363 bp, Glycine max
ctcgagcctatatcggctcgagcggctcgagaaacagcagtggattaagagtgttgagtgagatcagaatggccgacttgatgaaaagaatcctcctaatggaggccgagcaagcaagcaaatggtccaaacatgttacttcaaccatcaacagtggcaatcatcacaacatcggtaacaggtatgaccactcataccactacgatgaacgccctatttataacagaggcactttcaatggtgatggcaatgggtcacatatccagggtgactttgactcctcagaacggaactactatggtcgtcgttatggttattaattatctggatttgatacatagtatatgctgggcaacatcatat

SEQ ID NO: 14460 - DNA, 345 bp, Glycine max
cttccttttatgcctatcgcccatcactttgcttctttctgcgttgcgtgctcaagctcaatctcatgctccagctaccactttcaagtactgtgaaaagaatgcagactatgctgtgaaggtgagtggagtggaaatattgcctgaccccgtggagagaggagtgccattcacctttaagatcccagcttatactcctgaaccaattcaaagcggggacttgttatatgaaatttcttatgctggaatagaagcacaacctgctacatttctccatgatctctgtgaggaagcaccatgcccagtacctgcaggcaactttgtgctcgttcacaccgaattatt

SEQ ID NO: 14461 - DNA, 399 bp, Glycine max
caatttctctctcttttctctcttctgaattattgtcatggctaagagctcattcaagatggaacacccacttgagaggaggcaggctgaagcatctcggataagggagaagtatcccgaaagaattccagtaattgttgaaagggcagagaagagtgatgttcctgaaattgataagaaaaagtatctggtccctgctgatttgactgttggccagtttgtgtatgtggtgcggaagagaatcaagctgagtcccgagaaggccatcttcatttttgttaagaatattttgccaccaactgcggcaatgatgtctgcaatttatgaggaaaacaaggatgaagatggatttctatacatgacttacagtggagagaacacatttgggcttgtgttctg

SEQ ID NO: 14462 - DNA, 393 bp, Glycine max
aaaaaatttagaaacagaagaaacatatcaataacttaagtcacatacattctgacaccaaaaaaaaggaaaggaacttgagccacattctgtccctggtggactcaagaagagtctttcataggacagttaaaattatagcttgcaaaaagggttcactagcaaacattgcaatggcctcaacctcttctgctctcactatatcctcttcttccacccttcttgatggcaaggctccaagacagtcaccagctgcttcccctcaatgtgtgagcctcccccctccccctttgcactctcagaaccgttcatggaagaccactgcttattgtcgcaaggttgctcgaaaagttatggcaatggccacaggagaggcaccagctgaagctaccc

SEQ ID NO: 14463 - DNA, 343 bp, Glycine max
gggatctgacaggataggtgcggcgatggcttttgcagcgacgcccaagataataacggagtcactcgatatgcaaatccaaaggaggagcatgaaaggattgtatgggaaaaggtatctggtaacgatgaagcgaagtcaagatcattcaacgaaatgtgttattgagcgaatcatcagcgactgaaagaaaagcctcacaggaagaggcgcttcaaaacataactacatactgacattggactacatgtcgaacagatcctgcataacacgtaactttaactgtgatactgatggacctgaataaatgaatcccggatactatcatcaaacatgatcgctt

SEQ ID NO: 14464 - DNA, 323 bp, Glycine max
  modified_base (282)..(282): a, c, g, t, unknown, or other
tcggggaattccaattccacattttcaagaaataaggaggcaaaaatgttcatatatgaattggaattatttgttttcttattaggcctatcctgaagccaaaggaaatgagatcggaattcctcggggaattccaattccacattttcaagaaataaggaggcaaaaatgttcatatatgaattggaattatttgttttcatagtaggcctagcctgaagccaaaggaaatgagatcggaatgcctcggggaattccatgtccacatttagaggaagtaangaggcagaaatgttcatatcgggattggaattatttggttt

SEQ ID NO: 14465 - DNA, 382 bp, Glycine max
ctccacccaaccaaccaccttcttaattaataaacgtcgtcgtttcaatctcgttacacacctcaaaacgcagcggcacactcactagaatgcaagccgtttcgctctcacctttgtcgtttaaggattcttccgacgagttcgctggaaagttcgaacacgatttcatggccaagctcaaaatcaacgaagagaaagtcgaaaacgaaaacgaagagaagcataacgaagatgagatagaagaagaagaagaagaagaagaagaagaagaagaggaagagtttagcttcgttctcacgaattccgatggatcgccgatctccgccgacgacgcgttcgacaacggccagattcgtccgatttttccgattttcaaccagga

SEQ ID NO: 14466 - DNA, 204 bp, Glycine max
atatttttccttctttttcaaaggggtggtcaaagatagttcgttctcataaaaaaaataatgtaattttttgtatcgtttgtctttgaagtttttatttatttatttttatttttcatggaagtgggtcgtgcacatttctttctttgacaatgtatttgtttgtcggttatatgaatgaaacataggaaaaagtttacattt

SEQ ID NO: 14467 - DNA, 225 bp, Glycine max
gaagaagtttagctttttttatttttaatttccgtagaatttctgttcgagtgggtgggacaggtaacgaggaagacatcctgttggtttctgtgatatgaaaccaatttgggttgaataagcatgttttgtttggggaatgtgtgtgcattttgcttttgctttattaaatactaaattatgtgtttctgtccaccttttcaatatatcaaaagaaaataagag

SEQ ID NO: 14468 - DNA, 388 bp, Glycine max
catcaacagcaatggcagtatatgtccttgacattctcaaggagcaatggagcccacccctaaccatttccaaggtccttttgtcaatttgctcattgttgacggatcccaaccctgatgatccactcgtaccagagattgcacacatgtacaagactgacagggccaagtatgaggctacggcccgcagctggacccagaagtatgccatgggatgaccatatagagctgtttttcaatgaagcagcaaaatcataatttatgtaaaagaacaaaagatattttgaatgaatttgaatgctttattttatattagtggaactccacagtggtaagaagagacctggtttgccaatttgtgaatattttctttgctatacactggtga

SEQ ID NO: 14469 - DNA, 353 bp, Glycine max
tcagggaattccaattccacattttcaagaaataaggaggcaaaaatgttcatatatgaattggaattatttgttttcttattaggcctatcctgaagccaaaggaaatgagatcggaattcctcggggaattccaattccacattttcaagaaataaggaggcaaaaatgttcatatatgaattggaattatttgttttcttattaggcctatcctgaagccaaaggaaatgagatcggaagtcctcggggaattccagttccacatcggcaggagataaggaggcaaaaatgttcatatatgaattggaattatttgttttcgtattaggcctagcctgaagccaaaggaa

SEQ ID NO: 14470 - DNA, 158 bp, Glycine max
cgtgtaatcctgaatggatggaattttgagaagtgattttgggcatgattgttatgatccgtctattttcatgtacagaggaactacgatggttttacattgttatttagactgtccatcaatcagtaatcaagcatgatactttctaaaaatttcaa

SEQ ID NO: 14471 - DNA, 299 bp, Glycine max
cgactcaagaggatcccctcggggaattccaattccacattttcaagaaataatgaggcagaaatgttcatatatgaattggaatagttgtttctagaggccatctgaagcaaaggaaatgagatcggaattcctcggggaattccaattccacattttcaagaaataaggaggcaaaaatgttcatatatgaattggaattatttgttttcttattaggcctatcctgaagccaaaggaaatgagatcggaattcctcgggggtaccgaactcgaattccctataatgagtcgtatta

SEQ ID NO: 14472 - DNA, 304 bp, Glycine max
cacgcgagaggatccctcggggaattccaattccacattttcaagaaataatgaggcagaaatgttcatatatgaattggaattatttggtttcctattaggcctatcctgaagccaaaggaaatgaaatcggtattccttggggaattccacttccacatttttaagaaataatgatgcaaaaatgttcatagatgaattggcactatttggtttcttagtaggcctatcctgaagccaaatgaaatgagatcagtattcctcgggggttacgagctcgaattcgctataatgagtcgtatta

SEQ ID NO: 14473 - DNA, 157 bp, Glycine max
  modified_base (157)..(157): a, c, g, t, unknown, or other
gcataatctttcccctttttgattcttttgtagcaatacttgggtccttgtattgcctctttttttatctttgttgggatttgcctattgtttgattcattggatttgttacgattatcaagcgtttataatttgattctttcttgtgatctaaaan

SEQ ID NO: 14474 - DNA, 358 bp, Glycine max
tcagggaattcgaattcgacattttcaagaaataaggaggcaaaaatgttcatatatgaattggaattatttgttttcttattaggcctatcctgaagccaaaggaaatgagatcggaattcctcggggaattccaattccacattttcaagaaataaggaggcaaaaatgttcatatatgaattggaattatttgttttcttattaggcctatcctgaagccaaacgaaatgagatcggaattcctcggggaattcgaggtccacatttgtgcaggaaataacgaggcaaaaatgttcatataggaattgggattatttgttttcttagtagggctatcctgaagccaaaggaaatg

SEQ ID NO: 14475 - DNA, 310 bp, Glycine max
tcggggaattccaattccacattttcaagaaataaggaggcaaaaatgttgataggtgaattggaattatttgttttcttattaggcctatcctgaagccaaaggaaatgagatcggaattcctcggggaattccaattccacattttcaagaaataaggaggcaaaaatgttcatatatgaattggaattatttgttttcttattaggcctatcctgaagccaaaggaaatgagatcggaattcctcggggaattccaattccacattttcaagaaataaagaggcctaaatgtgcatatcttaattga

SEQ ID NO: 14476 - DNA, 263 bp, Glycine max
gaaccgaactcatgctcactatagctggcaccaaaatcaagggtcagtttctatggacggcgattccctttggtttttcaacacatactgtcacccaattgatgattccactgctcatgtttcacattaacacaaattcacttgtcttatgagaagaataccaaatgtcatgtcaataaattcatgagtctacaattgattgtatgtcaatactaccaacattgattaccagtatctttatatctctgtcacatttgataaat

SEQ ID NO: 14477 - DNA, 323 bp, Glycine max
  modified_base (76)..(76): a, c, g, t, unknown, or other
tcggggaattccaattccacattttcaagaaataaggaggcaaaaatgtgcatatatgaattggaattatttgttntcttattaggcctatcctgaagccaaaggaaatgaaatcggaattcctcgggaattcccatttcacattttcaagaaattagggagccaaaatggtcatatatgaattggaattatttggtttcttattaagcctatcctgaaaccaaaggaaatgagataccgaatttcttggggaaatccaaattccacattttaaagatatagggacgcaaatgtgcacatatgaaaatggaatatatgggttc

SEQ ID NO: 14478 - DNA, 322 bp, Glycine max
gtttgttttttttttttttttttttttttttttttttttttttttttttttttttttttttttttttttttttttttttttatattttttttttttttttttttttttttttttttttatattttaaaaagtttttttttttaaaaaaattgggaatttttaaaaaaatttttaaaatctgtaacacttaaatatcctaaaaatgcaaaataagtttttatcattcaaaaaacttattttcttcagatgttcaccaattgaaaataaaaaaaaaggggggtattcattatttgacatatggttcaacgcatttaaattttga

SEQ ID NO: 14479 - DNA, 57 bp, Glycine max
aaaaaaaaaaaaaaaaaaaaaaaaaaaacaaaaaagggaaggaaaaaaaaaaaaaga

SEQ ID NO: 14480 - DNA, 400 bp, Glycine max
tcggggaattccaattccacattttcaagaataagagcaaaaatgtgatatatgaattggaattatttgttttcttattaggcctatcctgaagccaaaggaaatgagatcggaattcctcggggaattccaattccacattttcaagaaataaggaggcaaaaatgttcatatatgaattggaattatttgttttcttattaggcctatcctgaagccaaaggaaatgagatcggaattcctcggggaattccaattccacattttcaagaaataaggaggcaaaaatgttcatatatgaattggaattatttgttttcttattaggcctatcctgaagccaaaggaaatgagatcgggattcctcgggggtaccgaactcgaattccctataatgagt

SEQ ID NO: 14481 - DNA, 183 bp, Glycine max
  modified_base (5)..(5): a, c, g, t, unknown, or other
tcggngaattccaattccacattttcaagaaataaggaggcaaaaatgttcatatatgaattggaattatttgttttcttattaggcctatcctgaagccaaaggaaatgagatcggaattcctcggggaattccaattccacattttcaagaaataaggaggcaaaaatgttcatatatgaa

SEQ ID NO: 14482 - DNA, 385 bp, Glycine max
tcggggaattccaattccacattttcaagaaataaggaggcaaaaatgtgcatatatgaattggaattatttgttctcttattaggcctatcctgaagccaaaggaaatgagatcggaattcctcggggaattccaattccacattttcaagaaataaggaggcaaaaatgttcatatatgaattggaattatttgttttcttattaagcctatcctgaagccaaaggaaatgagatcggaattcctcggggaattccaattccacattttcaagaaataaggaggcaaaaatgttcatatatgaattggaattatttgttttcttattaggcctatcctgaagccaaaagaaatgagatcggaatttctcgggggtaccgagct

SEQ ID NO: 14483 - DNA, 376 bp, Glycine max
  modified_base (17)..(17): a, c, g, t, unknown, or other
tcggggaattccaattncacattttcaagaattaaggaggcaaaatgtgcatagatgaattggaataatttgttttcttattaggcctatcctgaagccaaaggaaatgagatcggaattcctcggggaattccaattccacattttcaagaaataaggaggcaaaaatgttcatatatgaattggaattatttgttttcttattaggcctatcctgaagccaaaggaaatgagatcggaattcctcggggaattccaattccacattttcaagaaataaggaggcaaaaatgttcatatatgaattggaattatttgttttcttattaggcctatcctgaagccaaaggaaatgagatcggaattcctcgggggt

SEQ ID NO: 14484 - DNA, 327 bp, Glycine max
tcggtgaattccaattccacattttcaagaaataaggaggcaaaagatgggcatatatgaattggaattatttgttctcttattaggcctatcctgaagccaaaggaaatgagatcggaattcctcggggaattccaattccacattttcaagaaataaggaggcaaaaatgttcatatatgaattggaattatttgttttcttattaggcctatcctgaagccaaaggaaatgagatcggaattcctcggggaattccaattccacattttcaagaaataaggaggcaaaaatgttcatatatgaattggaattatttgatttctt

SEQ ID NO: 14485 - DNA, 353 bp, Glycine max
  modified_base (5)..(5): a, c, g, t, unknown, or other
tcggngaattccaattccacattttcaagaaataaggaggcaaaaatgttgatatgtgaattggaattatttgttttcttattaggcctatcctgaagccaaaggaaatgagatcggaattcctcggggaattccaattccacattttcaagaaataaggaggcaaaaatgttcatatatgaattggaattatttgttttcttattaagcctatcctgaagccaaaggaaatgagatcggaattcctcggggaattccaattccacattttcaagaaattaagaagcaaaaatggtcatatatgaattggaattatttggtttcttattaaggccattcctgaacccaaagga

SEQ ID NO: 14486 - DNA, 396 bp, Glycine max
tcggggaattccaattccacattttcaagaaataaggaggcaaaaatgttcatatatgaattggaattatttgttttcttattaggcctatcctgaagccaaaggaaatgagatcggaattcctcggggaattccaattccacattttcaagaaataaggaggcaaaaatgttcatatatgaattggaattatttgttttcttattaggcctatcctgaagccaaaggaaatgagatcggaattcctcggggaattccaattccacattttcaagaaataaggaggcaaaaatgttcatatatgaattggaattatttgttttcttattaggcctatcctgaagccaaaggaaatgagatcggaattcctcgggggtaccgagctcgaattcccta

SEQ ID NO: 14487 - DNA, 366 bp, Glycine max
tcggggaattccaattccacattttcaagaaataaggaggcaaaaatgttcatatatgaattggaattatttgttttcttattaggcctatcctgaagccaaaggaaatgagatcggaattcctcggggaattccaattccacattttcaagaaataaggaggcaaaaatgttcatatatgaattggaattatttgttttcttattaggcctatcctgaagccaaaggaaatgagatcggaattcctcggggaattccaattccacattttcaagaaataaggaggcaaaaatgttcatatatgaattggaattatttgttttcttattaggcctatcctgaagccaaaggaaatgagatcggaat

SEQ ID NO: 14488 - DNA, 376 bp, Glycine max
tcgggaattccaattccacattttcaagaaataaggaggcaaaaatggtcatatatgaattggaagtatgtgttttcttattaggcctatcctgaagccaaaggaaatgagatcggaattcctcggggaattccaattccacattttcaagaaataaggaggcaaaaatgttcatatatgaattggaattatttgttttcttattaggcctatcctgaagccaaaggaaatgagatcggaattcctcggggaattccaattccacattttcaagaaataaggaggcaaaaatgttcatatatgaattggaattatttgttttcttattaggcctatcctgaagccaaaggaaatgagatcggaattcctcgggggt

SEQ ID NO: 14489 - DNA, 365 bp, Glycine max
  modified_base (50)..(50): a, c, g, t, unknown, or other
cgactaacgttcattccaagatatgtcaatctcatgatggatgcgttaanacagggagtggcaaattttgcagctcgttatccgaatcctgagagtgagtatggatggtgtattgactctgattctgaagccctaaaaggcttcttgaagatgcctacaacatttgccgagtaacatggtatgcccaatgaaaaagttgcacacatagatgcgtctactacttcgaataaatgtgtgctccatgcaatacgtagtcacagtttccaactcaattggtaatgatggttcatgattgtatttgagcctacaagtaatttttcttttggaactcgatatccaagtgttctttggatatatgaattatt

SEQ ID NO: 14490 - DNA, 384 bp, Glycine max
tcggtgaattccaattacacattttcaagaaataaggaggctaaaatgggcatgtatgaattggaatcagttgttttcttattaagcctatcctgaagccaaaggaaatgagatcggaattcctcggggaattccaattccacattttcaagaaataaggaggcataaatgttcatatatgaattggaattatctgttatcttattaggcctatcctgaagccaaaggaaatgagatcggaattcctcggggaattccaattccacattttcaagaaataaggaggcaaaaatgttcatatatgaattggaattattcgttttcttattaggcctatcctgaagccaaaggaaatgagatcggaattcctcgggggtaccgagc

SEQ ID NO: 14491 - DNA, 393 bp, Glycine max
tcggggaattccaattccacattttcaagaaataaggaggcagaaatggtcatatatgaattggaattatttgttttcttattaggcctatcctgaagccaaaggaaatgagatcggaattcctcggggaattccaattccacattttcaagaaataaggaggcaaaaatgttcatatatgaattggaattatttgttttcttattaggcctatcctgaagccaaaggaaatgagatcggaattcctcggggaattccaattccacattttcaagaaataaggaggcaaaaatgttcatatatgaattggaattatttgttttcttattaggcctatcctgaaaccaaaggaaatgagatcggaattcctcgggggtaccgagctcgatttcc

SEQ ID NO: 14492 - DNA, 372 bp, Glycine max
atcccgtcggtgaattccaattgctcattttcaagaaataaggaggcaaaaatagtcatgtatgaattggaagtaggtgttttcttattaagcctatcctgaagccaaaggaaatgagatcggaattcctcggggaattccaattccacattttcaagaaataaggaggcaaaaatgttcatatatgaattggaattatttgttttcttattaggcctatcctgaagccaaaggaaatgagatcggaattcctcggggaattccaattccacattttcaagaaataaggaggcaaaaatgttcatatatgaattggaattatttgttttcttattaggcctatcctgaagccaaaagaaatgagatcggaat

SEQ ID NO: 14493 - DNA, 275 bp, Glycine max
tcggtgaattccattgcctcattttcaagaaataaggagtcaagaatggtcatatatgaatgggggttatttgttttcttattaggcctatcctgaacccaaaggaaatgagatcggaattcctcggcgaattccaattccacattttcaagaaataaggaggcaaaaatgttcatatatgaattgtaattatatgctttcttattaggcctatcctgaatccaatggaaatgagatcggaattccttctgaaattccaattccacattttcaag

SEQ ID NO: 14494 - DNA, 310 bp, Glycine max
tcggggaattccaattcctcattttcaagaaataaggaggcaggaatggtcatatatgaattggaattatctgttttcttattaggcctatcctgaagccaaaggaaatgagatcggaattcctcggggaattccaattccacattttcaagaaataaggaggcaaaaatgttcatatatgaattggaattatttgctttcttattaggcctatcctgaagccaaaggacatgagatcggaattcctcggggaattccaattccacattttcaagatataaggaggcacatatgttcatatatgatttgc

SEQ ID NO: 14495 - DNA, 370 bp, Glycine max
tcggggaattccaattccacattttcaagaaataaggaggcaaaaatgttcatatatgaattggaattatttgttttcttattaggcctatcctgaagccaaaggaaatgagatcggaattcctcggggaattccaattccacattttcaagaaataaggaggcaaaaatgttcatatatgaattggaattatttgttttcttattaggcctatcctgaagccaaaggaaatgagatcggaattcctcggggaattccaattccacattttcaagaaataaggaggcaaaaatgttcatatatgaattggaattatttgttttcttattaggcctatcctgaagccaaaggaaatgagatcggaattcct

SEQ ID NO: 14496 - DNA, 398 bp, Glycine max
tcggggaattccaattccacattttcaagaaataaggaggcaaaaatgtgtcatatatgaattggaattatttgttttcttattaggcctatcctgaagccaaaggaaatgagatcggaattcctcggggaattccaattccacattttcaagaaataaggaggcaaaaatgttcatatatgaattggaattatttgttttcttattaggcctatcctgaagccaaaggaaatgagatcggaattcctcggggaattccaattccacattttcaagaaataaggaggcaaaaatgttcatatatgaattggaattatttgttttcttattaggcctatcctgaagccaaaggaaatgagatcggaattcctcgggggtaccgagctcgaattccctat

SEQ ID NO: 14497 - DNA, 388 bp, Glycine max
  modified_base (31)..(31): a, c, g, t, unknown, or other
tcggggaattccaattccacattttcaaganataaggaggcaaaaatgttcatatatgaattggaattatttgttttcttattaggcctatcctgaagccaaaggaaatgagatcggaattcctcggggaattccaattccacattttcaagaaataaggaggcaaaaatgttcatatatgaattggaattatttgttttcttattaggcctatcctgaagccaaaggaaatgagatcggaattcctcggggaattccaattccacattttcaagaaataaggaggcaaaaatgttcatatatgaattggaattatttgttttcttattaggcctatcctgaagccaaaggaaatgagatcggaattcctcgggggtaccgagctcga

SEQ ID NO: 14498 - DNA, 364 bp, Glycine max
tcggggaattccaattccacattttcaagaaataaggaggcaaaaatgttcatatatgaattggaattatttgttttcttattaggcctatcctgaagccaaaggaaatgagatcggaattcctcggggaattccaattccacattttcaagaaataaggaggcaaaaatgttcatatatgaattggaattatttgttttcttattaggcctatcctgaagccaaaggaaatgagatcggaattcctcggggaattccaattccacattttcaagagataacgacgcaaatatgttcatatatgaattggaattatctgttatcttattaggcctatcctgaagccaaaggaaatgagatcgga

SEQ ID NO: 14499 - DNA, 328 bp, Glycine max
tcggggaattccaattccacattttcaagaattaaggaggcaaaaatgtgcagttttgattgggaataattggtttcctaattaggctattcttgaacccaagggaatgggatcgggatttcttggggaattccaatttcacatatttaaaaaataaggaggcgaaaatgttcatatatgaattgggattatttgtgttcttattatgcctatactgaaacccaaggaaatgagatcggaatttctcggggaattccaattccacattttcaagaaataaagaggcgaaaatgtgcatatatgaattgggattatttgggttcttatt

SEQ ID NO: 14500 - DNA, 148 bp, Glycine max
tacataaggactgcttttgaatgttgtcacccttcatatgatattgtgatgtatggtttatttcattttggctatgtcttgaaattaaaattctcgttgccttctcccagatttgcacttaataggattgccatattctttttctaaa

SEQ ID NO: 14501 - DNA, 298 bp, Glycine max
cgctgagttgaaggtcaaggaactcaagaacggtcgcttggctatgttctccatgtttggtttctttgttcaggccattgtcactggcaagggccctattcagaacctttacgaccatgttgctgatcctgttgccaacaatgcttgggcttatgccactaactttgtccctggacaatgagcattgcaattcaatgcaatcttctgctcccattttctctaatgtaactacacctgtgtaccagaagaatctgtatgagaaccattatattatatatattagaaatttctgtcccta

SEQ ID NO: 14502 - DNA, 196 bp, Glycine max
attaaagctgtattatctttcaaatgtcagtggaagattaattgtgtaatcctttggttatagtcctggttgtctctcatttgagcttcatttagatatatgtaatttttgccttgaggcttctcatatacctttactggaaaacatgatctgatcaaaagctgacattcaatgtgtcacaaatttgaaaatccaa

SEQ ID NO: 14503 - DNA, 439 bp, Glycine max
tcggggaattccaattccttattttcaagaaataaggaggcaaaaatgtgcatgtatgaattggaattatttgttttcttattaggcctatcctgaagccaaaggaaatgagatcggaattcctcggggaatcccaattccacattttcaagatataatgaggcatatatgttcatatattatttggaattatttgtcttctatattatgcctatcttttatctaattgcttttttacctttatttctttgctcttcttttttttttttttttttttttttttttctctctttttgttttttatatttatttattattttacttttttttatttttttttattctttttttttcttttttaattttatttttcttttttttttcttctttttctatttcatttttattatcttctatttctttcttttttttttttttt

SEQ ID NO: 14504 - DNA, 364 bp, Glycine max
tcggggaattccaattccacattttcaagaaataaggaggcaaaaatgtgcatatatgaattggaattatttgttttcttattaggcctatcctgaagccaaaggaaatgagatcggaattcctcggggaattccaattccacattttcaagaaataaggaggcaaaaatgttcatatatgaattggaattatttgttttcttattaggcctatcctgaagccaaaggaaatgagatcggaattcctcggggaattccaattccacattttcaagaaataaggaggcaaaaatgttcatatatgaattggaattatttggtttcttattaggcctatcctgaagccaaaggaaatgagatcgga

SEQ ID NO: 14505 - DNA, 377 bp, Glycine max
tcggggaattccaattccacattttcaagaaataaggaggcaaaaatgttcatatatgaattggaattatttgttttcttattaggcctatcctgaagccaaaggaaatgagatcggaattcctcggggaattccaattccacattttcaagaaataaggaggcaaaaatgttcatatatgaattggaattatttgttttcttattaggcctatcctgaagccaaaggaaatgagatcggaattcctcggggaattccaattccacattttcaagaaataaggaggcaaaaatgttcatatatgaattggaattatttgttttcttattaagcctatcctgaagccaaaagaaatgagatcggaattcctcgggggt

SEQ ID NO: 14506 - DNA, 252 bp, Glycine max
tcggggaattccaattcttcattttcaagaaataaggaggcaaaaatgtgcatatatgaattggaattatttgttttcttattaggcctatcctgaagccaaaggaaatgagatcggaattcctcgtggaattccaattccacattttcaagaaataaggaggcaaaaatgttcatatatgaattggaattatttgtttccttattaggcctatcctgaatcccaatgacatgcgatctgaattcctcgggg

SEQ ID NO: 14507 - DNA, 298 bp, Glycine max
agaagagcttggttgatgtttcttggtatggcctatgggatgaatgaacgatataatgcgtttctgtaattcatttacttctctcaaaaaaaaaaatatatgcctgtcatccattactgaacatgttgacatgtgaattaactccagacctttattttcatgtcttccatatttacacaaagctctaccaaatatatgcttcactagacatctgcattattgccattatgttcaaatatgataaccgttacactgattacacaatctatacttcatatacttaaaatttttaatccta

SEQ ID NO: 14508 - DNA, 338 bp, Glycine max
tcggggaattccaattccacattttcaagaaataaggaggcaaaaatgtgcatatatgaattggaattatttgttttcttattaggcctatcctgaagccaaaggaaatgagatcggaattcctcggggaattccaattccacattttcaagaaataaggaggcaaaaatgttcatatatgaattggaattatttgttttcttattaggcctatcctgaagccaaaggaaatgagatcggaattcctcggggaattccaattccacattttcaagaaataaggaggcaaaaatgttcatatatgaattggaattatttgtattcttattaggcctatc

SEQ ID NO: 14509 - DNA, 354 bp, Glycine max
tcggggaatttttattcttcattttcaagaaataaggagggggaaatgttcatatatgaattggaattatttgttttcttattaggcctatcctgaagccaaaggaaatgagatcggaattcctcggggaattccaattccacattttcaagaaataaggaggcaaaaatgttcatatatgaattggaattatttgttttcttattaggcctatcctgaagccaaaggaaatgagatcggaattcctcggggaattccaattccacattttcaagaaataaggaggcaaaaatgttcatatatgaattggaattatttgttttcttattaagcctatcctgaagccaaaagaaa

SEQ ID NO: 14510 - DNA, 371 bp, Glycine max
tcggggaattccaattcctcattttcaagaaataaggaggcaaaaatgtgcatatatgaattggaattatttgttttcttattaggcctatcctgaagccaaaggaaatgagatcggaattcctcggggaattccaattccacattttcaagaaataaggtggcaaaaatgttcatatatgaataggaattatttgttttcttattaggcctatcctgaagccaaaggaaatgagatcggaattcctcggtgaattccaattccacattttcaaggtataaggaggcaaaaatgatcatatatgaactggaattatttgccgactgattaggcctatcctgaatcctttggatatgagatcggaatttcta

SEQ ID NO: 14511 - DNA, 315 bp, Glycine max
  modified_base (128)..(128): a, c, g, t, unknown, or other
tcggggaattccaattccacattttcaagaaataaggaggcaaaaatgttcatatatgaattggaattatttgttttcttattaggcctatcctgaagccaaaggaaatgagatcggaattcctcggngaattccaattccacattttcaagaaataaggaggcaaaaatgttcatatatgaatgggaataattggtttcctaataaggccattcttgaacccaaaggaatgaaaaccggatttcttcgggaattccaatttcacattttcaagaaataaagaggcaaaaatgttcatatattgaattggaatta

SEQ ID NO: 14512 - DNA, 267 bp, Glycine max
tcggggaattccaattctacattttcaagaaataaggaggcaaaaatgttcatatatgaattggaattatttgttttcttattaggcctatcctgaagccaaaggaaatgagatcggaattcctcggggaattccaattccacattttcaagaaataaggaggcaaaaatgttcatatatgaattggaattatttgttttcttattaggcctatcctgaagccaaaggatatgagatcggaattcctcggtgatttcgaattttaca

SEQ ID NO: 14513 - DNA, 99 bp, Glycine max
tcggggaattcctattccttattttcaagaaataaggaggcaaaaatgttcatatatgaattggaatgattagatgtcttattaggcctatcctgaagc

SEQ ID NO: 14514 - DNA, 308 bp, Glycine max
tcggggaattccaattccacattttcaagaaataaggaggcaaaaatgttcatatatgaattggaattatttgttttcttattaggcctatcctgaagccaaaggaaatgagatcggaattcctcggggaattccaattccacattttcaagaaataaggaggcaaaaatgttcatatatgaattggaattatttgttttcttaataagcctatcctgaagccaaaggaaatgagatcggaatttctcggggaatttcaattccacattttcaagaaataaggaggcaaaaatgttcatatatgaatt

SEQ ID NO: 14515 - DNA, 209 bp, Glycine max
tgtttgcttttgctgctgtatatatggactacgccttcttttgtttgaattatgcaatgtaaagttgcaaaaaactcttgctgtgtatcgattttgtagtttgttgattgtttttggatgaattttgacagctttttgttaacatgaagggaaccatgatgggaattagcacttcgatttcgtgttcggctatgactgccgtgcatatt

SEQ ID NO: 14516 - DNA, 78 bp, Glycine max
  modified_base (23)..(23): a, c, g, t, unknown, or other
tcggggaattccaattcctcatnctcaagaaataaggaggcaaaaatgttcatatgtgaattgtgaataggtgttatt

SEQ ID NO: 14517 - DNA, 370 bp, Glycine max
tcggggaattccaattccacattttcaagaaataaggaggcaaaaatgttcatatatgaattggaattatttgttttcttattaggcctatcctgaagccaaaggaaatgagatcggaattcctcggggaattccaattccacattttcaagaaataaggaggcataaatgttcatatatgaattggaattatttgtattcttattatgcctatcctgaagccaaaggaaatgagatcggaattcctaggggaatttccaatttcacattttcaagaaatagtgaggcgaaaatttttatatatgaattgtaattattggtattaatattaagcctatcctgaagccaaaggaaatgagatccgaattcc

SEQ ID NO: 14518 - DNA, 310 bp, Glycine max
tcggggaattccaattccacattttcaagaaataaggaggcaaaaatgttcatatatgaattggaattatttgttttcttattaggcctatcctgaagccaaaggaaatgagatcggaattcctcggggaattccaattccacattttcaagaaataaggaggcaaaaatgttcatatatgaattggaattatttgttttcttattaggcctatcctgaagccaaaggaaatgagatcggaattcctcggggaattccaattccacattttcaagaaataaaggtgcaaaaatggtcatatatgaattgg

SEQ ID NO: 14519 - DNA, 344 bp, Glycine max
ctttaaaaaaatcattttcctttaaacttcaattttagagttctctctctgattcatccccagcaatggcttgtgcattgcaagcaaccttagcagccaacgcctatgtcttttcttccaggagattctccttgaagctccaaaagaacagtaagagaaggttttctttgttcactgttagagttgattctgatgaatctgattgcaatgaggaagaatgtgccccggataaggaaatagggaagggcagtgtggaatggttagctggggagaagacgaaagtagtgggtacattcccacctcgtcgtaagccgggttggactggctatgttgagaaggacact

SEQ ID NO: 14520 - DNA, 385 bp, Glycine max
ttggggaattccaattccacattttcaagaaataaggaggcaaaaatgttcatatatgaattggaattatttgttgtcttattaggcctatcctgaagccaaaggaaatgagatcggaattcctcggggaattccaattccacattttcaagaaataaggaggcaaaaatgttcatatatgaattggaattatttgttttcttattaggcctatcctgaagccaaaggaaatgagatcggaattcctcggggaattccaattccacattttcaagaaataaggaggcaaaaatgttcatatatgaattggaaataattggtttcttattaggcctatcctgaagccaaaggaatgggaacggaattcttcgggggtaccgagctc

SEQ ID NO: 14521 - DNA, 397 bp, Glycine max
tcggggaattccaattccacattttcaagaaataaggaggcaaaaatgtgcatatatgaattggaattatttgttttcttattaggcctatcctgaagccaaaggaaatgagatcggaattcctcggggaattccaattccacattttcaagaaataaggaggcaaaaatgttcatatatgaattggaattatttgttttcttattaggcctatcctgaagccaaaggaaatgagatcggaattcctcggggaattccaattccacattttcaagaaataaggaggcaaaaatgttcatatatgaattggaattatttgttttcttattaggcctatcctgaagccaaaggaaatgagatcggaattcctcgggggtaccgagctcgaattccctat

SEQ ID NO: 14522 - DNA, 226 bp, Glycine max
aggatttctgttagacaaaccctgctgatgaggaatgcagagtttatgaatagaggagagctccttttctaacgtatcatgtgaaaaagaaggaaattgttcagacagtctatctgaggagagattttcaaagtttatatttatttgcagccaataataagttttggcgtgactgaatgaatatcacccatatattgattgatattgaatttctgaattcttgtaa

SEQ ID NO: 14523 - DNA, 324 bp, Glycine max
tcggggaattccaattccacattttcaagaaataaggaggcaaaaatgtgcatatatgaattggaattatttgttttcttattaggcctatcctgaagccaaaggaaatgagatcggaattcctcggggaattccaattccacattttcaagaaataaggaggcaaaaatgttcatatatgaattggaattatttgttttcttattaggcctatcctgaagccaaaggaaatgagatcggaattcctcggggaattccaattccacattttcaagaaataaagaggcaaaaatgttcatatatgaattggaattatttggtttc

SEQ ID NO: 14524 - DNA, 386 bp, Glycine max
tcggggaattccaattccacattttcaagaaataaggaggcaaaaatggtcatatatgaattggaattatttgttttcttattaggcctatcctgaagccaaaggaaatgagatcggaattcctcggggaattccaattccacattttcaagaaataaggaggcaaaaatgttcatatatgaattggaattatttgttttcttattaggcctatcctgaagccaaaggaaatgagatcggaattcctcggggaattccaattccacattttcaagaaataaggaggcaaaaatgttcatatatgaattggaattatttgttttcttattaggcctatcctgaagccaaaggaaatgagatcggaattcctcgggggtaccgagctc

SEQ ID NO: 14525 - DNA, 385 bp, Glycine max
tcggggaattccaattcctcattttcaagaaataaggaggcaaaaatgtgcatatatgaattggaattatttgttttcttattaggcctatcctgaagccaaaggaaatgagatcggaattcctcggggaattccaattccacattttcaaggaattagggagcaaaaatgttcatatatgaattggaattatttggtttcttattaggcctatcctgaagccaaaggaaatgagatcggaattcctcggggaattccaattccacattttcaagaaataaggaggcgcaaatgtgcatatatgaattgggattatatgggttcttattaggcctatactgaaaccccaggggatgtgatcgggatttctctggggtacccagct

SEQ ID NO: 14526 - DNA, 378 bp, Glycine max
tcggggaattccaattccacattttcaagaaataaggaggcaaaaatgtgcatatatgaattggaattatttgttttcttattaggcctatcctgaagccaaaggaaatgagatcggaattcctcggggaattccaattccacattttcaagaaataaggaggcaaaaatgttcatatatgaattggaattatttgttttcttattaggcctatcctgaagccaaaggaaatgagatcggaattcctcggggaattccaattccacattttcaagaaataaggaggcaaaaatgttcatatatgaattggaattatttgttttcttattaggcctatcctgaagccaaaggaaatgagatcggaattcctcgggggta

SEQ ID NO: 14527 - DNA, 350 bp, Glycine max
gaaaaattactatgacaaggtttttgaaggacaccatgggctacttaattaatttggcaatcatggaagattaagtgctttaatttgggtgggaattaagtatgaaattgaagccactgcttcttcaactagtttgatgcatgtatgatgtatctattattaggttgtcgatcttctgggaaatatgtgtatttatatctagtactatatatatggtatcttaatcaagtttgtattgattttcttggttgttgagataacatatatgtaatatgctctcctttcagccagcttgaatgtgcacaagtgaacttgttacgctatataatgaaatgatgtattgctcgata

SEQ ID NO: 14528 - DNA, 389 bp, Glycine max
  modified_base (5)..(5): a, c, g, t, unknown, or other
  modified_base (75)..(75): a, c, g, t, unknown, or other
  modified_base (127)..(127): a, c, g, t, unknown, or other
  modified_base (373)..(373): a, c, g, t, unknown, or other
tcggngaattccaattccacattttcaagaaataaggaggcaaaatgttcatttatgaattggaattatttgttntcttattaggcctatcctgaagccaaaggaaatgagatcggaattcctcggngaattccaattccacattttcaagaaataaggaggcaaaaatgttcatatatgaattggaattatttgttttcttattaggcctatcctgaagccaaaggaaatgagatcggaattcctcggggaattccaattccacattttcaagaaataaggaggcaaaaatgttcatatatgaattggaattatttgttttcttattaggcctatcctgaagccaaaggaaatgagatcggaattcctcggngaattccaattccaca

SEQ ID NO: 14529 - DNA, 330 bp, Glycine max
tcggggaattccaattccacattttcaagaaataaggaggcaaaaatggtcatatatgaattggaattatttgttttcttattaggcctatcctgaagccaaaggaaatgagatcggaattcctcggggaattccaattccacattttcaagaaataaggaggcaaaaatgttcatatatgaattggaattatttgttttcttattaggcctatcctgaagccaaaggaaatgagatcggaattcctcggggaattccaattccacatcttcaagaattatggaggcaaatatgttcatatgtgatttggaattattcgtgttcttatta

SEQ ID NO: 14530 - DNA, 309 bp, Glycine max
tcggtgaattccaattcctcattttcaagaaataaggaggcaaaggatggtcatatatgaattggaattatttgttttcttattaggcctatcctgaagccaaaggaaatgagatcggaattcctcggggaattccaattccacattttcatgacataaggaggcaaaaatgttcatatatgaattggaattatttgttatcatattaggcctatcctgaagccaaatgaaatgcgatcggaattcctcgagtaattccaactccacattttcaatgatgtagggatgcatgtttcgttcatatatgaa

SEQ ID NO: 14531 - DNA, 220 bp, Glycine max
gatagacaaatagggagaggaggttggtccgctgccagaggaggattctgtacatgtatatatgtgttgattatataccaaacactggaaaccttagagggagatagaatgagtggtgggtacttaatgggttggtgaaatgaggatgaatatgttgttattgctattatttctctgtcttagccatttaatcaataaaatttcccattttttctgttaa

SEQ ID NO: 14532 - DNA, 221 bp, Glycine max
gatagacaatagggagaggaggttggtccgctgccagaggaggattctgtacatgtatatatgtgttgattatataccaaacactggaaaccttagagggagatagaatgagtggtgggtacttaatgggttggtgaaatgaggatgaatatgttgctattgctattatttctctgtcttagccatttaatcaataaaatttcccattttttctgataaag

SEQ ID NO: 14533 - DNA, 361 bp, Glycine max
attggaatgatatgttttcttattaggcctatcctgaagccaaaggaaatgagatcggaattcctcggggaattccaattccacattttcaagaaataaggaggcaaaaatgttcatatatgaattggaattatttgttttcttattaggcctatcctgaagccaaaggaaatgagatcggaattcctcggggaattccaattccacattttcaagaaataaggaggcaaaaatgttcatatatgaattggaattatttgttttcttattaggcctatcctgaagccaaaggaaatgagatcggaattccctcggggtaccgaactcgaattcctatagtgagtcgtttaaattcgtaatc

SEQ ID NO: 14534 - DNA, 417 bp, Glycine max
tcggggaattccaattccacattttcaagaaataaggaggcaaaaatgtgcatatatgaattggaattatttgttttcttattaggcctatcctgaagccaaaggaaatgagatcggaattcctcggggaattccaattccacattttcaagaaataaggaggcaaaaatgttcatatatgaattggaattatttgttttcttattaggcctatcctgaagccaaaggaaatgagatcggaattcctcggggaattccaattccacattttcaagaaataaggaggcaaaaatgttcatatatgaattggaattatttgttttcttattaggcctatcctgaagccaaaggaaatgagatcggaattcctcggggaattccaattccacattttcaagaaataaggaggcaaaaatg

SEQ ID NO: 14535 - DNA, 418 bp, Glycine max
  modified_base (374)..(374): a, c, g, t, unknown, or other
  modified_base (393)..(393): a, c, g, t, unknown, or other
tcggggaattccaattccatatttttaagaaataaggaggcaaaaatgttgatatgtgaattggaattatttgttttcttattaggcctatcctgaagccaaaggaaatgagatcggaattcctcggggaattccaattccacattttcaagaaataaggaggcaaaaatgttcatatatgaattggaattatttgttttcttattaggcctatcctgaagccaaaggaaatgagatcggaattcctcggggaattccaattccacattttcaagaaataaggaggcaaaaatgttcatatatgaattggaattatttgttttcttattaggcctatcctgaagccaaaggaaatgagatcggaattcctcggngaattccaattccacattntcaagaaataaggaggcaaaaatgt

SEQ ID NO: 14536 - DNA, 197 bp, Glycine max
tcggtgaatggctattccttattgccaagaaataaggatgcatgaatgtgcatatatgaattgggatcatgtgcttacttattaggcctatcctgaagccaaaggacatgagatcggaatccctcggggaattccaattccacattgtcaagaaataaagacgcaaacgatgtcatatatgaaatggaattatttgt

SEQ ID NO: 14537 - DNA, 406 bp, Glycine max
tcggggaattccatttccatattttcaagaaatacggaggcaaagctgtgcatatatgaatggccactactgcttctccaattaccactcttcttgaacaccctctattgctcttgctcccttggtgtagtttgtgtaaaagggtatctctatttatagagtttccattgtctctggaggcaattttcgaccttaggtgtgttttggagagtttttttttttttttttgtgttgtttagttgttgaggttggttggtttgtgagagagagaatggtgggtgctctatctgttgtgggatcatcagtaatggactctcacactggcccttgtttgtgtgtggatgctctcccaacaacaactagtgtcaatctcaagagtggtggacatgttgatttgtgcaagaat

SEQ ID NO: 14538 - DNA, 118 bp, Glycine max
ataggctctaaacgtctctttatttaacttgtccatcagtagaataatcatcattttcaattattggcacacacacacggcttacagatcagagttaggtacaacatccattctgctt

SEQ ID NO: 14539 - DNA, 52 bp, Glycine max
atcccttccaactcccaatttataatggattttctgctgaatttattttgca

SEQ ID NO: 14540 - DNA, 370 bp, Glycine max
tcggggaatgcctattccttattttcaagaaataaggaggcagggaatgggcatatatgaattggaattatttgttttcttattaggcctatcctgaagcctaaggatatgagatcggaattcctcggggattcccaattccacatttttatgaaataatgaggcaaaaatgttcatatatgaattgtaattattcggtaacttattaggcctatcctgaatccaaatgaaatgatatcggaattcctcggggaattccaattccacatttccaagaactaccgacgcacatatgttcatatatgaatcgtaattatctgtactcttattaggcctatcatgaagccaagagaaatgagatcgcaattcc

SEQ ID NO: 14541 - DNA, 323 bp, Glycine max
tcggggaattccaattcccatttttaagaaattaaggaggcaaaatggtgattttttaaatgggaataattggtttcctaattaggcctatcctgaacccaaaggaaatgaaatcggaattcctcggggaattccaattccacattttcaagaaataaggaggcaaaaatgttcatatatgaattggaattatttgtttcttattaggcctatcctgaaaccaaaagaaatgagatcggaattccttcgggaattccaattccacattttcaagaaataaggaagcaaaaatgttcatatatgaattggaattaatttgtttc

SEQ ID NO: 14542 - DNA, 253 bp, Glycine max
ataagtttctccgttaggtccccttggaagccagacttttttatgcaattggcggatggtattggaactttgtaggttctgattggtttgatttttttccttttattcgattttcttgttgtggccaagaattaggtgcctcgagttaggagaacgatagtctagtatcttttctcccagagggatttttgagtcagtttctgtttatatttattatatgcttaattggtttttatgtttgcattaaactcag

SEQ ID NO: 14543 - DNA, 155 bp, Glycine max
acgagtttatattactagttccacagaaatggatagaagatcttattcataatttttagcaatttatacatgcatttattgtattttgtaaacatgctttaaggtcattttgtaacatgaatagaatattcaatccaatatttcttattgatatt

SEQ ID NO: 14544 - DNA, 155 bp, Glycine max
acgggtttatattactagttccacagaactggatacaagatcttattcataatttttagcaatttatacatgcattaattgtattttgtaaacatgctttaaggtcattttgtaacatgaatagaatattcaatccaatatttcttattgatatt

SEQ ID NO: 14545 - DNA, 247 bp, Glycine max
tttttcgttaggtccccttggaagccagactttgttatgcaattggcggatggtattggaactttgtaggttctgattggtttgatttttttccttttattcgattttcttgttgtggccaagaattaggtgcctcgagttaggagaacgatagtctagtatcttttctcccagagggatttttgagtcagtttctgtttatatttattatatgcttaattggtttttatgtttgcattaaactcag

SEQ ID NO: 14546 - DNA, 138 bp, Glycine max
gtgctgtgagaataacagtgtgttctggtcatgcatgcatgctgagagaaacaatgtatgtcggtcttaaaaagttcactgtatttgcataaactatatgtactaaataatggatttacaagtgtgttttttttataa

SEQ ID NO: 14547 - DNA, 299 bp, Glycine max
caacatatggctgtagtagtattcacctaaatgtttcaagtgaagagttggattatatatagcaactaaataccggtatctggttatttttaattagctgctaaggatttcttatgtatctgctggttgttcatgtttgaatcggaagccctgatgttcctaatgtattttatatagttttttaaggcacttcgtggtgcttaaggtggtttactgcactagaagctctaaattatttgttttgaattttgatgtctaaataattgattagtaagcaaataatcttttcttccttgtga

SEQ ID NO: 14548 - DNA, 364 bp, Glycine max
tcggggaattccaattccacattttcaagaaataaggaggcaaaaatgttcatatatgaattggaattatttgttttcttattaggcctatcctgaagccaaaggaaatgagatcggaattcctcggggaattccaattccacattttcaagaaataaggaggcaaaaatgttcatatatgaattggaattatttgttttcttattaggcctatcctgaagccaaaggaaatgagatcggaattcctcggggaattccaattccacattttcaagaaataaggaggcaaaaatgttcatatatgaattggaattatttgttttcttattaagcctatcctgaagccaaaggaaatgagatcgga

SEQ ID NO: 14549 - DNA, 337 bp, Glycine max
ctcgagccgattcggctcgagttgtacctgattattggcatttcatgccactgttaagactgtaccattttccactgtttgtgccatatgtgacatccaatgtattactccccatgtgtatgttgtatataactttatcattttgaaaacttgttgtattgttctctaatattgtgaattttatttttatactatgttaaactctgtttttacatctcagttggtcaatgtgaatgtgcaaaattgtcacaattaaaattgtctgcatttttatttttgagtcagttgtctgatggaagtgtgctataattgacacaataaaatagtcttctatcta

SEQ ID NO: 14550 - DNA, 255 bp, Glycine max
gtctcaggaggttgcttctggctgtgctgaggtcctcaggcaatactaggagttcgacaatgagaattaattacgtaattaatttcagtaatactgttattattaatctactttcgatttgggttttctaatgtctatttaattcaatcttgatgtggagtcttatctcgacattttcatattatcatgttatatatgttgatggaccgaccctgcttaattatattattacatcaagatctatcctggactaaa

SEQ ID NO: 14551 - DNA, 329 bp, Glycine max
  modified_base (320)..(320): a, c, g, t, unknown, or other
tcggggaattccaattccacattttcaagaaataaggaggcaaaaatgttcatatatgaattggaattatttgttttcttattaggcctatcctgaagccaaaggaaatgagatcggaattcctcggggaattccaattccacattttcaagaaataaggaggcaaaaatgttcatatatgaattggaattatttgttttcttattaggcctatcctgaagccaaaggaaatgagatcggaattcctcggggaattccaattccacattttcaagaaataaggaggcaaaaatgttcatatatgaattggaattatttgntttcttatt

SEQ ID NO: 14552 - DNA, 346 bp, Glycine max
tcggggaattccatttcctcattttcaagaaataaggaggcaaaggtgggcatatttgaatgggaataattggtttccttattaggcctatcctgaagccaaaggaattgagatcggaattcctcggggaattccaattccacattttcaagaactaaggaggcaaaaaggtccatatatgaatgggaattattggtttccttattaggcctatcctgacgccaagggaagtgatatcggaattcctcggggaattccaattccacattttaaagatatagggacgcaaatgtgtacatatgtgaattgagaatatgtgttctcatattaggcctattcttgaccc

SEQ ID NO: 14553 - DNA, 384 bp, Glycine max
tcggggaattccaattccacattttcaagaaataaggaggcaaaaatgttcatatatgaattggaattatttgttttcttattaggcctatcctgaagccaaaggaaatgagatcggaattcctcggggaattccaattccacattttcaagaaataaggaggcaaaaatgttcatatatgaattggaattatttgttttcttattaggcctatcctgaagccaaaggaaatgagatcggaattcctcggggaattccaattccacattttcaagaaataaggaggcaaaaatgttcatatatgaattggaattatttgttttcttattaggcctatcctgaagccaaaggaaatgagatcggaattcctcgggggtaccgagc

SEQ ID NO: 14554 - DNA, 221 bp, Glycine max
  modified_base (116)..(116): a, c, g, t, unknown, or other
gttgtacataaactcttattcctattcatacagttcttgcgcttgttgaatattgcttcatcatatgtgacaatgatgataatccactgctcttaagtttcatccaatcacagganataaaccaaaagtaattcgtataattgctgctgctattggattttaggaatgtattttaggcctatctgttacagtaatgtgaaaaaatggatttgattcatgta

SEQ ID NO: 14555 - DNA, 296 bp, Glycine max
agaaggagtatgtcagcctcctcaaatccaatgaccctgttggattcaacattgttgatgtcttggcttggggctccattggccatgttgttgcttactacatcttggccaccactagcaatggctatgaccctgcattctttggctgatttaatttcatcatcatgttgttccaactgtgtttcttgcttactttttagtatgtaatgtaatcaatgtcatgatgtataggttctctctaaagatccaacaagttcagcatatgctaatttgatcactattttcggctgcaaaaa

SEQ ID NO: 14556 - DNA, 295 bp, Glycine max
ttttggtaaaaaaaaaaagacagagaaaacgcaagtttctagtagagcttacccctttatgtatatttgtgaatgtgataagggatttaactggaattaaaaaaaggggggattcacgaagatttaattactaaatgaataacttacccatgaatcatttccccggggtatgtttcaagttcccttatataattaatgcaaattggattttgattataggatatgtttccaaaaagattcaacgtactttttatgggtatactattaaataacaaaatattaccttaaatacatt

SEQ ID NO: 14557 - DNA, 377 bp, Glycine max
acccgaattccggacgtgtccctgcacgcgttccaccttcacttactctctgtcctattacagcttgctgtaatcatcgtcataacttcactctgagtcaaatatacatctattcacaaaatcacacaatatcccagccaagaacatataatctaaaggccagcatacctactgaaaccgctaactggccttaattctgtcgttcttacatacgcttcgcccacctgacgaccatcacaaaccatctacgctcaattcataggtcaccacacccgacaagactataaacataccaggcgtttgcctctggaagctccctagtacgctctcctgcaccgaccctaccgcttaccgcatacctgtcccgctattatcct

SEQ ID NO: 14558 - DNA, 267 bp, Glycine max
  modified_base (244)..(244): a, c, g, t, unknown, or other
ttcaaggaaccgacctattgctaattttacctggcaccgaattcaggatggggttgctgtggaggccgattccctttggtttttcaacagatactggcacccagttgatgattccactgctcatgtttcacattaacacagattcacttgtcttatgagaagaataccaaatgtcatgtcaataaattcatgagtcgacaattgattgtatgtcaatactaccaacattgattagcagtatctntatatctctgtcacatttgataa

SEQ ID NO: 14559 - DNA, 434 bp, Glycine max
tgcccgcctccttagcctgggattccggttgagcttcaacccgttcaacccgaaccacagttttccattcacatttaacggttagcacttagcagactctgctgcagtgaggtgaggggaggtttgttggttgtttcgtttttcctttcctttccgccagaatccgttgagaatggcgttgccggtagtcgtcgatgcaaagtacctcaaggaggtcgacaaggctcgccgcgatctccgcgcactcatcgctaacaggaactgcgctcctctcatgctccgattagcctggcacgatgccggaacttacgatgctaagaccaagaccggtggacctaacggttcgatccggaacgaggaagagtattctcacggagccaataatggcttgaagaaagctattgatttctgccaggaagtgaaggcaaaatatc

SEQ ID NO: 14560 - DNA, 432 bp, Glycine max
  modified_base (341)..(341): a, c, g, t, unknown, or other
  modified_base (388)..(388): a, c, g, t, unknown, or other
ctcggatttcggttcgagaagctgaaatgaataggattcacagcagatttagcaaagcggacactaacatcaatttatgataacaacctcaaaatcaagttatcagtgtgtcaccctgacttttcaaaaacaattatttgttgcttcatatttcactgtgatttcataatagattttcactcatcttacttgactccaagcattctatatatctagtgcctccacgcatctctaccctcaaatcttcaccacacaacactacctcaattactcaactaaagcttcattcattcatcgtgtcgtgttgtgttctttgcaaccatgcttcttagaacagcgtnctctttctctctcttcaacgccaacggcgaccatatactactccttntctctgttcgctactctcagggcaaacactttgttccatgcgct

SEQ ID NO: 14561 - DNA, 245 bp, Glycine max
gtttggtcttctggttcttgagaattggtttacactgttctgcaacttccgtttggtgttcatcttcctgaacttaatattgagtctatttgcactgctatatagataacaagagataagttttcacaaatcttttcgtcaacacaatatcatcttttttgaaagatgatgtttatataaacacaaagaaagagaaaacttatctcttgttatctatttgcactgctatatagtctagatcgcga

SEQ ID NO: 14562 - DNA, 247 bp, Glycine max
gggtttgctcttctggttcttgagaattggtttacactgttctgcaacttccgtttggtgttcatcttcctgaacttaatattgagtctatttgcactgctatatagataacaagagataagttttcacaaatcttttcgtcaacacaatatcatcttttttgaaagatgatgtttatataaacacaaagaaagagaaaacttatctcttgttatctatttgcactgctatatagtctagatcgcga

SEQ ID NO: 14563 - DNA, 227 bp, Glycine max
ctcgagccgagcagacgattctttggacgcctgaaaggatagttatgttaattggatggaaatgctggaattctatttggttgccatcacttataaactttgtagtgtttctgttttgatattatggattctcgggtagtgagttttttttctccttaagttggccaaacttttgtttcagggaagactgatcgtttatttcaaattttgtttatgagtttatctaa

SEQ ID NO: 14564 - DNA, 377 bp, Glycine max
ctctagtgtctctttgtgttactaatactttttagacaaggttattgcttgttgcctagaaatcgtgtcccaaatcataccccaatcttctttgtaaatgcagcctatgactcatggcaagtcatattattctctttctcaagaaacattctatttttggaatggtgttcatttggaattttggtcctacttaaaactgataatatgtttatattcattgatcaattgattggcttgtttattaggttaatcaacgttagttatatatgaggatttatacatatcaacataatatataatagactttagattttaacttttaaattcccaattaaaaatactatgattgcttaaattatctcaatattgaaaaattc

SEQ ID NO: 14565 - DNA, 292 bp, Glycine max
gatcaacttgctcttaaagctccacttggccaaaacacggttggtcttagaggtcccaagaatgcgcgtgaggctgtcaagcactttgtaccagctcctggtgtgccccatatccacaccaagccctatgtccgtgcaaagggaaggaaatttgtgcgggccatatgaagaaggaatagctgaggctttagagtttgagtcctggagctcaaacatgtacgacttttccttgtaacctatgatcattatgtattgttttcttgcaactcggatcaatctgataattcaagtt

SEQ ID NO: 14566 - DNA, 403 bp, Glycine max
  modified_base (48)..(48): a, c, g, t, unknown, or other
ccaggttgatgcttatatttatttatggaagtggaatgcaagaagttntgggttcagacgttgatggaactattacaaagtctgatgttttggggcaattcatgcctttagttggcaaagattggacacaatctggagtggcaaggcttttctgtgctattaaggaaaatggataccaactactttttctgagtgcccgtgcaattgtccaggcatatctaaccagaaacttcttgcttaacctgaaacaggatggaaaaaccttaccaaatggacctgatgttatatcacctgatggattatttccctcgctttaccgagaagtgattagaagagcaccctacgagttcaagattgcttgtttagaggatatcaatagacttttcccatctgactattaatc

SEQ ID NO: 14567 - DNA, 226 bp, Glycine max
tgtgagcaaaagtgtcagcaattggccacgaaccgtcaaaaggccgcgctctgggcaattttccagaggctccgaccccctgacgagcattacaaaaatccacgctcaagtccaaggtggcgaaaccccacaggactatcaagataccacgcgtatcctccttgaaactccctcttgcactactactgttacgaccctaccgcttaccgcatacctgtccaacttt

SEQ ID NO: 14568 - DNA, 100 bp, Glycine max
gggttggccttttaaggtttccaagagttgagcgtcttcatcctggcaggttttaaggttttgctgcagtgcagtgttatgaaattaagaaattagaaag

SEQ ID NO: 14569 - DNA, 207 bp, Glycine max
ctgagaagtgtggttagatgatttcatactgttggcttctggcagtgtatcttatgatggatctggcatgtatcgaatattggttttgatttctttatggccagttattgcatgaatgttaatcatcaaagcataattcttcgtggttatgctgttcaaatatagactagatttgattctaatccacttactgtcaactttcaatac

SEQ ID NO: 14570 - DNA, 377 bp, Glycine max
gcaagctcggcgttgctgattacggtcaacgcgcgttgaagagtcacgtggggtagtgcgacctcttctggttgctggctgaatgactcgatccgctggttcgttcggctgtggcgagcggtttcaagtcagttaaaggcggatatgcggttatcctcagaatcatgtgataacgtacgaatgatcatgtgagcaaatagccagcatatggccaggaaccgcagaaaggctgcgatgttttcgaaagtccatatgcttttggtgcctgaccagactcacattgacctaaatggagttgagacttggaaatcctcgagagtctatccggtatccacgcgcattgatgtgctggccaaatcgtatgaccatggtaatag

SEQ ID NO: 14571 - DNA, 186 bp, Glycine max
ttcactttgttagggtcatcgttgttattttttggcatatcctctaaacatctctttatctaacttgtccatcactagaataatcatcattctcaattattggcacacacacacggcttacagatcagagctaggtccaacattcattctgcttaaaacataaaaacaaaaagccaacaaaaagcc

SEQ ID NO: 14572 - DNA, 289 bp, Glycine max
tattaatttccggatcttttactttgttaggtccccttggaagccagagttgggtatgcatttggcggatggtattgtaactttgtatgttctgattggtttgattttgttccttttattcgattttcttgttgtgtccaagaattaggtgcctcgagttaggagaacgatagtctagtatcttatcttccatagggatttttgagtcagtttctgtttatatttattatatgcttaattggtttttatgtttgcattaaactcataaaattattaagaaatgttcgtg

SEQ ID NO: 14573 - DNA, 354 bp, Glycine max
tttgggtcgaatttcctttaaggccattggccattaatttgggtcctttcggggtttgtggctcaacctcattctcatgctccagctcccactttcaagtactgtgaaaagaatgcagactatgctgtgaaggtgagtggagtggaaatattgcctgaccccgtggagagaggagtgccattcacctttaagatcccagcttatactcctgaaccaattcaaagcggggacttgttatatgaaatttcttatgctggaatagaagcacaacctgctacatttctccatgatctctgtgaggaagcaccatgcccagtacctgcaagcaactttgtgctcgttcacaccgaatta

SEQ ID NO: 14574 - DNA, 181 bp, Glycine max
  modified_base (124)..(124): a, c, g, t, unknown, or other
  modified_base (153)..(153): a, c, g, t, unknown, or other
aaccaaatgtcattcctttccttcttggttggattggttaataaataataaatactttgggtttaaaacagtgtatggcactgcttttgtctctgtcgttgaatgatatcacatgaatgcattntggtttgcaacctgctgcgcttgcaaggngttgtgaagccaattttataataaataa

SEQ ID NO: 14575 - DNA, 69 bp, Glycine max
gacagagctctttcgtttcactaatacctatataaaaaaaaggggggggtcccacttatgaacctctta

SEQ ID NO: 14576 - DNA, 436 bp, Glycine max
aatggcctcagccgcatcccccaccactttctctctcctgcactgggccaccccttcctcctcctccaccgccacctccgcctccccctccccctcgcgcgtgcagctcacctcctccctccgcgcccgcccgctgcgccgcctgggcttcgccgcggcggacccgctgctcgcggcgagtgtagcggcgcgcgtggcggcggtgagaggaggaggaaagggcgccaaggggtggtgtcgatggcgaagaagagcgtgggggacctgagcgcggcggacctgaaggggaagaaggtcttcgtcagggccgacctcaacgtcccgctcgacgacaaccagaacatcaccgacgacaccagaatccgcgccgccattcccaccatcaaacatctcatccaaaacggcgccaaagtcattctctccagccacttggggc

SEQ ID NO: 14577 - DNA, 394 bp, Glycine max
cgtccatcatttttctacaacgacagaacaaggaaaagccgtgcctttaccaatgccttctcgtttttgtgttagtctttaactcatctgtcatgtcaattccattgtttttgaaaccttttcctcccccaccttgaaacaaagtatattttgtctcatgtagttttaagacaacttgattaggctgagtctgttgcgaaaattttccttgtatgatgacgatgatgtttaccatctcttccgcgtggtcaattttctaaatatattcctttccggatggttcaactttcttaatatttctttaccattttgtttttattggattgtctggttttaaaaatgtttgcaattggactaattcaattataactaaaaattaataattcaaggaatt

SEQ ID NO: 14578 - DNA, 420 bp, Glycine max
gtctcaacttctgctcttccaactcctacaacgcttggctgtgcactcatgggcaaggtcaagatcggaatcaacggatttggaagaattggccgtttggttgccagagtcgctctgcaaagagacgatgttgaactcgttgccgttaacgaccctttcattaccaccgattacatgacatacatgtttaaatacgacagtgttcacggacactggaagcatcacgatgtcaccgttaaggacgagaagacccttctcttcggtgacaaggcagtcactgtttttggacacagaaaccctgaagagatcccatgggggtcaactggagctgacatcattgttgagtccaccggagttttcaccgataaggacaaggctgccgcacattcgaagggtggtgccaagaaggttattatttct

SEQ ID NO: 14579 - DNA, 396 bp, Glycine max
atattctctcactctcttactctttcactctacttctctctcctattgcggctagggtttaggtttttctttcaccgtctccgttccttcaatcttcttattctctttcatctctgatggagacgttgcgggtttagttctaaggggtggttctggccttgggtttttggaacgtacggtgtcgttttggggttgggaaaacaaattctgagagatggcaaccacgaacccttttgatttgttgggtgacgacgctgaggacccttctcagctcatcgccgccgagcaactcaaggcggcggctgcggcctcggcggccaccgcggctcccaagaaggcgccggctcagcagaacaagccgggttcagttccttaccaagccgcttcttccggtta

SEQ ID NO: 14580 - DNA, 354 bp, Glycine max
gaagtagaggtcttaagagtttgagaactgagaagagatgggtggtgttgcatggacagaagaagaagatcacttgctcaagaaatgcatacaacaatatggagaaggaaagtggcatcgtgttcctttactggctggtttaaacaggtgccggaagagttgtaggctaagatggctgaactatctccgtcctaacatcaagagaggaaattttgcggaggaagaagtggaaatgataatcaaactccataaattactaggcaacagatggtcgttgattgcaggaaggctaccaggaaggactgccaatgatgtgaaaaactattggaactgtcatctgagcaaaaaacttaa

SEQ ID NO: 14581 - DNA, 368 bp, Glycine max
gaagtagaggtcttaagagtttgagaactgagaagagatgggtggtgttgcatggacagaagaagaagatcacttgctcaagaaatgcatacaacaatatggagaaggaaagtggcatcgtgttcctttactggctggtttaaacaggtgccggaagagttgtaggctaagatggctgaactatctccgtcctaacatcaagagaggaaattttgcggaggaagaagtggaaatgataatcaaactccataaattactaggcaacagatggtcgttgattgcaagaaggctaccaagaaagactgccaatggttgtgaaaactattggaactggcatctgagcaaaaaactaaatgtaatagaagctg

SEQ ID NO: 14582 - DNA, 383 bp, Glycine max
cctctgtctcctcctcaatcttcattgtgctgggctttcccttggtgacaaaccaagactaacacacacagaacatagcttgtgttggtgaggtgagaagataaagaaagaatggcatttgcaggaacaacacagaagtgtatggcctgtgacaaaaccgtttatctggttgataagttgaccgcggataaccgaattttccacaaagcttgcttcagatgccatcactgcaaaggaaccctcaagctgagcaactacaactcttttgagggagttctttattgtaagccacactttgaccaactgttcaaaagaacagggagccttgacaaaagctttgaaggaacaccaaaaattgccaagccagagaaaaatttggaaga

SEQ ID NO: 14583 - DNA, 378 bp, Glycine max
acaacgatgtacccttacacaaattcaaagacagcaatccaaaccctgaagagttcgatgcaaagggttacagcctcagcggaaaaatcatgctttcagcaataatccttcttttcttcgtcgtcgttttgatgttgtgccttcatatctacgcgcgctggtacctccggcgtgctcgccgccgacagctccggcgccaacgcgagctccgccgcacccagcttgtcttttacaacgacgacgccacccccgcagccgtgtcacgtggcctcgacgccgccatccttgccacgctccccgtcttcaccttcgacccggaaaaaaccgggccggaatgcgctgtttgcttgtcggagttcgaaccccgtgaaacgggtc

SEQ ID NO: 14584 - DNA, 362 bp, Glycine max
aaagccaattacggatcacttaaacttaactttgacaccctgcaacaagacaacgaagccttactcaaacagataaaggaattgaaatcgaggctggtgcaagaagagaacaacaacaacactgaaagcgatgtttcggtgaaggaagagatgatagccactctgcaggatagtaacccgctctgtgaatccgccattcctggatcggactcgaaggagttgagttacgagtgtttcaacaagagtgatgaggtgggagggggttctgtgttccctgtggatttcaaagatgggtcttctgatagcgactcaagtgcgatcttgaacgaggagaacaacatccacagccccaacaacaacgc

SEQ ID NO: 14585 - DNA, 339 bp, Glycine max
gggagcgtgagttcatgttctacagaaaccccagcgccgacatgctcctcaagcccgaagaactcaatctcgaactcatcagatctgcaaaagttttccattacggatcaatcagtttgatcgtggagccatgcagatcagcacacttgaaggcaatggaagtagccaaggaatctgggtgcttgctctcctatgaccccaaccttcgtctacctttgtggccttcggctgaggaagctcgtaagcaaatactgagcatttgggagaaagctgatttgatcaaggtcagtgatgcggaagctgagttcctcacaggaagtgacaagattgatgatgaat

SEQ ID NO: 14586 - DNA, 403 bp, Glycine max
ctcacttctgatgaacatgatgatagactcactcagttgactaatcaatctcctgaataccctccaaatttcagggttataatacaagagtatattcaagagatggaaaagctgtgctttaagctgttggagcttatagctttgagcttaggcattgaagcgaataggtttgaagaatttttcatcaaaaaccaaactagctctattcgactcaaccactatcctccttgcccttaccctggccttgctcttggagttggtcgacacaaggaccctggtgccttgaccattcttgcacaggatgaggttggaggacttgaagtgaaacgtaaagctgatcaagagtggataggagtgaaacccaccctagatgcttatattatcaacgttggtgatattattc

SEQ ID NO: 14587 - DNA, 405 bp, Glycine max
taaattatgtgttcataaattatgcaccagcaactcacacaagttttgcatctttaccaggaatgtgggacagaactcttactgtgaatggattttccaaggcctttgcaatgactggttggcggcttggatatattgctggtccaaaacattttgttgcagcatgtggaaagatccaaagtcagttcacttcaggggccagtagtatagctcagaaagctgcagttgctgcattaggactaggccatgctggtggggaggcagtttctaccatggtgaaagcatttagggagcgaagggatttcttggtaaaaagttttagagaaatagatggtgtcaagatatctgaaccccagggagcattttatctattccttgatttcagcttctattatggaagagaag

SEQ ID NO: 14588 - DNA, 398 bp, Glycine max
atcgcagccctgatagccgtcagcacaggtctatggtatacacatgaaattcacgccttcctccaaattcttaggcttttcaaatcacttccactcccttctcgcaccctctttctctccgaccccaaagttctcatcttccttttccgccaccatgtccactctttccactcagaacgacaccgtcacccacaaaacgcagcaacctttgcagattgcaaagcgcttagagaaatttcagacaacaatcttcactcaaatgagcttgcttgccatcaaacatggggccataaaccttggtcaaggctttcccaactttgatggtccagaatttgtaaaggaagcagcgattcaggcaatcagggatgggaaaaatcagtatgccccgggttatggag

SEQ ID NO: 14589 - DNA, 437 bp, Glycine max
cgcacttctgctccgcaattatcatgggcaaggtcaagatcggaatcaacggatttggaagaattggccgtttggtagccagagtggctctgcagagagacgatgttgaactcgttgccgttaacgaccctttcatcaccaccgattacatgacatacatgtttaaatacgacagtgctcatggacactggaagcatcacgatgtcaccgtttaggacgagaagacccttctcttccgtgacaagccagtcactatttttggacacagaaaccctgaagagatcccattggggtcaactggagctgacatcattgttgagtccacccgagttttcaccgattaggacaaggccgtcgcacatttgtaggggggtgcaaaggaagttattatttctggccccagtaaggatgcccccatgtttgttggtgtgtcaacg

SEQ ID NO: 14590 - DNA, 356 bp, Glycine max
gagaatggcaactatgactggtgtgagcctttcatgccccagggtggtcttcaacgcatgagcctcaccgcataacgcgcatgctgtaaagttctcacttccacccagccaagcagtgcgaccgggtagtatcaagttgggtcgcgtgatgaggatccgacccgttcgcgctgcgcctgagcgcatatcggagaaggtggaggagagcataaagaacgcgcaggaggcgtgcgccgacgatccgacgagcggcgagtgcgtgacggcgtgggacgaggtggaggagctgagcgcggcggctagccacgccagggacacgcaaatggtaatggacttcgacccgctcgagaattact

SEQ ID NO: 14591 - DNA, 403 bp, Glycine max
caaaaccatttgcgttgtcgcagtcgcagtcaaaggccaaggcaaaaccctaaattgtctcacactttcgtcggaatccgcttttggctttttccgtgacaagatgccggcgaaggacgacggctccgacaaggagaagtgccttgatctctttctgaaaatcggcttagacgagcgcaccgctaaaaacaccgtcgcaaacaacaaagtcaccgccaatcttactgcagtcatctacgaggccggtgttattgatggatgcagccgagcggttggaaatcttctttacacggttgcaacgaagtaccctgcaaatgccttgccacatcgcccaacattgctacagtacattgtctcgttaaggtgaaaacaactgcacagttagatgcagcattatcatttc

SEQ ID NO: 14592 - DNA, 321 bp, Glycine max
ggaagaccttatcatctccgaatttcattttcagaagcctctttgggaatcaaatccgaagcatgatgcattgtgcgagcattgtctcggctccgtcctacgcgttcccttttctctctggctccgcttccactactccaactgcgatctcgctcactaagcgcagttggaagccacctccgagcatggcaaaaggcccagtcagagccaccgtttctatagagaaagagaccccggaggccaatcgtcccgaaacgtttctcagaggagtggacgaggcccagtcttccacttcggttcgggcccgcttcgagaagatga

SEQ ID NO: 14593 - DNA, 115 bp, Glycine max
gaaatgtctgcttttgtttacaaggattggctttttacaaagcgagcgttgcctgctgatttttagaaaagaggattggcaattgaggatccatctgccctcatggcattcgcct

SEQ ID NO: 14594 - DNA, 401 bp, Glycine max
cggctcgagccttatgctgttgatgggctagagatatgggctgcaattaagacatgggtccaagaatatgtgtccttgtactatgcagagatgatgatgtcaaacctgattctgaactccaacagtggtggaaagaagctgtagagaaaggtcatggtgatctgaaagacaagccatggtggcctaagttgcaaacaattgaagagcttgttgaaatttgcaccattatcatatggactgcttcagccctccatgcagccgttaactttggtcaatatccatatggaggtttcattctgaatcgcccaacttcttctagaaggttgcttcctgagaaaggcaccccagaatatgaagaaatggtgaaaagtcatcaaaaggcttatttgagaactattaca

SEQ ID NO: 14595 - DNA, 396 bp, Glycine max
  modified_base (386)..(386): a, c, g, t, unknown, or other
aaaattcttccaccaagttatgggtttccttgtgttgcttcttttctccctcttaggtctctcttctagttccagcatatcaactctcgttccatattggaccttgacctaaccaagtttaccacacagaaacaggtgtcttcactgttccaactatggaagagtgagcatggacgtgtctaccataaccacgaagaagaggcaaagagacttgagattttcaagaataacttgaactatatcagggacatgaatgcaaacagaaaatcaccccattctcatcgtttaggattgaacaagtttgctgacatcactcctcaagagttcagcaaaaagtacttgcaagctcccaaggatgtgtcgcagcaaatcaaaatggccaacangaaaatgaag

SEQ ID NO: 14596 - DNA, 414 bp, Glycine max
cgggatgcttaataaccccctaatattattggcgaatttataggctggcaaattaaggatagaggttcgttttcgtaaagcatgaaaaaagctattgattaactgaacaggcgggtacaaaaggagttcaagtacaaattgcaggacgtatcgacggaaaagaaattgcacgtgttgaatggatcagagaaggtagagttcctctacaaaccattcgagcgaaaatcgattattgttgctatacagttcgaactatttatggggttttagggatcaaagtttggatattttctaaataaagaaaaatatattattctttatcttaaatgtgctatattttatcttaaatgtgctatatttttttttagaaaacaaaaaatgaaaaattactcgatttttatttctccaaaatga

SEQ ID NO: 14597 - DNA, 412 bp, Glycine max
aatgcttataaacaccctattattattgcagaatttatatctgggcgagggaagaatagagtttcgtttcgtaaaacaatgaaaaaagctattgaattactgaacaggcgggtacaaaaggagttcaagtacaaattgcatgacgtatcgacggaaaagaaattgcacgtgttgaatggatcaaagaaaggagagttcctttatcaaccattctagcgaaaatcgattattgttgctatacagctcgaactatttatgggggtttagggatcaaagtatggatattttctaaattaaaaaaaatatattattctttatcttaaaagtgctatattttaatttaaatgtgcatatttttttttagaaaacactaaaatggaaaaaatattcgattttttttttcttccaaatg

SEQ ID NO: 14598 - DNA, 424 bp, Glycine max
gtttggatgcttgctacttggctcttcctgccagtactaccaaaggatctgcgttgctatataatgtcatggattgccatttacacgtgagattgaggctcatcgttcaccattagctgcaatggttctttcttctaatggaatgtacatagctacagcatccgagcaagggaccataatcagagtccatttggtgtcagatgcaacaaagtcatatagctttagaagggggacatatccgtctactatattttctctttcatttggaccatcaaagcagcttccagatattcttgcagcctcaagttcttctggttctattcatctttttactctcggatttgcttcacatccaagcaggagcaagagatcaagtggttttcttggatcaataattcctggtgctgtgaatgatgttgctgat

SEQ ID NO: 14599 - DNA, 385 bp, Glycine max
cttttaacttgagaagccgcgaccccatctactccaacaagcttggcaagttctttgagatcaccccagagaaaaacccccagcttcgggattggatatcttcctcagtattgtggatatgaacgagggagctcttcttctaccacacttcaattcaaaggcgatagtgatactggtaattaatgaaggagatgcaaacattgaacttgttggcctaaaagaacaacaacaggagcagcaacaggaagagcaacctttggaagtgcggaaatatagagccgaattgtctgaacaagatatatttgtaatcccagcaagttatccagttgtggtcaacgctacctcaaatctgaatttctttgctattggtattaatgccgagaac

SEQ ID NO: 14600 - DNA, 386 bp, Glycine max
atctccatctcttagtttcttcttcaaatggcagaagttgaagacatagacaaccctcatcacgaccaccatcattacctttcttcttcacaacacaacctccaatgatcaatttcccgcgagatctgttaagaaccttcgtgggagtgaacaacaacagcaataaaaacaataacaacagtcagcaccacaatttgcctatgccagtggtgaagttagaggatgagaaagaagagctggaactaagtctcggcctttcgatgaatggtagatttggggtggaccctacagcgaagaagataaagagaacaacctcgataccggagtttgtgcgcgacgaggagatgggatatgctgctgcgatggggtgcacggggtctctggtg

SEQ ID NO: 14601 - DNA, 447 bp, Glycine max
tggactgacaactgaagtcaagtctgtggagatgcaccatgaatctcttacagaggcacatcctggtgacaatgtgggattcaatgttaaaatgttgctgttaaggatttgaagcgtggttatgttgcctcaaactcaaaggatgaccctgcaaaggaggctgctaacttcacagcccaagtcatcatcatgaaccaccctggtcagattggaaatggctatgcccctgtcctcgactgccacacttctcacattgctgtcaagtttgctgaactcatgaccaagattgacaggcgatccggcaaagagcttgagaaggagcccaagtttttgaagaacggtgatgctggttttgttaagatgattccaaccaaacccatggttgttgaaactttctccgagtatcctccacttggtaggtttgcttgtagggacatgcgtcaaact

SEQ ID NO: 14602 - DNA, 393 bp, Glycine max
gaaatataaaacatttattcattgtcaccaaattttgttccctgcaagagagagaagaagaagttgttgggttgagttgggtttggttggatttctaatctaatctatacctttctttttcctatgcttttaaggcacaaatccttctcccttctctcttctttcttcttcttctcctgacccttattattattccttgcccttaccctttaggcaagggaaggaagaaagaataactatattattatctttattgtaatctatctttttattataattataattataattattgttgttattattccttaaatatggattcgccgtgtctctccaacgattcggtttctggattcaaagacaaggagtcaatggttgacccctttttggtcg

SEQ ID NO: 14603 - DNA, 417 bp, Glycine max
gcaaaatgaccaagttcacaatcctcctcatctctcttctcttctgcatcgcccacacttgcagcgcctccaaatggcagcaccagcaagatgctgccgcaagcagctccagggggtgaacctcacgccctgcgagaagcacatcatggagaagatccaaggccgcggcgatgacgatgatgatgatgacgacgacaatcacattctcaggaccatgcggggaagaatcaactacataaggaggaacgaaggaaaagacgaagacgaagaagaagaaggacacatgcagaagtgctgcacagaaatgagcgagctgagaagccccaaatgccagtgcaaagcgctgcagaagataatggagaaccagagcgaggaactggaggagaagcagaagaagaaaatggagaaggagctcat

SEQ ID NO: 14604 - DNA, 284 bp, Glycine max
aaaaaagttcatgaatcctctgccgcgacacgatcgagtagggcgcaaccgtgaaatcgatccatcgagctcactcagccgccactgtcgtgttttcagcgcgcgtgttttgttccttctgtgctatgccccaatccctaatctatctatctatctatccatcttttcttcattccccttcttctcttctgaattcgaatttcgaaaatgttgggtggtctatacggagaccttccttcaccttcttccggcgaggaagacaacaagcccacccccaacgtctg

SEQ ID NO: 14605 - DNA, 368 bp, Glycine max
ctacacaaaagtgttccacttgagtgaaaagtagtgtgttaagaactaaacaatttttcaatggcgtccaagaaacaagaggagcgactgaggcagctgcgaaagttgctgccaaagaactcgaacaagtcaacagagaaagaagagaccgtgatttcggtgttgttgctgaacaacaacaacaacatcatcaggaagatcaacaaaaacgtggtgtaatcgggtccatgtttaaggcggtgcaagacacctacgagaacgccaaggaagctgtcgttggcaagaaagaagctactaataacgcgtacagtaatacagaggttattcacgatgttaacattcagcccgatgacgtgtcggcaacgggg

SEQ ID NO: 14606 - DNA, 388 bp, Glycine max
cattaattattttcttatgtgtttgttctgcatttattggtgtacggtcacctggtagtgtctgttattgtgtgagatcctaacaggactataagtattgggaggcactggagtttttgcggacaatttgtttgtttcatttgggtttggagaactctgatttcacaatttttttttaccaatttttaatatgaaagatatttctaggtgtttaactgtttgtgttcattcttatgcagcatgccaagtcctgatatgagatttctgttgccgattgttgaagaataaatcataaaattagaacagataacagctctggatgaattaatgtcattgatgagtttcttctttctgtattatttatttctctggatttgatcacgaaaca

SEQ ID NO: 14607 - DNA, 398 bp, Glycine max
gcgctataccctcctagatctactctctaaccgctatacaggctggtactaagagctgtggttagtcatagatggcgctctcagcttccgggcaatgtcaaagggtgtggtggtatctgtgcctgttctggttctatctgctttagtggctactgttttcctgttcttccttttgtcctctctttcatcctgctcctgccctactccttcagaaatctctgcctccaatgttaggagtgttggtgttggtattggtgttcctgagtctagcagcggtaatgttccgttagccacaaggaaaggagtctagcagcagtaatattccgttatcaacgaggaaggaagatgttgagtgggtgaagaatcaaatccaagcaaatgggcttcatatgcatgac

SEQ ID NO: 14608 - DNA, 394 bp, Glycine max
aaagatgcgagcacagacgctgatgacacagtggtgcacaagagcagcaacgtgtggccaattgaggatgagcactaacaccaacacccccaacacgatggtctcgacgccattttcaaacataagcgcttacttcgaacgcaggtcagaaaaaccctaaaatccatccaaccctccctccgatctcaccaagataacaccgttcaagacatagttttgggagctccgtggttcaaatccagtcgcaggctatgcgcgtacataagctgcgctgctcttcgcgaagtcgacactttaaaaatattgtcacaaattttgcaacataacaatgctactgatggaaagaaactctatgtgccgcgcggtgaggatatgaatagtcacatgcgtatgc

SEQ ID NO: 14609 - DNA, 371 bp, Glycine max
ctcgcccttcacgcgctgacttctacaaccctaaagctggtcgcattagtaccctcaacagcctcaccctcccagccctccgccaatttcaactcagtcccaatatgttgtcctctacaagaatggaatttactctccacattggaatctgaatgcaaacagtgtgatctatgtgactcgaggacaaggaaaggttagagttgtgaactgccaagggaatgcagtgttcgacggtgagcttaggaggggacaattgctggtggtaccacagaacttcgtggtggcggagcaagccggagaacaaggattcgaatacatagtattcaagacacaccacaacgcagtcactagctacttgaaggatgtgttta

SEQ ID NO: 14610 - DNA, 361 bp, Glycine max
gacgaaaggaaagaagaagaagaagcgttctttcggagagttcgaagatgtcgggcgttaccaacaacaacgaggaagacaagaagccaaccgacagggagcacacatcaaccttaaggttaaggggcaggatgggaatgaagtttttttcaggatcaagagaagcactcaattgaagaagcttatgaatgcttactgtgaccgacagtcggtggatttcaactccattgcttttctgtttgatggacgccgcctccgagctgagcagactccagatgagttggaaatggaggacggggacgagattgatgccatgcttcaccagacaggaggttctgttgtctgaaggatgtgattactt

SEQ ID NO: 14611 - DNA, 350 bp, Glycine max
gattaatgaaggagaagcaaacattgaacttgttggcattaaagaacaacaacagaggcagcaacaggaagagcaacctttggaagtgcggaaattagagctgaattgtctgaacaagatatatttgtaatcccagcaggttatccagttgtggtcaacgctacctcagatctgaatttctttgcttttggtatcaatgccgagaacaaccagaggaacttccttgcaggttcgaaagacaatgtgataagccagatacctagtcaagtgcaagagcttgcgttccctgggtctgcaaaagatattgagaacctaataaagagccaaagtgagtcctactttgtggatgc

SEQ ID NO: 14612 - DNA, 306 bp, Glycine max
  modified_base (281)..(281): a, c, g, t, unknown, or other
ggctgaggaatttgtgcccccatcactaaccaatactcatggctacctacctggacctggtgccggtgctggtgccgggtttggttaccctaaaattttatactgctcaataactttggtgatgctaacggtcaaactaacagaaggaggaagaatggctataatcatgggaagcgaagagtgaatcataaaatggatatggagaagagagaagagatgattaggaggactgtttatgtgtcagacattgatcaactggttactgaagagcagttggcggngctctttcttaactgtggccaggtc

SEQ ID NO: 14613 - DNA, 440 bp, Glycine max
  modified_base (410)..(410): a, c, g, t, unknown, or other
cctaagtgagaaacaaagaaaggaaataattgatctttgaaaatgcagggaggaaagaaagctggagagtccatcaaggaaacagctcaaacattggtgcttctgccaaggctggcatggagaaaaccaaggccactgtccaggagaaggcagaaagaatgacggcacgtgatccgatgcaaaaggagttggcaacccagaagaaagaggcaaagatgagccaggcagagctggacaagcaggcggcgcgtcagcataacacggcggcgaagcaggctgccacggcagggcacatgggacaacccatggggacccatcagacgtcagctatgcccggtcatggaaccggacagcccacgggccatgtcaccgagggagtggtgggctcacaccctattggaaccaacagnaggcccggtgggactgctacggcccataat

SEQ ID NO: 14614 - DNA, 364 bp, Glycine max
gtggattcttggttaccaatttttgtgaattgtctttatcctgtgagtcaattaccttcagaagctgtcgttgtaaatgtcacatgtggtagggacgtggtggtttacccaccactgcttggattagttctgcagttaacaatcgctcctcagatagtaacaaaaggattcgcacagcacttgggaaaggtaagaaaattgtttttcttactagagttgatccttttccagtagctttactggctgttctttttggtgttaagaatgaaactcttagttgtaacgccactaatcctatgctgacgcgacttcttgaaaactgtaagagtctcaaatatttggttgatgagtgttcttttgcatt

SEQ ID NO: 14615 - DNA, 421 bp, Glycine max
gtggcgaagggaatatattggggcagatggcttctggaatgccacaagcagtaactgtcacccctgaggagcgccaagcaattgaacgtcttaagcaatgggttttgatcgtgcaatcgtattggaggtgtacttcgcttgcaacaaaaatgaggaattggctgccaactaccttttagatcacatgcatgagttcgaggaacaatagatctacttttgaatttgccaaattatttcttgtcatctttttctctcgatgggtctttgttacactctatgtttaatgaggtaatgcttgataatgtcaaatctcaagtggataagggatgttttagtctcctccatattattgcccttgtatttatcatttccagcccgtcgagggtttcttagtattcatatacatagttggttgccttgc

SEQ ID NO: 14616 - DNA, 427 bp, Glycine max
  modified_base (345)..(345): a, c, g, t, unknown, or other
gtcctccatggcttcctccaccgctttcttcacacccctccatgatttcactcaagccagaacaaccccatcaccccctttgcctttcatcaatcctcctttgcttcctccaagtcaaccttttttcaccctgccctttccctacaaacctcttccaactttcccaggctttttggaaagcctaagtttttctctgttcatgcaagggctgccacagaaaaaaccatttatgattttactgtcaaggatattgacagaaaggatgtttctcttagcaagtttaaggggaaggttctattgattgtcaatgttgcttcacgatgtggtttgacatcatcaaattanctcgagctgtcacgcttgtatgaaaaatataagaatcaaggtttggagattttagctttcccctgcaatcaatttggtatgc

SEQ ID NO: 14617 - DNA, 352 bp, Glycine max
ctcaccgattgctagaatggaatttcgatgctcagtcatctcttttaccattctcttctctcttgctcttgcaagagagagccatgtccatgcatcgtacctgaggaagattattgggaagctgtttggccaaacactcccatttccactgcactgcgagagcttctaaagcctctccctgcaagtgttgaaatcgatgaactccctaagcaaattgatgatacacagtacccaaaaacattcttctataaagaagaccttcatccaggcaaaacaatgaaagtacaattcaccaagcgtccctatgcacaaccttatggtgtatatacatggttaacggatattaaagaca

SEQ ID NO: 14618 - DNA, 395 bp, Glycine max
ttttgttcctcactgaccaagccatggcgatgagaaccaaactttctttagctatctttttcttttttcttttagccttattttcaacctagcctttggcaaatgtaaagaaaccgaggtagaagaagaagaccctgagctcgtaacatgcaaacaccaatgccaacagccacagcaatacactgagggtgacaagcgggtatgcttgcaaagatgtgacaggtatcatcgtatgaagcaagagcgagagaaacaaatccaagaggaaactcgtgagaagaaagaggaggaaagccgtgaaagggaagaagaacaacaagagcagcatgaggaacaagatgaaaatccctacatttttgaggaagataaggattttgagaccagagtcgaaactg

SEQ ID NO: 14619 - DNA, 420 bp, Glycine max
  modified_base (390)..(390): a, c, g, t, unknown, or other
tggatctgaaccagatctacacgccgatggtggttttggcctggtctttcatagatctgatgcatggaggctcagatctactgtacagagatactgagataatcgatgagaagaacgcagatccagccgcttccgcttgttcgatcgctacagacgcttgtatcggattattcatgattgattcataagcagcatgtcttcctccggctatagttgttgcagatctcggatgttgtaaaattagtgtatgatgtgaagctatgggctggaaaatgtggatgtaggagatttcgggacgaaaggcctcaaaacgcttcgtcgtttgtggttactgagtcctgagtgatcttgtcatccgacctttgccatgacaggtgcgcttgcttgcangtcaaaatatgttaataaaaaaagtttatt

SEQ ID NO: 14620 - DNA, 396 bp, Glycine max
gaaatgtctgctgtagtttacaaggattgggtttttacagatcaagcattgcctgctgatcttataaaaagaggaatggcaattgaggatccatcggccctcatggcattcgccttgtgatagaggactacccttatgctgttgatggacttgagatatgggatgctatcaagacatgggtccatgaatacgttttcttgtactacaaatcagatgacacacttagagaagatcctgaactccaagcctgctggaaagaactcgtagaggtgggtcatggagacaagaaaaatgagccatggtggcctaagatgcaaactcgtgaagagctagttgaagcttgcgctatcatcatatggactgcttcagcactttatgcagctgttaattttggac

SEQ ID NO: 14621 - DNA, 381 bp, Glycine max
aggaaatcttccgaactgatggtgaacaggcccttaagtttcctcctcctaaagtaattcaagtgagtaagtctgcatggatgactgatgaaaatttgcaagagaaatgcttgctggtgtaaatccaaacttgattcgttgtcttaaggatttccctccacgaagcaagctagatagccaagtctatggtgatcatactagtcaaataaccaaagaacacctagagcccaacttagaagggctcactgtagatgaggcaattcaaaacaagagattgttcctactagatcatcatgacccaatcatgccatatttgaggcgaataaatgcaacctccacaaaagcttatgctaccagaaccatccttttcctgaaaaatga

SEQ ID NO: 14622 - DNA, 397 bp, Glycine max
ggaaaaagttgtattgaaattttcacaagaggaatttcttacagcttggtcaactcaggtgcgtcctgcaacaactctgttggctgatgggttccatatttgtatgctatggtgcatgatagttcagtgtctacaataccaggtgattttgtcattggtgttaagttgacaaccataaacaatatgtgtgcatatgggctcaatcctggtatttcaggttctcgtcttttgggcaccattcctcagtctatttcacagcaaactgtttggaatcaaatggcaacagtgagaacaccattgaattttgatcctagcaagcagagcttttgtcaattttctattgaccttcttggtggaggaattttagtggacaaaactggagattggatcacactta

SEQ ID NO: 14623 - DNA, 382 bp, Glycine max
gcttcattgataccatatgttgagccagttgtgcaagctcaaagtgctgaagtttactttgacttcttccctgtggaggttgatagtcaagaggagttgctcacattggtgaattgaaatctggtgtctatgttccactgcctacaaaaactaatttggtggaaactcccaaggaatggcaactggatctaccttgtgacaaaattcctagtgtcttgaccacaactgatgagagattggtaggcacagaacatgagggatatgatccttttcttggtggaattcaaaaatatgccactcccatgatgcccctagatgaagaaattctttctaaggttgcacaagatatagttgaggaatggtttgattgtgttgatgagga

SEQ ID NO: 14624 - DNA, 384 bp, Glycine max
ctcagacaggagcttgcctgcgttgagagaattgggtcacacccttttgggactaaacatccagcactgcaatgcaatcaacagcagtacggtgacacacttgtggagcttctctggaggtgtgacatcctctcctgagctgaaagaaaaactaatctcactgcaatttaggccaggatcacatcagcaggaagcttgttatgctcagtgttgcacagtagttttttaggtccttaacaggtcttcatcgtccagtgactcggttcctttttaccggagtgtgcagtcatttagccctcatttttgcaggttccttcaatgggaagcctgttctttttggcatccattttgcccccttttaaatggctgcatatctgagaacat

SEQ ID NO: 14625 - DNA, 406 bp, Glycine max
  modified_base (336)..(336): a, c, g, t, unknown, or other
ctagttcaatatcctagtataccttaataaataatttaagatactatgatgagagcacggttcccattactgttgctgggacttgttttcctggcttcatttctgtctcatttggcattgcttactgggaaaaagagaaccccaaacacaacaagtgtctccagagttgcaatagcgagagagactcgtacaggaaccaagcatgccacgctcgttgcaacctccttaaggtggagaaagaagaatgtgaagaaggtgaaattccacgaccacgaccacgaccacaacacccggagagggaacctcagcaacccggtgagaaggaggaagacgaanatgagcaaccacgttcaatcccattcccacgcccacaacctcgtcaaagagaagagcacgagcagagaga

SEQ ID NO: 14626 - DNA, 392 bp, Glycine max
aagcttttcatgaaaaatagaattatgtattttaacatataaatcaatcaaatcaaaataattttttttgttaatttattatgcaaataaaagatatttctatttttaaaaaaattttaaattcttttctattgatatcaacttttttttactcaatttacatatcaacttatttaattattgatatatatagttaccccaaattaaattatcttcgaagatacattcttttgtcattttttgtttccttgatcgccttctattatccaactctctttgaatcataaactagagaggataaaatacaaacacttctttacaattaattgttatttttcgtttgttgtagttgctttttttttttatatttaaaataaatttgcaacaccgac

SEQ ID NO: 14627 - DNA, 386 bp, Glycine max
ctcgagccgctcgagccgattcggctcgagcccaattcgtgcattcaggaagaacctttcaagcagcagcagtgcttctaagccaccaccacctcctgagtctcaggctgagcagcagcacaacaaggttgctggtaaaaaacctgttgacaactatgctaataataaaggtttgtttgtcaagatcaacatggatggtgttccaatagggagaaaagtggacctcaatgcttacgacagctatgaaaacctctcttctgctgtggacgagctattcagaggtcttcttgctgctcaaagagattcctctgctggtggggttcacaacaagcaagaggaagagaaagcaattacggggttattggatggaagtggagagtttactc

SEQ ID NO: 14628 - DNA, 307 bp, Glycine max
actatatgtagtttcaaaacttcaaaattatgtagtgggtattatgttgcactctggggttttgtgtctaaacaaacacccttagaataaagtggtcatttcttgcccttgagcaagttcaagtgttttggacttgtgatgggtgtgttaaggtcatggttgccttttttttatatatatatatatatataaatgtttggttaaaaaaaaaaattaaccttaattcttactacaaatattaaaacctttattatgcttttgaccaactatttaaaggtcttctttgcttattaaaaaaatttctata

SEQ ID NO: 14629 - DNA, 188 bp, Glycine max
aaaaaaaaattaaaaaaaaaaaaaaaaaaaaaaaaaaggaaaaaaaaaaaaaaaaggaagaaaaaaaaaaaaaaaaaaaaaaaaaaaaaaaaaaaaaaaaaaaaaaaaaaaaaaaaaaaaaaaaaaaaaaaaaaaaaaaaaaaaaaaaaaaaaaaaaataaaaaaaaaataaaaaaaaataaaaaaaa

SEQ ID NO: 14630 - DNA, 405 bp, Glycine max
aattgattcaatagttcttagagttcatgtgtgctttaagaacaaacgtctgtgcaagcgaaatacgaacatatatctcagattaaatgtaaaataattggtgggatatcagaagagaatgcttgcttcactgcaccctttacgaattgtgagtgctaaattggaaaagtagatcaaatgtgaaccaacggccagtactataaactcgcgagtttctaaaaatcaagacaaaacaagaaactcacaagttctgccatggtagacagagatagatgtttggaaaattgtgattccactgggtttagagcactggctattttgtcaggcacagtctacaagcttgtcatgtttatattcctcctctttagtttacaacgatcctttacattgaactttgtatacagt

SEQ ID NO: 14631 - DNA, 401 bp, Glycine max
ctctcatttagcttctccaaaagcttgttttagtttatgcataagctaattttaactcacaggagaaccttaattcattttaccttattttcttctcctataagttcttattgaaaaatttatccaaacaggaccgaatgttcaagtctaaattggattggtgggattatgtaggtgacatgtttaccgaggaacagaatgagttaattgaatcagcagccgaaatgctttatggactgattcatgcccggtacatattgacaagcaaaggaatggctgcaatgctcgacaagtacaagaactatgattttggcagatgcccacgagtttactgctctggacaaccttgtattccagttggtcagtcagacatccctaggtctagtactgtgaaaatatac

SEQ ID NO: 14632 - DNA, 281 bp, Glycine max
aaaaaaaattaaaaaaaataatagtttaaattatacaataggcatattaatacaaaaagggagtacctaaaataattaatcaatttttaaataaatctattataatattgtggcgtccgttttcttttcagtttctttccccgtaatttaattggggcccggtcccttttgggttcctcaccttcccttttttttgttccgtcctggaccttggggtcttcctgctttttcctttttcgggtggttaatggtttggggttattatttccctatttttttcc

SEQ ID NO: 14633 - DNA, 403 bp, Glycine max
tatatactatgatgagagtgcggtttcctttgttggtgttgctgggaactgttttcctggcatcagtttgtgtctcattaaaggtgagagaggatgagaataaccctttctacttgagaagctctaacagcttccaaactctctttgagaaccaaaacggtcgcattcgtctcctccagagattcaacaaacgctccccacaacttgagaaccttcgagactaccggattgtccagtttcagtcaaaacccaacacaatccttctcccccaccatgctgacgccgatttcctcctctttgtccttagcgggagagccatacttaccttggtgaacaacgacgacagagactcctacaaccttcaccctggcgatgcccagagaatcccagctggaaccactta

SEQ ID NO: 14634 - DNA, 335 bp, Glycine max
cggacacgtgtcgtccactgatttctccccaaagagtttagagaagcactgccgtccgattgaaaacattatgatggagaccgaagccaaaggaacatgatagagaggctcaatcaggtggaggatcgaatgctaaagctggaagaagagttggtagcaaagaagaaagaggaaggtgagaaaatgaatagcccaaagaaaggttttaaacagcttgtgaagcaaagtatgaaacctaggggaaaacatagtaataaagaagcatgaatgaattatgaccattgtagctgctcccatcccaactgtgccaacgttttaattttaatgtacattta

SEQ ID NO: 14635 - DNA, 419 bp, Glycine max
  modified_base (407)..(408): a, c, g, t, unknown, or other
caaaaagataaagggtgaataattagcagctccttctagttccggtgtcggtgtgggtgtttgaatctggtgaaggatgtcaattgttcaatcaaccagggtgatgccaacggctccaaccccttcgcttcgtggggtcaattcgtggattttcctctccctccttccatctccggcttcttccccggcttggaattcggattcggattcggatcatccgtgaacacacgtgtggactggagggagactcccagagcgcacgtgtggaagctggtgcttcccggcttctccaacgaggacgtgctggttgagctccaagacgagagggtgctccaagtcagcgtggagagcggcaacttcgtcacgaggtttaaggtccccgacaacggtaacctaaaacaactcannagccacatgcg

SEQ ID NO: 14636 - DNA, 352 bp, Glycine max
aagaaagtcttccatagccccccaaaaatgaagagcaccatcttctttgctctctttctcttttgtgccttcaccacctcatacctaccttcagccatcgcgatttcgtgctcgataatgaaggtaaccctcttgaaaatggtggcacatattatatcttgtcagacataacagcatttggtggaataagagcagccccaacgggaaatgaaagatgccctctcactgtggtgcaatctcgcaatgagctcgacaaagggattggaacaatcatctcgtccccatatcgaatcccgtttatcgccgaaggccatcctttgagccttaagttcgattcatttgcagttataat

SEQ ID NO: 14637 - DNA, 438 bp, Glycine max
caaaaacaaaacaaaacagtgtctttgattacgagagagagagaacaaaacaatcaacacaatggcttctgagcaaatgcctcgcagagagaacacagcaatagggtgatagagagagaggttcacgttgagacacacagaaaagagtccctccctgataagggaagggttgtgatagagagtgagaagaaggagaaagagagagagttggcttctgatagagccaggtctggaaatatagttaaggaggacaaagaggttgaagaaggaagaagaggaaaagaaagtggtggtggtggtggtgttcagcatgagaggaagtttgaaacgaaagttgaagagaagaagggttttggtgaaaaggctgaactccagggaataacaagagtcgtggtgggaagagagtgcagccaaaaggaggaacagggaagaacaaga

SEQ ID NO: 14638 - DNA, 316 bp, Glycine max
gttcaatatcctagtacaccgtattaaagaatttaagatatactatgatgagagcgcggttcccattactgttgctgggagttgttttcctggcacagtttctgtctcatttggcattgcgtattgggaaaagcagaaccccagtcacaacaagtgcctccgaagttgcaatagcgagaaagactcctacaggaaccaagcatgccacgctcgttgcaacctccttaaggtggaggaagaagaagaatgcgaagaaggtcaaattccacgaccacgaccacaacacctcgagagggaacgtcagcaacacggtgag

SEQ ID NO: 14639 - DNA, 372 bp, Glycine max
tagtgacactataaaagcttacgtccatgccgcgtcgtagctcggattcgctcgagaaagaaatacacattacattactaagtctttgttcatttgagtagtagtgatggctagcctcaaggttgcatgtgtggttgctgtgatgtgcatggttgggtggccatgagtgctgcacccatggcacaggccgcaatcacgtgcgggcaggtcgccggcgacatgtctccgtgcttcagttatcttcgaagcggcggaaaaccgtcgcaggcctgctgcaacggagtgaagtccctcagcagcgcggcgaagaccaccgcggaccgccagggggcgtgcagttgcctgaaaaaccttgccaataatatgggacag

SEQ ID NO: 14640 - DNA, 371 bp, Glycine max
gtcttccatagccccccaaaaatgaagagcaccatcttctttgctctctttctcttttgtgccttcaccacctcatacctaccttcagcatcgctgatttcgtgctcgataatgaaggtaaccctcttgaaaatggtggcacatattatatcttgtcagacataacagcatttggtggaataagagcagccccaacgggaaatgaaagatgccctctcactgtggtgcaatctcgcaatgagctcgacaaagggattggaacaatcatctcgtccccatatcgaatccgttttatcgccgaaggccatcctttgagccttaagttcgattcatttgcagttataatgctgtgtgttggaatttctaccgag

SEQ ID NO: 14641 - DNA, 412 bp, Glycine max
  modified_base (324)..(324): a, c, g, t, unknown, or other
cccagcagcagattatcatgctgcagctcgtgcaattggtggatgtcctatttatgttagtgacaagccaggcaatcacaattttgatcttcttaagaagctggttctcccggatggttcggttctccgtgctcagttacctggcaggccaactcgtgattctctatttgtggatccagccagagataggactagcttgctcaaaatatggaacctgaacaaatgctctggagttgttggtgtatttaactgccaaggtgctggatggtgcaagatagagaagaaaacccgcatccatgatacatctcctggtacactcaccgnctctgtctgcgcctctgatgttgacctcatcacacaagtagcaggtgctgaatggcttggagatacaattgtttatgcttacagatca

SEQ ID NO: 14642 - DNA, 402 bp, Glycine max
atcataaaattcttccaccaagttatgggtttccttgtgttgcttcttttctccctcttaggtctctcttctagttccagcatatcaactcatcgttccatattggaccttgacctaaccaagtttaccacacagaaacaggtgtcttcactgttccaactatggaagagtgagcatggacgtgtctaccataaccacgaagaagaggcaaagagacttgagattttcaagaataacttgaactatatcagggacatgaatgcaaacagaaaatcaccccattctcatcgtttaggattgaacaagtttgctgacatcactcctcaagagttcagcaaaaagtacttgcaagctcccaaggatgtgtcgcagcaaatcaaaatggccaacaagaaaatgaag

SEQ ID NO: 14643 - DNA, 452 bp, Glycine max
tcactatagctataactatgacatgcactccacccttacctcagcattgcattccggtagagctcacaacacatctaaacacataatcaacaacaatggcttacgctacgcttgctcctatggctgtcttcttgcttgccacttgcacacataatgataccaacgcacatcgatacagcacgattgtcatggtgcatgttcacctttcgagatgccatcggacctatcacgtgattgtcgctgtgtacctataggactagttgctggcttgtgtatacattcaactggactatcatctgatgcgaaaacgatctacgagcatcccaacttatgtcaatctcatgatgaatgcatgaataaaggaagtagccctttttgagctcgttaccctaataagtatatcgattatggatggcgttttgactctgattctgaagcactgaaaggcttct

SEQ ID NO: 14644 - DNA, 393 bp, Glycine max
ctcgagccgattcggctcgaggacaaaacggggaagatcgtcgatgctcgcttcaaaaccttcggttgtggatccgccattgcttcttcctccgtcgctactgaatgggtgaagggaaagcaaatggaggaagttttgaccattaaaaacactgaaattgcaaagcatctttcacttccaccagtcaagcttcactgcagcatgcttgctgaggatgctataaaagcagctgttaaagattatgaagctaagcgtgcctcagcatctgctggtggacaggcaacaactggagagaaagctgtcactgcttgagtacttcatttctagaatgatgatgaaaacaaccaatagtgtggttttctgacaggactcgatggacactgtatgaacatc

SEQ ID NO: 14645 - DNA, 381 bp, Glycine max
gagggaacgtaggagatatagttaacatcccaattccccagtgggtgcttgacattggagaatcaaatcatgatatcttctacaccaaccgctcaggaacccggaacaaggaatatctaactgttggtgtggacaacgagcctatattccatggaagaacagccattgagatatacagtgactacatgaagagtttcagagaaaacatgtcagattttttagaatctggacttattatagacattgaagttgggcttggcccagcaggagagctcagatacccctcttatccacaaagccaaggatgggaatttcctggtattggcgaatttcagtgctatgacaaatatttgaaggcagatttcatagcagctgtagcaa

SEQ ID NO: 14646 - DNA, 216 bp, Glycine max
acgcttccttgcctgcaacttgactttagaagatcccttcagggaacaacaatatcatattttcaagtaaataatgaggcaatggtggacacttatcaattggagcgcttagatttcttactagaactatatttgcacaatccataataagctcggcaactctcaaggaaagctctttcctcattttcaagacttcaggaagcataaatgcctacc

SEQ ID NO: 14647 - DNA, 405 bp, Glycine max
cggctcgagctcgagccgaatcggctcgagcggctcgagcggctcgagcagggtcgcaaggttgacgagtatggcaacgttgagaagcaaaccgacgaatactgcaaccctgttcatgctgctagtgtcacctatgtagccaccagaactgctgctggtggttacagtgatgacattaataagcaacatgataccaccaatgcctactgcgtatacactggtagacagcattctagtggtggctacgatggtgacactaataaacatcatggaactactggtggctataatgatgacaccaatagacattatggaactaccggtgtctatggtatagacaccgataggcgacaacatgggactactggtggctatgccggggacactggtaagcacatgggaaca

SEQ ID NO: 14648 - DNA, 407 bp, Glycine max
attggtccttaaacactcatcagtcatcaccatggccaagctagttttttccctttgttttctgcttttcagtggctgctgcttcgctttcagttccagagagcagcctcagcaaaacgagtgccagatccaaaaactcaatgccctcaaaccggataaccgtatagagtcagaaggagggctcattgagacatggaaccctaacaacaagccattccagtgtgccggtgttgccctctctcgctgcaccctcaaccgcaacgcccttcgtagaccttcctacaccaacggtccccaggaaatctacatccaacaaggtaagggtatttttggcatgatatacccgggttgtcctagcacatttgaagagcctcaacaacctcaacaaagaggacaaagcagcagac

SEQ ID NO: 14649 - DNA, 405 bp, Glycine max
ctcgagccgaatcggctcgaggctatgaaaacatacttggagctttagcctggcgcagtaatttttacaatccttcaaaaattttgtttctttgtgtgtgtatggtgatgataacttaattagtgttcatgaatacgtcaagccttactttagtggttctaaattgaaaagctttctagctggtcataatatcaccattactgatggtattgacaagactagtgcaactttgcaatttagaaagttagcagattgtgattttctcaagagaaactttaagcagatgtctaatgttttgtgggtagctcctgaggacaaggcgagtttatggtcacaacttcattatgtttcgtgtaataatctggaaatgcaagaagcttatcttgtcaatctcgtaaatgtgtt

SEQ ID NO: 14650 - DNA, 395 bp, Glycine max
tctgttcctgcaagagtttgagtcacaaattttccactcttcctcaccgattgctagaatggaatttcgatgctcagtcatctcttttaccattctcttctctcttgctctagcatgatagagccatgtccatgcatcgctacctgaggaagattattgacaagctgtctgtccaaacactcccattcccactgcactgctagagcttctaaagcctttcactgcatgtgttgaaatccatgaactgcctaagcaaattgatgattcacagtacccatagacattctgctatcaagaatacctttattcaggctaaacaatgaaagtacaattcaccaagcgttcctatgcacaacctttacgtgtatatacatggttaacggattttaaagaca

SEQ ID NO: 14651 - DNA, 405 bp, Glycine max
atctgaatgagggagagacttctaaggaaaccagtgatatccattgggaagactgcaaggatcaaattgatgtagttgcacttgcatccaaggagcccatacttttctatgatgaggtggtgttatatgaggatgaactcgctgataatggagtatcacttcttactataaaagtgagagttatgcctagctcttggtttcttctgttgcgtttctggcttagagttgatggagtgttgattagactgagagaaacacgtatgcattgtgtatttggtggaagtacaaatcccattatacttcgagagagttgctggagagaatctacatttcaagctttgtctgcaaaagggcacccttttgattctggtgcgtatggtgatccgagtttcatcagccagaagc

SEQ ID NO: 14652 - DNA, 404 bp, Glycine max
cagggactggtgcgacccttcatcaccattcactgatttgtgggaccctcgtcgtgtcggtgacgctgatgatatcacctcctctctcgcccatgctcacgttgactggcgtgagactgataaagctcatatcttccgtgctgatcttccaggggtgaagaaagaggatctgaaggtgcaggtggaggagaataagatcctgcagataagcggtgagagggtgaaggagaaggaggaccagaacgacaagtggcaccgcgtcgagaggcagtgcggaagcttcctccgccgcttccggctgccggaggatgccaaccccaaccagatcagctgcacgctcgaaaactgcgtgctgaacgtcaccgtgcccaaggtggagaagaagccggagaacaagaacgtga

SEQ ID NO: 14653 - DNA, 212 bp, Glycine max
gtcaggcggggctacccgctgagtttaagcatatcaataagggaagaaagggtcctttgtcttcaattttgagggctttttactgaataagtatgtactaaaatgtatgctgtaatagctcatagtgagcgaggaaagtatcgggctatgtaactatgactagagcttcaactatgaataaataaatcgacagcatatgatgcttttgtttt

SEQ ID NO: 14654 - DNA, 99 bp, Glycine max
aaattaggcatgaccctcttgttgagtatgctctgcctatttgaaaatttccacacctcttttaattgtcgtaatgatgtgtgaagtgtgtgttatttt

SEQ ID NO: 14655 - DNA, 401 bp, Glycine max
gaagaagaaaagaagaacaaagatgcaatcctcaaaggagaagatgaaaaacatggcaagtgctgccaaggaacaagtcgacatctataaagccaaaatagacgagaaggcagagaaagcaacggcaagaacagaagaggagagggtgatagcccatgagcacgcaaaggcaaaggaagctggagcaaagatggagctgcatgaagctaaagcaaggcatgcagcagagaagctaagcgccaaccaatcacattatggtctccaccatggccacaacaaccctcccttagtaggaacaactcagactcactaccagcaagggcaccagcaccagccacttggggcagttcctatgcctggaaccacttatccatcttatccactaggaggaaaccctaacc

SEQ ID NO: 14656 - DNA, 333 bp, Glycine max
aaaaaaaaaaaaaaaaaaaaaaaaaaaaaaaaaaaaaaaaagggaaaaaaaaaaaaaaaaaaagggaaaaaaaaaaaataaaaaaaaaaaaaaaaaaaaaaaaaaaaaaaaaaaaaaaaaaaaaaaaaaaaaggggcggcccccatttaggggccttttaaccccgggaataaatccgggcccggtccctgtgggggtccaaattttccttatagggggccgttttaaaccttggcaaaacaagggcaaaaactgttccctggggaaaatggttttccgttaaaaattcccaaaaatttccaacccggaaccttaaggtttaaacccgggggg

SEQ ID NO: 14657 - DNA, 155 bp, Glycine max
attgatgttgtgccaaaaaaaaaaaaaaaaaaaaaaagaagggaaaaaaaaaaaaaaagaaaggaaaaaaaaaaaaagacggccaaatacataagagactaaaagaccagaagataaatcccggtccggttccgcgaaggcgtacctcctttccc

SEQ ID NO: 14658 - DNA, 228 bp, Glycine max
aagaaacataccgaatgagagcatcaaactcttcttcggggatttccattgcgaagcgttactttttcttcttctttctcttcattttcttcgctcttcgatcttccgtccggggactgctccgaataccaccaccaccactcgccgatggccacgatcggaggcttacacgactcccaaggctctcaaaacagcgtcgaaaccgaagccctagctcgattcgccgta

SEQ ID NO: 14659 - DNA, 260 bp, Glycine max
aacgatgagtatgaagaacatcatcgtggtgctcaaggggggttagttgcttcttttccttgtgggggttacagctgcacgcatggaactgagctgcttcaaaagggatcagtcattaagttacgatgatgatgagcatccaaaaccttgctgtgatctctgcatgtgctctcgctcaatgcctcctcaatgcacttgtgaagatattaggctgaattcatgccactcagattgtaagagctgtttgtgcacacgctcac

SEQ ID NO: 14660 - DNA, 216 bp, Glycine max
gaagaagatgggtttgaagaacaacatggtggtgctaaaggtgtgtttggtgctacttttccttgtggggggtactactagtgccaacttgaggctgagtaagcttggcctgctcatgaaaagtgatcatcatcaacactcaaatgatgatgagtcttcaaaaccatgctgtgatcaatgcgcatgcacaaagtcaaaccctcctcaatgccgctg

SEQ ID NO: 14661 - DNA, 261 bp, Glycine max
gtttcagtatttaaaaagtgagaaaagaaaggtatgtgggcatatgttagtaattcgttggaagtaacgctagcttcagaagtcgatggtttgctttcttcgcaccgtgtccgcccgcctcttctcctcctcggtttgccactgaatgcagctgatatagtttacagaagttgtgaaggaccaacagagcacttaagagagtttaactgagagctgcagggatggctcatttggatgtttgtcatcaagtcaggttcattg

SEQ ID NO: 14662 - DNA, 165 bp, Glycine max
taaaattcttccaccaagttatgggtttccttgtgttgctggttttctcctcttaggtctctcttctagttccagcatatcaactcatgttccatattggaccttgacctaaccaagtttaccacacagaaacaggtgtcttcactgttccaactatggaagagt

SEQ ID NO: 14663 - DNA, 269 bp, Glycine max
caccttttcttttcccacacaagtacgtttgctctagatgcaacatattacattggaaccatttgctttcttatgaggcctatcctgaatccaatggaaatgacatcggaattccttggggaattccaattccacattttcaagaaataaggaggcaaaaatgttcatatatgaattggaattattggttttcttattaggcctatcctgatgccaaaggaaatgagatcggaattcctcggggaattccaattccaaattttcaagaa

SEQ ID NO: 14664 - DNA, 273 bp, Glycine max
gccaccttttatcaccaccgtttgttgccaatgtcacgggcgagcaattacccaaggctcgtggaggaagtgggcgtgccttcgtgacctttcttgctgggaacggtgattacgtaaagggtgtcgtgggtttggccaaaggactgagaaaggccaaaagcatgtaccctttggtggttgctgtgttaccagatgttcctgaagaacatcgtgagattctcaaatcccaaggttgcattgtcagggagattgaacctgtgtaccttcctgaga

SEQ ID NO: 14665 - DNA, 280 bp, Glycine max
  modified_base (52)..(52): a, c, g, t, unknown, or other
tactacgatgcctgcacgcctactctagatgatcctctcgctcaagcacctntcctcattctacacaaatacggatgctatagaggcaaccacttacattgccaccaatggcttcttcttgtttattttgctcccataccattagcaacactgtgttagatactcagatcccccctcttttctctatgccattcccccagctgggaagggtgtactggaatcaaagtgtacctgtggggtgcaaatggattcctatcctggggttggccttttaaggatg

SEQ ID NO: 14666 - DNA, 181 bp, Glycine max
caagcatatatgaaggtgtggtgaggccatcttatatgaaggaatatcaaatatattttgtgtaataataaaactatggcctatgtattaccaccctccgacccagcctatgttaatatctgagtggcgtagtacctttgaatcgccttaataaaaggtcagtcgttcaagtttggtcttt

SEQ ID NO: 14667 - DNA, 300 bp, Glycine max
ctaaatccgtgcttatactaaccgatcattgtatgagcaggatagcagaaatgattatcagtctttgtggtggtgatgaaaaattgatgcttgaaaggacacacctgctgttggcttgttgttcaaggatggcaatttgtaagaaagatgtttggagagttgaatgtggaatcccttctggatttccgttcacagttatttgtattagcatttttaatgagatgctcattagatatagctatgaaaaattactgcgccaggctaaagctccaagtatgtttttacaatccttcaaaaatt

SEQ ID NO: 14668 - DNA, 240 bp, Glycine max
ggacgaaggtatttcacccaaatataaatagcaatggaggcatttgccttgacatattgaaggagcagtggagccctgcgctaactatttcaaaggtgttgctctcaatttgttccctgttgacggaccctaatcctgacgatcctttggtccctgaaattgccaacatgtccaggacagccaggaccacgtccaagtcaactgccagaagctggacccagaattttgcattgggttaag

SEQ ID NO: 14669 - DNA, 415 bp, Glycine max
gaaaaaggaggatcgaactcgaacccgattgtggtcggggcagaacagagaggagaggacaacacacacaatcacagggttgagttgagttgagccgtgagaaaagaaaaaataaatggccattgctatgaaggccacgcctatcacggcttcgggcttcgtttcaacaagaaattccacactttcaccctttaaatcatcatttctcagataccgctcaggagcattggaagttcctggcatgcgggtaacctactcagatagattgaaatgtaattgtcatggtggcggtgcccttggcactcaaatgaatctttttagcagatttgctagagttatcaagtcatatgctaatgccattataagctcctttgagaccctgagaagatattagacaagctgtgctggatatgaa

SEQ ID NO: 14670 - DNA, 93 bp, Glycine max
  modified_base (43)..(43): a, c, g, t, unknown, or other
tatagaagatctatgacgtctcatgcaggtcgtacgtagctgngaaataacatttgagctaaatgtcagtttaaggccaggatccgtaaaaag

SEQ ID NO: 14671 - DNA, 399 bp, Glycine max
  modified_base (337)..(337): a, c, g, t, unknown, or other
ctactttccatgcttatattacagggctcttgattgtcgggctgactagagaagcctctgtaagtgaaaagagcagtcagaattcaacctctgtgggtttcaagttgatgttagccaagatagtgccaaagcttttcttgtcactatgtgaggttggagctgattgtgaaggaatttaagcatctgaaagatttgtagcgaagttatatggttgatacatcacttcatttctcaaattaaagccaactttggtctgctaactctgacccatagtaccatcaagtgtaaaggttctcatatagcgtcaatgttttgattcctactatttgtactcttntaatttctcttggttaaaagatcaattcacttctaggagcttgaaggaacataatttggtgg

SEQ ID NO: 14672 - DNA, 216 bp, Glycine max
acaaaaaccttaatatatttacacaagaaaataaatatacgggatagccaaaataatactctagaaatttaaaaaacccataaattctttccacccgttactctctccttctcgtgtttcccttttaatagggcgcccccccccttttggccctcttgcccccggttttttttccggccccgtcccttttggcttcccatttttccctttttgggg

SEQ ID NO: 14673 - DNA, 247 bp, Glycine max
aagaaacataccgaaggagaacatcatggtggtgctaaagcggtgtcaggtgctactgttgctcgtggtgggagcttctcgcaccgacctgagcgctgagcaaacgtgaccatgctcataggaagggatcatgatgagcacccaaaaccatgctgagacctcatgaatgtgctctcgctaatggcctcataaaagcactggcgaagttatacggcgaaattcatgcaatctacattgtaaaagctgt

SEQ ID NO: 14674 - DNA, 144 bp, Glycine max
tggagacaagaaaaatgagccatggcggcctaagatgcaaactcgtgaaagctagttgaagcttgcgctatcatcatatggactgcttagcacttcatgcagctgttaattttggacagtatccctatggaggtttaatcttaa

SEQ ID NO: 14675 - DNA, 275 bp, Glycine max
gtcacacctgtcatatgtttcgtgtaatcatctggaaatgcaagatgcttatcttggcaatgtcgtacatgtgttacgcgagctgtatctgcacagtccatacgaagctcgccaactgacaaggacagctttgtctcatattgaatggctcgcaaaagctgatgtgcctaccatagcacagattgaagagttgcattcgatgcatagaatgatgaatgcttctgattcacatgattatcttgatctactgtacaacattgactagttggctttac

SEQ ID NO: 14676 - DNA, 416 bp, Glycine max
gtcacaacttcattatgtttcgtgtaataatctgaaaatgcaagaagcttatcttgtcaatgtcgtacatgtgttacgcgagctgtatctgcacagtccataggaagctcgccaactgcgaaggaaagctctctctcgtattgaatggctgcaaaaaggtgatgtgcctaccatagcacagattgaagagttccattcgatgcaaagaatgatgaatgctcctgattcacatgataatattgatctactgatgagcattgatttgttgggtttacaaggagcacttaaagctttttcaaaatagaatgtttttgatgataagcttgtgtcggctaacacacaagaattcttttatggaaaatttccagaggatgcttggttaccaatctttgtgaattgtctttattctttaagtc

SEQ ID NO: 14677 - DNA, 229 bp, Glycine max
actatagatatgactatgacatgcactccacccttacctaagcattcaattcgagtttagaccagccatagcatagcttgaggcggaagagtgatactatatcagcccgagagaaaggtagtacaccaatggcgcaaggccaaacatggctgcaacttcaggtattgtaacagccacaggtccagattaccctatatgtgaatgaactcaatatggtgatgtgaacaaa

SEQ ID NO: 14678 - DNA, 420 bp, Glycine max
gttggactaaaagaacaacaacaggagcagcaacaggaagagcaacctttgcaagtgcggaaatatagagccgaattgtctgaacaagatatatttgtaatcccagcaggttatccagttgtggtcaacgctacctcaaatctgaatttctttgctattggtattaatgccgagaacaaccagaggaacttactcgcaggttcgcaagacaatgtgataagccagatacctagtcaagtgcaggagcttgcattccctgggtctgcacaagctgttgagaagctattaaagaaccaaagagaatcctacttttgggatgctcagcctaagaagaaagaggaagggaataaaggaagaaaaggtcctttgtcttcaattttgacggctttttactgaataagtatgtactaaaatgtatgc

SEQ ID NO: 14679 - DNA, 403 bp, Glycine max
acagtacacacactagaagaataatggcttccatcctccactactttttagccctctctctttcttgctcttttcttttcttcttatccgactcagtcacccctacaaaaccaataaaccttgttgttctacccgttcaaaatgatggttccacagggctccattgggccaacctccaaaaaagaacccctctaatgcaagtaccagtcctggtggacctcaatggaaatcacttgtgggttaactgtgagcagcagtactcatccaaaacgtaccaagcacccttctgccactccacccaatgctctagagccaacacccaccaatgcctcagttgccccgcggcatcaaggccagggtgccacataaacacgtgtggcctcatgtccactaatcccatcac

SEQ ID NO: 14680 - DNA, 405 bp, Glycine max
cgtcctactagtgaaacagtgatgtatccctactactctaagtggataaggggacatcgtgacttgcctttgaaacttaatcagtggtgcaatgttgtaagatgggagttcagcaaccccactccattcatcaggagtcgcgagtttctttggcaagaagggcacactgcttttgcaacaaaggatgaagcagatgcagaggttcttgagattctggaattatataggcgtatatacgaagagtatttggcagttcctgtcataaagggtaagaaaagtgagcttgagaagtttgctggtggactctacactaccagtgttgaggcatttattccaaacactggtcgtggtatccaaggtgcaacttctcattgtttgggccaaaattttgctaaaatgtttgag

SEQ ID NO: 14681 - DNA, 89 bp, Glycine max
gtggtagtggacgtggtggtttacccccactgctcgaagtacttctgcacctaacactgggtcctcatatatcaacaaacagattccca

SEQ ID NO: 14682 - DNA, 219 bp, Glycine max
cacaatggcttaactagcagctcggccgattgatcacatgcattgaataaccctaaacttgagctccttccttgaccgctcaagtgccacctcacagtgtccatgtccacacaacatcacaccgctacgaagctggcgtcgtcccccccggagcccgtttcgaaccgccgcgttatgaagccgtcgtcaaagcgccctccatttaccattccgagagag

SEQ ID NO: 14683 - DNA, 244 bp, Glycine max
acaattccttcacttgcagcactgttgcatcatcatcttcattgcaaaacctaaacttcaccttcaaccatgaccacacaagtaccacacacagtgtccaagtccacacaacaacacaccgctacgaagctggcgtcgtcccccccggagcccgtttcgaaccgccgcgttatgaagccggcgtcaaagcgccctccatttaccattccgagagaggtccaacgacttcccaggtcctcgccgt

SEQ ID NO: 14684 - DNA, 288 bp, Glycine max
cacaagggtcgacccaacaacttggcccattggtcacaggcccacaattcctcttttcttgtgcaccttccttccttgttcaaaagggtcttcctagaaacactcaaggtgtggctgggttaggccatgcaccaatttctcttccaaaccaactcgcttcccactttggcctacaacgccaattcaccacttgcctttctcgctaccctacttcaaagggtgctataatattcggggatgcacctaacaccatgcgacagtttcaaaaccaagatattttccacgatt

SEQ ID NO: 14685 - DNA, 312 bp, Glycine max
acttgtgattgatgataacacaaattccctcagaactgggcatgtctattaggtgtgaaaacaacaccacgcatacagcaagatggccacttccgacagtaacatgctactaaattatgttccagtttatgtgatgctcccactcggagttgtcaatgttgacaatgtttttgaagacccaaatggccttaaagaacagctcttgcagcttcgagctgcggctgttgacggcgttatggttgatgtgtggtgggggatcatagaactgaaggggcctaagcagtatgattggagagcctacaggagtttgtt

SEQ ID NO: 14686 - DNA, 256 bp, Glycine max
  modified_base (151)..(151): a, c, g, t, unknown, or other
ctctagcctgatggaatctgaatctcttcatccgacctagacatattaataatacgagctggcaatccagtatgggtcaacgctacctgacatctgaagtgctttgcttttggtatcaatgcctcgaacagccagaggaactcccttgcgngctcgaaagacaccgtgataagccagatacctagtcaagtgcaggagcttgacgtccctgcgtctgcataagatattgagaacctcataaagagccatggtgagt

SEQ ID NO: 14687 - DNA, 372 bp, Glycine max
  modified_base (325)..(325): a, c, g, t, unknown, or other
  modified_base (341)..(341): a, c, g, t, unknown, or other
ccttcttcatctgcaccacgaaacttacctagttcctggtcctgtgttctccttgcagctccaaaattctatgtggtggtggagatggtgatgattactgcttggatcactgaccttttcgcttgtatgggtggttgttttggatgctgtgtgaaacccacaccaattattgccgtggatgagccagcaaagggactaagaattcaggggcagacagtaagaaaccacacatatcagatggtttctggagttcaagcacttgtgatctggatacagcaacattcaatctcagagaagtatctcgtctgtcagtacatcaaatcanattctctatcatagcngtggaacttctacccaggggccaaatctgat

SEQ ID NO: 14688 - DNA, 248 bp, Glycine max
ctcatggcgggaggcatctacactgtcttgttgcaacctggtcatggttatctattgtgttggactgctgtcatggggggaaataaaccggctcatattgggacttacctctcatagagaaccaacgatgagaaactgagaaaccgttgtggaccagctcaaatgcctaatgctctgctcttgccttctagtaaggaaggattaactttcagaggaattccaaactagttccctatctgaagaggttg

SEQ ID NO: 14689 - DNA, 249 bp, Glycine max
actagcgatagctgataagagagataccaacaggactggggaaatatgataagttgagattccctttgaagaaaagatggcatcccataggcaaagctatgaagctggtcaaactaagggccgaactgagacgaaccagacgatgggcaatattggagagaaggctcaaggctgcaaaggagaagacccaggaaatggcccaagctgcaaaggagaagacccaaccaaacagcccaagctgccaaggac

SEQ ID NO: 14690 - DNA, 313 bp, Glycine max
cgagcttaattattaacacttccttagttcaatatggggaaggccttcactctctctctttcttccctttgcttgctactcttgtcgagtgcatgctttgctattagctccagcaagctcaacgagtgccaactcaacaacctcaacgcgttggaacccgaccaccgcgttgagtccgaaggtggtttgattcaaacatggaactctcaacaccctgagctgaaatgcgccggtgtcactgtttccaaactcaccttcaaccgcaatggccttcacttgccatcttactaaccttatccccggatgatcatca

SEQ ID NO: 14691 - DNA, 267 bp, Glycine max
acgtggccatccattacaccatccaaaatctcagattaggaacactcgccatacccgttaacaagcctggtagatttgagagtttcttcctatctagcactgaagctcaacaatcctacttgcaaggattcagcaggaaccattttagaggcctcctaccattcccaaattcgaggagataaacaaggttctgtttagtagagaggaagggcagcagcaaggggagcagaggctgcaagagagcgtgattgtggaaatctcgaagga

SEQ ID NO: 14692 - DNA, 186 bp, Glycine max
acagataaaaaattaatataaacaaaaatccaaaaaataaaaagaaaatataaaaacacgagtataatatttaaaaaataaaaatgaataacactatcaatatggataaattactactaaataaaaaataggccgtcccccacctattgaccttgtatcccctgaatttaattccgaaccctttcc

SEQ ID NO: 14693 - DNA, 218 bp, Glycine max
agagcttaactattaacacttcattagttcaatatggtgaagggattcactcctggtctacctcacctctcatgaatcgttttgatacgagacatccttgttctcaagctcatacagtatcagccagggcttacccaacaccctcatcactttgtaacctgaccaccgtttcaagccctaacgtggattgattcaaacctataactctcaacaacctg

SEQ ID NO: 14694 - DNA, 303 bp, Glycine max
gtggtagtggacgtggtggtttacccaccactgcttgagttagttctgcagttaacaatcgctcctcagatatcaacaaaaagattcgcacagcacttgggaaaggtaagaaaattgtttttcttaccagagttgatccttttccagtagctttactggctgttctttttggcgttaagaatgaaattctgagttctaacgccactaaccctatgctgacgcgacttcttgagaactgtaagagtctcaaatatctggttgatgagtgtccctttgcatttgtgaactagtatggtaatattt

SEQ ID NO: 14695 - DNA, 186 bp, Glycine max
acctggctatacacgacaccatccacacactaagatgaagaacggtttccatactccactacttgctagccctatctcttacttgctctcttcttatcttcttatccgactcattcacccgtacggaacccaataaaccttgttgttctacccgttcaaaatggatgggttccacagggggctcca

SEQ ID NO: 14696 - DNA, 257 bp, Glycine max
taggccggcgattacacttgctgataactacgtttacaatagggtatatagtttattaaataacgttgaagttgtatcaccatagatcgtcttatcaagtgtaaatctgcaccgacgattatgctgcttttgttcttttccctccttttttgggaatctccaactagctagttgtagtgctatagccaaaattccattaaatttgatggattgcacgagtaatgtgcatttctcctccatcttccactctctctatg

SEQ ID NO: 14697 - DNA, 225 bp, Glycine max
gggattttgtcaccagttggtcctcgtggaaggctcttgaggagattgctttcttggataggacttattccacctatgccagaaacaccttttgaggttcacaatgataataacgctccttgaaccattcctaaggcctacttttttatcaaggatatcactaagtgatatatggagacctgcatcaaggaaatactgcagaaatgatacttggaaaatgttgaa

SEQ ID NO: 14698 - DNA, 194 bp, Glycine max
agaaactcgaatccagtgctcactacagtgctgattgtgggaaagactaaagctattataaaattctgagccatggatatctagggaaacttcatgcaattaggttaactcaaacggcctgaccttaaaatgaagtggactcttttagctatgccttttattgtccgacttatgcagctccattgagagatgtt

SEQ ID NO: 14699 - DNA, 265 bp, Glycine max
atggcctccacttgccatcttactcaccttatccccggatgatcatcatgcccaagggaaaggagcacttggagttgcaattccaggattcctgagacgtttgaggagccacatgaacaatcaaacagaagaggctcaaggtcgcagaagcagcagctacaggacagtcaccagaagattcgtcacttcaatgaaggagacgtactcgtgattcctcctggtgttccttactggacctataacactggcgatgaacccagtgttg

SEQ ID NO: 14700 - DNA, 401 bp, Glycine max
acttgagatggatggaagcggtgttgccgctgggaatcatagctggaatgctctgcgtcatgggaaacgctcagtattacattcacagagctgcacatggcagacctaagcacatcggaaacgatatgtgggatgtggcgatggagcgaagggacaagaagcttatcgagcaagcctctccctccaattaacatcgatgttttgccgatgtcattgtgaagaaaataaactgctcacctggatttacggctgtgttcttgggaagcatggttaatcacaagaatcaaattccgtctgttttcttgtatgcaattcaacataggatttataaatatacctatgctacaatcacaattacttttgctaagctcggcttgttgaaaactaagcagttctgaggt

SEQ ID NO: 14701 - DNA, 375 bp, Glycine max
  modified_base (337)..(337): a, c, g, t, unknown, or other
atacatatatacgagagagtgagtaatcgagaaagagaagaggcatatatatcaaaatggctgcagagatcggaaaggagtcattgataactggaactactaatgcacagttactggacagagaagggtagaaatgacttaaaaaaatttttaccaaaacatacttgccaagagcattgaagctcctgatacgggtcacccaaatggacagcaggccacaggcaccacaacttatctgttcttcagcagcattgtgcttttttgatcaagatgccaatggaatcatttacccttgggaaacttacatggggctgcgttctattggatttaatgttgntgcatctggtattatggctattggtatcaatgttggat

SEQ ID NO: 14702 - DNA, 73 bp, Glycine max
gtttatcagtttctcaatcgttagatctcatcttatactcaccggcgagtccactcgcgccagcgtcgacgcc

SEQ ID NO: 14703 - DNA, 238 bp, Glycine max
aacttactaacactatccttagagcaatatggggaagcccggggggactctgtatcatgcttgcctttgcttgctactctagtcgagtgcatgctttgctatgaccttcagcaagttcaacgagtgccaactcaacaacctcaacgcgttggaacccgaccaccgcgtttagtcccaaggtggtcttattggaacattggaactatcaacaccatcagctgcaaaacgccggtgtcac

SEQ ID NO: 14704 - DNA, 339 bp, Glycine max
aggttccatgttagatcttaaaatttctcaatctaaaattgcacttcccaaaaacacagttggaggaaccattctgcgtagtgatctattggcaaatttttggacagagggcaattttagagcaagtgttgatttgcagcgcaacgcatcgtattaaaggaatgattaaaatggtggccacagttggtattcctgagattcaggtatagcattggcctgtgctatgaataagtcttttggggggcgtcccagttctgatatttacaccatctgctctcaagactggtgattatggaatcctgcttgcacaaaagcaatgactatgtcatttaatccaaa

SEQ ID NO: 14705 - DNA, 180 bp, Glycine max
aggttccatgttagatcttaaaatttctcaatctaaaaggggacttcccaaaaacacagttggaggaaccattctgcgtagtgatctattggcaaattttttgacagagggcatttttagagcaagtgttgatttgcagggcacgcttcgtattaaaggaatgattaaaatgttggccac

SEQ ID NO: 14706 - DNA, 135 bp, Glycine max
ggctcgagaaggaaataattgatctttgaaaatgcagggaggaaagaaagctggagagtccatcaaggaaacagctgcaaacattggtgcttctgccaaggctggcatggagaaaaccaaggccactgtccagga

SEQ ID NO: 14707 - DNA, 64 bp, Glycine max
cacaatacatataacatcacatgcactcgtaccttacctcaaacttaatctcttgataactcat

SEQ ID NO: 14708 - DNA, 338 bp, Glycine max
tcattcacgagattgaggcggcggttgatttggaagaaacccagctaaggtaacatcatttctgtgatggtgtacttggctccggtgccaacgttttaccggatatacaaaaagaaatgcacggacggtttccactcgctgccatacttgttgtcattaatgagttctatgctttggttatactacgccttcctcaaaattcatgacggcgttgttccccttattacgatcaactcgatcggatgtgtcatagagctcatctacattctcacctacattaaatatgcgcacaaggatgcaaggaacttaacctataccctatttgcggcgatgaatat

SEQ ID NO: 14709 - DNA, 158 bp, Glycine max
caaccttgtttcttaaggtttatattttggagtttacttagggatgatgattgttattttctgcactggctttgatacagatttcaggtgagtttgtttcgttatctcttaatgacaaccttgtttcttaaggtttatattttggagtttacgtagtg

SEQ ID NO: 14710 - DNA, 289 bp, Glycine max
tcattcacgagattgaggcgggggttgatttggaagaaacccagctaaggtaacatcatttctgtgatggtgtacttggctccggtgccaacgttttaccggatttccaaaaggaatggcacggacggtttcaactcgctgccttcctggtggtcattaatgagttctatgctttggttatactacgccttcctaaaaattcatgacggcgttgttccccttattccgatcaactcgatcggatgtgtcatagagctcatctacattctcacctacattaaatatgcgc

SEQ ID NO: 14711 - DNA, 316 bp, Glycine max
ggcgtttgtcccatttgtggattcgtgctgataaaagcgtggaaggaatcagcattgcagtggtgacatggaagtcatattggggggcatggcttctctggaggatgagatttcatggttcaagacagaagccaacaagtggggtatttcactttctgacgttgttcctcagcaggctaacaaaaactattgtgggttgctggaaagtttaatgagtccagacgcggaatatactgtggctattacagcattttgggctattgaaacggcgtatcaagagagctttgccaactgcattgaagaaggttccaaaacc

SEQ ID NO: 14712 - DNA, 319 bp, Glycine max
cgctgctggaggcacatcaatgaccctgaatggggtctgtgcaagtacaggggttgcaatacacagttgcttgactgttgctgaccaatacgatttccagattaacatacataccgacaccctaaatgaagctggatttgtcgaacatagcattgcagcatttaaaggaagaactattcatacttaccacagtgaaggtgcaggtggtggtcatgctccagatttgatcaaagtttgtggtttgaagaatgtattgccttcataaccaaaccgaacacgccctttaacactcattactatatatgagcatcttgacatg

SEQ ID NO: 14713 - DNA, 252 bp, Glycine max
ggagaagggaaggtgagtagtaatggtcatggatgttgcggatcagggccaggctatgcttccccactggaagccatttctggtcccagagagtctctcatttatgtaacctctgtctacacagggaccggaatagagaagccagactatttggcgacagtggatgtggatccaaactctccaacttattccaaagtcatccataggcttcctgttccttatttacgtgacgaattgcatcacacaggctgg

SEQ ID NO: 14714 - DNA, 287 bp, Glycine max
cgatctagggacaagggaaggtgagtagtaatggtcatggatgttgcgaatcatggccaggctatgcttgcccactggaagccatttctggtcccagagagtctctcatgtatgcaacctgcctctacacagggaccagcctagagaagccagactatttggcgacagccgatgtggatccaaactctacaacttattccaaagtcatccataagcttactgttgcttatccaggtgaggactttcatgacacaagctgttatccatgcaaatctcgccatggagac

SEQ ID NO: 14715 - DNA, 270 bp, Glycine max
  modified_base (245)..(245): a, c, g, t, unknown, or other
gtcgacctctgtcaatcagcatgggaaatgcaattagggtgtctcaaaagtcggatagccaagctacctttgaccttgtctgaatcagaagcaaaagcttctctcgagtcagatattgagtgttttataagtgaaaagattatacttgccaacaaggtgatagtgaagcatgctgtcaccaaaataagagatggtgatgttcttctaacttttgggtcttcatctgctggtgaaatgatactatngcatgcacatgagttgggaagacag

SEQ ID NO: 14716 - DNA, 200 bp, Glycine max
gtagcagaccaagctagctagctagcacgcaagcacagaggtggaggcaaagcgaggccatgccctcatgtgcttggcacgtgtttcactcttcctctgcgctctaaccctatccgctgctcacggaagcaccacggttcaagacatcgcgagaaagttgaaactcggggacaacgagcttctgcgcacggagaagaagt

SEQ ID NO: 14717 - DNA, 326 bp, Glycine max
  modified_base (177)..(177): a, c, g, t, unknown, or other
  modified_base (255)..(255): a, c, g, t, unknown, or other
  modified_base (257)..(257): a, c, g, t, unknown, or other
caaataattaattaaattcctcgtggaatcttgttgaagccatgtctacagcggtcaggtcatcaagtgcagagctgcggtggcatgggaacagggaagccactatcgatagaaaccatagaagtggcaccaccccagaaaggtgaagtgcgtttgaagatcctcttcaactccctntgccgtacagatgtttactggtgggatgctaagggccagactccgctgtttcctcgtatcttatgccacgaagcttcngngattgtggagagcgtgggcaaaggtgtgacacatctgaaaccaggtgaccatgctctcccaatattcac

SEQ ID NO: 14718 - DNA, 113 bp, Glycine max
ttagggaaagccttaaaattgtttttcttactagagttgatcagttttacagtagctttactggcgtgcattcatcggatcttatatgatcattccaagttatcacgtctcta

SEQ ID NO: 14719 - DNA, 166 bp, Glycine max
ttaaggaatacgcccgtgtcactgttttcaaacacaccctcaagcggaacggctccacttgccatcttactcaccttatccccaaatgatcatgtcgttcaagggaagggagcaattggatttgcatttccgggatgtcctgagacgtttgagaagccacaacagc

SEQ ID NO: 14720 - DNA, 354 bp, Glycine max
gctaacttcaacacctttaattttctaaaagtaattcagcggctgaataccaagcggagaagatgagtcaggagcagccacggcgtcccaaaggccaaaaccccatcaaatacggcgacgtttttgtcgtctccggcgaccttgcacagaagcccgtcgcaccggaagatgctgccatgatgcaaagcgcggaaactcgagtgctcggacaaacccaacccggcggagcagcttccgtcatgcaatctgccgccaccaggaatgaacaggctggccttgtcggtcaccgggacgtcaccgacgttaccggcgaccgtggcgtcacagtcacagaaactaaagtccctggaagac

SEQ ID NO: 14721 - DNA, 310 bp, Glycine max
gctaacttcaacacctttaattttctaaaagtaattcaccggggggataccaagcggagaagatgagtcaggagcagccacggcgtcccaaaggccaaaaccccatcaaatacggcgacgtttatgtcggctccggcgaccttgcacatgatcgcgtctcaccgtaagatgctgccatgatgcaaagcgcggaaactcgagtgctcggacaaacccaaccctgcggagcagctttccgtcatgcaatctgccggcaccaggaatgaacaggcttggccttgtcagtcaccggtactttaccgacgttacc

SEQ ID NO: 14722 - DNA, 410 bp, Glycine max
  modified_base (387)..(387): a, c, g, t, unknown, or other
acaaaaacaaaccaaaccagggcctttgattacaagagagagggaccaaaacattcaacacaatggcttctgagcaaatgcctcgcagagagaacaacagcaatagggtgatagagagagaggttcacgttgagacacacagaaaagagtccctccctgataagggaagggttgtgatagagagtgagaagaaggagaaagagagagagttggcttctgatagagccaggtctggaaatatagttaaggaggacaaagaggttgaagaaggaagaagaggaaaagaaagtggtggtggtggtggtgttcagcatgagaggaagtttgaaacgaaagttgaagagaagaaaggttttggggaaaaggctgaactcgaggggataacangagtggtggtgggaggagagtgc

SEQ ID NO: 14723 - DNA, 144 bp, Glycine max
tcaataccatcaaaaacctggcataatctacatcaacagtgaggccaaacaaaacacagacgagaacctcatccatctattaatatcatctatatcaacaacaaatccaaccattacacaatcatacactactaatccaacaaa

SEQ ID NO: 14724 - DNA, 407 bp, Glycine max
  modified_base (337)..(337): a, c, g, t, unknown, or other
  modified_base (370)..(370): a, c, g, t, unknown, or other
aaatttctttgcagccttggaatgctttcaggcctgatggagtaattatcttctcggacatccttacaccacttcctgcgtttggagttgattttgacatagaagaagtaaggggacctgttatacattcgcccattcgttctgaggaaggattaaaggttttacatccaattgacctggacaggcttaaatttgttggagattcactaaagatactgcgccaagaggttggtggtcatgcagctgttttgggttttgtgggagcaccttggacaatagcaacatatatagtggaagggggcaatagctgattacgttattttccaagtggagtctngggctcattgcatacaaatatttgattcatggngtggacaactaccacctgaaatgtgggaacgctggtc

SEQ ID NO: 14725 - DNA, 297 bp, Glycine max
gagtcattgaactttgactatatttttcagagttcagattattcttctcttttgaattttgattttgggggtttaagtttctgagagaaaaaaaaaaatgataaaggtcgttctttttttgttctgctttgcctctgcactgaccctttcagtatcggagtccaaatctgcttctgtgcaacctcatgcagctgaatctttctctgttggatatattcagatgaagactgcagcgaactgttcttacctggtagttatatctacgagttgttcatcgcctaagttcactacggataa

SEQ ID NO: 14726 - DNA, 196 bp, Glycine max
tccatgtcgtgccctcacgtgagcggcttagccgcgctgatgaagtcggctcccctgattggagcccagccgcggtccgatcggctcttatgcaacggcttacacagtttacaaaaccggtgagaagctgcaagacagcgcaacgggaaagccctccacgccgttcgatcacggttccggacacgtggaccccgtc

SEQ ID NO: 14727 - DNA, 425 bp, Glycine max
tctagggtttacagagaagctaagaggcgcagccgtagcaaaagctcgtggaattgctagcaatggcgaggatcaaggtttacgagctgaggcagaagacgaaggctgatctgctgaatcaactgaaggacctgaaggcggagcttgccttgcttcgtgttgctaaggtcaccggtggtgcccctaacaagctttccaagataaaggtggtgaggttgaacattgcccaggttttgacggtgatttctcagaagcagaaggctgcgttgagggatgcctacaagaataagaagtacttgcctctcgatctccgccctaagaagaccagggctattcgcaggaggcttactaagcaccaggcatcattgaagacagagagggagaagaagaaagagttatatttcccactaaggaaatatgctatc

SEQ ID NO: 14728 - DNA, 68 bp, Glycine max
gtgcagccgactttgttggagctagaggcaactggcttcgtggcggcagttccgtgtcattgtaggtg

SEQ ID NO: 14729 - DNA, 304 bp, Glycine max
  modified_base (273)..(274): a, c, g, t, unknown, or other
  modified_base (285)..(285): a, c, g, t, unknown, or other
ggctcgagtaataaaggagcaagaggcaagaagaagacaacgaaaagaagaagaaaggaaagccttggaagcagcggctagaaaagctaaaatagacgagacatttgagaaaacagttgaagagggaaatcaaaccggaggtgatctagttgttgaaaaatctcggtttgtggcttcagatcctgatccttccatatctggagtagtaaatggtaatccattaagtaaagacttggagggaaatcagaattctacgtctatatctgagacagnnaaatatgatgngtctgctcatttcaacaat

SEQ ID NO: 14730 - DNA, 305 bp, Glycine max
caattttctattgaccttctcggtggaggaattttagtgggcaaaactggagattggatcacacttttacaaaattctccaattagtaacttgttgaaagttgctgcttggaagaaaggctgtttaatggttaagattgtgatgtctgggaatgcagcagtcaaaaggagtgattgggcctcattggtacaagtgtttttaacaaacagcaacagtacatagcatttggatgcattaagtggacaaaatcggaaccacatttctgggaattgatcttcccaatagaggtatgtggtcctaataat

SEQ ID NO: 14731 - DNA, 229 bp, Glycine max
aaatttcttagcagacttggaatgctcaaacgcctgagggggtaattatataggtgggcatgcttacaatcattgctacgactcgagtgcatattaacatacatgatctatggagaccagttatgcattcgaaccttcactctgacgagtgagtaaaggttatgcatccaattgacccccacaaaagcaaatcaagaggaaagtcactaaggataacattgcacaaggt

SEQ ID NO: 14732 - DNA, 297 bp, Glycine max
tatatactatgatgagagtgcggtttcctttgttggtgttgctgggaactgttttcctggcatcagtttgtgtctcattaaaggtgagagaggatgagaataaccctttctacttgagaagctctaacagcttccaaactctctttgagaaccaaaacggtcgcattcgtctcctccagagattcaacaaacgctcccaacaacttgagaaccttcgagactaccggattgtccagtttaagtcaaaacccaacacattccttctcccccaccatgctgacgccgatttcctcctct

SEQ ID NO: 14733 - DNA, 424 bp, Glycine max
agaaaagaagaaaggaaagaattgatcgttgaaaatgcagggaggaaagaaagcgggagagtccattaaggaaacagctacaaacattggtgcttctgccaaggctggcatggagaagaccaaggccactgtccaagagaaggcagaaagaatgacagcacgtgatccggtgcaaaaggagttggcaacccaaaagaaagaggcaaagatgaaccaggcggagctggacaagcaggcggcgcgtcagcataacacggcggccaaacagtccgacaccacggctgggcacatgggacatggccaccacaccaccggaaccgggactggaaccgtcacgtattccaccaccggcgaatatggtcagcccatgtgggcccaccagacgtcggcaatgcctggccatgaaaccgggcagcccacgggc

SEQ ID NO: 14734 - DNA, 378 bp, Glycine max
acccaatcatgccatatttgaggcgaataaatgcaacctcgacaaaggcttatgctaccagaaccatccttttcctgaaaaatgacggaactttaaggccacttgccatagagttgagtttgccacatcctcagggagatcaatctggtgcttttagtcaagtttttctgcctgcagatgaaggtgttgaaagttctatttggctgctagcacaggcttatgtagttgagaatgactcgtgctatcatcaacttgtcagccattggttaaacactcatgcagttgatgagccattcatcatagcaacaaacaggcatctcagtgttgttgacactatttataaactccttgactctgactatcgtgacaccatgaaca

SEQ ID NO: 14735 - DNA, 409 bp, Glycine max
gagaagaagaagagagagtgatggagtgcgtattcggatgggtgggtaatgggtttgcgatcggggtggctgattcatcggcggtgcacagcattctcgtacacaagtccaacgaggacaagatcatgctcctagattcccacaaactcattgccgctagcggcgagcccggagacagggttcagttcacagagtacattcagaagaacgtatgcttgtatcagttccgtaacggcatgcctgttaccaccgacggcgtcggcaatttcacgcgtggcgaactcgtcactgttctcccgaagaacccattactttgtgaacatacttcttgctgttgatgactaagagacgggccctgaactatactatttggactacagtgctacgctttatcagcttttataagggg

SEQ ID NO: 14736 - DNA, 281 bp, Glycine max
tattgaacttatctctcttctcacttctgttgttataagtaacttccctcatcattacaaaacaatcctccacaggtttcaaaatgctgaaatcgggcatgggaattgaggagagaaagcaagtgaagaagccagcacaagccagctcgagaaaagggtgtatgagagggaaaggaggtcccgagaatgctagttgcacctacaaaggtgtgaggcagagaacatggggaaaatgggttgctgaaatccgtgaacccaatcgaggtgctaggctctggctc

SEQ ID NO: 14737 - DNA, 358 bp, Glycine max
  modified_base (287)..(287): a, c, g, t, unknown, or other
atactatgatgagagtgcggtttcctttgttggtgttgctgggaactgttttcctggcatcagtttgtgtctcattaaaggtgagagaggatgagaataaccctttctacttgagaagctctaacagcttccaaactctctttgagaaccaaaacggtcgcattcgtctcctgcagagattcaacatacgctccccacaacttgagaaccttcgagactaccggattgtccagtttcagtcaaaacccaacacaatccttctgccgcaccatgctgacgccgatttnctgctttttgtccttagcgggagagccatacttaacttggtgaacaacgacgacagagactcctacaacct

SEQ ID NO: 14738 - DNA, 362 bp, Glycine max
gaggcagagggggtacatctacgactcaggagctattctagtgtcgtcttgaccgacgatggcgagtgaaaagttggtgctggcagtgatcaggccgcgaggccaaccttccgcaaccaaaacgacaaaatcgcatttgccgttcactcctccttcctcacctccggctatgtcctcaccgctacaggtccccaggccctctccgacaatgcgttttctgacccatccaatgacgaggtatccgttgatcattggaacgagctgaacgatgagtacgcgttcgtttacgcgaatccagaaaagggttcggagaaagtgcttgtcaagtgcctcgtgatgaacgacaaattgctcgttcatgc

SEQ ID NO: 14739 - DNA, 407 bp, Glycine max
tgaaattttcacaagaggaatttcttacagcttggtcaacccaggtccgtactgcaacaactctgttggctgatgggtgtccatatttgtatgctatggtgcatgatagttcagtgtctacaataccaggtgattatgtcattggtgttaagttgacaaccataaacaatatgtgtgcatatgggctcaatcctggtatttcaggttctcgtcttttgggcaccattcctcagtccatttcacagcaaactgtttggaatcaaatggcaacagtgagaacaccattgaattttgattctagcaagcagagcttttgtcaattttctattgaccttctcggtggaggaattttagtggacaaaactggagattggatcacacttatacaaaattctccaattagtaac

SEQ ID NO: 14740 - DNA, 379 bp, Glycine max
acccaatcatgccatatttgaggcgaataaatgcaacctccacaaaggcttatgctaccagaaccatccttttcctgaaaaatgacggaactttaaggccacttgccatagagttgagtttgccacatcctcagggagatcaatctggtgcttttagtcaagtttttctgcctgcagatgaaggtgttgaaagttctatttggctgctagcaaaggcttatgtagttgtgaatgactcgtgctatcatcaacttgtcagccattggttaaacactcatgcagttgttgagccattcatcatagcaacaaacaggcatctcagtgttgttcaccctatttataaactccttcaccctcactatcgtgacaccatgaacat

SEQ ID NO: 14741 - DNA, 378 bp, Glycine max
acccaatcatgccatatttgaggcgaataaatgcaacctgggcaaaggcttatgctaccagaaccatccttttcctgaaaaatgacggaactttaaggccacttgccatagagttgagtttgccacatcctcagggagatcaatctggtgcttttagtcaagtttttctgcctgcagatgaaggtgttgaaagtcctatttggctgctagcacaggcttatgtagttgtgaatgactcgtgctatcatgaacttgttagccattggttaaacactcatgcaattgttgggccattcatcatagcatcaaacaggcatctcattgatgttgacactatttataagctcctttacgctcactatcgtgacattatgaaca

SEQ ID NO: 14742 - DNA, 359 bp, Glycine max
tatatactatgatgagagtgcggtttcctttgttggtgttgctgggaactgttttcctggcatcagtttgtgtctcattaaaggtgagagaggatgagaataaccctttctacttgagaagctctaacagcttccaaactctctttgagaaccaaaacggtcgcattcgtctcctccagagattcaacaaacgctccccacaacttgagaaccttctagactaccggattgtccagtttcagtcaaaacccatcacaatccttctccccaaccatgctgacgccgatttcctcctctttgtccttaccgggagagccatacttaccttggtgaacaacgacaactgagactcctacaac

SEQ ID NO: 14743 - DNA, 245 bp, Glycine max
tctatactatgatgcgagtgcagctcccttctgtgacggagctgatcactgctagactgacttcactctacagtttattaaaggtcctacatgaccagactggccgtggctactccagtaactatatactgttttacactctcttggagaaccacgccggtcgcaatctaattcatctagagacatcacaaactctactttcatcttcagaacctacaaacgtacctgtccttcagcttcactca

SEQ ID NO: 14744 - DNA, 401 bp, Glycine max
ccattacgccaaacttgttctaccatcaacaccacgatgcttcctctctggtgggaggctctgtttcttgctcttgcacaatatagccatgtccatgcatgctacctgagggagattattgggaagctgttcggccagaacactcccattcccactggactgggagagcttataaagcctctccctgcaggtgttgaaatcgatgaactccctaagcaaattgatgatacacagtacccaaaaacattcttctataaagaagaccttcatccaggcaaaacaatgaaagtacaattcaccaagcgtccctatgcacaaccttatggtgtatatacatgggtaacggatattaaagacacctctaaagaaggatatagttttgaagagatatgcatcaagaa

SEQ ID NO: 14745 - DNA, 341 bp, Glycine max
gtttggagagattcaggaaaaagttgtattgaaattttcacgggaggaatttctacagcttggtcaacccatgtgcgtcctgcaacaactctgtggctgatgggtgtccatatttgtatgctatggtgcatgatagttcagtgtctacaataccaggtgattttgtcattggtgttaagttgacaaccataaacaatatgtgtgcatatgggctcaatcctggtatttcaggttctcgtcttttgggcaccattcctcagtccatttcacagcaaactgtttggaatcaaatggcaacagtgagaacaccattgaattgtgattctagcaagcagagcttt

SEQ ID NO: 14746 - DNA, 331 bp, Glycine max
gctaacttcaacacctttaattttctaaaagtaattcatcggctgagtaccaacggagaagatgagtcaggagcagccacggcgttccaaatgcaaaaccccatcaaatacggcgacgtttttgtcgtctgcggcgaccttgcacagaagcccgttgcaccggaagatgctgccatgatgcaaagcgcggaaactcgagtgctcggacaaacccaacccggcggagcatcttccggcatgcaatctgacgccaccagtaatgaacaagctggccttgtcggtcaccgggacgttaccgacgttaccggcgaccgtggcgtcacagtcacag

SEQ ID NO: 14747 - DNA, 409 bp, Glycine max
  modified_base (256)..(256): a, c, g, t, unknown, or other
gagaagaagaagagagagtgatggagtgcgtattcggattggtgggtaatgggtttgcgatcgtggtggctgattcatcggcggtgcacagcatcctcgtccacaagtccaacgaggacaagatcatgctcctcgattcccacaaactcattgccgctagcggcgagcccggagacagggttcagttcacagagtacattcagaagaacgtcgccttgtatcagttccgtaacggcatccctcttaccaccgtcgncgccgccaatttcacgcgtggcgaactcgccactgctctccgcaagaacccatactctgtgaacatccttcttgctggttatgacaaagagacgggccctgaactatactatattgactacattgcaacgcttcacaagcttgaaaagggggc

SEQ ID NO: 14748 - DNA, 295 bp, Glycine max
tccatgtcgtgccctcacgtgagcggcttagccgcgctgatcaagtcggctcaccctgattggagcccagccgcggtccgatcggctcttatgacaacggcttacacagtttacaaaaccggtgagaagctgcaagacagcgcaacgggaaagcccttcacgccgttcgatcacggttccggacacgtggaccccgtcgctggcctcaatccaggactcgtctacgatctaacggtggatgattatttagggtttctctgggcgttaaactactcagctttcgagatcaacacat

SEQ ID NO: 14749 - DNA, 413 bp, Glycine max
  modified_base (376)..(376): a, c, g, t, unknown, or other
tgagggagttgatgatgcagctgttaaggttgttgacattggtgacacattcagacttcaggagcaacccgcattcgataagaagcagtttgttaccttcatgaagaggtttatcaagaatttgactcccaagctcgatgcagagcaacaggagttgtttaagaagcacatcgagggagcaactaaatacctgctctctaagattaaagatttccaattttttgttggtgagagcatgggtgatgatgcttgcttggtctttgcctactacaaggacggcgctgctgatccaacattcctgtactttgcatatgccttaaaggaggtcaagtgctaagtgacttaatgtaccgagctatctactcattgtatctangttttttttacgttctgtcctaagctacttgaaactt

SEQ ID NO: 14750 - DNA, 316 bp, Glycine max
gctaacttcaacacctttaattttctaaaagtaattcatcgggtgggtaccaccggagaagatgagtcaggagcaaccactgcgtcccaaagccaaaaccccatcaaatacggcgacgtttttgtcgtcttcggcgaccttgcacataatcccgtagcaccggaagatgctgccatgatgcaaagcgcggtaactcgagtgctcggacaaacccaacccggcggagcagcttccgccatgcaatctgccgccaccagtaatgaacaggctggccttgtggtgcaccggaacgtcaccgactttaccggcgaccgtg

SEQ ID NO: 14751 - DNA, 399 bp, Glycine max
tctcggtgaattccaattccacattttcaagaaatatggaggcaaaaatggtgatatatgaattggaattatttgttttcttattaggcctatcctgaagccaaaggaaatgagatcggaattcctcggggaattccaattccacattttcaagaaataaggaggcaaaaatgttcatatatgaattggaattatttgttttcttattaggcctatcctgaagccaaaggaaatgagatcggaattcctcggggaattccaattccacattttcaagaaataatgaggcacaaatgttcatatatgaattggaattatatggttgctcattaggcctatcctgaagccataggatatgtgatcggatttcctcgagggtacctagctcgaatgccctat

SEQ ID NO: 14752 - DNA, 259 bp, Glycine max
gggagcttgggtagggatagggtgctattcagcagcaactcggggggtatgaatattatctcagaccattaaggcttcattggtttactaataggaaatggatgagaacatattgaccctcttatgcactctgctgactgatgtaataatcatgggctaatacactgtccttgcagattgatgttctacatatttgatagttcaattttggattttgatgggtagttccttgtgaacttgtggaactaatggattacaa

SEQ ID NO: 14753 - DNA, 384 bp, Glycine max
gtctgatgatgacacagttctcgatcgtctgtgatgataaacttgagctggctaacacacatgaattctttgctggacatgctccagcggattcttggttaccaatttttgtgaattgtctttatcctgtaagtcatttaccttcagaagctgtcgctgcaaatgttacatgtcgtagtgcacgtggtggtttacctaccactgcttgcattagttctgcagttaacaatcgctcctcatatatcaacatctggattctcacagcactttggcaaaggtaagaaaatggtgattattactacagttgatccttttccagtacctgtactggctgatctttttggcgttatgaatgaaattctgagttccaacgccactaaccct

SEQ ID NO: 14754 - DNA, 297 bp, Glycine max
gggagcttgggtagggatagggttttattcagcaacaggtcaaagactaaaaatattatctgagaccattaaggcttcattggtttactaataggaaatggatgagaacatattgaccctcttatgccctctgttgactgctgtaataatcatgggctaatacactgtccttgcaaattgttgttctagatgtttgatagttcaattttggattttgatgggtagttcctggggtacttttggaactaatgggttacaatccctggcattgtcctaatggcttgcaaaagttccttc

SEQ ID NO: 14755 - DNA, 366 bp, Glycine max
cgtcgacaaaagatagtctttctaatggaacacaaacactctttctttcgaagccataggtctctctctgcgcttctcgaccttcgatggcgctcgacctttcttcgaattggctcaaccgtctacgggttcctatccaatctgggccttcaatttcctcattcctttttcgcgggttttgaatgggagctgcggaattgcggacaggtgccgcatgtgcagcatgagcattgacagccccgttggagggaaggattagggtttcgtggtttgtgttcggtggcgaggattttcccatgggagatggaggcgttgcgtgtatacctctgcagcagcagcagcatgttattgagcggttgccgaatg

SEQ ID NO: 14756 - DNA, 249 bp, Glycine max
aacaaaagaagcaatgatgatgaatgtcatagggctgagtctgagtctggtgttaacttcactggcagcagcgagcaccatcgtcaaagaagggcacagagttgtcgtggttgaatacgaccaaggtggccatcagaacaccaaaatctcaatatcaccagaacaacctacgcatgctaatcttaaagatcccatttgcgacgcctatggaaaatgcaagcacaaaatcgtggatgcaatggagaagtc

SEQ ID NO: 14757 - DNA, 424 bp, Glycine max
aacttattaacactttccttagttcaatatggggaagcccttcttcactctctctctttcttccctttgcttgctactcttgtcgagtgcatgctttgctattacctccagcaagttcaacgagtgccaactcaacaacctcaacgcgttggaacccgaccaccgcgttgagtccgaaggtggtcttattgaaacatggaactctcaacaccctgagctgcaatgcgccggtgtcactgtttccaaacgcaccctcaaccgcaacggcctacactcgccatcgtactcaccttatccgcaaatgatcattgtcgttcaagggaagggagcaattggatttgcatttccgggatgtcctgagacgtttgagaagccacaacagcaatcaagcagaagaggctcaaggtcgcagcagcaactacaa

SEQ ID NO: 14758 - DNA, 422 bp, Glycine max
caaaaatgaagagcaccatcttctttgctctctttctcttttgtgccttcaccacctcatacctaccttcagccatcgctgatttcgtgctcgataatgaaggtaaccctcttgaaaatggtggcacatattatatcttgtcagacataacagcatttggtggaataagagcagccccaacgggaaatgaaagatgccctctcactgtggtgcaatctcgcaatgagctcgacaaagggattggaacaatcatctcgtccccatatcgaatccgttttatcgccgaaggccatcctttgagccttaagttcgattcatttgcagttataatgctgtgtgttggaattcctaccgagtggtctgttgtggaggatctaccagaaggacctgctgttaaaattggtgagaacaaagatgcaatg

SEQ ID NO: 14759 - DNA, 409 bp, Glycine max
gaaaaagaaaagcttgctcatccagcagcataggatcaaaaagagcaatgcagagaatcggccaactgttccaaggaagtttgataaggacaagcagttcacatcagaaagaatgggaaggcaactgtcatctttggggcttgatcccagtttggcaattaagagaatgcacagcagatctgtctctagaggtcggaaaagggatagatcgcctgaaacaagaagtgctgatggtatggatactgatggtgacacacctagcaaaaaacagcgtctgagtagatcactgtcacggtccaggtcagtgtcacgcccaccacatgaagttgtgcctggagaatgcttcaaggattctgctcaaaaggtcaaggcaatcaaacttgcaaagaaatctgtcaagaagagaaac

SEQ ID NO: 14760 - DNA, 353 bp, Glycine max
  modified_base (202)..(202): a, c, g, t, unknown, or other
tgcggacattgtaagtaaatcttatgaagatggagatgataactgatgttaccgagtatgaggcaattgcaaaggaaaaattgccaaagatggcttatgactactatgcatcaggggcagaggatcagtggactgtgaaggagaaccgaaatgcattctcaaggattgtgctccagacgcgtattcttgttgatgtgagcangatagacttgactgccactgtattgtgctgcaaagtatcatgcctatcatgattgatccaacagccatgcatgagatggctcacgctgaaggacaattagctactgctagaagcacatgagcagctggcacaatcatgacactatgctcat

SEQ ID NO: 14761 - DNA, 276 bp, Glycine max
cggctcgaggtaggttgaaaaggcgtgcgtgctcatccctttagggtgagagaagaatggtgctttcggaggaggaaatcggtcgtctataccgaataaggaagacggtgatgcagatgctgagggacagaaattttctggttggtgacttcgagatcaacatgtccaagcacgagttcaagtccaagtacggcgaacacatgaagcgcgaggacctcgtcatcaacagatccaagaaggacaactccggcgaccagatctacgttttcttccccg

SEQ ID NO: 14762 - DNA, 87 bp, Glycine max
cattgaacttatctctcttctcacttctgttggtataagtaactggcctcatcttacaaaacaatcctgcacaggtttcaaaatgct

SEQ ID NO: 14763 - DNA, 177 bp, Glycine max
atttggatctcctacgaaacttaagaataggagattgctcctgactcaaagcatcatgaccatttactatgttgctatgcattgatatgctgctcaagtttcttggttattgttatcctttatattgttgaaattctataatgatttattcaatattatattaactcttgggattgt

SEQ ID NO: 14764 - DNA, 268 bp, Glycine max
  modified_base (267)..(267): a, c, g, t, unknown, or other
tgacattctcttgggaatttctcaagattttgaaattgctggtaatactcttatgccagctttttctgttccacaggctactgccagatcttctgaaaatccggaatcctctgcatgatctggaatttgtgttttctttcatttgtccgtttgtttaattcaataaaggaaattaggcatgaccctcttgttgagtatgctctgcctatttgaaaatttccacacctcttttaattgtcgtaatgatgtgtgaagtgtgtgttattnt

SEQ ID NO: 14765 - DNA, 404 bp, Glycine max
gtttatcagtttctcaatcgttagatctcatcttatactcaccggcgagtccatctcgcgccagcgtcgacgccgttccggccacggttccggccaccgcctttggttccttaactttctcgtccttcttcttctcagatagcagaaatatgccttctcagaaagttgaaacgggtcatcaagacacggtccatgatgttgcaatggattactatggtaagaggctggccacggcttcatcagatcacacaattaagataattggggtgagtaatacggcctctcagcatctcgcaacattgactggtcaccaaggacctgtttggcaagtggcgtgggctcaccctaagtttggttctctacttgcatcgtgttcctatgatggccgtgtcattgtttggaag

SEQ ID NO: 14766 - DNA, 406 bp, Glycine max
  modified_base (174)..(174): a, c, g, t, unknown, or other
  modified_base (270)..(270): a, c, g, t, unknown, or other
gaaagaacctctctctctcatttggtacggtttggtcgtgcccattgtcctgtttgtttcggtttctgttttgctttgaaagcagaagaatcaaatcaaatcaatccttcaccgttcgttcgttcattaattcattcaattccctttcttcggtttttctattttttccctcanaaaataaaaatcggaactttgctttaaacgtggaaccccaccctgagatttcgcccccagaatcttgatccctttatccagaagggtacttattgnttttttttttccactgggattcttgttgttgttgttgttgtggttcattgtttgtggaagagaaatggcgacgagtatagggattatggatagcgcttactttgtcggcagaaacgaaattctcagttggatcaac

SEQ ID NO: 14767 - DNA, 352 bp, Glycine max
ctggtcaaaagatagccgctctccattgtctttgaacactcatgaccatggccaagcttgtactttccctttgtttccttcttttcagtggctgcttcgctctgagagagcaggcacagcaaaatgagtgccagatccaaaagctgaatgccctcaaaccggataaccgtatagagtcggaaggtgggttcattgagacctggaaccctaacaacatgccattccagtgtgccggtgttgccctgtctcgctgaacccttaaccgcaatgcccttcgtagaccttcgtacaccaacggtccccaggaaatctacatacaacatggcaatgtaatctttggcatgatattccc

SEQ ID NO: 14768 - DNA, 371 bp, Glycine max
gaaagaacctctctctctcattaggtacggtttggtcgtgcgcattgtcctgtttgattcggtttctgctttgctttgaaagcagaagaatcaaatcaaatcaatccttcaccgttcgttcgttcattaattcattcaattccctttcttcggtttttctatttcttacctcaaaaaataaaaatcggaactttgctttaaacgtgtaacctcaccctgagatttcgcccgcagaatcttgatccctttatccagataggtacttattgaattctggcttccactgtgattcttgatgttgttgttgacgtggctcattgtttgtggaagagaaacgtcgactagtatagggattatgcatagcgcttact

SEQ ID NO: 14769 - DNA, 363 bp, Glycine max
  modified_base (252)..(252): a, c, g, t, unknown, or other
ctcgagccgaatcggctcgagcggctcgaggcaagcagagcttttgtcagttttctattgaccttctcggtggaggaatcttagtggacaaaactggagattggatcacacttatacaaaattctccaattagtaacttgttgagagttgctgcttggaagaaaggctgtttaatggtcaagattgtgatgtctgggaatgcagcagtcaaaaggagtgattgggcctcattggtacaagtgtttctaacanacagcaacagtacagagcattttgatgcatgtaagtggacataatcaggaccacattcctgggaaatgatcttgcaatagaggtatgtgggcctaataatggttttgaaat

SEQ ID NO: 14770 - DNA, 265 bp, Glycine max
tgaaggactaaattaaaataaactaagtattgaaatacaattgaaaataaaggctgaaactaaaatataaataatctgaaactaaaactatgttgtgttattagatgaccatggccgttattgatgccgatgaaaatgggttgggtcgtggccagttgagcacaactatagtactagcaggcatatggtctaattaatgaaaaggaaaccttgcaatatcgctccttggaagcttgggtctataggattgtgccaggttttaatg

SEQ ID NO: 14771 - DNA, 425 bp, Glycine max
tggagaagtgagagtgatatatgatgccaaagaagccatttcaggtctcaaaactcctattatcaaggatgtggagagtgtgtggccaaccgaatcagcccttgtttggagtgagttgagccaagccattatgaacaaagattgggaaagagcaggagaagcaaagcatgacgtggaagaaagacagaggaatatgttgagagacagagccatgaaaggagaaaactacaaaggatgctaaaggaagagaaaaagcaggaaccaaaggtcaaacaaagaagggtggtggtgaggaacatggaaaaagaagagaagaaacatagaggagaaacaaagaagttgtccaagagggaaagtagaggcagagaaagcaagaccaatggaagaaacaaactggaactaaaggagagaaaaagctgaaacca

SEQ ID NO: 14772 - DNA, 257 bp, Glycine max
tgtagtaactagtaactctcactagagctgcaggaagttcaaaatgctgggatactctgattttatttgaaactagactcactaaggactagaaccttctaaactataacttataaccagtctagcacgatccatcttgacaactctaaaaacagagtacaggattacagtgtcatagtacgctgacgcacacaactttaagtataccattatcggaaagtccttcgcttccacggtttctctgataagaaactaga
